United States Patent Application Publication US 2018/0305689 A1 - sequence listing, part 108

SEQ ID NO: 1561656 - DNA, 4001 bp, Homo sapiens
gcctacgctggatgggcgggcggggcagggggtggggcgggggtgggcacggcagcaccacagacatgctgtgggtgctctccactaagggtgggtcctgggtttctcgtcgcaggtgttcaggtactccctgcagaagctggcatacacggtgtcgcggaccgggcggcaggtgttgggggagcgcaggcagcgagcccccaactgaggccccagctcccagccctgggcggccgtatcatcaggtgctcctgtgcatctcggccagcacgggagccagtgccgcgcaggaatgtggggtcccctgtgttccctcgccagaggagcacttggcaaggtcagtgaggggccagtagacccccggagaagcagtaccgacaatgacgaagataccagatcccttcccaacccctttgcaccggtcccactaaggggcagggtcgagagaggaggggggatagggggagcagacccctgagatctgggcataggcaccgcattctgatctggacaaagtcgggacagcaccatcccagccccgaagccagggccatgccagcaggccccaccatggaaatcaaaacaccgcaccagccagcagaatggacattctgacatcgccagccgacgccctgaatcttggtgcagcaccaaccgcgtgcctgtgtggcgggactggagggcacagttgaggaaggagggtggttaagaaatacagtggggccctctcgctgtcccttgcccagggcacttgcattccagcctcgctgcatttgctctctcgattcccctttcctcctcactgcctcccaagcccaccctactccaaaataatgtgtcacttgatttggaactattcaagcagtaaaagtaaatgaatcccacctttactaaaacactttctctgaaccccccttgcccctcactgatcttgcttttccctggtctcatgcagttgtggtcaatattgtggtaatcgctaattgtactgattgtttaagtgtgcattagttgtgtctccccagctagattgtaagctcctggaggacagggaccacctctacaaaaaataaaaaaagtacctcccctgtctcgcacagtgtcccaggaccctgcggtgcagtagaggcgcaccaaaactttgtctcttgtgatttctttagcggcatcaacatacacttctaagactcagctgatgtgcccactgtggaacaggcacactgcttgggggagggaggaaaaggagggccatcaaaattgcaataagctgggcccctcacacacccaaccccatctcaatgctgtcctgtgataaaggaccatctccccctctccccaaagagaaaggctgacatcttcacttgtggtcctggaataagggaccacttccccctccccaaagggataggtgctttacttgtggtcttaggataaggggccaaagcaagtatcactttgggaaagatgagaggaggggaaaaaggtgggagtagccctccaaagaggtactagggaccaagggggtgatttcagaacacaaagccttacttcaggtctccatccaggagccccaaagaaatgagtagtgggcagggtggacagtggcttagacaatgagtatgggataagaggtgcagcgtggcgccttcttcacccagcttaatgctgcaggccccacatccaccaggaccactacaaagacaatctgcctggccttgctactctgcagggtctcctggccccacctcaccccagaaacctctctccccaatactgggtttctgcttttcccagcaccagcctccgtattcttaggaatgcttaccaggtccgtggccctgggctctcccctgccatcacgtcagggtgggcagtgctcggcctcggacttgtcttcctctcccactccccagtgagtcagggctctttctacacggggtcagctgactgtctcaccaaatggccctgccgcctgttcagccttgtctctggctttatgtgtccctgtcactacacacctgttgctgggtcaacaccaagggagggagttggagggccataaatctctcttcctgccacttcttcgaatcccttagtcacagctgtcacaaatacttctgaagcacaaagtaccttgcccccttaagcctgatcatgtttccctcccctaagcaagcccttaagtttcttagcccaatcaccagcacctctaaaggcatctaaaacttcattcggtatcagagaattataggggtggggaggtgcagatcccggttctggtcttgactttgccatcaatcagcctagggaacctggacatgtcaccttgtacccttcatctccagtttccctctcgaagagggcctttgagatgccagtgaaccctaacacgctagaaactgccatagcagtggcaatcaggactcatcaggacttgaagaggatgtgcaatctgagacttcatctttcttaggctgggtggctatagctgctaccatagcctgaaggtgaggcaggtctcctctcgccccagtgtgactcatcagcaggcaatgcccacacctcctcccttctgaaccccatatcttggcaggcctcaaaactgggagtttctgtggttttccacactaaacccacagaatcatgaacataccaacatgtgttctccatgaaggctgaccctcccttcggagcttttgaggggtatgcccatagccccactgcccttcttgatgctctaacctcagcccaagtgacaaggtagcagatttcagggaggtaggccaaagcagcatggtaagagctggctgctctggacacagcacctcttgtgcccccacttagaggacaagaggctcctggtagccccagagctttccatatcatcttggcaaagcccttttcctccatccgtccatcagcagggctgtgagtgtggcaaggtgagatgacagatttccaggcaagggctgccctggtggcctgcacctgcacgtgtgggcttcaatgtgcaatgtccactccccatttgcatcctccacccacaaaacttcatgttctggcagcaaacttaacccaccagagaagacagtgcattcactttccatccagtgcaatgccatgcaatgcctagatggtccaaacacaccttgtttataaaattttttccacaaactataccattaaacattttattctgatagagagcaatgcgaagaattgaaaatgactagtgttttactgcacagcccttagtcacagtgctgaacgtcccctttgcctaaaccatcattgctcccagaagactttgcccccacaaggccaaggacagagcagatcggttgggaaggaattgggaatagctctgtgggactccagcaacaggtgagagacccttgagactaatactccaggatgttagtttcttagcctaacgaactgaagttaagtccagaggtgtttaggtaccatgacttttaggggtgcagggtgctatgtgacactgttacctttatctgtggaatatttgaattgtcactgaaggaagggatgtctgctgtcagggaagggcaggggcaagttccttgagcttgggcaacggattactgttggatcggggagcaggtttgctgtgagccatttactagatatctattttgaaatgtgtatctcctcaggagccaacaccccaaagggagattctgaatttgcagttaacttcccccccccaccgcccccaccccccctcagagatttaaacgtgtgcactcatgcacatacacaaaacactagtcaaacaacaatctcttttccccccggtaacctctgacttcctctatatgccccagagacacgttgtcaccatcttccctgggagtgatcctgtttatcctcccctccccgacttgccctcccacagggcccatgcatgccccagcaggatccagattcctgagcatttccagagcaggaagtcagagaggcaggcaacgcgtggttct

SEQ ID NO: 1561657 - DNA, 4001 bp, Homo sapiens
gtcacccgagttccccgcccagtcctcccccctcgcgcccccgcggcccggtctcccatttggctggcgtgcctcctccaggatgccctcctggcttggcacactcacgagtctaggtaagaccgaccgaagctcaaacgtttgggataatgaagggtcccaagttcctgaaccagatgatttatcgctcccatccaacgcttagctcgtctgacatcagatttgggatttgccctcccccccaaccaaaccagcgccaatgactgtcacttttttgtgtgtgacacagcgctgacagccaatgccgggaacctgggaaaaccaccgcttgatctgacaccctgcgtcccctatacaaacccaaatgcggagtgctgagcgctgtctggcatataaacacacataaatggtgcatgtgacttccttagaggcactgtatagaacttcctgacacacacacacacacacacacacacacacacacacccttatagcttccagaccctgtaagctcaaggccacaacttctgaagccacttatgacttgtgtcccaggcccctaccctcaggggtgtctcgaaaggcagctccatcccgcatccccacagtgcagtcaagatacacatgtatcttcccgggattacgtaaatggtgaatatctattaatgcacgtgtcagctgttaaaaacacagtaccaagtgatccttcagtactgacccctcgcatttctggaaacaagtagggagaaccccaaactcctagtactttcctaaatgggacacggctctgagcaaagaaaccaagtctcccggaaacacttgaagaatggagatcaccatggcagagcggacaggttctcagctaacgggtgaaacccaggggctaccctctcaaagggatttctttgacccaaaaaagtttttaaaaaaattaaaaataaataaataaataaataaaacacctcatctaagtgttaacagctccaaaagtattccagggagaggggaagaaagaggggtggaagagtgcgggccgggagggtgaggcttacggtcgcccggggcagctggaagtgggagcccctgcagggctccgttgcacgtggactggagaggggtctgtttacttctggcctggacgtaaggaagggctctaccgcagtggctgcccaaatccccctcccacccaccacccaccccgggccctggcccgcgtcctctacctttaggagaccgcagtccgtctaagaagcacgcggggacacgtccattgaaagagcgtccacatggaaaaactctggtcaaaggacctggcgcaaggaccgaatgtccgttccttttctttgcctcctccttctcccgggtgccggccgcgcagtctctcttttcacgctgggaacagcgtctcagtgtcgggcaaggccgaggagtggaggggcggtggggctcggagatggcgaagcaggctccgctggggcaaaggcaccggcgcaaagtggggtgcgcaagttattctccctgcaagttcaagaagtccccagccaagtgctgacacacaacaacagcgagcagggggaggagtgcggggcagggaagggaagggagaaaggagaagctggtgctgtcgtcctccttaggaaccagcgcccgagggacgcgtggccccgcgcggggccggctccgggactcgggggtcgagggtcgggcgctccgcgctagctccgccgcggcccatggctcggggcagccatcctgggcgacgccgggtccagggaagggcacggcggcgatctcggtgccaggcgagttgcccccccgcatcactctgccttactccagtgcacccccattcgcgctcgccagttgaaagcaccgcggctctggcgccccgtcgtcctcgggcgcattctccggcgagtcgagccgagtcccgggccgccgaggcgggtggctgtgctctcccctcgctctcctagccctggggccaagtgccctttgtggctagcctggggtccgatcacacctcggccagcgcgtcccaggcccccgatctcctgcagtaggtgctccgcatcgcggcgctagggatcggctccggagtccccggcgctctgcgcgcccgtccgcggctctggcgcagcccgggcagcagaggccacggcgctgtggcgcgctctgccgggtgctccagcccgcgcggggtctgcggcgcgcgggtgcctcgcggtccccggtgatccactcggcgctggccccgagaacgttcgggtagccggcggaggctgtggcggcagatgtgcggcggcggctgccagtccccggcggggtgtgggaagcggagcgactagcgcagcgcgagccgggcgcagcgcggcggggcgaggactccggcggcggcgacggcggcggcggcgccgtggcgcggcgctcgcggcttttaaaggggacgccgcctgccggctccctcccggccgcggccgaacacctcccccttcgcggcgcggctcgccggggatccccgagcgggcgggagctgcgcgcaggggtgtggacggcgcgcccgggcagccgcggcggggtggggcggagggcgggggcgcgcggccgccaaggggggcgctcgcgcctccactccctgctctcaaaggagagatcagctggcgcgccggaccctcgcggggactctggaggcgaaatccaggacaaatgcagggtcagggtctggcctcttatttccccgctgggcccgttattcaactttcagtttgaagtttttcggtaatatacgatttcaaaaaacaaaacaaaacaaaacacctcaattacagcgtattttggcatagcatagacgtgggatccacgcttctgtttccccggaataggaggaaaattaaaagaaaacagcaggctggaaattgagtgtttttaaacattaatacatagagatgtatgtatttacatatgtaaatgcatgtgtacaaatttttttacataaatgtgtatgcatttattttcatatccatacgcatgtaaatttatagttacataaatatatccaatatacaaaaatatgtgcatatatttctataaatatattcatgtatgagaatatatgcaaccgaagggccacatttcggttaatatgtctatgtatgtgacatggatgtcatcctgctttacgtgacatgtgtgtaacgtagactgcgtgtgtggcagactgaaggatggatgggagggatttgatttttttattgtacaatcactttgtgccttgtgatatttatctcacccagctcagaggcaggcgattagcagctcagaggaaggtaaaataacgcactgtgtgaaccaagcatacaggacaattccagtttgggaccttggaaccttctacgccaccctcttccaccaggcccccaagaagtagggctgtgacacgtggccaagtcactcctcagctgaatattcactgaagtcactcctcagccgaaatactgctcagagctgctgcacgatgagtctggggccaaggctttctgcccttcccaggattccaggagcccccatgcacagcacctcgggcttgcccaaatgatccccaaaaccaagggcagaaaatttttggaaaaggccaagttctgctttcccagagctatcgggcctgcgaaacagagagaaaaaagtcagaagcaggagctggtaatagaactattatccatgtgtattattttttcggtaggggagctaaaataatactaggttccgctcacgtaaatcggattagcaacccacagaggcgaattaggcacttgctgtttctaaaggtataaaggtcaaataaggtattttggaggaagcctgactaccaggaaaataaaagggggtgggggaattattcaggaacatgctactttatttcctgaaaaaaaaaaaaaaggtgctatagaagttgattgtcactcagagtcattgcaccgcaaacaaggaggcaataaaacata

SEQ ID NO: 1561658 - DNA, 4001 bp, Homo sapiens
aaaacctgtggtttgcgcgccacacgtggtaaatgctgaaaatagattctgccggcccgggacctaccactaaatacttaaaatagaagactagcggcagggcacagtggctcacgcctgtaatcccagcaccactttgggaggctgaggcgggaggatcacctgagatcgggagttcgagaccagcctgcctaacatggagaaaccctgtctctactaaaaatacaaaattagccaggcatggtggcgcatgcctgtaatcccagctactcgggaggctgaggcacgagaatcgcttgaacccgggaggcagaggttgcggtgagcagagatcgcgccattgcactccagactgggcgacaagagtgaaactccgtctcaaaaaaaaaaaaaaagaaaagaaaagaaaaaaaaagaaaaaagaaaaaaataaacaaagaaagaaaacaaagaaaattagcaatggcaccgtttcttccccagctccagccaagagagaatggggcatccggcggcccggagaggggccccaaggcgctcggagcgcgcggtacgctaaggcgggcgcaccacgaggggacaggtagggcttgacagggagggtaagggggtgcgacggccgcgatgccagagccaggcagggctgagaggggcccaggaagggcggcaaggcagcctcgccgggaagggccctttacatccaggtagcgcgagccgcgccggcccgggacagctcacatgaccgagccccgcgctttgaacggcccttgcctccagccccagagatgcggccggcggcgtaacatggaggggacttcggaggatccctccttcccagtaacccctacaggctcaccgaacccagcgcgcccgacctgggggcgcacacagcttgggagtcatagggctgtgggtgggagaccctcgggcaggcactgcgatttcagccaggagcggaaagctgggcgggctgcatagaagaagcggctccctccctcccagtctcaaagtgcccccgaaaggagacgcgtaccctcgcctgcccttactcaccgaggttgacgaagctcatgaccatgtcggcgtcggtgaggaaatggctatcttgcaggctggccagaggggggccctgggtactgaagacggccttgtaggggtaggagaagccctggccgccgggcccgccgccctcctccaccgccatggcgttgtacaggtccagcatgaacatgggtgccgagttgtgcttgccctggaggtgcgggcgcgggcggtggggcaagcccaaaatggagaggatctcgcgctgcatctcccgccgctcctggctgcggaggcgccggtggatgaagctcgagtgcacctcgttgtccaggctgaagtcggccagggcggagcgcagcaggaacaggggtgcccagagcgccacgaagctgtgcggcgccgcagctcgcagtgagcgcacgtgcatcgcgccggctctacgcgctacccgggctccgggctccgggcccgcaccgccccaggtggcagagggggcaggcggccgtccgcgccgctcggtcacttgctgcagacgggccccgctgcgcccgcgccagacatggcccctccccggccggccgcgctctgcccggacccccgccccctgctcggtgctggccccgggcccctcgccccgcactcgcccgggcgcaccgcagggcttggaaagcagccccggcgaacgaaaaggcgagtgaggaggcgggcgcgggtgggaggagcagccagcaagcctaggagtccagagagccaacgccggggaggcagcgaggaggcaggcgggcgggcgagcgctccttcttcccgctcctctggcgctctcgccctcgggcggcggcaacccaccctcttccaacctccggcgcggatagcaggggccccggggcgctctcccagccttgtgcgccctggatcgcacaagaggccgcctcgggagcgccagagtggtacgcgctggggcctgggcggaggaggaggaggaggaggacgggcttcgaggggcccctcccgcgccggcggcctcccacctgccctcggccccgccctccccccagctgtgcccagtgggttcattcattccctctagagcgctcgacaaatgtttactgagtgcccacggggtgcctagagcctggcgggacgtcgcggggatgcggctggaggaatcggagccggccctgccctctcggcactcgcggtccggaccaggaaggcggcccgagcaggacgggtgggctgcggaccgcggtgggaaaagttgggggagcgcggaggtggcgcggaaatagaaggcttcctggaagcggtgacccttgagccggtcttgcccctcagtccctgtatccttttaagccagccacgctgacccctccgcgcctccctgaagccgttgccagcctgtctctgcgctcgccattccctccgcctggacctctccccactcaccacctcccgcccccatcagacgctgctttctcctcccagagacctccaagacctgccaagctgaggttgtttcctcgcctcgcccctcgcacgtttgttttctttcctgtagtttctcttgctgtctggaattgctgtttgagttactccgtgccttctttattgccttcttacccccgctagacacccagagcactggggcccggatcagcgatcttctccgcacctctggtacccgcagtgccttgaacccagcgcctggtagccactgtagctgcgcagtcacgatttgttgagtgaataagtgaactgcgtgtgagctgggggggttcttcccacctcctcctcttcggggccctgtatctttccagccacccctcagcctgagaccagacaccccagccccaccactagggcttcccatcagccctcctcgtggcagtgcctggggagccagccgctggtcttcacatcctcttcccctccaagggtctgtgcctgagacctccccatcggcctcctctcctgtctctcctcatccattcatccctcaatcaataccgagccatgcacgctgtcacagggagtccccagaccactcagaacccaccggtccctctgccggtgtgggatctcaagggaattactgcacccagagtggcagtgagggcagcggggtaaaagttcatcctgtctccttcccctcctggggctgggtgagagagtgggtccccagagggcctttgggatgaactgggaagggctgaggttggggaagcgggggcgcttgtctgggaggggctctggctaagcctcactttggggctgtccttcctggagcaggagagctggggaagagaattatggtcttctacagttttctggagcagaagtagtttggccaagtggccctctgggtctcccttggggacttttggactagatggcagcctgaggggccacatgggtggagaaaggggaggccagaggccaggcaaggagcagaaaaatgccagcctgcaggtcctggccatttacacacaggccccaggctgtgggatggaacaggtcttgagccccatgccagggaggggcctctacccacccaccaggcaaggccctcaaaccacccccaccacctgctcttcatccattcactccttccttcaacagacaagcatggagcacaggatatcaggaggcgagctgtggggcctgcaacctggacagtcgtacagggccccccagctcttaagggccccacacttggtttcctactctgaggtcaccatatgtggttctgaatcacctatgaacaaagtaccccctgccccgtactaattttgcacctggcccagatattatgtggccagtcccagggccaagcaccatgctgggcaggaagacatggccatgagcgaacccacatggcagactccatcaaggagccggcctccaggccagggaagcaaagcaagagccttaaataagattcagggactgaaggagag

SEQ ID NO: 1561659 - DNA, 4001 bp, Homo sapiens
ttgaggcaggagaatcacttgaaccccggaggcagaggttgcagtgagctgagatggcaccattgcactccagcctgggccacagagcgagactcggtctcaaaacaaaacaaaaaaagatttattagatgaataaataatgtcctaatggcaggaattctaccaccagttataatgtggctaacagcatcaaagaaccaattaaaaggcagacacattacctgaaaaggagtaagtagtaagatgagggagcccagactttgggttttctcggagccagttaggaaataataatatcaatgaaatgtatcgagctttactctgtgccaagcactgttctaggctccgtatatgtatgaatttgtacaatcctaggaagtaggtcctgtcactacccccatttcacagataaggaagctgaggctcagaaagctgaggtgacttgctaggggccacacagcggacaaggggcagaatttgaacccaggccttctggtcccagagcccatgccctagagaaggctttctgggggttcaaaagtaaatgacacataactggtcactgtgtggagggaaaaaaaaatgtgcagtggccaggatctgtaagttgacaggggccaggcctcgaagggtctcaaatgccatgccaaagggtcaggatagcttctgaaggcagtagggagccatggagaatgtgagccaggggaggatgtgtagggatttgctgcatttcagaaaactcactccgattggcacaaggggcctgggtagaaggggaaactcaggctgctatgacggagcatgaagaccactgaacttaaagaccctgactgagcctctgtgtcgacaggcttcagggccatactccttccccctagctcttctgtcttctgtggccttctgtctgcagctctaggattcagtgatgtcctgctgggctggggtgggaattcaggggtgggataccaggtcccctgagtcctgtctgttttcccaacgcaccccaactggtgaggctctgccttccccttggtctgatttccctggggctgggtgtcacccactgttttgcaggtcatctctctgccatcgggaggcagcatcgagcaaccccgtgctggggcatcaggcaagaccagagctcaaatccaggctgcccacttctcacgtgtaaatgtggatagcagcagtttgtcttacacaaggctgaagtgagggtaaaagagactgtgtgtgtaaagttcctagctcaatgcctggcacaggttagagcaggtctttctctcctctgcctgggctggggtgagtggtctggggggaccctctttgtgtcacccagtggagcactgtgcacagtatggccgccagcccctgcagtggggagagcacggggtggggaggtcctcccacactctccctctgaccctgctcagcctcctcagcaacgagaggcaaatggcaaggctgagaactggctttggaaagaagagaagggcttataagtcaaaggtggaggttacatagagggaaggaggggaccatgaggaccctcaggggtctgagcactggacttggagtcctctagaccagtgctccaatcccagctctgccatcccagccctgcaatcttaggcaactcgctttgcctcagtttcttcatatataaaatgggggcaaggggacctgccctgaggtgctatgagtgtgccaggtgctggatctaaaggggtgcacacagtagatgctaagtaagtgctcctcaggggtggagaggagggaagggaggcatccagttaccgtagtccaggcccttctgggagatcctgaccacgacgccagggttgacggccgctgtcacggcggtgcctatggcgaccagcaccatcagggacgcccatctcggcgcgttgcaagggcccctggccatgttctctctcatcctccagagctgccaaaacctcaaggccttgaggttgaaccagggagctataaaagagtcggctggggaaatgcaagtcagtagaatgtggaaaggaggaaggaacctggtgagggtgggaaagagggagggccgctgtggttttccattgtggttagggccccacaggcagggagaagtgcagcctgggaggctcgcatgtccatgtatgcatgcgtgtgtgtgcgcgggcgtgcgtgtgtgtatgtgtgtgtgtagattggttcccctccctaggcaccccattccccgctctgtgtccccacccaaatgcccccatctacagactcccttgaaggtgggtggcacagacataaggattcatatttttctttctacttttgatttcttttgtatttttgatagtaaaacatttaagaaaacagatgctttcgtgttttcttgtcctgagaggcagtagtggtaatgattcaatgctcacattttagagtctagtatcttggctatggttttaaatcttagccctgtcattctctagtggtccgacctcaggcaagccctttaacctctctgaacctcggttttctcttctgcagaagagaaatacatagtactgctccctctctggattgtggagaagataaaatgagcttaaaaccacgtaaagcatttagcatactgcccgtgcaaaataaatatccaaatgctagctattaatgttatcctgattttaaaagtaacccatgtttattggccaaaatttgagaaagaaacaagagaatacaaattacatataactccctcttccggagacaagccaaagtgtattttagagtatttcttttctccctcttttgttggtaagcataggtagagagtccatgtttgtttgttaaccaatatgggatcacctggtcagtttggtaaagttcccttttttcgagaaacaataggtagcaaatgttcttctccagcattaaatatttcattgcttcctcatcccacagctttcttatccaagcttctgtttttgtacatttttactccttcctttggcagatgtagaacctgaggcttcaccaggggaagcgttcttcccacggtcactcagcaagctgctagcagagcgaggatcaaaacacagccctccagatgcatcccacaccagcccgaatccctcagcgccttgggagttggggggatgtagacactccccaccgccaacccagctttccagacaggtccctgtctgctcagcccctgcccctccctctgcagcagcctcaggcctcgggtgggcaggaaccccactgggcagcctgctccgtctccatggtgatgagaggaggggcggggctgcagaaggggcagccagcttctctcccgctgggtcctcatcagccccctagtgccctgtctccccgactttggactttatgaaagtctaatgaagtccgctgagctcggaggacgtgagaccttctgaagttttcttctttttttcttaaaagtttttttcttcctctcttcgtttggttctaaaagagtctcccctcctgcttccatctgcagcaactagaattcttctggcttgcttcagaatgaaagcagtggccgtgtgtgaagcatccactgtgtgccagatgcttcatatgcatcatctccaagccaaaaaacaaccctgagagagggatgattcttccccattttgttttattattattattattattattattattattattattgagatgaggtcttactatgttgtccaggctggtcttgaactcctgagctcaagcaatcctcctgcctcagcctctcaaagtgttgggattaaggccgagccacaccgtgcctgacctcttcaccattttggaaacaaggaaactgagatgcagcgatcacatcactgtcatggtcattcctcctttcacgcagagaagattttcccttacctgaggcaggtgccaggaggactcatgactgtaggccctcaccccagctctccctttttccaagtgatttgagcccccagactcagatgtctgcatctgta

SEQ ID NO: 1561660 - DNA, 4001 bp, Homo sapiens
cccctcccccatccagccctgtccctccccactttgcagggttggacacacacacacacacacacacacacacacacacacacacacacacacacacatgcacacatacacccctgaaaactcaccatttgtcaagcttcctgcaagacctgtgggactcaagggcagggctggattcacattcaagggcagggtctggtccaggggcacgggcaggcctccaaactgggccatggtctgggctaacagcccgtagaagacaatgaggcccccagtttgaaacatctttgctcttagtatctgtggccagaatgacaagtccaacatggcatgggtatcagagaggaatttatccaccacctgccctgacacctggggggtggggttgtttgctccccagaacaccagggggtcactagtaatagctaatactgctgaacaatttctctttgccaggcaacaggctgaccactttacacaatttcatcttcatcacaaccctaagacatgggcacctgttacctgcattgcacaggtgaggaccactgatcaggggcctaaaaaggagacagccccactccaccacattccaaagaagagggtttttttccttcttgccaagaatcccagcctcacctcactccatcttgcccacagttcacttgtctgattttccagtaggagaaaccaaggctcacagaggtcaagtgagtttgcagttgggagtttcaaatatactcccatcccttcttgaaacccacttgtgtactaccgagtgtgggtaactttccccaaggtcacaagtacacggtggacagaggattagaagctagagccaggtgaaccctcggttaaattaagtaaccatcagatttattctccaatcgggcttgcttcaatggtttgaatcattgctgctcttcagacaaagcaaatgagaagggttaaacgtgcaagtgctgaagaattgaactgttttagatcatccctgttcagtcctttggcctgagctcaggccatgatggttggtggatgcccttgaaagtcacacaatacaggggtcgcatggccacagccaccatctcatgtagacctttgttggggaattcctggggccatcaaagtcttcattgcatgagaagaaccaggagaccaaagaggggtagtgactttcccaaggtcatacaataaattgatggcagagctgtggttgaaggcaggtctcccaaccctcccctcacccaacacacaaacatgcattctatcattttgacacctttctcttctccttcaagctgccctggatggaattccggtcaacccctgaggtttggcttgcagacctctcacaggtctatttggcagccagcagagttgtccagagccagcactagtacctacaatttggagacaactggtgactttgtgcaaaattccatctattggctgactcagctaaagctccatccttgtggtggaaggctggaaatgaaaggtctttggtccaaagagccagttgtgcccttcttagggaggtaactttgaccacagcctctgaatctcttttgggcaacagaccctttatgaatccaatggaagctaaagatcctagtctcagaaaaaatgcatcaaaatgtataaaattgggtgaagaattttaggaggtttttggatcatctgtatccacattggtaacctcaagctaaaacttatgccttagaggctttcatttacggcattaatagtgcccatttctatatcaatgttactggtctcttaggacagcagagcaaatggccatccccacatccctgacattggccaggtctgtttctcttgcacagcccccagtgagtgatcaagatcactcactgccccacagggcaggagcctgagatccctgccgttaagggtagcagaggggccacagaatggatggctcttacctggacttcttagaggtctcagcagctgtcctggtctcctctctctcccccactcacttctgccgaggagtcagcctcttttatagtatggggacgaggaagcatgtgttgggtgatgggtttctagataattgagaattctgcaatctgacagtgtctttcagggctctccaaagtaaataattgccaatcacattagcaggtgagacagttaagctatttggtcaacaagataaacagagaaaaacctgagatgggatgttactcaagactttatggtttcctgagcggagccaaggttggggacccacgctcccaaggtagcttggagcattgaaaggagcagccagacagagcccaggaagggacctcagtctcatctcttggcccctttcctctcctgctctaatttttttgctccagttggaggattctttctcctaaaatgtcaaaagagtcacactgcatcctacatctggggtgcgtctccattccagggcaagggtctcctgttttcagagcccctattgcacgtcaggagctctctgtcctcacaagaaccctgagagggagaggtgactcctcctcttttatagaggaggaaactgagatccagtggggacaagtgctgaaagacccagagaggatgcagcagagttagaatgcaactgactggagaatgaaaacaacaaaaacaacgccaacagcagacactggccgagctcctgctgtatgcctggcctgccatggtgttcacaggcagcatctcacaaaatcctcacaaccctgtactcctattctataagggggaaactgaggctgagtgtgaggcaagttgtccagagatgcagtgcttgcctggggtgagacatccacattcaggtcctttccccgaatcactgcactgagagatgaaggtgcctcccaacacttgctggccattttgatttccccacctgtgaactttacactttcatgcgtccctttttattttttaaattttcacttaatttttattttattttattttttgagacagtcttactctgtcgcccaggctagagtgcagtggtgtgatctcagctcatgacaacctccacctcccgggttcaagtgattctcctgcctcagcctcctgagcagctgggactacaggcgagcgccaccatgcctggcaaagtttttgtatttttagtagagatggggtttcaccatgttggccaggctgtcctcgaactcctgacctcaggtgatccacctatctcagcctcccaaagtgctgggattacaggcgtgagccacagtgccccgccgcttctcttttaggtcctggaaaagtctttccaggttcccaggcctgagggatcctttggcatcctggtctctatcctaccctttcttctacctttccctaaatggagtaatcaggcatttatttatccccaccactggggcccttggagtctgttcagcagatgaaaaagtgaagacacaggaaggccaaggtcctggaccagtgagcgcagctcttaccctgcaaaacctaacaccttataagcaaaagtggagagagaaggaataaatgtgcttttattaagcactgactgcatgccaggtgctctccatatttgaacctcatcttcttcaggagtggttggtattgttgtctctcatacattggatgaggaggctgaggatcagaaagggtgactgcttcctggggacacacagcgagtgagtgttggagtcaattgaccctgccaccctctgtgtctgtctgagtccctgctaatcagtgggccacactgcctccctcacactaggccttcactggcctgctccactgctctccagagtctgggtggtgcccccaagggtttggggccatggctttgaacttaattatccattcaaggtacttgctggactctgcccacatcttgtacatggcaatcatcctcacagtggtcccatcgtataactcttgtgggttgggtcaggttgctactatccttgtggggaaactgaggcagataaggcaaggaattagtagag

SEQ ID NO: 1561661 - DNA, 4001 bp, Homo sapiens
tttggtttagacatttctgtctctgggcctcagttttctcagctgtgaaattagagtgtgagtcctttctgcatctttgaaagttacctaagcccttgacaaggtttgaaaggcagccatttgcagaagttacctcctcctacaaaaactgtttttgatgtgctgctaatgtttccataaaacaaaaagaaagccaagttattttaataggttagcataaaaaggaggtataaataaatataaaggtaggtagctttacagataccaaggctaggtagggataatttccttaattttcactgaattaacacaagtccataaaagaatattaaacaacccaaaagaaaaatatgctaagaatatagacaaaatcctcaagttaaaatatgtaagtacatagtaaatatatgaaaaaagaagagggctccttcataattagaggaatgcaaagtgaaataagttatagcttttcatctgtgagacaggcagaatatttaaagttgtccatacccagtgctggaaaaggagtgggaaaaaaggcactttcgtagactgttggagaaagtgttaacataggagattatttgtcaacagcatagtttttgaacttttgaaatcccacttgtaggaatttatcttatgcacgtttatcaggatataatatgtaaaaggctattcattgtggcattgcttgtttctagaaagataaacgaatgagtcaggaattgaatagccacttttctcagtaaaccgcccataaagagtagcccctggtggcagcctctggtaatgcaggcatagtgtttaggaggctaatttaggtgacactgttcatcacccttgttgatttacctttaagagtattgtcaactgtctcaagtccctcgtgaagaacaggttccagcttatccacgacattgcttaggtcattgccaagattgtcaagaagagactctgaggtcccagtgagcacgccgcacaggagaacaagtttccaaagctgaagcatcttttgtcttgacacctggacagtcatgggaagaacaggagtgagaattgcccagagggaaatggactcttcagtgagttcccatcactcttaacatttagcattccattaagatagatgtggttatttcctattttacaaatgggcagccaaggtcagaaagctacagcaacttgcccggagacacacagtcagtgagcagaggagctgggatttgaaaagtcagacttgactccaagcccatactcttgacacaaagttccttttcatacgctgtcttctctgcctaaaatatttttcttcttctttacttttccacttaggtcaattcctacatcatgccctctgtgaagcctactgtaggccccttcccagattctaggttggaggagtcccaccttgctgccttcattatcctgatcaaggtcttggataacacttccctgatgatttgaccacctttcctaccaggctgtgaactccttagaggaaggactgtgacttatttcactgtcgaatcctcaggcgccagtaaaaagcctgcacctagtacagtacagtaaacgaataaatctttgttgaatataagtatgaacaaatcaatggagaccacctcatgaccctgcattgttcattagtttgacacttattttaatataatctatagatctctaaatttactctgatttgccatttgtcttgacacctggacagtcatgggaagaacaggagtaagaattgcccagagggaaatggaatctttagtgagtactcatcacgaacttgccatttagagcacatttagagatatattgattatctctgctgtattcaaaatattagctaacccaagcaatcccacccctctgcctcttgcccccaaagccttccaaagaccaccacgtgtggtgccactggggggagcacgccactcacgcgtttagaggaggatgctcatgaaatccttgccccactgcacagtctgctgggattctgctgaatggtggcggctattatatggtggagatgggatggaaggctgcccacagaagcaagccttggttctgggatcatccaaggacactccaaggaaaataacccctctccaggatgagcagagagagagatttccaactcaaaggtcacccaggatgcttgaattgaaacggatggctatggagagggctttccgccaagactaagaccaggtcctcatggagcctgcagctaccgagggggtggtccttggtccttgtgggtgaggactgggagaagactgagaatgaatgaattggagaatgtcctggcaggaggacccataatgaccatccggtctaactccgtcatcatttggaaactgaggctcagagaggggaagccaccagcctggggtcattcagcaagacagggaccgagatgggtctagaattgtggcccacaaggagtcagacagcctcccaggggtcctgcccccaggggtctgcacccggcaggtgcagcagatgcctggcagctgcttgtgctgacactgggcttggtgtccctaaagggcactttagatgcacttttctgttagtctttatgaaaactctgtaaggcaggttttcagagctccattttccagttgagaaagctgaagttcagagagggaggtggcttgtccatacttgcaaggacaggaaccaggcatttgggccaccagggaagacccttccacccatatcaggctgaggtcagttagcagagagggagagtccctgggcctgagtatcctgtttttgcttcggccactgatgtttgggttggttgtaacgcctgctgcattgggcctgtgtcaacccggaacagcacaggaaactcgggtgggtgcccacttggcctcaggctgggaaggactggcacagagctcagggtcaccataggtctctgcccttctgctcacccacctgcaattcagcaaggacctggggggcctgtcctcaaaatgatgcaaccaagcaaacggtgggacaagaccagtggctccaggagctggctgttcctacactgaccatggctccactgttacagcacagagctgggcggctgcaggaaggtgatggccaggccccaagagcccagaccattagacccctgctgcagtcttgcctgtggtcttgaatggttgtcacacctccttccctggctgcctgacaccgggttctccaaacgtctgagccccgctcttcccccagttgtgaagcacagagccaagggctgtgctgaaatcttgtgaaggcagtttgtcccagcccaggaacatagcccagggtgctgagcatgatgcagtgacctcgagacctggtgttggcccaggcctcagttgcctcatctgtaaaatgggtaaacacgctgttcctggatctcagaggcatggtggacaggcaaggacctaggaaatcaaaacgatggtgaggggctttgagggcagtgctcagagcctggcactgggcttgggctgtcctgggcatgaatactctctctctgctggttgctggccatgtgacctgggccagagaccgcaccttgctgagcctcaggctctttatctgtgaaatgggactaagaacagtgctcacctcaagggcatgctgtgaggtcaaattagtgtaatacccatgaaggcttagcatagggtaggcccatgatgcacggcaacagcaaagatggcgaagaagatgctgatgaatatgtgcgcatatggtcccggcttacgatggtttgacttcaatatttcaactttactatgggtttactgggacacaacccattataaaatgaggaccatctggccaggcatggtggttcacacctgtaatcccagcactttgggaggccgaggcgggcagatcacctgaggtcaggagttcgagaccagcctggccaacatggtgaaaccctgtctctactaaaaatacaaaatctagccgggtgtgggggcaggcatctgtaa

SEQ ID NO: 1561662 - DNA, 4001 bp, Homo sapiens
aattaagtaatgtctcttcaagtcaaagaggattaaaaaaacccagaaaagcaaatttaaaaatggataaaaggtaagaacagggaattcaaagaagtcaaaatggggctgggcacagtggcttacacttgtaatgccagcactttgggaggccgaggtgggtagatcacttgaggtcaggggttcgagaccgcctggccaacatgatgaaaccccatcgccactaaatatacaaaaattagccgggcatggtggcatgcacctgtaatctcagctactcaggaggctgaggcaggagaattgcttgaacctgggaggtggacgttgcagtgagccaagatcatgccactgcactgcagcctgggtgacacagtgagactctgtctccaagaaaaaaagtcaaaatggttaacaaaagtataagatgctcaaacttcccactcaccagataaagtcaagctaaaacaagtagttatcactcaactacacatcaaactggcaaaaaaaaaaaagtagaaaaatagtgtcatagatcaaattgtgccctctcctcccccagtgcgactgtctttggagatagggcctttaaagagctaattaaggttaaacgaggtcattagggtatggccctaaactgatgggattggtgtccttataagaagaaacagatctctttctctgcatgcacagagaaaaggctgtatggagacatcgagaaggtgtccgtctgcaagccagcaagacaggcctcaccagaaaccaaccctatttgcatcttgatcttggacttccagcctccagaactgtgagaaaatgaatgtgtgttgtttaattcccagtctgtggtgtcttgtgaggacagccctagctgactgatacagctcagtactcggcagtgctggggaacatggggagacaggtatgctcatttcttactggagcacgtgtagaccacacagccattctagagaggattctggcagttttggttaaattgagttcacctctaccccaggacccaaccactctccttctgggtttatcccagggaaattctcccacaggctgtaacagggacacttgcaaggaggttcatctcagtgtagtttataatcatggagagttagagacaacctgcatgtccatccagaggggagcagccaaataaactgaggtggatgaatcttatggctctttctgcaccagctgaagcaacatagatgtcaacagcatagtgctgagtgaaacccaacactatacaatttatgtaaattaaagtacaatacaatttatgtaaattaaagtactgtacatacaaggacacaggcatatttaagtacatccattaaacacgctgcaatgcctgccaaggcagtagggatatggggtgagaataagtcataaagggggaaaataagaaaataaaacaaaagggggaccttgcagtgatttgtgccaatgaggatgtgctagaaattggcatatgatcaacacaacctcaattttctgtacttgaggtctaagaaaaagagaagagggaaagtgactaacctgaagtcacccagcgggttagcagtggagcccagatggcaccttcccacctccccagccccgtaggcagcaggcagagcccggggcttagcttacttcttgccagggtggatttgttgtctctgtgggcttgggccaggccaggccaaggctgcttgtgtggtgccaagggcaaggccagcaacccgaggaagatgaggagcctccagagtggacacatcatagggtctgggacctgcagatgtcaagagtgtcagatggggcctgggcagacggctttgagggtggcagtctggagggatggtctaatggttttctgcagaaagatgacatcagaattagcccccagcatgctgtggggaggggctgcactggaccctggcgctgccaccagggcttgctcacattgggagagcaacatgtggaaccctgggaggaggccagggctccagagggaggccttgttgcttggagacactcaccagagtctattgttgggtcatccaacaggagtcctctcccagaccctggcacaggctggatgttagtgactctttagtgaaccaatgaatgaatacatttgagtgaggatggctaaccccaggctctccaattgggttaggactttcttaagggcatgaccaaccacttcaatccctaccacgatacttgcttgtcagaaattgagtgttaatgaatgtttgttgagtgaccaaacgactgaattgatgagtggagatggttgatctctgaatctcctctgaattatgagtttcttgagggcagggtatgagtctaattaatcctcatgtctacagtgcctcccatgtttgccacatggtaagtactggtgaatgtttgttaatgctacaaatgaatgaataactggatggatggatcttatctttctggataagaattacagactcttgaagccaaagcatcaggttgaccttggagccctggggttgggattcagagagaattcagtttaagtcccctgtcctcactcttaggaaatggtgccaagtccatctagttgttctactcccagccggtggagctgccctttcctccccttttcccatctcccacaacccatctgtcaggagatcctgctgacacttccagaacatgaccacatataacaactactcctcagccaccatcagcttgatctgaattattgccagtgggtcccggctggtttcccagcttttaactgtgcccacccacaatctcttccacacagcagcctgaacagtcattttaagatgtaaggtaggccgggtgcggtggctcatgcctgtaatcccagcactttgggaggccgaagcaggcgtatcatgaggtcaggagttcaagaccagcctggccaacatggtgaaaccccgtctctactaaaaatacaaaaaattagctgggtgtggtggcacatgcctgtagtcccagctacttgtgaggctgaggcagcagaatcacttgaacccaggaggcagaggttgcagtgagctgagatcacactacactgcactctagcctggcaacagagcaagactccaactcaaaaaaaaaaaaaaaaaaagatgtaaggtagaccaccatgccactcctctgctcaaaaccctccagcatttcctactgcacacagagcaaaagccacattccatgcaacacctcccaggcccaggagggtccctgcatcctcttggaccgcactgcctgcagctctctcttccccactccactgcagcagcacaggtctcggatgtctgggccccaccttgccattgctgtgagctctgagacaaaggcgtttgtcactgtccctgtgctgtttccccatactacgggcgacatagagggtcccatgtggatgagggatgggaacgtcctttgcaaatttcacagaagccttggggctattcttgggcaattcactctggttttgtaagagattgtactgagaaagccttggttcagggtgttggctttccctgtttgaggtcctttctcagagttcatgctccccttggggatgtttgtagaatatcacttacttcaaaatgtatttttctagccttcctggtcttatgtaagtggttggaattttgttatttattgtcaagaaaacagagaagagtgggcattgtcgggaggaacaaatctgttgtccttggctctttggacatcttaacatggggcaggagctgttggtcctacctcatcacaggctgtggttctcagggccacagagcctaatgaaaggacagcatggagggtatagattttcagagcttgatgcatgacaagagagagcagatttggagggatgagagggccctgctcaggggctggggactggatttgaagccaactcggtgcaggatcacatgcagtccagagtatgtgctttagggtcacgcagaccggggttcaactgctgactc

SEQ ID NO: 1561663 - DNA, 4001 bp, Homo sapiens
cctgccaagatttgtcactttccctataaagcttcccctgtcctgcagacagggaacctggaccacacttggagaaatgttgtcctggggcccaagacatgaaggttggaggcaggaaggaaatgaggagccaggtaggactcaaagttgtgaaaaagctctttgcttaatctgcaatactaagggggctggggagggactgaatggcttcttggagccaggaaaagaagggcagagagagagagagagaaagagagagagagaaagggccctgtggctcatgccagggagaggagcttgggggtattctggccccttggctgctctgtcccctccctccacaggggtgtggcatcaacatctgtagtccagtcctgagctctccagcttgcaccctggctctgtctgccagccccccatggaagctcctgcccctgtggactgtcctgcttggagggaggggagacgctgcagagatctgagcccctcgcttggttcagcatgtggatttctttttgccaaagacaaatgtggcatccggatgacatgtgtctcctgtgccctggagcagtgtgagctcttctgagacccttgcaataatgattcagcctctgcttccctgaccaagctgtgagctctgggagggagggctgggtctgcctgctccctgctgtgtccctggcatccagtatagtggttggcatagaccaggtgcttaataaatggctgctgaataattgcatagcctctggaagccccgaaagaattggaaatctgagcctgctaagctgaaaaggttagtgttaggaggcctgaaggtggaggggaaaatattattggcttggcagccagatgaaccctagttggaggcctgcctctaccacttgctctgtgatctttgacaagtgacttaccctttctgagcctccatttactcatctataaaatggggaataattatagtacttatgtcataggctttttgggaagattaaatgagacaatctatttgtggcctggcatggccaagcgttcagtagatggtagcttccacgataattatgacaggtattattactaatattggagtcagaaggagacaccttgcagccaaagccagaagacagagctgaaccccggcatccaggcacccctgtggccccactccatattttccttgcaaataccttgactctgtctgtcctgcattatctgtacacactgctcagtcctctttggatcagagaaacccagggacccacgaggatggtagcatccctgtttccctcctgtggaaaagactctcctcccccagatccaggcaccacacacgcccctgtcatatggcacctcctctcccagcctttgcttctgctagttccccttcgtggaatatctttctctcctcctttgcccaatcgccttctactcggctttgcaaccaacacatcacctcttccaggatcccttctttgactgtcctccactcccatgtccctgggtcttccttgggcaccacattgtcctgcactgggagttctttgagggacagagtctgcgtctcatgcttcttttgtcccagcaccaccgcagcacagctgggacagagcaactggtatgtgcagagtgggtttatgtcactaggaagaggtcaggaaaacactcagccagccccatcccttcgtcactgccctttggtcctctgggcgagggagctgggcatctctctacacctggccctgaccctcagcggatcctgactcaccgagggcccttccctgagggcgagcctcccctgtgctcctgacctgaccccaacaggtatctctagctcagaaccttcctggcaaccttggctttcagccccttccctacttttacctgggcacgctggagtcctcggcccgctcctctcctctcccgggcagtgggtctggaagtccaaccttatatcctgcacaccccagcacaggctttgtctttaggcagaggcctcagaccaggccgaggtctccaaggtaaatatttgtggcttctgctgaaccacagccccgcccggaggcagccttgggactccagcttcctgaggtttggagaaaggaaggtccaggctgagagaagcacagtgcatatagcagaataagcactccataaatgtgagtggccgttgccattaatattattattgcttataataggatgagcctttgtagagggattacaacaattgtttaatccagataatcaatttgggaaaaggaaggagtagccttacccaccccttattcctaaatacatcaaagatacacatctccatcaattaattcacccaggagaatagatttgaatcctatttttgccactgctttgctgtgtgcccttgggcaaggtacttcacctctctgggccccaatgacctcatctatagcatggggataatagtagctcctcctcataggttgttaagagcatgagttgaagtgcatgcctacacagtgcttagcatgggctttcatttcattcattcattcattccgcagcaattaaaatctgctctaccttgtctgcatctttaggaatctccatgagcacttgtggaccaaaagaataaggagggatgaccatgaacctaaaggacaaatgtcagagcccagcaggacgctgtcatccaccacctgggcccaggtcttggctcacgcagcctgcacagtcacccagaggtgggcatcagcagcgttaatgttacagagggcacctgaggctcagagaggcgagtgacttgctcaaggtcacatgaccagggattccagctttgggacctgaacccgatcatcagtccagaccggaccctcttaaccgccacactgtccttcccctgagacttcaatttagcactggaggtggtggtgacaccaacatggccttttgatgtcatctggggaattatccttgctacccagtttttgtctagaagaatggaattgtggtttagagctgggatggccattgttgaatcctgtctccatctgcagcagacaagtcaggggcagtaagtgttctgaggtcacaaagtacgtggccaggccctggctggtctcttcctcctgctttttgacaagaagaacaaggtgaagagcgtttgctgtcctgccatgtttgcaaacacaccaaaagccctgaatacctaaaggtgaggtgttttgagagagctcttgggaggaccctgccgatcccttgggcacatctccagagaggcaaatgcccctgcttggcttcccagctggccatgcccactgcccatggacaatgaccctctgtgcggtgctcgggcccaatgccaagacctggggccgcatcagctcctgcttcctgccacgtgctgggacagcaaagctggctgcatctctgcaggcccatggtccccagactccacacctgccctcagtaccgcgtggcccctcctcaggttgctggcgtctcttggccttggctccacctctcttcagctcccaggcctttttgtgccgtgtcctctttctggagtacctccttcaccctcctgaaaacctaattgtgccctgtctgggaagaagcgcaggagtgcaggaggaagcctgtggaggccgacagacacggctcagattcctgctcctatactgacagctgtcagccttgggaaaattgcttcttctctatgagactgtttcctccattgtgaaatgggactattttgagggtctcgtaaggtcatgagaaatgcttgaaacatcagagaattcagcaagtggtaaattcacacctgtaataccagcattttgggaggcaaatactggtggattacctgaggtcaggagtttgagatcagcctggtcaacatggtgaaaccctgtctctaaaaaaaaaaaaaaaaaaaaattagacgggcatggtttttaggtggcacgtgcctgtagacccagttactcagaaggctgaggcaggggaaccacttgaacccagga

SEQ ID NO: 1561664 - DNA, 4001 bp, Homo sapiens
caggggtgggggaaacctgctacttccctgagccactgcttcatgtcctgggccactgaaggtcccatctactgtctgacctgactttctcacactgtaatctgagtttggccttgggggaaaccgcttctgatctcctggctttggtgggaaaccaaattctcaccgggaggcaactcgaggtgaataaacatgtttgtgctggcgtcctggaccttggcaatgtctgtccctccctggggctaagtttcttcattgtgccctccttaggggattggggcaagacttggaaggatctagcagcacagccgtaagacagagccctcgcacaagtgggacccagagagcggatggttctctcacgctgagctcagaagggatataactttagaacactccttgcatcacggtgctagacagacctctcccaagaacacacgtgcgtgcacacaccacatacgcaaacgtgtacacccagggtgaacagccgtacctgtgcacacacatccaggcagcatcatgggcttgcaccctccccgacacttaagtacacacgtgggcacagctctatgaaatttcaaactcataagtagacacacacaggtaaaaatagcccctcaaaccgacctatgcccacatcaccaaagcatgtgagcaagtcacatgtgcacacttgcacactggccacatgacgtactcccccctcacgcatttatgtaataagcatttgttgagcagcgccatgtgtcaggcactgtctgggtgccagggacacaacttccaattaaaatctgggtcctcatgggccttttgagttcacagctacgcacacacacttaggattgcacacgcatgtacaggctcacagacactcactgggtaacacaccgcttaccgtagctcaatgctgccttgttgagtcggaccacggtgcctggcgtggaggcaccgaccacgggcagcagcagtgccagcagcaggcccagcctacttgcccaagccatggctgccctggccgctgcccacaggatctgtgggctggggtagaaatgagcatcagggagctcagccaaaacagcccacccctgagccacccgaaccccactccagcctggagggaacaagccctgactggtgatcccagccctgccccaggcccacagacatcagtttttgcatctctgcattgggaaccatcaccttgccttgcttgcttcatcaggaatcatgggggagtcccttctggaaatgacccgcaatgcccagagaagaaatggtcttgcctagggccacacagtggactgggaccaggtgcaggacccaagccatggcatagaaggatggtgagactcccaaacggggagactgagggtagtttcctgtcccaagaagatgcccaggactgtatcacctgatgccggagtccagccccgtgtgacagccagcttggtgtccagctgtccaccaaattcagccaggggaggacccagggtggctcctgtcctcatcccctcctggccaggtggtaaatggcctaagagtaggcctctcacatggcccccatcctctcctgactcagtctggccaaataggcagatctgtgtctgactcagggagagggagccaggcaggagtgagggactgcggctcaggtgggtctgctgagacccaggatggcggcacttgcccaggtcctacagcaaggccaggggtggaaggacccttctgcagagggtggctggaggtagcatccccactgaacagatagagaagccaagcctccttggaagtggtgtaccagcccagccccatgcctacctcaggtggttcctgagacaggtgaactctcagccccagggtagccctcctctgcccgaggcaggcagatgcagaggctactttataaggctcccaatgtgcagagtccactgggaagggacccagggagcggcgagtttgcttgtggttgcaagtgttttccctgcaaacatggcctttgccaaagtgtctcatcccacatgtgcgctggggctgccacgtagccagtagccaggcccagctcccaaccactacaagcccctggggctaggcagctatggccttagtgagggccaggagatctctggaaggaaagctgcttctaggagggtatcttatcatgcccagccaaggcctgggaggatggggcccatgaggaccccatcccccctcccataggcaaggggatggctgcaatgacccctcaagcctggtacctccaagctctctcggaaacatgacccttttaggaggggcagaaggctacctgagcaccatcctcagtcattgactgagccctgaccctgtcacatattcacacactgagtcctgaccccagttactgagctctgaccctgatcacatgctgagccctgatcccagtcacaaactgagccctaactcagaagggaacagaagagaaagtgtgcgtgacctgtccccacagcttaacatcccagcctctctccaaatgcacattccactcacaatggattagtccacggtctctttccacattacaaacgtcagcctccgccttggctggatgggacccaaggaactgtgtgtgcgcatgaaggaatttgcatatgcacatgtgtggatgagggttgtgttgatacatgcatgtgagtgtgtgtgcatagtcacatgtacggggaaaatgtgtgctcttatgtgtgagtgtggacatgaaatgggcacgttggcatcttggtttatggtgttgtgtgtctattcacacaatccaacaggaccacagaggtggggagttttgtgtacatgtatgcatgtgtgggcttggcctactgagtgtttgtgggtctgtgagtgtgtggtgttaggtgcatgtgtgtatgcaagtggactgtttcctgggatggggaggtacatgtatatatgttcttgtgtgtgtgcatatatgtgtgcacagcaggcgatggcctttccatttttcttcattggcacaggatgacttggggcctttccccaactccagggcactctttgactcccactgaccccacaccagcccaaatatcaggcccagctcccaggcccaccctgtgctaggcctccaccagtgtctacaaagctgaccacagacaccatcaagccctcccctgagcagctggagctcacttgaaccagccctgcctcccaaccagtgctcccttgcccctattctagacgcaaagaggaatgagaagagcctgctgtgagctccctgacaccctgctcctggccttggtctgtccaccaatgcccaagaccggcccctcctgcgccctcaccatagctgatgcaaacagcagactcagtggacagaggcgcaaatattgaccaaacccactcttggtgtttgctgttggcctggacacttccttttcttaaatatttccagcacaagagccatttgggtgacagccagtagacataaaagagggagattctcaccagcccatcccagatctcaaccggctcctgacagcaatggcaagcaccgtttggtgagcacctgctatatgcagaatgttctgccagccactttgcctgcatccgcagggatgggagctggttctgctcagccctgtttccagcacctggaccatactaggtgcataaatatttgttgaatgaataaatgaatgagtatacatttgaaagacccttgtaacaattgtagtggtggcatttcagagtttccccttcactgaatattctcaggggttttgcattggtgtcctgttgctgcaataatgtattatcacaaacttagtgacttaagacacaatttatcatgttaccattctggaggtctgaagtcccagatgggtctccctgggctaaaatcaaggaagtattggcagggctgtgttccttgctggaggctgtaggagaggaattgtccacctgccttttccagcttctagaagctgcccttattccttggctcctggtcc

SEQ ID NO: 1561665 - DNA, 4001 bp, Homo sapiens
ctgagatcaggagttcaagaccaccctgaccaacatgatgtaacttcttctctactaaaactacaaaaattagcccgtcgtggtggtgggcgcctgtaatcccagctactcgggaggctgaggcaggagaatcgcttgaacccgggaagcggaggttgcagtgagccgagatcatgccactgcactccagcctgggcaacaaagcaagactgtgtctcaaaaaaaaagggaaaaaaaagctttttgagcatacactgtgtccctatttatgatcccggggacacaacagtgaataagccagacaaaaatcctacccctcctggggtttataatctagcaaaggagacataaaataaacctgtaaaatgtatggtggggataagaaagggctaatcagcccacacctcttttgagcggacacctggaggaggtgaaaaagggaaccatgctgatagctagattagcccagagagactaagcaacttccccaaggtcaaacagtgagtaactagtgttgaccccagagctggaaccctcaaccacagtggcattctgctgttcttgtcctgccaggcatgcagtagagtcatcatttttagacccggatcacaaccctcccacacaaccttcactgcctattggacaaattacaaagagacaatctctcctcaattcctggaagcaaagccaagtcttcctgtagggcatgcagcaggtgggactcacccagagagctcctcgacaacgccaaaaacccctccgtggcccagcaagccgcctcctccaagcagccctcctgagcccaagaggccccggttcacagctgtgaccgatcccagcacattctgcagaatgggctccccaaccagtgagttctggatggctgcagagagagtggaagtaggaaggtactagaaactccaacctcacccccaggaccatggcagctgcctccttcctctgagattgagtaggcttctttttaaaaatggaattaacccagaggttacactcaaatggtggaacccactaagccataacagcctcttactcccaccgcagggcctgtggccaccctccctgcctggcatgtgggaggtacccagtaagtgtttggagaatgaatgagcaaatctcataacaatcccttcattttaccagtgggaaaactgaggctcagagaggggcagagacgtgtccaaagtcacacagcaaattgggttggggtcagtagtgtaacttggctcctgatcctggactgccctacagcactgaaagggagggcaaagaagggggagcttgtagccaccagggctcaatcaagttggaggagatggtctctgcttctctcctgggcactccaggcctgactctgtgcagactgtgggaagggcaggatggaggaatggccctgtagagtagaggcaggccagggggcctctctgaagcatttcctgctcatgaccaatctactctatccctgagactgtcaccacaggccaccgggctctgtagtaccaaatgccaagtacagttcccttaccctagtgatgtgaggcagagacactggcccagctagcaccctcccctcgacctcttcaacctcactctgtccctgtccctgagccacacacagtccccaaacagcctcagcccatatcacccagtccacctcccgtaagagggaattcatcgcccattcaagcctgcaagggaaactttcactcctgcacagctactcccaggagaatgtgctctctaagcagctgagaatcacaacctgctcttatctgctcttaaagcagatgctctaagcatatagattgagtcgttgacattgcagcagccccctcacagactgcccacctggggctcacctttgccgagttcatccttgtcaatccgagcgagcgtgcccaccgtctctagcagctcctggcatggagtcgccaggccccagagcagaagcagggaccacagggccagcatgactggctgcatgcctataaggagcagaaggaggaactctgagacccttctcctgctcaagcctttcccctctctgttcccattatcagccttcccccttcctgcccacctggcacagcccaaattgagcttcactcccaggaaagccttctcctcccaaatgtaagcagagctaacacgcaggtggcacggtgcagctgccaatgcactcaagtctccaaggcactttccaagcctctccctcattgggttccatttctcagctgggaaaactgagaccgaaaggggtaggggactagaccaaggccacagaactaatcagagacagtcagaattcaagcctgagtccatctgacataaaaatcttcatcctcagaggcccagtgagcctggccgggtgtctggagtgacagctgcagacagaggggcttccccctccaggacagcaggatgagagctttgtttccagcagctgcttcccactggctcatgaggctgtttcagaaggtctagctgactggggacacccaacacttagacttaacatgtcttatctttctccttcccccacctccaccccaaatcttgttgaaaaagggaatggggtggcaggtgggggcatggctaatctgctaagttcacagagtgggatttttctttaagcagttccgtatttgcccacccaatcacatatccatctatgcccacccatcactcctgcttaaacccttcagtggctccccgctgccctgggttgaaacccaggcttcttgccattacccacaaaatccctgcctgcctttttgacctccttgagcttaaacatgccaggccccttcccaccccagggcctttgcacatgcggttccttgttaggaaggctcctccctgcttctttgcatggctgactccttatcattgagattccggataaacattgcctccctggagaggcctccgtccttcactttgtctaaagaaatccgtctgtcactaaacatcacgcagaatatttactttaaggtgctgatctccatttgcaattatgcatctgtttgtgtccttatttctcttccctgtaaactccatgaaggcagggaccatgtctaaggcctctgtgcgtggttgtgtgtcagaaggggtccctgctgagggggcaggggatagaaattcagcagcatgtcactggccaggagaaaaatgggcactcctggaactctctccataggatcatcctatggacagggatcccctgcccacccctccggctgtgaatatatacaagtctttgcctctctctgggccccagatctgtaacatggtttttctcttcatccaccctcttggtacccccagtctcctcctagggtgagttctttccgtgcccatcattcatatgggagggcagaaggcagtggggtcaacggctgggcgtcaggacaagagcagggctgcctcaggctgtcttacccttgctcctgcagctccacaaggggtaggtgggggctcccggcctcctgtcggttcctccacccacgcgagctgaggggtggcccttatatgcccacgcggctctgaggacacaaaggggccacggccgccagaatcccgtcaatatgtcatgtcagaagcaaattgcggttttccccgagggcctgggctaagccttcctccttggaggcgagtaaggggactggggtcggtgcccaggagtgggagtgaaggcgtgggggctgcacaggcagccacctccctcagagccaggggtgaggtgtggggccctgccacctacccattcagccacctattgggctccctccaaggctccccaagagccattccaatggcacagaatctaccctgcctaccccaccccttccccagcgaaggcctacggagggaaagaagggacttaaagctgctgggtcttctaccttccgccaccctccccccgcaccaggcctcacatggagagggctatgggcctggagacagggactctgggcacactt

SEQ ID NO: 1561666 - DNA, 4001 bp, Homo sapiens
atatcggtatttgccccccagctgagcagtgttgtcgttggtctcaatgtgaccatactggtaaataccatcaagttttttgccgttggtatatactggggggggtcctcggacatggaagtcattgtagggaatatcaccaacacctcgggggaattcaatgcgtctgtagtcattgtaatggtgtcggccaccacccaaaagaccaccaccactgccacccagcagcccccctctactgccacccagcaaccccccaccactgccacccagcagccccccaccactgccacccagcaaccccccaccactgccacctcctccacccagcaactccccaccactgctgccactgccacccagtaagcctccacccaacagatcactgccaccccctccacccccaccaccaagcaggccccccaggagaccacctcccccaccacctccacttccacttccaccaagcagaccgcccaggagaggcccaccaccatcaccacgggctttacccaagggcacctctctcagggccgagtggagagcatcactttgctgcagcatgcctgaaatggctgcagagaggcaagggcatcagtccagggttcctcccttttttccacctccagcccccaggcagcacctcgcagtgttgctcagctccctgggcctcacttttcccaccagcgaagagcagaggctgaacgggatgacttctccaggctgatctagccctggcatcctggccagctcattttctgctgggttttgtctggtcttactttaactagatttggacatcagccagcccttcatggattttcttcatcgccctcccttctaagtgctctgcactttacagctttaaaaaattgacttcaggacgggcgtggtggctcatgcctgtaatcccagcactttgagaggctgaggagggtggattatgaggtcaggagttagagaccagcctggccaagatggtgaaaccccgtctctactaaaaatacaaaaattagccaggtgtggtggtgggcacctgtaatcccagctactcaggaggctgaggcaggagaatcgcttgaaacggggaggaggaggttgcagtaagccgagatcgcaccattgcactccagcctgggcaacaagagcgaaactccgtctcaaataaaataaaataaaataaaataaactttcttatgtattatcgcaactgattcttgggaaatagtcaaggccagaagtgtacccgtctgatggatagaaagattgaggcctgtgaggtactcagagatcacttaaataggaaataatctcatttttttatgctcatgatagcctgggatgggtgttgagggagaaagtatgtcctcacatgctagatgacaaaagcaaggtcctaagaattggaggcaagaataattatagctcccacttttgagggccttctaagtcccaggagctgtgctaagttttcaaaaggtcatttcatttcattctcatatcagttctctgagatagagactataattacacccattttacagataaagaaactgaggctcagggaactcaagtcatgaacttaaggtcacacagtcaggatttgaaccccacgaaggctgatccagggctcttaatcattgttctctattgcctctaaagaatgagcataaagtcaccagtatggtgcttggcacatagtaggtgctcaggaaatggtagtcaaaagaaaaaggagaaactaaggcccagagagtagaattcacccagcctcccgatgtgaactctgctagcaggaggaggttcctgggtacttcagagttggcagagctgccctgctcaccccatgccaaccctcacccctttggggctggactcaccattgctcaacacatctttcgtcaccctgaggaccgtgtttgtctcgtggctggtgccacacacagccaccacagacagcgcagccacacaccaggccatccacatgctggcactgcttccctgtggaggagaaagtgcagatgcagatgtggctgggcgccaccaccctggccagcaggtagcactaggcagccccagccaagagtcatctcaggaccctgggacccagagagaggggaaaccagccaaggtcacatactaaggcagggtccagaattccagatactaccttttgagtttttcaaattgaaatgaatctggtgacacaaagcagacccattaaacacactgtttcagagaatggatgtctaattatctcccaagatggaattgacaaattgagcatcagggagatgggtaatagggattccaacaaaaacaccaaactgggagctcgcaggttctaaggaactctctccagcatctacccatctactcatctactcattcctctacatcactcacccatctactcatctactcattctccccttcgtatttattctcctattcacccatacattcaacctactatctttccatctatctattacccatctgtcatggaaacacccagcaagccatatatctatccatccaaccaaccatccatccaaccaaccatccatccactcatcaactcattctcctccctctatttattaatctgtccacccatcccaccatccatccatcttcccatatatctatcatccatctgtcatccaaacagctggcaagccatatatcctcctgcccatccatctatccaaccaaccatccatccacccagctatccatccatccatccattcatctttccatcagtttatctactcatcaatgcattcatctagccacccttccacacatccagctcaccagcaaacactcttcccatctctttggaggagtcagttctacaccacgtggttaatattaatggctctaggtcagagatatctgggtcttaatgcttaggaaagggactttacctttttgaacttctgctcccaaatcacaaacaagttgtatctcatacatagtagacactcaataaagagcagctattgttattactttgggactgttatttcagacccctaagaagtgggtgaggaatgttatgagattggggaggtgaaacatgcattttggaacgagctgcatagcctctgggaaactttcttttgctccttttgtgccctcatccacttctctcactccatcagccccggctacacatccaccaacctcagagagtcagcacagggcatggcctctcatctgagccaagaaattgttggtttcagccacctttgtttaggcacactctcctcttttttctgtccccatttctcttggacttcacagcgcccccaaattctttccctactcctatctgctcccagaagaatattagaggcattcatttacactagaatataaaggactactatatgcaataatttttttctggcttcctcacctcatcctaacctcactttccagagagctgtgttcaaaaaggaatcacccctttcagttaaaaagatgggcaccgatggaagatttctggcatcagcaaacagctgaggagtctccaggaggtagcaaaggccctcggtacccaacgtccctgggaaagatgagtgcagctctgcgcatgcatgtaattggcataacccaggcctttttgctgattcccaagaggctctcctgactaggcccatgctacagacaagacccctgaacttggagaggggccatcctgatggatctccaggctgggactctctctccttattaccttcccaggcctgtgcctcccctgccggacactgagtagacaaggtgcgcctccttacccctaggaggtccctgccgctgagtcttgagaagtcctgttccccagcccctctgcttttggctgagtctggtcacagatcagtcttatatagcagcctgaggctgagcccagaccccagagagggaaacactgtgtaattacaagagaccggaattcagatttgctctgcaaattgggcattgagccccaa

SEQ ID NO: 1561667 - DNA, 4001 bp, Homo sapiens
gagatccagggtaacaaaagatgtggcacacatacccccacttgcccatcctgagctcttggcagacattgctagttgatcacagtcctagttcctgccgagtgcagacagtgcctcagagccctcccaagtgcatcgtttcaggcagcccctactgatcaatctcatgtggcactggcagaggaaccagtttcctcttgtcattagatgattgttgatgcctttccagctctaccatttgaggatgttttcatttaatttcacgtacattcaatgagttcatgttgcatgcagagttgaaatttgactttccaacctcatttcctcctcaaaatgaccctgctcactacaaagcagaaattgtccccagtgaatggctgaggaggtccaggcacaggcaggagcagtgacctacccaaggccacacagcaagacagcacaaggcagggaagagaccccacatccctcaccagctccattacctggcctgctaagatcttgggcacagcaatccccaccaccctctgccctaaccaccaccctccagctcccctcccctactcacttggtgatgcccttgataggtttcatccctggctgtttcttgcctgcctcggctgccatcttctccaggatatgactctcatccatggcgctctggacctctggagtggagacacttagttggagagattttccctgggccaatcactcaggtatcccaggccactcaccgtcactgtgccccaccctgggctggacgatggcagagacccagagatgagtcccacagcgccccagcctaatgggggaagatggagtcaccagcaatgacagtaacaagctgtaggagccgcacgagggtttaggtaggaagagaagagctggggaaggcttccaggaggaggtgacagatcagttggtacttgaaaggggaatagtaattttcagcaggaagcaaagggataaaagatatcagtctggacagagggcacagcaagtgcaaaggtgggtgggagagaaggtggcacagttgggggaagaggatagattcagcatggctggagggtgaggacagacacgacagagaaactggagcagtttgcagggggcatgtagtgaagctcttgaaccctagggtactgactttatcctgtggaccagccactcccaagcctaggtgattaggggactcctctggggacttgaatgcagactttgggcctgaagcagagaaattctgattccccaaacctggaggacccaaccccaagtaacaccccgccagaaacacctccattatggtcacaagctaattccagagagggcacaaacactgagctggtagaacagtcattagccttttgtacctggatgtgactcggtttcccttgtgctagtggagtgggggatggaggtggaaaacacattttactaaggtctcctccaagagattattctatcctgctagggacagactggtcaccctattttacatttctttacatttcacctttacagatgagcaaacagcaacacagggaggccaagtaacttgcctgaggtcacacagcaagttgttgctgggatttgacccttgtctgtcactcccacagcccacttgtggctaaaacccctgccatcagggccaaggagagactccaaaggagcaggattttcagctctgcctctaacttgcagggggagcatgggaaaatcatcccattttctctggtccttggtttctcccctctgtaaagtgggagaataataataacacttgcttataagtttacttggagctcacgggatgctccaggatgtgcaaccaagagcagtgactacctaccacctaccccaagcaccgcctcccagctgcacgcccgggcccacaagctcaccacggttcatgatgtccatgcccaaccgcagcagtgccccagggtcagctcgcgtgccagtcagcaggctgcagagtgccaggcacaggatccgcagcatggcaccacctgtgccaaggggcctgaattgggcgcagcccaccagaccctggtccccttggggaccttctgtctcagagcagattgagccccctgggtgtttctggggtccaagagcctttagactccagccagttcagcaaacatgagcactgccctcttccaagggattgaggaacccccagattaaacacagggcctccagccacccccagctagctcatttccctctgtaagcctcagtttccccatggacatggtgtgttctgaccagcctgcaagatggggttggaggaaggttcaactgcagtttttcatgggttcaaggacggctgaatgctggagccacagagagagttccagactttccttgagccccacacggcattgtgggagtggggagccctgtgtccccaccttgaccctacagccagggtccctccccacctcttccagctcagctcacttccatgtggaactcagaaagctcaactctgagccctgaaaggcctcttgagacatcgcctctccgatagagaaactgaggcacagacattaggtctcctagcataaggacctcccaccccagaccttttcaggttcccaggaaagccctaccccaccccgggcccatagaaatccttccctcttacttaccaagatctgaaactcttccaaccaagggccaagtgtatatttcagttttgagctttggctgaaaagaatgaaggcagggcccatgggagcagggcctatgtccacccagagagaggaggttcccaccagactctctcttgctctcagcgggctaagtcactgagggctcacctaatgcacaaactaagatgggcccttaccatgggcctgccttcccagtccaagccaatgcctgcattcattcactcattcactcattcattcattcggctcacatctattgggtgtcttctctgtgccaagcagaccgggcttgtctcttttatctcggtggcagagacagccctgctcctcctaaatcctaaagtctggcagggaacgagaagcaatagggtgggatatgggataaaggggtcagggacggactccttatggaggaaacatttaggctgagacctgagggatgaaaaggagcttaagtatcgagaagtgttcaagccaatagtcaatattcactaaatggaagatatatctgggcttaaaataatccacagtagcgcttctcgaccactgtgaatgcacaggtgcgtgccatgacgtgtgctcatgtcccggcacaccccatgtcaaatctctttaaaaatcatccccaaaggggctgtgaaattctgagccaggcaacagagctgggaggggcttggtgaaggtctcctccagccccagccccatctcacagacggggtgactgagcctcaccccagtctcccgtccccaggccagaactgatgccaggtgttagggtcactcagggcagggtctttttttgccctttcagaataataagtggcttcaggtaacgtggtcatgcgggtgtctctgggacaaatggctaatgctagggttttgtttctgaatgtgcttgtcctaagctgcccctcccttttagaatgccttccctccatccatctatcactgactcaaccctcaagtcctaatttcagcacttgcctcatctaccaggaagccttcctcaacccccgactgccctgagcctcaaaaatcacaaattgaacctgaccgtgcaaataatccaccctacctgtgatgagtgtttcctgctacccccaaccacccccatcctttgctcatggtttcccccaccagaagtcccttcctccctctttctgcctggcacatactcccactcctgggtgccccagcttggctctgagctcttacaaagcagagcctggggtttccctccctagtctcccttcaacctcagatggagaccaaggagacccattggatctgctgtctccttgatctttccttactcctaca

SEQ ID NO: 1561668 - DNA, 4001 bp, Homo sapiens
atagctaccaaaaaataaattaaaagatcatatttttatagaaaaatcaggaaagatgatgaacactggagtgctgacacactacaggtagaccatacactctgtaagggaatgttatggcataagcaatttggcaacaagccacaagagtcataaaagagttcacctctgccccaggatttccactgctataaatctaacctgagtaaatccgaaatatttaaactttcagacaagggcatttttctcagctccacctgtgtgtccactcttacgtactgagcctacgtcatttggtcgaccctgctggccttcctctacttagttcattccatctcaccaaaactctatggtgcaggcaccatgacccttattccaaggaaatgcgattaaagaggtaattaaggtcacttaggaagtggccgtgctaggattggcaaccaaagggtttaatactgtattctcaagccactaaaactaaaaataatacgtaaaacaacagaaaactagttcaataaacttgggtgtattcatcattaaaaatcttattttcaaagggtttacagaaaaaggaaacgtctctaatatttacttcatattaaataaaagtgcaatatttaaaactacagataaaattaaaggccaattttgttcaaaagtatgtctatgcagacaaacagagtaaaatggaagcacatcatctaattaccagttgtttctttttagatgatatgacggtgatttttactttcttaatttttttcagtgattcccaaaatgtctcccaacaggaaatatttttttatttaattttttaaaagaaacaaagcaacaacaaattctcaactgtatttgcttaatttgaataaacaaaggacatgtcgataaatgtacattaatgcacaccttcaaggaatttgagactggacaactatgctgaaagagatactaaattgaaaaggcttaaaggtaatttttaaatgtgtgatgaaagaagggaagattaagtgaaagattattattttagcagcccagcatcactgctggaactacaaggtccatcacatgataggggtttccaccagtattcctttctcacagtaaatgggaaaaattcaccttacaggatttgcttgatagctcagttaacagaaatttaaacagcacataaaatagattttagtaagagaaaaccatttcaactcccaacacaaactcaaaaatcactggaatcctaaaggtattttggaattgactaaagtctgataacttacaaagtttaaaatattttttaaaaaacacaattaaaaacaagtatgttaaatgacctatttctgtactattttgttcagaagagttttaacagttccttgcaaggcaaaatggaattagatgtctatagcatacctgttttgagcattaaaaaaaaaaatgaacattttttcaaattgatctttggatgcatgtgtttgggcagggaagtaggagaatgtgtagactaattgtgcctttcctttgttaaagtataacattacaagcagtttaacattttgtaaagaatgttggcagagtactttctaggaacaaaacaacttaaaagctaagcatggcatttttgccacaaattatcaaaagtttttccgcacagatgtggagttatattttttttaaatttttaaatataagatataacttagggctttagagaaatagtgcatacaattcttaggcatgtgcacctccaagaaaacatgctaaaaaaggaaaagaaaacattgtttccacttcattttggaagtttgttaaacaagttatcagtgcaaggattgggaaagaatgagaaatcaagaaagaacatggctgctagtaattatcatcccatacaacggcgttaataatctgtaagtatctcagaaagaacatcttggaactgcataagctcacccttacctgctgaggccaagaaatgaaaaagggtgattcaaaaattcttccgaaaaggaagagtcctgttcagaaacccaagggtaagaggacccgcccacttcccctggaggactcgttgctatgggaacccgcagtaaccctttaaagccagtaacctgtgggggaggaagatcctccctcaggttaaagttaaaacaggggatctggcagagggttgagtaggggactgaggtagggttaaaagaaggggaaagcccttggctgggcagggagtcagtgaaagcgggcttagtaacctcaacagaaattcaaaacaacacttagaacaattgttttgagtgctagagtcacattatagttcacaaagtttgaaccgttagagacgcttccctccctccctggtgggaaacaaaccgctctttgtgagttcctgtctaggaaaatgaatttgagtttcatctcaccaattacaaactgaatgctactactatgtgaaactaaagccttgactttcttatattaaaccagtgtttccaaactcggctgcgcgatcacctggggatctttaaaaaatacactgtgttaattggtctggtgtgcgattgggctttaagagttttaaaactccccagcgactcctctgtgcagccaagtttggggaaactgtattacaggatttggcgaggtggcggggaatatttaaaaaagaaaaagcaccgtgatctcccttggtcttttgaggactaataatagaattagctcgctttcaccaggcacacacaggacaatgggttgcttgataaatagggatccccagcaggcccgaacaatactttctttgaaaaggccaggaggtaaaagccttttcttcccaagagagcaaacatccttcttcccgaacaccaaacttgtacgtctatttttagagcaaacgggccacaaatgccactcagaactcggaggactagtccagcctcaggaggaagccgcccccgccatcgcccgccgccactcgctgggttcccgcggcgcctgaggccgcgcaaacccggagcgtcggtccccggagtccccgccggcagcgcctcaggaaagttacttaggggaagtttgctccgcttcccaccgcgcgcctccccgggagaggggcgcggcccccgccacctgctaggcgccgaggcttcccgaccgcgccccctgcctggacctccgccacctccggggtcgcgcaccccgcgggcgtccgcacggccaggcgggctcgtgcgcccctccccgcggtctttcggctgaggcggccctgcccctccgcccccggcaccaggacctccgcgcgggcccgacgcgccccactgggaccccccccccctcggaaagccagcccgcgcggccagcgcctctcgagcccgggggacggatatgggatcctctggtcccgtgggtccgaggccgacctgcggccaccagcccggcctctcctcgcttcgctcggcccctccggccggccgcagggcgcgcgcccctgcccgggcggtcccgcgctgcgcacgcgcggaggcgccgacccgctcgcccgcggcgccctcactcaccgccagcgctcctcctcgcctcgggcgacgcagccgtccgccgccttgccctgtgcccgctcctcaggccccggccggggcactcggagatccagcgcccggcgggctcggcgggcacccgcacgcagggcacgctctgcgggagcgagcgcgcgtgcccggtcaccgggagggagcggagcggcatgggaggtgctcccggaggcggccttggatacggggcatgcgcaatgtctgccctgtcctcaagcaggagtgaggggtgggcgggaacccgggcttggagaaggcggggagggtggaggagagccagcactcccgcatctctgagaggccacttcgtccttgtcccacgaactgcagtttttctctctgggtcattcatcaatgaatgtattaagcatttattgaacacttgcactggcagagtggatgtgcgggatacagggcatcctccggtaa

SEQ ID NO: 1561669 - DNA, 4001 bp, Homo sapiens
ctctttccaaacacacgaatgatgcttacttcagcatagcgagaaaagcagcaggttcgacatctggtatacggatttcatctttgtcctctgcaagttctccgtaaaacatcgcatggaacacagagctcccaacagctaaaacatactgtgtagaaagggaaatcttatttcatacactaaattgaaggcatttccagcaaatcaatgcagaaaaacaacactaggcaatcaggtttagtaaacatagcgtacctaaaatctactgctttgaaaaagccaaggtacacagggtagcttgccatggaagcataagaccatgctgctaattatttcaaagctttaagagattaatgcacatgtcccctcattactaaatacatacaataatagcttacataactaatttctaggagaagggtaaacatacgactttcctgacctgtcacaacaacttcccatgtctggagagttaagaggggatgtgtgagatataaagcagtatagaaggaaacaaagaaaaaattaagcgtggccaaagccctctggagagggtgcgctctctccctaatcgagtgaaacatgcactgcctgacatcggcaagctgcccacaccaagttacaggcttatggaaagggtccctctttgtaaacgtcaggactaaaccggtcatgcagctgttgcttactttgtgtcctggcaaccgttgagtcccacctggtggcccaaccacaaaatgtacatctgccatcaaatcattattgaacatcatcgcatttctataaacagaggcaactcattaattcacagcagcctgcatttttaacatccccttccccaacatacaaaacccacaaaagacttgcaagctaagcaacagtccagtaacttcaaggcaaaacaacaaataaaggttctaactaaactgttcataatcattgcaaacataagggaagtaactaaagtttaaaataaaagttatacaaacttttaataaagctaaggacaaataaaaggttcccattttctatggcccatagacaaccctgtcacttgaatgttacagcttgcaaaaacatttttatctaagaggaaaacagctgtactgttttggaaaagatacaaggcaattttccattaccaataaaaagcttctgggaaaagaggaaacagatttgtgttcaaatacattacaggttttgcaaaagcagaaacttcaacacaggaaaacttttaaagtaaatagactagcgcggcacttacctctctctaatggtgggataaagaccctgccagtttggggccgggataaggttgttgttactgagattctgctggtggtactgctggacgctggtgctgctggagttggctggctttttacgggggaatatatcagcagccatcttcttctttttagtcttcaaggtaattatttcataacaaactggtggcaacttgctgctgttgctactgctgctgctggtatttgctttctttgagcttttcttggacctgttctttaccgtctctggaagcatcaagaagaaggtgagacatttcatgttcttttccttgtcatctaccatgagtacagtgtgtctctctttagagttagatatcccaaattggtttgaacatcaaggaaaagagattagcccgggctaagaggttaactgaaaccaacaaagctgatattttgctgcttttctcagccaggcaaggtgaccttttcactatgttgaatagaaactggctttaagttttatccagtactgggtctgttaaatatatccccatcatgattcctgtttctcttatttgctcataaaaataactgtttcctagatcacctgaaaatgctacactgcaaagatgacaggcacagagctgtagcacttcttttctgaattaggtcagcaagatgggctggagctgcgtgagtctgttcagccggctgaagttgtgtggtgaatggatcggaggagagtaggtattacagccctgcagatggagtcagacagccagtgctccgagccaatagctgaagtcaccaatcatgattggaccaagcaaaacagtgacacctattgtaacatgcatagttctgatattaaaggaacagcagttgcattttcttgtctactgtatatttaaacaagataataacatatgaaatatatttgacaacaggaagggaggagtttatgcccacagatttctcttcagtagacatacattatgtccccagttaagcaggatcaattaacaaagggtagggacagatatctatatttctactaaaatctttttcccagcagcatttagtttcaaatacttaaaacaaaatcctccagtctataaactgaaaagggctattaatagcaaaacacatttattacactttaaaggcaaaggacgttatttttctttttcttagcctcttttgagtgcaagtcatagtctagtgctaaagaagagaactgaggccatgtgttcagtttacctcccaatgttttctagcttctataatggtctttgacaggtgtctcaggtcacaaaatactgttaattagattaagattatacccgtacacctaagtacactaaagcataagataaactctagaagtaaaaataagattcaaataaaaacaaatctgatgatcaatgttcaaaggctgtaattcactaaaaatatttcagatggggccatgttcaggatctcaaaattcaacttaactgttaaggctacatttagtcttgtcttaattttaaagaatataatccacaacttctaagacagaacaaataacaaggctattcaaaatgataaatgttcggattccacctagttaaaatgcaaacaggttctctctgctttgaattagaagaatataagctaccatttgatttttgtaggtgtgaatcctccaaccatttctagcgttggtgagtaaaaaaaacaaaaacaccggcaataggttctgcatatgcttatttattgtaaagagggactaattaaaatatttaatctcacccctatctatttggatcacgctcatttgttcaaagcacagcagccatttgctacccctcaggcaaatgcacccttcatgaccacagccctccttgttttaacatttgtctgaataatgactacctgacacagtgagggctcagcaaataagagttacgattgttattgttataattaataatctgctaaaggcggttaccagaaatcagtctttaaatccctagaacactaaattgaaccaagaaatatcctctttattgttgttattattattcttaaaaccatttgcaaagcctctgtaagagaaccagggcctgtagcacagttacctgtctccattttagatggatcctgaagcactgcttatttattatgattatcatgttctcaacagcagaacacacacatacagatacctccaaatcatcttcatacacactttaacacacaatgttagagagggatctagaaaccagtttaaaaagcacatagagaaagtcatgaagaaacaagtaagctcctattgacctaattattcagaatagggttaacactaaaggatttctctcttgctcaagtgccactgaacttccttgaccacttccttgcaggaaagctcccatgccaggtaggcctttctgactgggattaatctcataaatatttctaacaaatctagtatctggcttttcaggtcagaagtaatcaattagaatggaaagggaaaccagctgcttttaggcagacatactattaattggtagctggatggagacaaaatagaaaaaacataaaacacagatacaagaacttagaagggtttgtgatctttactcattttgcatatggctcaatacccatcaccaagaagtctccaaaacacatggctcttacaccactaagttaaagaaaaaaagtaaagtggatgtaacagtttgagaaagagaagtatgcaatatt

SEQ ID NO: 1561670 - DNA, 4001 bp, Homo sapiens
aaacattgtttccacttcattttggaagtttgttaaacaagttatcagtgcaaggattgggaaagaatgagaaatcaagaaagaacatggctgctagtaattatcatcccatacaacggcgttaataatctgtaagtatctcagaaagaacatcttggaactgcataagctcacccttacctgctgaggccaagaaatgaaaaagggtgattcaaaaattcttccgaaaaggaagagtcctgttcagaaacccaagggtaagaggacccgcccacttcccctggaggactcgttgctatgggaacccgcagtaaccctttaaagccagtaacctgtgggggaggaagatcctccctcaggttaaagttaaaacaggggatctggcagagggttgagtaggggactgaggtagggttaaaagaaggggaaagcccttggctgggcagggagtcagtgaaagcgggcttagtaacctcaacagaaattcaaaacaacacttagaacaattgttttgagtgctagagtcacattatagttcacaaagtttgaaccgttagagacgcttccctccctccctggtgggaaacaaaccgctctttgtgagttcctgtctaggaaaatgaatttgagtttcatctcaccaattacaaactgaatgctactactatgtgaaactaaagccttgactttcttatattaaaccagtgtttccaaactcggctgcgcgatcacctggggatctttaaaaaatacactgtgttaattggtctggtgtgcgattgggctttaagagttttaaaactccccagcgactcctctgtgcagccaagtttggggaaactgtattacaggatttggcgaggtggcggggaatatttaaaaaagaaaaagcaccgtgatctcccttggtcttttgaggactaataatagaattagctcgctttcaccaggcacacacaggacaatgggttgcttgataaatagggatccccagcaggcccgaacaatactttctttgaaaaggccaggaggtaaaagccttttcttcccaagagagcaaacatccttcttcccgaacaccaaacttgtacgtctatttttagagcaaacgggccacaaatgccactcagaactcggaggactagtccagcctcaggaggaagccgcccccgccatcgcccgccgccactcgctgggttcccgcggcgcctgaggccgcgcaaacccggagcgtcggtccccggagtccccgccggcagcgcctcaggaaagttacttaggggaagtttgctccgcttcccaccgcgcgcctccccgggagaggggcgcggcccccgccacctgctaggcgccgaggcttcccgaccgcgccccctgcctggacctccgccacctccggggtcgcgcaccccgcgggcgtccgcacggccaggcgggctcgtgcgcccctccccgcggtctttcggctgaggcggccctgcccctccgcccccggcaccaggacctccgcgcgggcccgacgcgccccactgggaccccccccccctcggaaagccagcccgcgcggccagcgcctctcgagcccgggggacggatatgggatcctctggtcccgtgggtccgaggccgacctgcggccaccagcccggcctctcctcgcttcgctcggcccctccggccggccgcagggcgcgcgcccctgcccgggcggtcccgcgctgcgcacgcgcggaggcgccgacccgctcgcccgcggcgccctcactcaccgccagcgctcctcctcgcctcgggcgacgcagccgtccgccgccttgccctgtgcccgctcctcaggccccggccggggcactcggagatccagcgcccggcgggctcggcgggcacccgcacgcagggcacgctctgcgggagcgagcgcgcgtgcccggtcaccgggagggagcggagcggcatgggaggtgctcccggaggcggccttggatacggggcatgcgcaatgtctgccctgtcctcaagcaggagtgaggggtgggcgggaacccgggcttggagaaggcggggagggtggaggagagccagcactcccgcatctctgagaggccacttcgtccttgtcccacgaactgcagtttttctctctgggtcattcatcaatgaatgtattaagcatttattgaacacttgcactggcagagtggatgtgcgggatacagggcatcctccggtaatagagggccgattgcatttggctttggggctcctttttaggcactgatgccagccctctctctaacagataaggagggtgcataaatagaggtctcgtaatacctaacgactacactcttcagtgatctggggaaggagagtagctgctggttgggttgatcatggaaacttcgttgagaagcgaaaaagaggaaaggtgaacacgaaggcataagtggcaaaaaaaaaaaaaaaaatcaaacagcatatgaatccatgcatcctgtcggggacaagtttaatctgagtgtattgttcttagtgaaagatgaaaacggcggccggaaaggtagttgaagctcatctggaaataatctttaatgcttagcacgacttcagctttattccgtggataattgagaggcacggaagaaggggagaaggggagcccggtggtggcttgataaaatgcagaatttaggaatataaagtgaaaactagagacatgaaatgctgtaatatatgttctaggtaagaagtagtagggtcctaagttcaagggttggtatcaggaatggaaaggatcaaaaagtttccagagactgtgaaggacagaatgactcccttacttatgtcactgcctcttgggtagagagatgtttatcatgacaggcgcctacttcattagatcagatcatcatccttggcaaaatgtatatcggtggataaattagacctatacaatactgttaggacaagtggatgcttcttttagcaagagtttggccctgggagaacgtatttctgctcagatgaaaaaccattaatttgagagacagcatacatagtgaaagacacctgggctttggacaacaaaagtccctttgataaagtccaaatacctcataatacactatattgtctaaattacttactatctgtgagccttactgtgttcatctgtaacatgggatcataatatttaccttgtataatggtaagttttatgtgtcaacttggctaggtcatggtatccagatatttggacaaacattagatgtttcagtgaaggtattttttagatgagattaacaatgaaatcagtagactttgaggaaagctgattactcttaataatgtgtatgattttcatccaatcagctgaagaccttagtagaaaaatgctgacttcccctaagcaagaaggaattctggcagcaaacagccattgacttgcagccttttccctagacctgcagcccgcctacctactctgaagattttggagttgccaagcctccacaaccatataagccaatacctttctctctctttctctcttttctctctcttaaactgcaaaaagcaaacaaacaaacaaacaaacagacagcaggttcaaaatggagtcactcatactagtgtcacataaccaaaccaaaacttgcgttatttacttgcaagatttgaccttgtgagaaatcagaagagagataacagtggaatccaactaggccaacaagattttgcttacatctgtagaagaaaagtaaccttgaaatgaccaaccctctatttgttctttatttctgcttttctcttcttttttctgcccataaaactcacccactctgtttagctcatcagagtttctttctactttgtagactggatgctgcccagttcatgaatcgctaataaaagccaatcagatatttgaaactcaatttggtgaaatttttttaattgacatatatttaaaatagatatatagatatatatccatcctg

SEQ ID NO: 1561671 - DNA, 4001 bp, Homo sapiens
ctgggtgagtcatggaggtgaggaggcccacaaggctcagcagtgtggagaagagcagcaggaaggaggccgtgaagaggagggcaggcagagcactgagcaccagcagcaggagagccggtagcaggtggcgccacaccgcggccacgacaggccacaaggagctcagcaggtgggagccagtggtgaagagtgcatggcacaacatcagtgccagcagcaggtagagtatcccctccagaccccacagcaggcgctgcagcggttgccgccagttcgaggtgctccaccactggatccagctcgggggcatgtggctcacccaccagcgcacccagccatgcctcgtgacccaggctgaccagggcactgcctgctgtggcccctcgccagccccgatggtatctgtctccactcgcggctgctgcatcatgtctggtgcacctggggagagggccagggtcttgaagatgcctgggaccttggggggggggggcagagagggggtgcaggggtcaggagggcaccagtgtgcgtggggtggggctacagaattagggactgggacttacctctgggcagttacctaagtcatgttgcttcctgcagcgcccaggacggcctggcaggcagatccaagtccccactctcatctacccccaccctccccagaggagcccctttgtgacccgggctggggtggggtccagccaagagaggagtcactgtagggtgtgaggcccacccaagtccctctgcacggaccctccaggctggcaggggagcctcggagccccgcagatgtagtttctcatgctttctcatgggaagccctccctggatccctgtccctttcctgctttccctgctggctgatatccacccctttccaaactgctctctcgcaagtctttctgtctggaccttcattctctagagccacagaggaggccagagtggctgcccccaatccacaggctctgaggtggctgccacattcttccttgggctccctggctagtatcctaccttctcttgctgcccaaagactcagatccaggtatctgatacctatattataggactgtgaggttcaggctgggaagaaaggggtatcatcccacctgcccagccaggaaggagaaaagggggcctgatgaagaagggtggtcattgtatatttgaaggacactgagttgtggggaggggctctcaggcccaaggatggaggcagaaagccaggccaagcagggtcaagggcatgccacaggctctcaggagcgggcccagccccatgagcagcagcagcagtgcgtcctggaggctaagttgtcctgagactgtacccatttgcaggagtagagcctcctgctgtccaggaccttcaccggccccctgactctggcccctggtgagaagtttgcgctgtggcagagtgtgacctgcgggcctgtggagagagagggtggtgactgggcttagggaagttgtccactggcccgcccgcctacaatgcccacctgccaggctgctgcccacttacctatggagcaggtcaaaggtgaggaagctgaccagaagcagcagcagggctgggccagtggtggaaaagactgcctggattgtcagtcctagtgcccccagccataggacactgtccaggagctgggcccagctagggccccaggtggatacaggtggacgcactggactacctgacccctccccagcacccaggccccttggaggaactgggatcggatcctcacgtgcttcgggtctgggtaagcagagccgggtcatggagagaggtggaggtgacgggaagacctagtgctgaaaaggattataagggtgagagtaggggaaggggtagggcccgggcagacagaagggtgagctcagagtggggaattaggctcctgcagagtctccccctcccccatacccacccagcaaaccctcctcacctcctcccactttggtcagcattctgggagtgggcacccggggcattgtgacctgttaccacgtggggccgtggggtagggagggggctgctgctgctgctgctctgacctcataagcagctggtggcctaggtggggcttagctgggaagtcagggatttctgagaactaagactcatcctcttgcctttgctgattctctgccctagggccctcccttggggatctgagttgtcaggaaggcattctaaccccattactacttgggcatctgtccaagggagcgaggtctgctttcttcttcctgtgagtttgcagagctgcaggtccagggcgaagtcattcaatatctctgtccccagctgtcttccctgtgggtccttctaggggatttttcaggcctgaagttccagattgcagagatgggctctgccaggggactgcctgaggcttctggggctgggcttccgcataacctgctaaatgggggtgagagaggagggggctgttcaggtattctaagcactacagtttatagggggtgttatgcatactggggttccagtaatgaggtagaggacatgaacttaagaggactatgacctagtaacccccttattagaggttaaggttacagtctgagaatggagttaaggaaaatgaacatataatgaagggcttagtcacttggattatcagtatatcagattacactgatcatctgtaaatgggtggtggccataggggtccagcacatctcagtttagtgacttgagaggcaagagcggaaatgtgtcataattaagagaacttaatctttgcccacatatcatactttgaaggaaaactggtaggggtggcaaaatgggagacagtggccatacagcccctaggagaggaggagacagaacaagaatcaggctgcatatccacctccagcaggccttgcccagagacgagggtcaccagccctaatgaccatgcactgatcgcccttggtctggctgttcttgcttatccagcagctgggttttacgagtagatttgtccgtaatgggatagggtataacagaagatcccagaatttttttttttttggcattaagttccaattgtgcttgtaaaggaacattaaggtttaagattggcaattccctgagcctgatcaatcctggatgcatccacacaattgcattcctggacatacagacctggggagcatgtcctgatgagtccaccaagatgaggctactccatattgcagggcatggggggatcggagagtctaaagctccttaaagatttactatgcaccaggtgctctgtatgcatgtataggagagttctgtctgtgattttctcagagtttattttgtattcaacaatcatttatttaagtgcttcctatgtgccaggcactgcaccagatggtgggtgtattaggccattcttgcgttgctatgaagaaatacctgagactgggtaatttataagaaaagaggcttaattggcttgcagttttgcaggctgtacaggaagtagggtaccagcatctgcttttggggagacctcaggaaacttccaatcatggcagaaggcaaagggtgaagagcaagggagagagtggtggttaggggagttgccacacacttaaacaaccagatcttgagagaactcactcactatttcaaggacagcaccaagccatgaaatatccacccccatgacccaaacacctcccatcaggccctacctccaacattgggatttgagatttcaacttgagatttggacaaatattcagactatatcaatgggtcataatttctaaaagtagagcctgagatggggatacttgtacacatggtttattgagggagtgctctgaggaggaaaacctttctttctatttttttttttttttttttttgagacagagtttcgctcttgttgcccaggctggagtgcaatggcgccatcttggctcactgcaacctccgcctcccgggtttaagtgattctcctgcttca

SEQ ID NO: 1561672 - DNA, 4001 bp, Homo sapiens
attgatccaaatcctgagtgtcgcctgggtgagtcatggaggtgaggaggcccacaaggctcagcagtgtggagaagagcagcaggaaggaggccgtgaagaggagggcaggcagagcactgagcaccagcagcaggagagccggtagcaggtggcgccacaccgcggccacgacaggccacaaggagctcagcaggtgggagccagtggtgaagagtgcatggcacaacatcagtgccagcagcaggtagagtatcccctccagaccccacagcaggcgctgcagcggttgccgccagttcgaggtgctccaccactggatccagctcgggggcatgtggctcacccaccagcgcacccagccatgcctcgtgacccaggctgaccagggcactgcctgctgtggcccctcgccagccccgatggtatctgtctccactcgcggctgctgcatcatgtctggtgcacctggggagagggccagggtcttgaagatgcctgggaccttggggggggggggcagagagggggtgcaggggtcaggagggcaccagtgtgcgtggggtggggctacagaattagggactgggacttacctctgggcagttacctaagtcatgttgcttcctgcagcgcccaggacggcctggcaggcagatccaagtccccactctcatctacccccaccctccccagaggagcccctttgtgacccgggctggggtggggtccagccaagagaggagtcactgtagggtgtgaggcccacccaagtccctctgcacggaccctccaggctggcaggggagcctcggagccccgcagatgtagtttctcatgctttctcatgggaagccctccctggatccctgtccctttcctgctttccctgctggctgatatccacccctttccaaactgctctctcgcaagtctttctgtctggaccttcattctctagagccacagaggaggccagagtggctgcccccaatccacaggctctgaggtggctgccacattcttccttgggctccctggctagtatcctaccttctcttgctgcccaaagactcagatccaggtatctgatacctatattataggactgtgaggttcaggctgggaagaaaggggtatcatcccacctgcccagccaggaaggagaaaagggggcctgatgaagaagggtggtcattgtatatttgaaggacactgagttgtggggaggggctctcaggcccaaggatggaggcagaaagccaggccaagcagggtcaagggcatgccacaggctctcaggagcgggcccagccccatgagcagcagcagcagtgcgtcctggaggctaagttgtcctgagactgtacccatttgcaggagtagagcctcctgctgtccaggaccttcaccggccccctgactctggcccctggtgagaagtttgcgctgtggcagagtgtgacctgcgggcctgtggagagagagggtggtgactgggcttagggaagttgtccactggcccgcccgcctacaatgcccacctgccaggctgctgcccacttacctatggagcaggtcaaaggtgaggaagctgaccagaagcagcagcagggctgggccagtggtggaaaagactgcctggattgtcagtcctagtgcccccagccataggacactgtccaggagctgggcccagctagggccccaggtggatacaggtggacgcactggactacctgacccctccccagcacccaggccccttggaggaactgggatcggatcctcacgtgcttcgggtctgggtaagcagagccgggtcatggagagaggtggaggtgacgggaagacctagtgctgaaaaggattataagggtgagagtaggggaaggggtagggcccgggcagacagaagggtgagctcagagtggggaattaggctcctgcagagtctccccctcccccatacccacccagcaaaccctcctcacctcctcccactttggtcagcattctgggagtgggcacccggggcattgtgacctgttaccacgtggggccgtggggtagggagggggctgctgctgctgctgctctgacctcataagcagctggtggcctaggtggggcttagctgggaagtcagggatttctgagaactaagactcatcctcttgcctttgctgattctctgccctagggccctcccttggggatctgagttgtcaggaaggcattctaaccccattactacttgggcatctgtccaagggagcgaggtctgctttcttcttcctgtgagtttgcagagctgcaggtccagggcgaagtcattcaatatctctgtccccagctgtcttccctgtgggtccttctaggggatttttcaggcctgaagttccagattgcagagatgggctctgccaggggactgcctgaggcttctggggctgggcttccgcataacctgctaaatgggggtgagagaggagggggctgttcaggtattctaagcactacagtttatagggggtgttatgcatactggggttccagtaatgaggtagaggacatgaacttaagaggactatgacctagtaacccccttattagaggttaaggttacagtctgagaatggagttaaggaaaatgaacatataatgaagggcttagtcacttggattatcagtatatcagattacactgatcatctgtaaatgggtggtggccataggggtccagcacatctcagtttagtgacttgagaggcaagagcggaaatgtgtcataattaagagaacttaatctttgcccacatatcatactttgaaggaaaactggtaggggtggcaaaatgggagacagtggccatacagcccctaggagaggaggagacagaacaagaatcaggctgcatatccacctccagcaggccttgcccagagacgagggtcaccagccctaatgaccatgcactgatcgcccttggtctggctgttcttgcttatccagcagctgggttttacgagtagatttgtccgtaatgggatagggtataacagaagatcccagaatttttttttttttggcattaagttccaattgtgcttgtaaaggaacattaaggtttaagattggcaattccctgagcctgatcaatcctggatgcatccacacaattgcattcctggacatacagacctggggagcatgtcctgatgagtccaccaagatgaggctactccatattgcagggcatggggggatcggagagtctaaagctccttaaagatttactatgcaccaggtgctctgtatgcatgtataggagagttctgtctgtgattttctcagagtttattttgtattcaacaatcatttatttaagtgcttcctatgtgccaggcactgcaccagatggtgggtgtattaggccattcttgcgttgctatgaagaaatacctgagactgggtaatttataagaaaagaggcttaattggcttgcagttttgcaggctgtacaggaagtagggtaccagcatctgcttttggggagacctcaggaaacttccaatcatggcagaaggcaaagggtgaagagcaagggagagagtggtggttaggggagttgccacacacttaaacaaccagatcttgagagaactcactcactatttcaaggacagcaccaagccatgaaatatccacccccatgacccaaacacctcccatcaggccctacctccaacattgggatttgagatttcaacttgagatttggacaaatattcagactatatcaatgggtcataatttctaaaagtagagcctgagatggggatacttgtacacatggtttattgagggagtgctctgaggaggaaaacctttctttctatttttttttttttttttttttgagacagagtttcgctcttgttgcccaggctggagtgcaatggcgccatcttggctcactgcaacctccgcctcccg

SEQ ID NO: 1561673 - DNA, 4001 bp, Homo sapiens
cctccctcatgcctaagagggatttctggatgctggggggatgtcaggctttaccggaagcaggtccctctcactagcgtggccaagcctgggtttgcccaagcccacctcccttgagcctgcagactgggcaggatgtgacctggatttggagtgttgggggaaggaaactgcctcccgccactgtagcaaggtttggggttctgttctgacccttggcacaaggaaggagaaagcaaaagacagccctggctccagaccgtggcgatggctctgccttcatcacgccccgttcacccctctgcggctcctaggctgagctttgcccaccccgactccgcgcccagacgcctccgacagggttcgcaggcgccagggttgccacgcactctttattgggcggggtccgggccaagcgtttaaagctgcgggcgagggcagcggcaccgtttgcgcggctgctcctcggcggggccggcttcgcggggagccttccccggggaccggaagcgcgagagcagccgcggccagctcagagctgccctggccccgccctcttccggccgccgcgcctcttgccgccgcagcagcagcagtaccggcatcctcggctcgcgctcgctaccttcgcccgctccgcgcaatctgggtgccgccggggagcccagcccagcgccggacgcgtagtcaatccgttgcccagcgttggccagcggctgccgcttgtccagggggagaatcagcacgatcctggtctgggggtggaacaggggcgtgaggcgggagagcgcgctagggccgagcccacgacccggggccgctccgcgcttctcctgggaccctcgtccacccgggtcctgtcgtccacccgggtcctgtcatcctctcgtgcacagggctggaggggacccctgtccaattcaggccgcggggaagcccgcccttccctgcgtggcgccccggactccgcctcctttctggaaaccctcatccatcccaggctgacttcctgagaccagctccgtctaagtttatgagatcccttccaggccctatgtcaggggctttcagcacctcccacccccgcctggtccagggcttctgctcatttgagagggagacagggaagttctgagcctaggagctgaagagaggacactagggaattccccctgcctctagctccagtagtaccaactagaactgattctccgtgttgggatctccacccgttcgtccagggttgggagagaatcccactcatgctcaccccccggggctctcaagtctcatccactttctggttctggaatctctgccctcccttctgggctttttttgtttaagactgagtcaaacagggtcttgctgtgtcctacaggctggagcagtggtgctgtcaacggctcactgcatccctgacctcctgggctcacgtagtccacctcagtcttctgagtagctgggactgcgggcattcaccaccacaaccagctaagttttaatttttgtagagatggggcctccctatgttgcccaggccaatctcaaactcctgggctgaagttatccacccaccttggcctaccaacgtgttgggattacaggcgtgagccaccttgaaaggacccccatccacacccatatgggctcctgggatcctcatccttgggagagattttcgaattcctccctcaccccctaggacttctgcatacaaggcctagactcccagcatcccttcccacccacttgtccagctttctctgccccccagctgcctccccagccctgctccccatcccccgccctcacagccggcttcttccgagtgaggtggttgaggaacgatttccaccaggccttgtccatgtcagccggcctctccttgcgggcctgcttgggtgctttggtccttttgtgggaactatagtttcccatggcagggctggtcaccactggggacgatggcccacactccgtctgctctgccccctgggccctggcaacattgtgacctcacgggctgacctcaccaattgcaggctctgagcaccgccttccagggcccacaggtgaatctgggctccactcagtcacttctagccttggtttctcagctgtaaaactgggctaatgatcataaatgaggcaatgcatgtaaggtgcttagtggtgaatagagggggatttctgtggtttgggtatgaattttggccctgctactaacttgctatgtgaccttagcccaggtaatcaacctctctggacctgttttctcatctgcaaaatggggtcaattatggttcctgtaaattgttacaaaggttaaatgaggcctggcatggtggctaatgcctgtagtctcagtactttgggaggccgaggcgggtggatcacctgaggtcaggagttcgagtccagcctgggcaacatagtgaaaccccgtctctactaaaaatacaaacattagccaggtgtggtggcacaggcctgtaaacctagctattcaagaggctgaggcaggagaattgcttgaagctgggaggcagaggttgcggtgagccaagatcatgccgcttcactccagcctgggtgatacagtgagactctgtctcagaaaaacaaaagactaaatgaaattcttcttgcagtagtgcttggctctgagtgggtgcttctgtctgttctctggttgaaagcaacagaaactaatcatctcaaatacccaaaaaggaattttttgggaagatttcatggagatagaaaccctggcctgtctgagaatgaaaagacccagcctcttctctgtccctgtctcctagctcataagcctggcccaggaggtcccatccgatggctgagctgaggcaggtcatggcaggagatgaagtctctgatggatggggcttctggagtctcctcggagagggcaggcacctggactgcagctccccaggactcccaccctgatgcgtgtgtgtgtgtgtggtaggggttaggcaattctcaggacatctgtgactcctgggtgtacaagtgggcaggccctttattgtattacacttgacgatagatggctggtaggtctggcatcgagagcttacgtgccagaccctgggctgagtcctatgcaggaattaactcctgggacgttcttgcagctccatgtgctgagtttcatctttcctgtttgatagatgaggaaatggaagctccaggaactgacggttgttgaggagcctcagaatcccatgctgggccatgcagggcctagcatttgggcagcctccctgcctctctgccaccctgagaggggctgggaggaggctggcagtgtcggttggggtcagtgccggcgtgtgtgtctgagtgagaatggcaacctgattgtcttttatcagcagctcctagtaaaaagcacccagtgttgtgtgtatgagtgaatgaatgaatgagtgaatacgtagattgtgagtctggggccacaccacgccattattttgccttgtgtcaacattggcccttggatacctcgtgatagcccccacccagcctagctgtggctgggactcactggctatgacagtgctgaaggtggtagccccatcagggaaggggccatgaggtccagagaggccaggcacttcgctgggcagatgccccctgtgagttggcctcacacctccggggagggaggccagtcccggacaaggagggatccagaccctccctgcccatcaggtctcagtaccctcctgcctgtgccaggtttgcgtgcccctgctcttggcactgccaccgctgctctgatgggcaagaggcaggggacccactcaagagatcagtgcccgggctgggagatgctgaccgtccctccttggcccacaggagtacgagagggcctccaaagtggaccagtttgtgacgcgcttcctgctgcgggagacggtgagccagctgcaagcccttcagagctcgctggagggggcgtcagatac

SEQ ID NO: 1561674 - DNA, 4001 bp, Homo sapiens
tctgtcaccaggctggagtgcagtggcgcaatctcggctaactgcaacctctgcctcccgggttcaagcgattcttctacctcagcctcccgagtagctgggactacaggcatgcctggctattttttgcatttttagtagagatgaggctaccaccatgcctggctattttttgtatttttagtagagatggagtttgaccatattggccaggctggtctcgaactcctgacctcatgatccacccgcctcagcctcccaaagtgttgggatacaggcatgagccaccacgcttggcctacatgtagagtcttgaaagccaggcagaaaactttagactccatgctgaaggcattgaggagcaggaattttaagagaagaagatacaagaatctttcctgccggggcacagttgtgcaagacacagaacaaagccttgggccccagggatgaccctgaccctggtaagacagccagttgtcctggttgcacctggggaggaagggggagggaactgacctggggcccttcccacagcaacccacagccacatcctaccccttttcctattccccctcaccgtgtctttgctatcttccactccactagggaaccagaccatcttccaaaatctgagaaagaattggaggtgggggagtttgggccacaagacctgggaaagtcctgcaagtgtccccagtaagccaatagaaggtcttcccagagcccctgctgttactccctgcagtgacctcccctcacccccacacagagaatgtctggggacacctccatcaccttatcacttagagcatctgaagtccacaccaggtcagagagcttccgcagtagcatctccagctgcatccaggagccctggtcgctggcattcctgggatagatgaagcattgtgtgtggtttggttccccacgtccatctcaaagccctggacttggggcctgcttcatcttgggaaggggagcagaaactgatggaactgtggggcaggcctggccttcctgctcccgccctctccccagcacccacctgaaaaccacggggtattggtcgatgtcgttgccaaggctggagccctgcgggatctgtgggcgccccaacagcacacaagtcccacaatagaaatcaaaatggctcaccgagagcctgggaatccctttaaacagcttcctccacaatttcccaagctcgctccctgagttcatgccctggaaacagcaagagggagattgggggctgggcccaggggagagaaaacagagctgggtgggtgagatctccatccagaggctgtgaagacagggccaagggcagggatttgggcggaaagtgggagatgggtgaggcccggaaagcatgggggatatggccgggcccagtgttgaccactgaccaaccaccagagcacagtgtcagaggtcatagactctcttgtcctcatcaggtaccccatagtcttcctggagcacgcatcaagccagttccattcgtcggctgtgtggtggcaggaggagcagttgagggtctcagaagggcagccacacttcccggaactgaaccaagggcagtcgcaatgctgtggtaccaagtacattcgtttttcctggggtgctgattcaggtgtcagatccagatagggggtcatcagccagaggatgagcacccaaaagacccacaggacaaaaatctgccagcgcttcatgtctggcccaggcggtggctcccgtggtgggccgtagactggcttctctacctgtaaggatgaggggctgaggccacagacagcaccagcttccctctgtcctgtcggcctccacaactccccatcccaccaccttccacctccttccaacccctcctctcctgcctcactatccatttgctcaccctcaaaacggtctctgactgggcatggggtggaagaggccagggcagagagacagcatgtggctagtcctgagaggggaaggaatacctcagtgggggccttgctgtcatcccagttatatcatagatctcatcacaaagtacacattgtgacctccctcctttagcctgcctgaaaaaagccaccaccctaccctttctctgacaccgaaatgacctccactggatgtaagattcatgaggacaggggctgacctagtctctcttcttcacctctgcagctctaagacttagaatcatttaataaatatttatgggataaataaacaggggttgagagggaacttttttttttttttttgagatggagtttttgctctgttgtccaggctggagtgcagtggcatgatcttggctcactgcaacttccgcctgcctggttcaagcgattctcatgcctcagcctcccaagtagctgggactacaggcatgcgccaccacgcctggctaatttttatatttttagtggagacagggtttcgccatattggccaggctggtctcaaactcctgacctcaagtgatccgcccacctcagcctcccaaagtgctggaattacaggcgtgaaccaccatgcccagccgggaactttatttttaaattattattattattattattattattattattattattattattttgagacggagtttcactcttgtcgccccagctggagtgcagaggcacgatctcggctcactgcaccctctacctcccgggtttaagtgattctcttgcctcggtttcccaagtagctgggattacaggtgcccgccaccacgcctggctaatttttttgtatttttagtagagacggggtttccccatgttggtcagactgatctcgaacttctgacctcaggtgatccgcccgccttggcctcccaaagtgttgggattacaggcatgagccactgcaccccgccccagcctggaactttaaatatacttgtgtgtgatgccctctctggagttgtgtgacatcaactcaatcctctcttgtagtctctagaccccatatccaacagcctactgaattgccacttagatggctcagagacatctcacctgaataagcctgagactgaacccaggattttccctgtaaaccaacccttcccaaaacttctctgtctcttttgttttgtttgagacagagtcttgctctgtcacccaggctggagtgcagtggcgcaatctcagctcactgcaacttctgcctcctccggggttcaagcaattctcctgcctctgcctcccgaatagctgggattacaggtgcgtgccaccaagcccggctaattttttgtatttttggtacaaacgggattccaccatgttggccaggctgatctcaaactcctgacctcaggtaatctgcccacctcggcctcccaaagtactgggattacaggcgtgagccactgcacccagcttcaaaacttctctatctcaacaaatggttccaccacgtacccagttattgaaaccagaactcatgtgttattaattcctcctactcctatgatacccaaattctttttttttttttttttttaggacaaagtctcactctgtcacccaggcaggagtgcagtggcacaatcttagcccactgtagcctctgcctccaaggttcaagcaatcctttcacctcagcttgccaagatgctgggactacagaagtgtgccaccacgctaggcttatttatttatttaatttatttttgaaacagagtctcactctgtcgcccaggctggagtgcagtggcacaatcttggctcactgcaacctctacctcccaggttcaagtgattctcatgccttagcctcccaggtagctgggactacaggcgcacaacaccacacctggctcatttttgtatttttttggtagaaacggggtttcactgtgttggctaggctggtctccatctcctggtctcaagcaatccgcccacctcggcctcccaaagtgctggaattacaggcgtgagccaccgagccttgctgatttttttttttaa

SEQ ID NO: 1561675 - DNA, 4001 bp, Homo sapiens
cactacctttaaaagaataaataaaaagcacatggccatgctactaaaaacaagaaaggcagcatttaagagacagattctaaggtagagatgatttttttccccctaaagatctcaacagactcaaatccaaattcctaagctcaagatgatctgggataaacctcaagtccacacagagcctagatttaacggatggctgttctaaagtatcctatgcaatgtctatacaagttcaaatactttctgcttcagacagtgaaactggcagaaatgttgcaaaggattggagatgcgttactataagcagttaaacttggaactgtaaagcccacaaggaattacactgaagggcagagcaggagttcaaaaatgtcacctgacagattcgaagcaatttaggactcctaaatgcaatgtttcattggtatctaccccccaccttctctatcctttatttgttcaacaaacatatactggattctgggttgtggaaaggaatgcagggaagtaaaaaagaaacaggtttctaagaatcagtttcttgttctccaataatttggtctagttaaagcaaacaaacaaccccaaaaatcagatcagcaagcaaagttaaaacatatgccttaagtaccataacaagaatataagaaaactgttttaacatgtagattggcaacctcctttcaagggaacaatatatttgctttgctatgtggctagaataagaaaaagcaaacaacaacaaaaccctctcctgttttaatgacagtttagcagtaccaaagctcatcgctcgcattccccctctccctctccttctcaaaggtctctgctgcaacccctccatcattccaacctccacactgcgccggcgccccacaccagctccatcacaaacaatgcccagaccaacaagatcagcaccaaacgcatagggcacagaaatcggaaacggatcttcctatatctaaagggggcggggaacgctccccacgatcaccccctccccatactgaggtagcttgggactgtgtctctacggtaaggggcctggcgtccgccgctttcggaggttctaggcctctttcccctatttatccagtttttcctcctgcgtccctaatacctctacttcctcccaacccgagctccctattgtggagtgagggggcgtcgcgatgcaggctgaggcagggggagctggggaaacgcgcgacaggggagatgctgtcattatgtacgtagggggcgggggacactctttaaggaagccgttgtcaagggcaaaggctctagagacccacgggagggggctttctaggtaatccatttgggggttctacacgagggagctattgtgtgtgtggaggtgtgaggtctgtagagtagcagtttctgagggaaacattccctggggaaggcgagtgagttattcatagggaagcctctgtggggttctgtgtagaagaatccttcctgggagaaacgttctatgggggtgaggacgtcataacagtgtcttcacagggaatcgctgtccctagggaagccattgtggggaaaccgttgcagggttgtctgtgggggagccattgtggggaaaccgttgcggggttgtccaaaggggagccattgtggggcctctacagagggcgccgttcctgggaaaaattcctccctgagccgttcagcaaagaaccgtcccgaggaagccatgtcggaccacgccctgcggcgggaggcgtcgccggaccccgacagcccgcatcccccgcccggccgcccctcggctgcctctgccccgcgtacctgacggagggtgacccgcggctggagccgccaggggaccgagcgcggggcagcccctgccggcgcggggggtacacgtccatggcggcggacgactggcggcggaggaggacggtgcagctgcgagggtctcagttgcccgcagggcggctccacgctagctgcggccgggcggggcggcagggcgtgccgggtgggagggggcgcggcgcgcgggcccggcgggggcgggggcgggggcgtggagggggcgcgcgcaccgagagcggatgggggcgttgggagcggctggagttgggggtcggcgcacggccacagggaccccacttcttaagctgcgaggccgccggaccggatgttgggagcgcgtgtccgcagggtgagggttgccacagcgccgcccggcctcgtcctcaagcccggcatcatagagcggggctctgcgcggcgccccccggccacgcacacggacgcgcccgggggcggagcctctcccagcccggccccgcccctccgcctctgcccgccccgccccgcccgaccagccccggcctccagcgaagtcttccgctccggcgtcaggatccagcgcacctccccagtacccagcgcacctccccagtacccggctcgcttccctgttctccggaacggtgtcttcccgcttcctggtcatcaattccgcacccacccttcaaacatccaatagattcctagccggcctcgggttagcgcagcagtgcgcacccagccctgcgcagggcatgagcgttagaggcgcacaggatcccagaagacccctaacctttactgttaagatcctagctctaccggtttctgcagggacatgtacaagaaacttgggaaatactgcactgatagttgccaggagtcctgtatatacaggacgtatttaatgattattggcctgcgtccttcgttgacctcgtcggaatgccttaaatgtcctgtattcatctttttacactaaattgcaataattagagctatttttctcccacagtaattggtgctagatcacttaaattacaacactggctgaaaatccttcctacactaatgaagatttggacaatccctatggtgtctccttcaggtttggctgagggaagaccagaagggagtaggaatttaaagtgctcgtctttcatattcaagaaaggaaaatacttttttagctcaagtccggagtcgtgaacaaataaccaccattatttagagataacttctcgtcggtgcagcagctctgaaaatcagccaatcagcgatagcctcactccggtaactatgcttcttagtaaatcaatgacaaccccacgcttctgaaagtcagccaatcagtgaccgctctaagcctccgacaatagccaatcaacaagtgcctgacaccagcgaccaggcttccgaaagtcagtgggtactcagctgccgcactccacttctgattcggaaagacagccaatccctgaaggcgaatatttccaaaaccatttttttttctttcccagactgagtctcattctgtcgcccaggctggagtgcagtggcgcgatctcggctcactgcaacctctgcctcccggttcaagcgattctcctacctcagcctaccgagtagctgggattacaggctcccgccaccacgcctggctcatttttgtatttttagtagagacgggttttgccatgttggccagactggtctcaaactcctgacctcagttgatccgcctgccttggcctcccaaagtgctgggattacaggcctgagccatcgcgcccggccttttttttctttttctcctttttttttggagacagagtcgcactctgttgctcaggctggagtgcagtggcgtgatctcagatcactgcaacctctgcctcctggttcaagcgattcttgtgcctcagcttcccaagtagctgggattacaggcctgtgccaccaagcctggctaattttttgtatttttagtagagacagagtttcgccatgttggccaggctggtcttgaactcctggcctcaagtgaatcgccagccttggcctcccaaagtgctggtattacaggcgtgagccgcgcccggccttcaaaaccttttataagatcagctctggctttgttcagagaggctgtaccttacaagtaccgctctcccttgcaa

SEQ ID NO: 1561676 - DNA, 4001 bp, Homo sapiens
catttcccagatggagcctgaggctaagaagcttggttcttgttctcatccagggcttgagcccagtgctgagccgagtctgaccctctgtccgtgggtgcaccggctgagtgcagctgtggccccaggctctgccgcagctccctggagagcaagccgcacccctggttgctgccccggctcccagcaaccctggagatctcaggttgtcacagccacttgggccttggacgacccacaaatgagagctaagcagttgctgagttccccagggccacacaggtacgtggtgaagtcatatctgcccgggaagggttgcccttttgggcgtgaggcagatatgacttcacgagcgcactcctcgggaatccctcgagaacaggcccctgggggcagcagggagtgtgtctggggtgaggtgccagctgagagcaggaccccaggaccccaggcctaagccctgctcttgctggaggctggggcggatttcaccgctggagggaaaccgtgcctctgtgacgtgtgagggatgttttctagtctccagcagctgcccaggtggaacacccagagaggctggtcgtgaacccggaaaggtggttctgagcccctcgctgcttcctacacgccccggtcccaggcccgcttccctgagaccaccaggtgcccgcactctaccccctccaccacactccccttggctcccctggcccgggcccacctccccggccgctctgcctgccccttaccttctcgagacccccagccctcctctcccggcccccgccgccgccccaggaccgcgcccacttgccctgcctctgaagcggagccgcgcgcggacttcccagagcccagcctccctccgcactccgcgggttgccctggggaccagcggcctttgtgacgctgcggcccgggggcggggcgggggtggggacccgggaccccgagccgagtaatcttccatccgcttcgcttcctggagagccccagacttctgggggcccgcgtccccgactgaggggccacggcgggtggctggtccaagagccaggctccaaggggggttcccgtcccggagcccttccgcgggcgcaccactccccacgcacccccggcttcgggcggggcgcaggagcctcgggtgactgggagggagttcctgctcaaccccccagtccgagcgcactcctcgggaatccctcggaggaatttgggagagaggcagtggccggtgaccaggcggatggaccacccagcgcctggacagaggagaggggcggcttcccccgccgcgggctctgcccagcaaggccccgcccattacagatgccacccattacaggctcctcccaccgcaggctccccccaccgcaggctcctcaaccacaggctcctcccaccatgggctcccccctcccccgcaacggcccctcccatcataggctcctcccaccgcgggctccccccaccacggcccctcccaccacaggctcctcccagagcaggctcctcccaccgcgggctcccctactacggcccctcccaccacagggtcttcccaccacaggctcctcccagcgcaggctcctcccaccgcgggctccccccaccacggcccctcccatcataggctcctcccactacaggctcctcccactacaggctcctcccaccatgggctccttccacctggggctgcccaagctcaggcaccgacctgactctggataaatggggtctccatagctccagggagccccgcaggggagctctgaggccatctggtcccgtctgtatctgttcagttgggctcagggcctctgggatccccccgttcccccacagcacaccccagctagctgggggtctcctggggtcacaatcttagacaccccaaggtgcccctccttcaccttcaggaagatgctggaggaagacaccctttccatcctcctcatctccacccccacggaggtcagtgctggggcctcttccaggatgggcgtctttgagcccctaccaggctgttctgtaacttgagcctcccccctcctcccggtgaccccaccctggaagagctttcccttggtgcatggaggccccaggggttaggcctggcaggaagtgggtggatgtgggtggttttttttttgagatagcgtcttgctctgtcacccatgcggcagtcttcacccccggggctcaagtgatcctcccacctgggtctttctgatccttccggattacaggtgtgagccttgcacccagtcctgttgggtgctgtttctgccctgccctccctgcctgggctggaactcaataaatgccagctattgttattgttatttagggctccaggggacaaagccggggttgtttggagaagggggtgctgtctgacgcggagggttgggaagcagtaggagttagaccccttacccccggccctgcagcccactgacggagaagcggggtgggggcagagcagcctccccttctcttttggggccaggcaggtcctggatgtctcccctctcctgggctccaccctaccccctttctttcaatttctgatttctaatctaattttttaaagttaaacttttggccaggctcggtggcgcaggcccataacctcagcactttgagaggccaaggtgagaggatcccttgaggccagaagtttgagaccagcctcggcaacacagggagacccctgtctctacaaataatttgaaaaattagctgggtgtggtggtgtgcacctgtggtctcagctacttggaaagctgaggccggaggatcacctgagcctgggaggatgaggctgcagtgagccaagatggtgccactgcactccagcctgggtgacagagggagaccctgtgtctctaaaaagaataataatggctgggcgcagtggctcacgcctataatcccagcacttcgggaggctgaggcaagcagatcacctgaggtcaggagttcaagaccagcctggccaacatagtaagacccagtctctactaacaatacaaaaattagctggacgtgatcgagaccatggtgaaaccccgtctctactaaaaatacaaaacactagctgggagtggtggcaggcgcctgtagtcccagctactcgggagactgaggcaggagaatggcgtgaacctggaaggtggagcttgcagtgagccgagatcacgccactgcactccagcctgggcgacagagcgagactctgtctcaaaaaaaaaaaaaaaattagctggacgtggtggtgggcgcctgtagtcccagctactcaggaggctgaggcaggagaatcgcttgaacccaggaggtggaggttgcagtgagccgagattgtgccactgcactccagcctgggtgcaataagacagaggcctgtctcgaaaataataataataataataaagttaaacttttacttttaagataagtatagattcatctgcagttgtaagaagtaacacagaggtcccgttaccctctatccagcatccccagtggtagcatcttgcaggactgcagtgcagaatcacgccaggaccttgacgtcgatacagacgcaaggcagtgccacccccacgggaccctgacatgttctttacagccacgctgctccctcccacctctccctagccctgcaaccactcatctctccggctctgtctggtcatttcaagaatgtcctatcagtgcaggctttcagtatgcagccttgggactggcttcttgcgctcagcatagtcccctctgtgcagggtcaacagtcactcctgttcactgctgggcaccaggggccagtttgtgctcagtcttgctcaaccctgtttgtggccaccagggcacgggcagtgaacactttggatctgttgtccctggtggggacaagctctcttccctgggccctgaggatggtgaagcctgggggtagtggggccagtcttgggggagagaatgcacgctga

SEQ ID NO: 1561677 - DNA, 4001 bp, Homo sapiens
ttgagatggagtctcactctgtcatccaggctagagtgcagtagtgcgatctcagctcactgcaacctttgtctcctgggttcaagcaattcttgtgtctcagccttccaagtagctgggattacaggcgcacgccaccgtgcctggctaatttttttatttttcgtagagatggtgtttcatcatgttggccaggctggtcttgaactcctgacctcaagtgatctgcctgccacggcctcacaaagcgttgagattacaggtgtgagccatggagcccagcccatctctagtcatggcacctagcccatctattctctgaggctgctactcacacttcatctacgtaacaaggaccttgaaccacacaactcccttatcttagttcaagcattcttttctactgacttcaagtctttagacaaagcttaactctctcaagcaactgtcagctaaagaatccctaaaatccacctaagacttctaagaccacccttggacatatccacctttttgggtctaaccaatgtataccttccatgtattgatttatgtctttgcctgttaactcctgtctccctaaaatgtaaaaaaaacaaactataacccaactgcctcgggatcacttactaaagactttttgggtttgtgttttctctctgggcgatggtcaatcatactggctcagaataaaccgctttaaaatagtttacagagttttatttatttgctaacagtctgacacatgatacaaagacaagctttgaaaatattatacatagtataagaagatagccgggcgtggtggctcacacctgtaatctcagcactttgagaggctgaggcaggttgatcaagagctgaggagttcaagaccagcctggccaagatggtgaaacctcgtctctactaaaaatacaaaaattagtcgaacgtggtggcaggcgcctgtagtcccagctactcgggaggctcaggcaggagactagcttgaacctgggcagcagaggttgcagtgagccaagatcgtgccactatactccagcctgggctacagagtgagagtcatgagactccgtttaaaaaaagaacaaaagtcatgaaagaagctagtcacaaaaacattgacattatacttaatgaaagaagccagctgcactgtatgatttcatttatatcaaacgtgcgaattggcaaggctatacagacagaaagtatactagcaattgtctaggacttgaggcggagtggacgtggtgaatgtagaatgactgctactggaggcaggatttttctttggagtgatgaaagtattctaaaatgagatcacagtaatagatgcacaattctgtcaacaacaacaaaaaaacccttaatgttaccctttattatttatttttgggtacgttgtcttgctctgtcttccaggctggagtgcagtggcgcgatctgggctcactgcagcctggaactccggggcacaagcgattctcccacctcagtctcctgagcagctggaactacaggcgaatgccactatgctaggcttgatttttttttacgctttaaatgggcaaattttacttagtaggtgaatagaaatttcccaagaaagctgtttttttgtttgttggttttttagcagaacctcctgaagtggcaggtcactgaaaaaatttaaaaaaaaacaacaaaaccgaagcttatccatactcactatccacaaattcccaaaattccccaaagcacaggctgcagacaccgtgtgttggggcggaaggggcggggagctagcaggaaatcctgacatgcctaggaaagcctccataacttcctaattgagagagaacgatcagatgcattgctgtgacccccgcccccaccactccaacccccccccatcccatcccgcgcttacctctcctccaaagcactccagaaaactgaggagaaaagccgccaagccccccgacacactcaccatccgcaaccggaacgcggaagcaatggcgccatcttttttatgggaaatgtgaggttcgaaggaagtcaccggagccatccttactgcgggcagtgaagggcaatggaagccggtcgcggccatgttgactgaggcttttggcctgtcaatgaggcttgccacatgtggctattttgggcaatttcctgaggaggcttgtcgataaatgtgcttggtaaaccctaagggaacagaaaaaatattcaaaaatttaaatgttggccgggagcggtggcttacgcctgtagtcccagcactttgggaggctgagacggatcacttgaggccaggagtttgagaccagcctgggcaacatagggagacactgtctctacaaaaaaaatttttttttaattagcgaggcatggtggcacatgtctgtaggcccaggtagttggggggctgaggtgggagaattgcttgagcctgagaggtcaaggctgcagttggccatgttcttgccactgcagtccagcctgggcaacagagctagaccttgccttttaaaaaaaaaaattcgtctgggctcagtggctcacgcctgtaatcccagcactttggtaggccgaggcaggaggatcacctgaggtcgggagttcgagaccagccttaccaacagagaaaccctgtctctactaaaaatacaaaattagctgggtgtggtggtgcagcctgtaatcgcagctacccgggagactaaggcaggagaatcgcttgaacccagaaggtggaggttgtggtgagccaagatcgtgccattgcactccagcctgggcaacgagagcgaaactccgtctcaaaaaaaaaaataaataaaattcaatgtcttggagagggtggggtggcatgcccctgtaatcccactgctttgggaggccaagatgggaggattacttgaggcaaggagttcaagacccacctgggcaacacagtggagaccttgtctctacaaaatggttttgtttttttttttttgagacggagtctcgctctgttgcccaggctggagtgcggtggcgccatctcggctcactgcaagctccgcctcccgggttcacgccattctcctgcctcagcctcccaagtagctgggactacaggcgcccgctaccacgcccggctaattttttgtatttttagtagagacggggtttcaccgtgttagccaggatggtctcgatctcctggcctcgtgatccgcctgcctgggcctcccaaagtgctgggattacaggcgtgagccaccgtgcccggcctacaaaatggttttaataaataaataaataaacttgaatgtctacattttaaaaatatgaaaagtagaaattaaagatgaggatgaaaatattgtaatattctgatgcatgcagataactacataactgccacaactgcaggaccacaaaaaagagactgtctaaagacaaaattacaaaattaagatttagcttaaagatctaattggcttttgtttacaattctagaatcaggcagcatctcattctataagattgaatgttccaatgagctgagcagacaaggttagcttcataggcagaaaaggggctaaagaatgcagaaagagatttgaacaaaaagcaaattgatcgtccttttttttttctttttttttttgagacagtcttactctgtcgtccaggctggagtgtcctggtgcgatctcaacttccatctcctgagttaaagtgattcttgtgtgtcagcctccctagtacctggatcacaggcgtgcaccaccatgcccggctaatttttgtatttctagtagagacagggttttgccatgttggccagactagtcttgaactcctgatctcaagtgattttcccgcctgggcctcccaaagtgctgtgattacagccatgagccaccgcacccggccctgcaaattgatcatttcaaagttactttccttgtagggttaaaacagagaagacttccttattatatttactc

SEQ ID NO: 1561678 - DNA, 4001 bp, Homo sapiens
gccttatgggattattatcaagaacgccctatttaatgatggggacatgctgccccacttccatccctgggccttggtgcacaggccagaaagtccgagacagaccatctgtcctccctacaggggaccaacttgcacaaacaaatgggcatcagcacccactgggagcagccgtgacccctgggtcctcggtaccagccacaaagccagttctgagtttgttcagaatcctgcttagaatgaaggatgctcctacaccagagatctcttaatacgaccaccaaacaccacgggattttcaaaggtagctgccacagccgccgcacacaagctctgttcctggcttgcttctgccatctgctggccagttgataaaaggcaccgggggttattttccagtctctctgaggctcttgttttgtgggaggaactcatcaccacctttatcttcacaagggctgcttggcagacctgtcccataagtagtgcaacttgggaagatcctaggcctcttgtgggtagggcagtcatccagtcctgcatcttatgacttcacacgttacaaacgttaacttgctaaacactcaatgtgaaacctaggagtaagggacaattatctttactatctacaaacaaggatgttcaggcacagagaggctcagtacattgtgcaaagtcacacagctacagagttgtgaagccgagattggaactcaagcaataaggcactttgatggcaggcaccttaatggggggtgggggaacaccctttaccaacaaccatgcaaatggcccaggtgctcctgtgacccctgatcccaggggctccaccagagcaccagagagagagggatgtgggaagagcagaggacagaagaggacacgtgcatctaaccactcggaggacaggagaaggcaccctaaccttctgagctgccatcttccaatcaggaggaggggagcactggatacataatctcaaggctttccctacagttctctcaacaggacagacaggcaggggtgcacagtggttagagcacaggctttttggtcagacagaactgggttaaagatcagacacgtccactcactctcaatgagtccatatctgtaagcctaagcttccgtcctcacacatgttgataaaagaaaaagaaaaaaaaaggccaagtgcaaagcttttagcattgtttctggttcagggtatggacttaatactgttttctatcattataaccacactaaaggctctgagaagtcctgcaggaaggaaaactacttgtctttatctcagccatccccaagctagctgcccacagagccaccatggagcccacagctctgtcaccccacagggcccatgtgcctggcccattcatgttccctcacacgggagcctcaggccccagtggaaacagactcaggagacaaacccaggcctcctgctcccagctccccactctgtccttctgcttctacatccaactacccccaaagcagtttctacaatccataaacaaaagaattcagagacaattctccagggctcccaagacgacatatttcatctgtggcttctacagtgcttatttgtcagttttacagaccagaggcaattaagagtctaaggccgagaaggctgtttttaataattctgtcattattctcaattttcagcaccaccacacatgaaaaacccatttccaattcccttaaaggtgttaaatggtttttgcactgtgttgcaaaagtttgccgtccgccaaactgctacaaagtgggcttgtagcgtccggtcctgagctgtgggaacgacttggtcggggctgatccgctggagcccagctctttccccaagcgttcaattcccagcacatgccgcgtgggtcactgtggatttcagggtggactcaccgcgctgctgggtgttgcagtccacgcgatttcacaagactccatgcaggacacctccacccggcccaggctcaggcaggatatgaacaggaaaccactgtttcctgccgatcaacacccaggaactgatgaagtaacccagtgcccagcccctctgacagccacagagccaagaagagggaagtgaggtggcatccaaggcagcccctgaaagaactaagcaaggcaagttcaaggggttcagggctctgcagcagctgatggggagcagggaggagcattccgttttcagggcattgaaagtccttgaaaggagaaaattttataaggaatgacaaggcctggatgcagaaggtgggagacccctgcccttgataaccgtcatagttaccaatgacaactatgataaagagatgactttctgtggctcccacttgctgccctctgtggttccaggcacatcacagagaactcttcattttcatgaggccccataaggacatccctattactatgatccttatcaatatcctgatgttacaaatgagggaaccaggacacagagacgctgaggaacttgtctgaagttacatggtggagacatagcctgggacgcagcagtgagagggacagacgagccctgcccctgtgcaccaagccatctgctggggacgcagaaatcaaacagctcgtggctgcccttgtgcccagcgctgtgggcatgagcgagctgctttgaagagacagcgtggtgacctgccctgctggcccaggcagcatcacacggcaagaaggcgggctttgaagggttttaaacagagtcgtgttcccacgtctgcagtgagagggctgcaagcctttgtgtttttcacacggtgttacacagcgttggggtccacggacctgcctcggaagctgctcatgggcaaatggacgaccacgggtggggaaggaaatttcccccaaacacacacatgcttcacccagagcagccaagctgtttgtgtgtttgtgtgtattcacgtgtgtatgtgtgtgtgtgtgtcttatgcctaatggttcattgagtttaaggatctctcagctcccttgcagcacaaatgtttcataatttggtggttagcgcgcagtgaccaggcaatacaggttcatcaaaatgcaccaatgagacagagacaggagaggatgttttggcagcagacagacatccaggaggcctagcacacccccatcccccggccccaacctcagagagataatcaggggagcaaagggcattagtatgaaacgaccaaagagacttagcgagcaacgtcagactccctgcaacacgcgtgctgatgggacagagggggagttatttttatacttcagaaataaccaagcattctgcatgcccaaagccagtttgggttttaaatacctttcataatttttctgactatggaggtaatacatcctcagggcataaaatttagaaattatagaagagtatttttaaaaatccaaccattgagcaataaccattataaaaatcttactgttttcctttcttgtcatttatctaggctcatacagatatttggggcttttttcacaaaactaggaaaatgttaaaatatatattctaatattgtctcgattttattattagatttatcataaccataaaagatttgaacacttttaacgacagcgtattattccatttccatggaattactgtaatgaatctcctactgttgggtttcagttgcttccaaatttgaatgtaaataatttgggggcagttctcactccatcaatggcagactaggttgaatacagccgaggttttgcaggcacacactatgcccaaattaaagccacagcccaggatgttggccatggagagatgatgctttcaactgtatcaactcttgaagctggtgaaccatggcttctccccttcaggcgctggcagaccttctcctcacactcttggctctttgctgggctgacaactccctacttgccctgcaggccttccctgagctctggggtcttctttctgcccccttccatagctccccgtggctgccaca

SEQ ID NO: 1561679 - DNA, 4001 bp, Homo sapiens
atgagtaacactgccaagagaatatgtagctagaaagagagatgtgaggccaggcccagtggctcccacctgtaatcccagcactttgagaggccgaggtgggcagattgcctgaggtcaggagttcaagaccagcctggccaacatggtgaaacccggtctctactaaaaatacaaaaaaattagccagccgtggtggcatgcgcctgtaatcccagctactagggaggccgaggcaggggaatcacttgaacccaggaggcggaggttgtagtgagccgagatcgtgccactacactccagcctgggcgacagagtgaggcttcatctcaaaaaaaaaaaaaaaaaggaaagacgtgaagcaaaggtgtagtcggcctccctcagaacactgggacgactcaggctgcagagcgagtggtcctgggcccattttttcctaattcctcagaaaacattcactctgtgttttctcgattttagggttttcctcctgcacatatttctgggtatgcgcctacaagaccacagtggggttcccagcacggaggtggtgatgaggcatccaggcacccacagtttcagggagcataaggaagacagctgcccagtgctggatgcctgctgactgtgggaagctgcagtccctgctgctggaattccctggtcccatgagaaaccctactgggtcagcccttcctctggggtgatgacagggttgggtcccagctggcctgttgcctggcaacccagaaaggtcatttttggacaatcctgtctgtctctccccaggatgagaggtgtgtatattgagaaacaaacctcttctgaggttccctgagctgcctcctctctcctggctggtgtccccacacacttgggggcacccctcttttttcggacttggagaaaataccataatgaaaggcataagcctggcttcctgagcagcaaccacaggaccaagtaacataacatcgggtcaggagagttagtgctccatgggggaggcccttgccaatgggaaatgagagacaggaacgagctgggcagatgaatttcctctcgttctctctcccccaatgtgcagttcctccttcaacccctgcagagcatctcagctgctgagacacccactgggcctccttaaggcaacttctgaagccgtaggctgcttggtaatacaatgtctggcgtaattgcctggcatagcattggcctctgctgccacaccctatgttcctccctatcaccacccttggcttgtacttccaaataaagtgctagtttctcaatccttgtccaagcctctgctttctaggggacccaggctaagacattgggtgtacgcatgtccatctgggtcagggttataatagccagcaccacggtgccaagtattcattaagaggattacaagcatctcttcagtgaatccttacaataccccatatgatattggtactattgttattcccattttgtgataaggaaactgaggctcaaagagataaatcccctgctagagccacacagaggactcagcacacacggaggactcagtgtcattctaaaaccagtctggccagcaccacacccagcacctcccatataggccacgacctacttatccctgaacctgagatcacaattgtgcattgtgtggtaggtcccagaggggagactgcagggtccataccgtagcctgcagcctctgccccaggggggacccgggaaggaaaaccagagatctttggaaaatatgtagtcggggcatcaaggaaaagcaatgcaaaaccttaccagctcctttctcagccactccaaggtctgcccaagactcgggctgggctcttctgctattttcatctcagtgttcttaggagtgaccttgacactgacctggttctgggcccgagggatctttgacttgtacattcccccaactctttcagactggcagcaggttctggccaaatcactgaagatggagttaatgagagcaggaagtagctcacattgaaaaatgtaatctggctttttttttttttttaaagggctttagtgctctgaacagaacaaggaggaagggagggagaccattatgggtccgagtaccttggagcctgctgttccagaagccaagaatatgtgatgccaacaggatcacagagaatgcaaagctttaaatggcaacaatatggttattatgaaaataggcactcttttctaagggtttgctttgtgctttacatataaactatgtatatgtctcatttggcatatacctccacgggtgtcccaagtccctgtcctcatttacttatctatagagtccagataaaggaaatgctcactttccaagtttccttgtttctggaatccccatgtgacccatttccagcaaatgagatcaaagcagcaatttgctgttaggcttccagaaaaacttttaccttcctaacaaaagggaaaatgtcactgctgcttcccttttactcctactttctcccttttccttctgccttgaatgtggatgtaatgtctggagctatggtaactgtcttgcgaccataagacaaagcccaagaaaatcacagagccattagaaatcattgcacccctgactcggcaacagcatctatatgagaaaacagacccgatgtctaatggaacactctgctacttgcaggcaaacacagtcctgacacaccatttattcttcccattgttataggaaaggggtcccaacccagaccccaagggagggttcttggatctcatgcaataaagaattcagggggagtccatacagtaaaatgaaagcaagtttattaggaaagtaaaggaataaaagaatggctactccatagataaagcagccttgagggctgctggttgcccatttttatggttattttttgatgatctgctaaacaaggggtagattattcatgtctcccctttttagaccatatagggtaacttcctgatgttgtcatcgcatctgtaacctgtcatggcgctggtgggagtgtagcagtgaggatgaccagaggtcactcttgtggccatcttggttttggtgagatttagccactttctttactgcaattgttttatcagcaaggtctttacgacctgtatcttgtgttgatctcatcctgtgacttagaatgccttaaccatctgggaatgcagcccagtgggtctcatcctcattttacccagcccctattcaagatggagttactctggttcaaatgccactgacatcatcacaccgtgaagcaggtattcaattctctctttcgctaaacacttattgaatgtctactgtgtgccgagttctgctctagacactggggttatcaaccaaaatcagagaaacaaaggccctgctttcctggagctgacatcctagtagtcattggaaacaaacaatcaaattaatgctacgatgaaaatatgtagactctattctcacataggtcttttaaaatataaatttattgggcaggcgtgatggctcacgcctgtaataccagcactttgggaggccgaggtgggcggatcacctgaggccaggagttcgagaccagcctggctaaacatggtgaaaccccgtctctactaaaaatacaaaaattagccgggtgtggttgtgggcgcctgtaatcccagctactcaggaggctggagcaggagaatttcttgaacccaggaggcggaggttgcagtgaactgagactgcaaatgtatatatataaatttattctattcacatgcactagaaactccaaaccaagaattagcatagtgaccccagataaagatgtgaaatgactggcaaagcaaactcagccgagtttagggaaacttgccctcaatctggctacacaaaatatcctcagatagagctcccctgaagatgaactcatataagaacacacaaggaagccattcaccataaatgagagtcaacagacaccattcacccc

SEQ ID NO: 1561680 - DNA, 4001 bp, Homo sapiens
tctcagaggagctttctgggctctggaagagagaggaagaggaagacatggtgtccctttccggatgtggggtgggagtgacacacaggagtactgcagcctcctcccagcactcagggaccaagccagagagatgtgccagcgcctcccaagggagaagccattctccagcagctggacaggaccagagcctgccccgcatgtccggccggggttctacccagagccagcctggcacagcctcggtccctaatcatgtttgctgaatgccttgaatacaagcgccggtgcccagaatctccttgaggtttcagctgggcgtgccgggcccatcccccactctggggagcagaatgattgtggggggtggtaacaggggacaccctgaggtggtggtggccttggtaggacaggcaggcagagctgggggtgggggcgccctgggctcggctaattaaacagcgaccgtgatgaattggagagaaactgctgcttgctaattaaaggtgcaggcaacttgcctggcaaggatgggaggcagaagtcctggaaacatgttgaggtccaggccagcgaggacagagcttggccaaagtcccccaccgtgcccattctgggcatccctcccattgccctcccccgcccagcaggggcccgcagccccctccccacttccctatctctccgacccaccttgctgagcctgaggcctccaacttccccccacccctccccaccaacccaaatcctttcctgataagggcctgggtgttgcggaggaggaggctggcgctggtggctgggctgggggtggactcgctgagcctttgaggtcctccttcccgccccaccgccaaggtcccagaggtgggcagtgagtccagccaagactgatgtggcctgttgggaacaaggcccccaagaagatcatagaatcttagtacctgagactcgcaaggggctttaggtcttccctaatttcccaacagtccccagtgtcagcccaggtgtgggagacagggacagcacttcttacccggctcagcattccagtttttgtaaagggaaaactggccaggcgaggtggccactgcctgtgatccagcatgttgggaggctgaggcaggagaatcgcttgagcccgggagttcaagacaggcctaggaaacataggagaccctctctctaaaaaaaaaaaaaaaaaaaaaaaaattagctgggtgtgttggcttgcgcctgagggttcagctactcatggggtagctactcaagtgggaggatcacttcagcccagaaggttgaggccgtagtgagccatgatcgccccactacactccaaagtgggcaacagagcgaaaccctattcaaaaaaaaaaaggaaaagaaacgagaaaattggagcaaatgatctctgagccttgaagattcttacagggtggacaagaaaaccccctgaagctgctcatccctgccccaagtcacttcaaagcagggctgtaggctcagacacctttaccaaccaacgtgacctcaggcaagggagctcattgtcacatgcctgggtttccccatttgcaaggctggggatggcaacagagcccacctcaaagggtctctgagaagactggaggagataacaaaggtgaagtgtccagcacagcaactggtctgacctgaatagccagccactgccatctgaaaggtctggggaactggggggtgacctggcacctagcctgtccgagtcttacctcttcatgtggcagctgcagtctggcactctgaggaggaggattagagagcttaagtgacttctgcaaagccacaccactacggaagaggaagaggcagccttggatcccttgagtgaggagaggatgggacctggattcctatgttgacatttgttgagcatctactggatgcagggtcctgaacaagaccccaggaagggactaagatgaatctgagattcactctgcctttaaggggaccccagtctggaaggagagagaaaacacacatacaaataactagaatgcaaagcaaatgtggctggatgcagtggctcacacctgtcactttgggaggcttaggcaggaggatcacttgagatcaggagttcgagaccagcctggccaacacaacaaaacctcgtctctactaaaaatacaaaaattagctgggtgtggtggtgcacgcctgtagtaccaactacttgggagactgaggcacgagaatcacttgaacctggtggggcagaggttacagtgaactgagatcgtgccagtgagctgagatcatgcacttcagcctgggcgacagagcaagactccatctcaaaaaaaaaaaaaaaaaaaaaaaaaagcaaatacccctggcatcagagggggcccagcagccctccatgcaaaggggctggggtgagactcttgggatggcggggagatgctgctgtgtcttggagctcaatttgcaaggcaaaggttttgattttatttgaacgataaaatcagccctgggggtcatgggggtgctgatggagcctcctctggcttttttgggaagttctgggtggtccctgacctctgtgattcctgcttcgaaggttctgggatctatcctggaggtatctaggagtcccggatgctgtggtttttggagactacactgtccagacccccagcatgaatacattcacgtccacaaaaaacagtgagggcccccttccaggtagccagacacgcaccagtttggggggcttcctgctgctgggcaatttggtggggagaggatgcagcaccagtgagaggccctctcagagatggtggaagcctctcaaggctgagagatgcaaggctgctggccccgatgttgcaaagcctgagcctcaggcggcaacccaaagcgggcagggtgagtgctaggtcactggccttggggatggtgcctccgtcactcccttcctggagatcagagctcagccagaggagcgggctggtctagccacaggaagtctgtgcaagcacagccagcagctcctggaaaataggcgctgctctcagcctccccagggcaccctgcacccaagctgggccaaatgatggtctggggcgccctctggtggctcctctgggcagtggtggatgctgaagccactgtgaatttaagggtgggtggggcagagatggtcagagttggaagatttcaaggtggaccactctttccactacacagatgggaaaaccaaggcccagagggaagtgacctgcctacagttgcacagccagtgactaatacaagaacagaacccagaagttcctctgtaccaatgcttttttttagggggtctcaagacatcccaccctaggggagggaaggctgagtgtccagggctcactcccagtgcatatggacagctgaactgtaggtcgctgagtatctgtgtgacatagcatgcagcacttccctcccaggcttggttctttgcctctaaagcctggggttactgtgttggcaagggatgggggactaggcctcctgcttgcacactgctagaactgagggtgtaaaccagccaatctttcggggagttctaagaagagtgttcctacagctggtatcatacttcatggtgagagattgggtgctttccccaagaccaggaacaagacaaggatgtccactcttacggcaaagttgaattcacgacttgtattcaacactgtactgggtacaatggcaagaaaataaagtcatccagattgcaaaagaagaagtaaaactatccctacttgcagatgacatgatcttatatatagaaaatcttggttgggagcagtggctcatgcctgtaatctcagcactttgggaggccaaggcaggtggatcacctaaggtcaggagtttaagaccagcctggccagcaaggcaaaaccatgtctccactaaaaatacaaaaattagccaggcgtggtggtgtgtgcctgtaaccccagcta

SEQ ID NO: 1561681 - DNA, 4001 bp, Homo sapiens
atcacatctaaaaattcatcctgtagaaaagacagaaaatgcaagaattatctggagtgggtgccacaagacagcaaaaggggagaatattaaacctttctgctaaacatatccaggaaatttgtttccccccaaaggcaacagtatgtgcttcctgtttcacctcttacttatactaaaatgtggtagaaatgatacatttaggggctgggcgtggtggctgaagcctgtaatcccagcactttgggaggccgaggcgggtggatcacctgatgtcaggagttcaagaccagcccggccaacatggtgaaaccctgtctctactaaaaatacaaaaaattagccgggtgttgtggcgggcgcctttaatcccagctacttgggaggctgaggcaagagaattgcttgaacctgggaggtggaggttgcagggcaacaagagtgaaactccgtctcaaaaaaaaaaaaaaaaaaagatacatttagacatcattaagcgatcacttccagaatctgtgctctaaatcaaaattctagaggtgcatatataatatggcctgtaatgaaatgactgtgataataattgtgctactggccgcacatacggattagaaccataaatgctggaggcaggtgccactatatttaagtttaatggaagaacacagacgactcaggtttctgatctgccctagattccagaaaccagtccttatacaagaaaagaaagaaatgacacagcagattagagactgcaggttttgcaagagctgggcagggctgggggcagaacaagggcaccttcaggaagtgcctcccatccccctttacaggaacttcaggaaggaaaatccacttcggcagcccagaaaaccaagaaatgactgcaaatataatacgcttttcaagctacctggaatcaagctgtttgtgatggccccttccagatcatggagcagagttacgaagcatcctccgaatgggacgagtaagaacgttctgaagtcccaaccaattctcgcacatatctggtggcgtttctccacccccacacctcacactcacccagcgggtggtctcagtctcccctcttgactcatgcttatcaaagtattcggtcctttacattcaacaagcaacagcagctcaagattagcgagcctcactatgtgcaaaaggctttaatgtaccacagtaccccacttcagagttattctgagttaaacgagattccgcttgcagagcacctggcacgtagaaagcattctcagcagaagtctgttactgttaatgtttgtgctacttaattcgaaagaaacaagtaacctactcaaaaccctactgcacataaaaggcggaggccgaatcgaattcagctccctttcccagttcaggcacaaaccctgcccgcgaatgacaacgcctctccccgctcctcgccaattccgcataactagggggcttcatccttaggccacccttcggggagctccaagcccagctgtccgcccagtgcccgccaagtttgctctgacacccttgggccacccgccccactgccctactcgattgtgccggaacgaggacgagggcaggcccgcgccagtcttccgttccccgagtcccagccgactcctcgcacccgcgccctgttcagactccaccgtaccttatcctcccaggccgcgtcgctccgcagcaccttactccagacggagactttgagggccccgttggccagctgcggctgaggcggctcctccttccgccgcccgccgctcatcctcccgtcgcgccgcccgggccgggcctggggcgcgcgggctgagccaaagggagtcggggtctagggtcgcaggtcacggcgcggggcggctgcaggctcagcggcccggtcctgcggcgcgctgcggttcctcacaacctggccaagctacccggttccgccggctctacagagcaggcgccgcgaagggaggggcggtgcagtgtcgcgcgccctcccgccgacgtgctcacgcagccaatcggcgaccgcgaagccatccgagtgaaacagcgaccggcgccttggcgcaagcgcgctactcgtggcggaaatgacgtcagcatccgccgggctcgcggtaaggtgtgaggggagggacaatcttggtagaacggtgacatgggcgccaggaggcgctgtggagaccgaggaggtaggggaaaaccgaggctggacgtcagcgtcgcccagtcggccacagctgcccctcgagcagcgagtggggcaggagcggctctacctttccttgcgacctactcgcctgctgagcccagaccttgctccagggtagctccaagctgccccacaggatttagcccgcttattttctcccctaaccctgcaagttctgtagggccttgttgaagatgttaactcttctgtaataactaaccatttcatcttgcccagcaccctcttttggcacacgagagccctgagaccccaaaagaggaaatgagattctgaggccgtatagcaaggtggacccaaccggggactcctgggcggcaaatacaaggattgggttaggtatcaggatatctgagtgttcacatacagcgtcctcaccatgtgctgcgtcagtggttcacaaagtgagcttccggatcagcagcggccgtatcgcctgggaactgggtagaggcgcaggttctcggcccccattccacgcctactgactcagaacccctggggatggggctccttccggtggccctccaggtggtgccaggctcactgtgctggtaagtccagagaccaaggcacatcccttctggacagtggatttttttttttttttttttttgagacggcacggtctctgctcactgcaacctccacctcccgggttcaagcgattctcgtgcctcagcctcccacgtagctgggatcacaggcgcccactaccacgctccactagttttttttgtattttagtagagacgggggtttcactatgttgcccaggctggtctcgaactcctgagctcaggcaatccgcccatcttggcctcccaaagtgctaggattacaggcgtgagccacctcacccggcctctggacagtggatttataaagacaagtaatgtatctggtacctgggtgtgtctgactccagaatctgtgctcttaaccgttaaactttaaagctgagagtatcttttttttttttaaacaggtcagagtatcttttgcatacctatcaacattcacctgtaattcttcacttttcaggagtaatagaacctccctagggaggccaggcgcagtggctcactcccataatcccagcactttggaaggccgaggtcggtggatcacttgaggtcaggagttcgagaccagcctggccaacatggttgaaagcccgtctctactaaaaatgcaaaaaaaattagccgggcgtggtggtggggacctgtaatcccagcttctcaggaggctcgaggcatgagaattgtttgaacctgggaggtggaggttgcagtgagccaagatcgcgccattgcactccagcctgggcaacagagcaagacttggtctcaaaaacaaaacaaaaaacaaacaaaaaacctcctagagagcttttccagaatactatagctgctgttttccaccccaagcccaccctgacattgtttcagtagattaagtggggctggacccccaaggtgaaacatactgtgatcacgttactgtctggaactggtggaagggccgtatacgttatatgggtgcactccttttgtcctaagtttccccgtgggtcttgttcttttcagccctgcctcttttctgatccagtttccctcccatatgaaatggtaaagcttagccagttgaaggaaatcaaaatattttaccccaaaatatggctccctagtataatgactattttagtttagtttttaagacagggtctcactctgttgcccgtgctcaaatgcggtgg

SEQ ID NO: 1561682 - DNA, 4001 bp, Homo sapiens
agagggggtcacaaggaagatgtgcagaatgaacatcctgggaaactgggaaatgactagggaggaacatggtgcctccccgccagcaaaaaaaattatacccttccccatgagatggagtgtcagcaagcttccaggccccagcccagggtgcaggaagaggagctacacccattcacctctggtcagcatgctcccaacgtctgagacctcatttctcattccttcttcagtccccattctcattgtggttcgaggtctttctctctgagccaggaactccgcaaccttccaccctccctacctcttcctctcctaccccagcctggggctcagtcctggctcaagcactcagtccagcagaagcactgtgtagcctcccattaaagctcacgcctgtgaaaagaacagccattgaggccttgagatggggccacactgacccgctgactctcaggactggacacagcagaggccacacatactcagaacaaagcctggaaaggcaaggctggaggtcagtagttgtggcagcttcacatcaactcagctttaatgtgatttaatttccttctccctccagtgggccaaaggtgcaaagataagtatggctgttctctctccttctaacagtgaggtgctgggggtgggggtgggggaatatggagaagggaccctcaccacccacaccttcctgcctccccaacaagtgctgccctcctctgcccagcattctccccactttgccctcagctagtgggtgcttagcctccagatagcatgccccacctaggccctgccctgggcctgtgatccagaggtcccaagaagcagaggccaggctggatccagggggtcagccaaggtgagggtgggagcacacaggattatctcccagggacagggctgctgcctcgtagctcaggatggatagaatgtggggggatatccagctacattttccctccacaaaagaccagaatgggagagggatggggtgctgccccgactttcttcaactccccggagcagaaaaatgccctacctccactttccagtgccaagattcaagaagaaaggcaagcggagacttccctttctcagtccctgcttactaatggaaacacgggtccagaacctaaatccagtccctcctccttcataccaccgggagggaggtgcagcccaagcccccgaggccccaagggtccaggtgtaggaccctttatcctctccggcagccatccctgtgggtgtggcacccccgccacaccccattcttgtcatctcagggggaggggggaaatgtaatcggacatcccccccatccaatccatcctgagctgcgaggcggcggctctgtccctcggagataatcctgtgcactccccaccttcactcacctcggctgacgcaggagtctccggagcccgcactcccagacatcactgccctccttcctgagggtgctgaggctcggaggctcagagatgctactggtccaaggtcatgcagcgaggcagcggcaatgaacagggtcgtggggaggagggggcgctgaccccattacgcccccgccctcactaccgcactcatgcccccggacaatcgcttcgcggaaaacaccccagctgcaccagctaacggtcactgcgccccgggaacctgacatcactctagttcaggtgctggggagtcctccaggcccggccccgacagcggagccccccaccccagccctgccatcacggccgctggggtcccaggcactgactgctcaggacagggccgggaccgggaggggacctcggcgaacgggaaggaaccgggaggcagggagcagaggggtggcctcaccttgcggggtgcaccccggggccggggagggcagggacgaccactgcagcggcggcggctgcaggagctcaacgccgagcacgaggaagggagccccgcgccgcggccgccctcccgtcggcacgcccccgcctccgcccattggttgatctgggagggtggggcgagggacgctccggaccaatgagcgggctccaaagaacggccaactggcgagggccgcctacgtcacgtgccagggtcgccgaggcagcgccctgctagtccgcgcctgccgggcgagctctcgcgaggaagacgggcaggcggcccaactaggccaggggccagaaccgaccactcgaagagggagaaggagggcctcggataggccccgcccccgctccttcttccgcctgggggatagcgcctctagccttgaaccttgcttaggacgcacctcccttgggcccttcgctctcgggagggctgtcgggcgcgtctcggggctgggtggagctcccgaaggtggcctttctccctgggcttccacgccggcttcggccatcgatacgggccgtgttggtctcgttcaggagctgaggaaccctccatcactcctgtttcgaccccagggtttggacctcttccccttccaccccatcccctgtctcgaaagaagcaacccccgtgcgggcccgagacgcgtcccgggtgcctggcccggcctggagaagcatcagaacaaagaaggcacgcgggctgggggctgggagagcctgtgacgcgcccccggggaccgcagcctctgctcccggtctccatggaggcggtcgccatggcagcgagatgcgcctcgctcagcaccgcggggtgggatgtgggcgcctgcaatgagccgaggagcgagaggcgtggccctccggtctgcgggggttcttgccggtgctctccgcccgccggttcgcgaacaccccacctatacttcgcccgtggggacggattccccaaagtgccctcagtaagccgtccggagcacgcagcgccttgcttccaacggaactagagagacggcctgggcggccgaaggccagcctcccttcagcagggccggggtcgctgccttaaaggagccctcaagtctgccaccctgtggcccataacctgtctgctgatctccagtctgcacactgttggcaaattaatctttctgagctcttgttttcatcgcgtccctctcctgctccaaagccctctgggactgcctccagtagcgcttcacaaacttcagcagcactttgggtgactcatgtgccctcgcgtttgagagacagcgcttacattgagagcttttcacattctgatctcagcccatccactcctgcccactctacccactcccaccacactacctttagaccttgtcttgaaagtctaaagttggcagacggtgggcccaaagtggcccgtaggtgtattttgtttagctcacatggggctttttaaaagaagtccttccccctcctgcctcctccgcctctttctggaatcaggaatctggtttcgtggcttttgaaatatcagaagatctgacaacatgggctcactttccagcctggcattacaagcccctttaagagcacataaatttaccatagtccccgctaatccctgtttctcacggttagttaccttctgggtctgtgcagacatttgtgatcccctccccctcattatcccaccttccaacctggaaggccctccccgctctcttctcatagccaaaattcaagccctcttcaaccaagataagttttgcctatttatttatttatttatttttgagacagagtctcactctgtcgcccaggcttgagttcagtggtgccatctcggctgactacagcctccaccccctcccccgccgggttcaagccattctcctgcctcagcctcccaagtagctgggattctaggtgcgcgccaccacacccagggctaatttttgtatttttagtggagacagggtttcaccatgttggtcaggtgggtctcaaactcctagcctcaagtgatctgcctgcctcagcctcccaaagtgctgggattacaggcatgagccaccgcgcctggcccaagcctgcctttttcaaaagtctttctag

SEQ ID NO: 1561683 - DNA, 4001 bp, Homo sapiens
gagcagatcacttgagcccaggagtttgagaccagcctgggccacatagcgaaaccgtgtctctactaaacaccaaaaaattagccaggcatggtggcatgtgcctgtctgtagtctcagctactcaggaggttgaggtgggagaatcgcttgagccctaaggtcgagctgcagtgagccgtgatcgcaccactgcactccactttgtctcaaacaaacaacaaagaaagatacagaagccatagtttcttcacccatgcccctgggcatgtcattgtttcccccagtttttgcctattacaaataaaactgctatgaacactcatgttcatgtctttgagaggacaaacgctttcattatgcaggaatacaattgctggtcacataagtgtgtgtttaactttttaagaaactgcaaactacttcccagtctggcctttttaattatagtcattttagatgcactcattttttttaacctgtggatctaatagatggtttcttagactgtctggacctcagtgttttcatgtgtaaaatggagataattggccgggtgcagtggctcacgcctgtaatcccagcactttaggaggctgaggcaggcagatcatgaggtcaagagatcgagaccatcctggccaacatggtgaaaccccatctctactgaaagtacaaaaattagctgggcatggtggtgtgcacctgtagtcccagctactcgggaggctgaggcaggagaatcacatgaacccgggaggcggaggttgcagtgagtcaagatcgtgccactgtactccagcctggcaacagagcgagactccatctcaaaaaagaaaggagataattacatcagttttgaaaggtagtgaagacagagtgaactagcacataagcacatatgcagcacatagaacagggactgggacatagtaggggttccataaacggtgggtttttgttgttgttgttgtttttgagatggagtctcgtgcagtgttgcaatctcagctcactgcaacctccgcctcccaggttcaagtgattctcctgcctcagcctcccaagtagctgggattacaggcacgcaccaccatgcctggctaatttttgtatttttagtggagacaaggtttcaccatgttagccaggctggtctcgaactcctgacgtcaggtgatccacctgcttcggcctcccaaagtgctggattacaggtgtgagccaccagcctggccaagggtgattattttattacaattgaaccacagccatcctatgatctggccacttaccccaggatacagcatcctcaactagatggcaaaaagccacttcctttgcacttagtcagtgctgttagcctggaggaataacaatggcaccatcgattgtgccaggcactatcctaggtgcttttgtatgttgaatccttgcaaagccctgtgaggtgggtcagtgtttgccttctgtatgacagatgagaaaactgggatgtagtaactagtcattggccaaggtcacacagcagtgaagtaatggtgctgtgatttgaatctatgtagtttgatttaggatctagaagtttcgctaatggattacctagctcagaactagtgaaagagcccagtcacaaaagcacctcctgatgcccaaaatcattttcagctcctcagacacagagcctgaagcaaagattaggtactgtgtgatttataaaggaaagaacctgtaagggatgaagggaagcaagacagggagggaaacaagaaaagatgtggtctcaggtaaagtctagcaaaaaggctggctttgtgtacctctgtacgagtcagctgttggctgccagccaccctgtgggtgaggggaataaactccagggtgaggtgattcctgagatggcagttctccgtagaaatggaaatagtaagccattcgaagccaacaactgaagcatctggggggatggtgttggtgtgctagcccatgaagggctcaagaggttcccagaggcacacttcttgcctgcctaatgaatcaagttctagaacattctggaacattcacttcctagacttgttttggagaatcctccttctcactgagaccagcatgttgaacaaacccagcctgtgacataatcaaagcataccttaatttgtatctcccagtgtcctttctaagatgtatttggtagagaaacattttccctgccactgggtgaaatctccccattattcttctgcttgttctgaggaaacaggcaattctatggtcactttaggtcacaaacacaacctcaatttagaaatgagaatgtccagtcaagcttctaaccaaaattcccaatttgatttgggtttaaaccttctcccctcaccctcaggcctgcttcagggaggtggtgtgggtgactccttctctatctctccttccctcacccacccgtggggtacagtggggggtgttggagatggcaaggggagaggaagggtctcccttgagctgccaccatcctggctggcttcaagctgcccctttctgtcgtgggctccatggagatggccactgtcacaggggccctctcactcttaaccttgggggatgcatctctcctcataggggtcccttgcaagtccttcgtcagcccttaggaacccaacatccaactcaagcttcttgctgctgccacacctctgcccctccaggaggctctaggggacaggacccaagaggaccccttgtaggtgctctctgccaacactggcccatgggaaacactccagccagcagcctgtactccgaaagtcctgggaatgtggcttaccttagcacgcccacactggctccttcaccagttcagccaggcagcccgtttctctcagcctctagatgtccatgcccacatgagaccactgggccccctcataatggccacacattattctctacatatagtggcccctctcatggaagagcccccatgaccccattccacccttccagggagatggtcaccaaagaactctttgcttcctcttcccatcctaggagaatgtggtgggtataggggtaatagtaaatgtgggggttttgggtagccatggccaaattttagcagctgtgggtttggactgggctcttttttgttgttgttgttgttacgtaaattaacccatttattacaggccagtgatgtctcaaagagtagaggagcgtctactggtctttcaactccttcaggcttctgatggcggactttaccgtgatagcggaggtggtattgtatgtccaggcaccgccagccactgtcttcacgcgggaaccacagtgccagatccccgcagctcatctcttcatcttggttttgccacagaaagagcaagtgtacttggcctgctggctgatttcaactttcttcaccattttccagagggaggccccatagcgggtcccgtatttaccgacgatcccgactttcttggtaggtttggccatgtcaccgcgaactaggtccgagcccagagagttggactgggcttttaaaaaacagttactggttgtcacagcagagctttctagaaacatcttacaagtcatgtccaccacccccagcctcagttttttcatatccttactgcgggtggcagcaccttactgggtgggggtttgtggtgagggctgagtgaagtagtgaatttgcggagctaacactccagaattccacaatcacagacctgcaaattccatctccgtgggaccatttacaagtgatgtggcttctctgagtctgtttactcctttgttaaatggaagagcctctactccattgcatctctgtaaggttagttaagtgaatacatatgacatgcttagcacgggacctggcacctggtaagaactcagtccatgctgggcgtttttaatacaacggtgggtggctggtactgacggaggggatttgggatctccaccccttccgtttccctcactattccagg

SEQ ID NO: 1561684 - DNA, 4001 bp, Homo sapiens
caacgtggcagaggtgatactgcatgactttctaggcttctgctggtttcttgcagacttctgccccttgtgagaagttctgacaccccaaggtccccatgtggggagaccagacagagatgctcagggatgcccggattcccagtgaggaatctctggagagggccgcagacactgcatgtctctgcaaacacatgggagtccctgagcaagaactgcccagtggagcccagttgacccccagatccatgagcaaatcattgttccggttttatgccactgttttggggtggctcattatgcagtattagataactggaaaatcaaggctacagtttctagcaaggaatggtgcataggggtgaactgcagctcccccacttgccacccggttgtgaccttggataagtgctctgatgtccctgcccagctttttcatctataaaaatggggatcatgttccctgcctcctatgattgctgccagattaaacacctagcacagggcctggatggtggcgggtactcagtcaatattgatggagtaaataactgcttactgctcaacggggctcatagggtgaattccggctgggtagagctcggaggccaaaaaatgggcagatgggatgactgaaacagtgctgtggttcagcctaggctacaaattatggctgttagagactgtgtgtgtgtgtgtgtttgtgtgtgtgtgtgcatgctttcaaatcttcctttaataaggaagtgaggaagtggagacctttttttttgccctgttgcccaggctggagtgcaatggcgcgatcttggctcactgccacctccgcctcccaggttcaagcaattctcctgcctcagcctcccgagttgggattacaggcacgcgccaccacgccaggctaatttttgtatttttagtagagacagggtttcgccatattggccaggctggtctcgagctcctggcctcaggtgatctgcctgctttggcctcccaaagtgctaggattacaggcatgagccaccgcgcctagccccctttgtagtcttgattgatgtgtgtgaaacccatttcctggagctctcaggggaacactttttttgtgtgcagatccctatttcatgaagttgcagggacatagaatatataatttgtttggggcattgctttgagcaggctgataaaagtggaagctaaaaaattaatgtagtctcctccctcagatcctgtagccagcctgtttgggtttcttccccatctctgcaacctgaagggaaggatcttcctttttttgccccatacgatccacaggaaggatcttccttttaacaaacttcttcttgacaaataacacacataatgcagaaggtgcatgcatcctgtgttcatcttgatgaagtttcataaactacaggcacccgtattttcataaaccaacttccagatccagaaacagaatcccttccagcaccccagatgtcccttctcctctttcttgtccctacttagtcctccaacccagggaaaccacaattctgacttaaaaataacattgtttagtttccccagttttgctgtcccataaacaaaatcatgcactctgattttgtgtctggattcctcggctccacactgtctctgtaacactcacgcatttgttgcacatcttttggctcattcatcctcttagttgtatcacatgttattttatgactataccacaatttatttatctgttctactgttgatgggtagtttccagatttgtgtcccatctacctgtctctccagcatgaaacttatctaacttacctctccagcatgtggcttaaatacctggaacatttgcttggaccatgaaggaaggaaggcaggttctttataaattcaaatccatcctgtccggttgcccacactgtgctgagtgtcctcactggctgctccagcctctcccacccaaatggccagacttcaaggagtggggggtgagaaccctctcccttgtctgttccaacggccagtgcctgaaatctcacttcgggagggcccttcctttcccaccgttaaaatacaacaacccggccaggcaccgtggctcacgcctgtaatcccagcactttgggaggctgaggcgggcggatcacgaggtcaggagatcgagaccatcctggctaacaaggtgaaaccccgtctctactaaaaacacaaaaaattagccaggcgtggtggcgggcgcctgtagtcccagctactcgggaggctgaggcaggagaatggcgtgaacccgggaggcggagcttgcagtgagccgagatagcgccactgcagtccggcctgggcgaaagagcgagactccgtctcaaaaagaaaaaaagaaaaaaaggaaatacaacactcactccacccagaagacatgttctccaaagtgagccttctatgtcacttgtcccgaaagaaaagaaaagaacaagacttcctgattgataactgatctgggccaggaatgcagcagcacttgatgtctgagggaagcggtttttcattgaagaggggaggaagacgaacgtgccccaaagcaaggtggggactttgactacaaactcagtggggctccgctttctgcctgtcgctggctcgttttatcgggcactgcgattgaagcaggagattagatttgggacctttaactcaacctaatcccaaatgcacctttattttatgtctcactgaggaagaactaacattgcaatggaaaactatggcatcctgctttctttagaattttattttcaacttatttgaatgggctttatatttaattaggtaaaaatttttataatatagtacttgggtgaatataaaaagaaaaatataagcaaaataaaattggttaatatattctaaatttcttaacattgacctgatttttctgattcacttttgactcccaaattgttgttgcctgtggtctctccactcctctggcaatgtcatcctgagtgccatgaagagccttggtaatacagtaattctgttctttaattttatctttaactaacaaagaatgattgcatatatttatggggtataatgtgatgttttggtatgtgtgtacattgtagaatgataaaatcaagtaaattaacatatctatcacctcatgtacttatcaatttttatgataagaatatttaaaatccaatctttaagcaattttgaaatatacaatgctatgattaattatactcatcatgctgtacaacagatcactaaagttttgaccctctgcctggctgaatattgtactttttaatcaaaatctctcttttctccatccacccccatcgctgagcctttgataaacaccatcctactctctccttctatgagtttgccttttgtcattcatgcacgaactaaaagcattggccctgggttctgaagctggttttgcagcctgcttctgattcctgctttgaagagggctcctgaaggcatattttcccttctcactcccagaccaattaggagaggctccaggatttccatgcacatggcagataccactctgctgggtttgatgctggtgcttttgatattcatgcatgtaacaggcaaaggcaactatatggcatgactacttcttagaggaggtggttgtaaggaagctttgatatatactaagatgcattccaacttcagaactgctaagatacagaaaaaagtataaactagaatcaatgcaaaaatcacagccccatccctgcctgctggtcagctgtgccatcccccagaatcacggcctcccagaagcatgcagccttgtcgtgagtcataacctgtgtctgaacacttgatttatcttcctctttctggaaagactgtacgtaaactgattacattgctctactccccacttccctccaaactaaaccaagtaacacaattcattggcttttctggagcaagaggagagagactgatatcagcattcagac

SEQ ID NO: 1561685 - DNA, 4001 bp, Homo sapiens
gcatatccctaccccacagtttcggagaccctggtcaactctttgccctgggcagtgagcatctaaggcagagtctatttcaatcaagatgtaacataagccacaaacatgagctgcatacacaatttgaaatgttctagtaactacattaaaaagaacataagaataaacaggtgacagtctttttttttttttttttttttttgatggagtttcgccttttttttgcctaggatggagtgcgatggcacaatctaggttcactgcaacctccgcctcctgggttcaagcaattctcctgcctcagcctcctgagtagctgggattacaggtgtgtgccaccatgcctggataattttgtatttttagtagagatggggtttcaccatgttggccaggctggtcttcaactcctggcctcggcctcccaaagtgctgggattacaggtgtgagccactgcatccggctgacagtcacttaaataatcttttttttttttaaataaatcatcgtaatttgtcacgcagtttacacttaacggctgaacccaatttggaccagttacaatttaagtgttaggtagccaagggccctattcaaagaggaggggtcacttagatttgggtcttgaaggatgagcagaagtttgtatggtgaagaagagaggaaggggcatttcagacagagggaacagatcctgctgtggcagcatctcctattgggacacttggataaagatttagtaaaaaatagttgtgtattttatgccaaatgataaaggttttctatttatgagagtgatatgaagttttccataaaatcatcaagtgaaaacaatttaaagacacatatgaagtgactaatagaggttttacaaggaaatggtaaaaattatagagagggtaaataggataactgaagtttagaaggtaaacaagtatgttttattgttactacaacttacttatatctaaatctgtaaattcccatatgagttaaactttcaaagagatgcaataatacgtagcagatagcatgccaattaaaatatccacgacaaatgtctgctagacatacatcttttagaaaatggatgtatctttaaagttaaaatatattacttaaaaacccaggagaatcaagggattttcatgtacttcattcaaatttaacaaatattaggatttttgctttctttttttaaaaaaaaatttggccaggcgcggtgactcacgcatgcaatcctaacactttgggaggccgaggcgggtggatcacgacgtcaggaattcaagacctgcctggccaagatggtgaaagcccgtctctactaaaaatacaaaaacattagccgggtgtggtggtgggcgcctgtaatcccagctactcgggaagctgaggcagagaattgcttgaacccaggaggcagaggttgcagtgagccgagatcgcgccactgcactccagcctggaggatagagcaggactccatctcaaaaaacaaacaaacaaacaaacaaaaatcatcagtcttaaaaacatgaacacgttctggttggatgctgagatttgaagaaaaaaaaaaaacatgaacatgttagttggatttcaacaagccaatctctgctgattgttgaaagccaatctcccacgtcttcgtggtgggcccaacaggagagggagaaggagacggagaaaggccctcctgtcgctctcatgtccctaacattgacccctttcctcaaggcccctgaccatcctcagcgcacgcccctctgcccctcgagtttagtggtcgatcacttcccggacttggtggggaaactgagaccccagatgtggacacttcaggtgagaacaggagcccaccgcgttgcccgatcccaggcgttaccagatctcatcctgacccacaaggttcatgcgttcagccgccgcggtgctgagaggtttctgcgccatgaggcctgggggctctgtgcgccccgcaagctctggccctgggctcagcgtctcgcgtctcctgggagaccggttgccaggcaacgcaggactcggaggcggaaatggctctgcacctggcgagggtggggtcgctgtgctttcgccgcgtcgcttgggtccgggcttgctgccatcctttgctcacgtctgggccctttgtccacctctaggcccatttgctcatctgtggaaaaccttggggaaacctccagacctaacaccctagacttctttgaaagtttaaatccgcagtggaagtatgcacacctacgagtggacagacgctcaagtgtacagagcttaattgagtatgtcaaagagaggactcgcctgtaaccgtcacctggagattagaaaacaaagcattgccagcctcccccagtggcccccagggtcaccgtcctccctggctctcattgacttccctctgcaaagattagctttgctgtgatttgaactttgtgtgagtggaaccatccagatgttctcctttgtgcctggctgcctttgcccagtgtcatgattgagagagcatccccgttgctgtgagtggccctagcgtccatttctgctcctgaacagtatttgctgatgggcgttgcattgagtttttggccaccacaaaagtgctgctaaaatattactgcacatgtctttggagaaaatatgcgttttggttggcgtccactctttgtaacaatccctaaatgaaattcacggataatgttacctccagaccccaccaccccacactctttttccctgcctataggcagtaatcactctatcgctggggtgctcagccagtgttttttgactgattcattgaccccctaggtttctaccatacccccattgttgtggacccagagctggaaaatggctctgagacaacagcaaggggatcatctacacgatgtaggaggacatttttctggctgagcagccatgagatgagcaggtgtccagagcctgcctcgggggactgagagaggaggaagcatgactcagttgagctacaggtcacctcctagataattaccagggcactggtctgggaggatgccagtgtgtgtatccaccagttaggtatctgagactctccctagtccatctccatggcctcttcccttatcaacagatttgtacttatgtgtggtgtttagaggggagctcagctagtgtgttttcccttcatagcacatggtgcttttcttggctgttggaaatgcctggcccacgcccagtattagggtggtcccaactgtccctcagctggattagtgagtgggcaagcagaggctggcatcggagctgaattgattaattaatgaatatataacatcccaggtccacggctgagccaactgcaagctagtgggctagcaagagggtggacagatctctaggcaggaagctgggattttcttcctggactgttctccaaggtctccattcttacaacagaggggaagatattctgggaggaaataagtggatggctaggaagaaagatccattatgtagtaagaacaaattctgctttcctccttgggaggttttgagacatttctgttaagatgattaattaagactaaattcattaacagtgccagacatcgagggttccttcatcctatggacgtgtgttgagagcttttgatgtgtctggtgccaggagggagtcagacctgcaaggtctctgcttccctggagctggcacatcgagtgggaagacagataatgaagccaggaaacaaatgcacgtgtgacctggtgccagggagagaggcatgacgtgctaggaagagagtcacaccagggcatgaggccagtgggggcagggacaggccaggggctgtggggctgtgttaaacaggcggtcagggcaggtctctctgaggaggagacatgtgggtgcagatctggtgtggaagatcagaagaatttcccacagagcgggtggtgtggagtatagttcccgaggcaggagcag

SEQ ID NO: 1561686 - DNA, 4001 bp, Homo sapiens
tatacataagtatgctagattgtctatgaagttcatttcaggataccaaagaaatattacaaaatatttgttattaattctcacaacaatcctaggtggtattagtgtccccatttcacaaatgagaaaaccaaggctcagagagatgaatgatttttccaagtgagtaaatggcagagccaaaatctgaccccatgtctgcctgagcctgacccaaggcctcggaactcccctgtaaagcatgataatgatgtggcagagtttattctacgatttcaccaaaccttgttttcttttcctcctggaaaaacagatggactacatttcccaccttcccttgtggttagcagaggtcatgtggctaaattatggcccctgaaacatgagtaggagtaacatttgtcacttcaaatctggaccccccccaaaaaaaatgcccacataattgtccatgttcttgttctctctcttccctctatgccagctggatgcaaaagtatccagcagaagacttcaagaccttacaaaatatcagacccacaaggtcaaaggaacctggatccctgaatgaccatgtggaacagaatccctccttcctcagatccacaaatgtactgtggcataaatgagatataaacttctatatcaatacttgcaatttgggcattgtttattacatcagttagcctaccctaatataagtggtgtcaccaagagccaaaagcagccactctatcctgtctccaacccccacaccagctcccaggtgcctccgcccacctggttggaccctagtcaaagtcttcattttgcttgtatgaaggctgttggcttgttggactggaggcagagtagatggcttggtttcctgcttggactgctgccatggaacataatcctacaaaatatacaatcagtcacatagcaccatgagtttatatcccagctctacccttttcagatatctgtgaccccaagcaagtgacttgacctctcctgagcctcaatcttctcatctgtaaagtggatctaataataaaacctacttctgtggattggcgcaagaattctgagagatatttatgaagcatgtggtaagtgctccataaatgttagctatcacttttttaaatcagccagccagaatttactaagcacatccaggctgtgaggtgctaagaactgtgagaaacagaaggcatggaaaagacgcagacatccaccctcaggaaaccagagcagcaatcagatgaataagagagcagcataatatacccttacattctgataagacagtgagaggagaaaaatgaggttctgaggcttgctctgggtcccacagcaaagtgtgacccggctgggactggaattcgggtctccagcctatatccgcggagcagtcacgaccgtgagagtggagagcaggtggactgcagggccagcgagcctcccaccccagccctagtcccccaagactcaccggaacctggaactcctggactatggagtgagtcccagagtgcttgggtctggaaagagttgggaagggaaagaacttccattatccccagcccaaggggcagcaagcagcaattcgaaacaggattggagtctcgaaccagaaactgcagtttaccggggacaatagccccgcgggagtggggcggggccaaggagatgtgggcggggagaggacgggggtcagaagaccgagggcgacctcgaggcgagggcgggacagcggcggggtgtgaagtacgcatgcgtattccgcctttcttccaatttttttttttttttttttttacctacttttgtaagacatgcgccattggggaaaatggaagagaagttgcgagtctgtgagaccctgatcttctggtataactactcggcttttccaacttccttgtctcagtgtagatcgcgcggtaacccaggccactcagaagtcccgagacccgatgctttcgccagcgtctcggtctccaaggaaacgcgacgccgcctaccgagcgcctaaagggactaacctctcaaggcaaaatctagttcggcccgcttttcaattttcaaattcccttcagtttgctctgcccataatcctaaaatatgatatcatatttctccactctcatcaaacttccaccatttccttcgccatcttcactcttggctaatgagtttgcttccaattttactaagaaaattgtgggaatcagtaaacccacaagttcatggcatcatttactcgcctacttgcctccctcccgtaactacgtataaactgcctactaagaccaattcctacatttatgcaccgaatcctatcctctcacgttttctcaaagatattggccgagcagttctccccgttttttcctcctcttttctctctcctttgtatcatcagtataccaacgtatttttaaatttcttctatttaaaaagattgtccacagccggacacggtggctcatgcatataagcatgagagcactttgggaggccagaggtgggaagatcgcttgagccagaaaggtccagtctgcagtgagccacgatccagccactgcattccagcctggttgacagagcaagaccctatctctaaataaataaacaaaccacttcccctccagccagctcccatttctgcttcattttaaagcaaaactcctagagaggtttgcctactctgtttcccatttttttccctcctctcaatcaggctttcactccccactgaaactgccctcgtcaacatcattggtgacctccactttgctaaaccccatggtcacttctaggtcctccctttatttggcctgtctgcagcatttgacacaacagatcactccctcccctgaaacactttcttaacttagtatccaggaaaccactcttgagttgcttcctgcctccttttcagtctcctttgctggttcctcctcttctccctttatcattgtagtatcccaggactcagtcccagccccctcccttccagtctcatggttttgaataccatccgtacccagatgcctctcagactcacgtctccatcctccccctgaattccagccatgtacatccaactgcctgcttgggccccttataagcaactctaatgtgcaatatttttccagaaacatttttcccgaacttaaaatagggcatctctcttcttggaatcatccttaactcatctcttatcccacatccatcagcagatcctgttgcaataacttcaacgtatatctggaataggaccacacatacacacacacacacccctctttccttttgtaccccaactaaagtactagttcccacccttgccctacaccaattctctctctacacaccagatttgctagatagagcacggatttaaaagagaattccagtttaaaagataattgggcgggagcaataattttaaatcacttaaacttcaataggggaacattgctatagaataccatgtcagagctcccaaccttttctgcctcttaaaaatcacaggagaatgtgtttaaatgcactgtggtaaatagaagcagctgctaggataaaaagcaattagcccaggtactctggctattcaggcccctcctggctgaccctagagctgagggaatcactgtgttgggtaccctcatttgcagagcacaccatatgacagcactcttgctgggcaactctgtaccaggaaaccattaaaaagtaaaagataaaggccgggcacggtggctcacgcctgtaatctcagcactttgggaggccgaggcagatggatcacctgaggtcagaagttcgagaccagcctggccaacatgatgaaaccccatctctactaaaaatacaaaataggattagccaggcgtggtggcgggtgcctgtaatcccagctacttgggaggctgaggcaggagaattacttgaagcagggaggctgatgttgcagtgagccaagatcacgccactgcactccaacc

SEQ ID NO: 1561687 - DNA, 4001 bp, Homo sapiens
ttagggccttgccgctctgccctggagagtcaccaccttgttccatctctcccgccttcctgaaggagctggccatgccaaatgcatggggcctggctgccacatttgggcaaatccatccctctgccccaatcatccctctgaccctccctggagcagcggccaggcatgtccgtggggggacatcttgtggacaggcctgggtctgcaggcaccctcagcctggctacggccaggaacacttccaaggatggagtgcaccgcgacctgcgtgtgacgcaacctgcatgtgacgtcatagtctttgaggacagagtgctgtgttctgggcccaaacttccccaaccaaagaccttagaggaacccaatgcctccacctgcccgaaggccaggggcgtggggcaactctgatgacctccaggtaagcaaggagcacgtgccagccttgacccaagagctctgtgtcggcccctttgctgcacacctgcaggggctgcctctgggaacagccgcccagcaggcacttggacctgtggacagtggctccctttgagaaggaaccgcaacaagcagccagtcctgggcccagagcccacagtcactcctggaggtgagggctgtgggaggcagggtcacccaggtcctgtggtctctgggagaaggacacagggtgtcgggcagccaggggccatctgggcagggggcacacgctggacaggcagggctcatggttggggttgccctgggatgggctgaggtggttcccagaaatggaatcaaggcagggggagcagtggagacccagggtgtgacagacccaaagataccgagctgagagtgatgtggggaagggcggggctcagcagggaagtgacagggagaggaggggtgccagagaccagtggctgtgggatgggagatgtggctgtgcaggggcctctgggaacaggtgtcagtgacagtgccaggaggaccccggcccacatgctgggtctgaggaggtgggcatggacggtgtggcccggttcaaagaatgcgaagagatgcacagggctgtccatgtgtccctgtgtcccgggcactggtaccagtggatgggggtgggggcatgtccagaacccacagggctgggggtctcaggggtaataagggctgaaccctaaaacccatttcagagcactgacaacgtggagatccagaccccgtattcaggggctgggagaattcaggggacaatgaaccctatgtgtggggggtgacagggcctgaggaaaccctcagccagcccaggaacccccagttctgtatccaggactgacaaggtcccaggtgaacccaacccctgtgtcctgggctgatgagggcccagactgaccctgacccctgtgtcctgggttgacaggggctcaggtcacctgaacctctgtccagggctgacaaggccccaggtgaacccaacccctttgtcctggcctctgtccagggctgacaaggccccaggtcacctgacccccttgtcctgggctgatgaggccccaagtaatcctgacccctagtcctgggctgatccggcccccgtccccgtccctgtaccccgcgtcctgggctgacctggccgggcccccactcacctctggcgctgcccatccaggccgaggccggtgggcacctgcgtggggctgagcaggccctggggcgcgggggtcctggcgggcagcccggtggggggctccggcggcggcggcgctggcggttcgcgggcctcggcgggcggcggcgggggcttctctccgcccgggcccaggctcgggggccgcccgtccagggagatgttgttgaggaagaaaagcgcggcctggcggcgccgcgagtccccgcgcctccgcagcgcctgcggcggggcccgagcggccgaggtcggcgcggcgggtggcgggggcccggcggggccgggggccgggcccggggctccaccggccgcggccgcggccatcctcagactgcgcccgccgccgcgaagcgccccaccccctgcccgcgcgcccgcgcgcccgccgcccattggccgcggcgcgcccacatgcaaatgtatcgccgtcgcgctctcccattggccagcgaggtgccgcgctcagggcgctcccctgggtcctagaggcggtcggacgcagcagcagggagtcgggagctgcgcgcctccccgccggttcgagtccccgtcttgggacctgcggccgcggggctctcgctttctgttccctttgctgtatggcggccttcgcggatggcctccatcgagcgcacattttaaggctccggacccagggcggcgtgggtgaggccccagcacacttccctgtccggaggtgtgtctgggcggcgcttcagcgggcgcagggcggcccctggaggagccccaccgcttcccggaagggcccgcgtgccatctggcctccttcattgacagaagggaacgagggtctgagtggagaaggcacctgcttgggatcaaagccccaggcagagtcctgcacttcctgcagtagcaaagtgaccttgagcctgccttgtgcccaggcctgtttcctctctgtgcctgggtgcccctgacttcagaacctgtgagcccgtggcaccgggatggtcagggcctgcctctggagcccgggagcctgtctgcagtctggaggggaacccgctgtatctttgtggagggactcaggaccttgcacccacctctgtgtcacctgcctgctctgtccagctttctttcatgggtttacgtatctttaaagaggggacaatgatttcagcctcagggtactgtcaggatgaaactggctcagtgagggggtcgggctgtggccggaggccaggcacatgcagtggtcagtccgcgaatgcgctgcagtacctcgcacctgcccgcatgcgcccagcctctcctgtgctgggtgctggggacccggtgggaccgacaggcacagcgctggccctaggagcacctggtgtgtggggaggcagcatgatggccaacaaggcagtgggcgagtgggcaagacagggtcttcatcaccacccctagcatgggcccctgcccttcaggcccctacccacctcccgcctgcctgctccctcctgtgggccttcacgggccaccattggggctcacgcagcatgcagcacctccatttcctttccctccgcccttccaagttggcctccaaggcctctgccaggcctaggggaaggtgggcagctgtcctgtctaggagaacgcggggctgggtggcatagcagaggggtggctgcggattctggatccacagaatggggtgctgacttgtgtgcctgggggctcccgtgagcggggagtgagtgtgtccagcgctgtagggtgctgaggctggggcaggcacacagtgggccctccatccctgctggctatcaccaggaggaggggcctgacaggggagggtgggccatacaccagcagcttgcagagaatctggtgtcagatgagaacagaaaggggcgagtgagggtggagggcaggacgcaggaggcaggaggcagctgtccgtgctggctgcagcgccgggtcctggggatcggctgtgcagtaggggggcccctagccagttcttctttgctggcgctaagctagactttgagggacaaggaggaatgctgaggaaggaacggggtctcttcctgggtctggtgaacccccttgctaggctcccgctgccagtcttctcccctccccagggtgtcgatgggtggccaaaagccaacctggcctgcgggcagtgtgtagggaacacacggcttttgtttcgtgtgattctggagaaattaaagcaacctttaacacacctggacttccctcttgggagttcagtccctctggcctctcaggacaacaggcagacatgtcacaggctgcaggtgggaggcagtgccccctgagtcaggcccgcaccccagtctggcccagg

SEQ ID NO: 1561688 - DNA, 4001 bp, Homo sapiens
tcagaaagacaaacacacacacaaacaacaacagccagaaaagctaaaaaggataattttggaaaatgtgaatgtggactgaatagtagaatggcattattaaatcaacgtgaattagactgaatagtagaaaggcattattaaataaatgtgaaatgttcttgggtatgatgatatgtagatattcttctacgttctgtagatgaatgtccttgttcttaggagacacataatgaagtttaggggtggagcgtcattgtattggccatttattttcaaagagtttaacaacaacaataaaaatgaagtgtgttccagtgtctaaatatacacaaataaatgcacacaaatatgacaaagtaccagaaaccaatgatctaggtgaaggatatgcagggatttactgaataacccccacgcttcccatatttttccaatggtttgaaatttttcaaagtaagtagttggggacaaaattctagggtagctaagatatttacatataatctatacaagagagactgtcatgggttactcagtcacaaattccactagtgactttttttttttttttttttttttttttgagacagagtcttgctctgtcacccaggccggaatgcagtggtataatctcagctcactgcaacctctgcctcccaggctcaagcgattcttgtgcctcagcctcccgagtagctgggatcacgggcatgcgccaccacgctcagctaattgttgtatttttggtagatatggggttttttcatgttgatcaggctggtctcaaactcctggcctcaagtgatccacctgccttggcctcccaaagtgctgggattacaggtgtgagccaccgcagacagccacactagtcacttttattataatgaaaaataagcattgatttttataagcaagctccccatttactgcttgtttcatttcttttttcctgttctacttaaaatttaaaaagggcatagcaagatgaaaacacaaccttgagcttcactttctttatgtctgggtaaatttttttttaatatggtagccattttaacttttcttttcttttttttttttttaagatggggtctcgctatgttgcccaggctggactcaaacttctgggctgaattaatcttctcacctcagcctctccggtagctggagtacaggtatgtaccaccgtgcctggcttctttcacctttctaaatagtgaatcttttttgattcatgacaggcatgaagtctgtctgaaagctccagctttgctcacataatgcacaagttaacatgaaaataacatgtaagtgcccactgtgggctcagcacgggaggctgcaggcaagggtctgggctctgctgttgggaggtgagcacagaaaccaaataggacagttagagtggcactgagtgtctttggggtccagagaaagaaggaattagcgggggctgaggcagactcgcatcttgcttcaggagtttgctggacgcaaaatgatggacggcgctgtcaaccaagtaagctgatttctactacaaagtcattttcacccatcttggatgcaaactggtaaggagctttacaacacatctatttcccacacttaaacttatgttaaactttcccatctccaactcacacgtcactggtattcaacctttattagaaagtcacaactaaagctggtcaacacccttaatcatcacagcttgctccccgccagagcccattcaaacagccccacatcactcaccttgggcgcacagtccatgatgcctgttcccttcatgtcggtgatgtggagcagctcccctgagctctgcagctagtatctccagcttcagaggcagattgtgcaatgtcactgcatgcttctggctggttctcagaaactgaattctatggagctatctgacaacacatgggaaacgatcaaaaagactctcccagcaggcaaactttctggaaagcacgataagagtaaaatgaaagcagtgaagcaggggaggaccagaaatacaagccacactcacgtctcaatgcctgacgtctcactttgtctgtaagtagagactgtcactcatttgctatgtgaaaccacaaaagaagaagaagaagaaaaaaacaccactcttctgctttatagggcgaagttcctacttcgaagagctcagtgtatgaacacacagcattcttgtcctttgaactctgtggaacaactccaaccgaacagaccaagctcatttccctgatgagaggccactaggccaaatttctgatagcggtcagcatttcttccttcctgctccctaaaacttgccttatgacagccaggataaaagcagtcaaacaggctgccttaaaggacacagtctccactctacccaccctgtcagttgtgcattcaccctgctcggaaccccatgctcatctcctggtctttgctcatggtacctaatgaataacatcttctgggtactggctctgcactgagggctatgctgagccccgcacctgtattctctctcttaaatcaaataaacttatcgtgtgtgttgtacttgaaacccctgctagctcatgcagtttatcatcacttgccaactctttttacttttcctaaattcagatccaatctctagagaggacctacagcatagcagacactgagcaaaataagtctgcatttttttttttttttgagacggagtctttctctgtcactcaggtgggagcgcagtggcgcaatctcggctcactgcaacctccacctcccgggttcaagtgattctcctgcctcagcctccagagcagctgggattacaggcacccgccaccacgcctggctaatttttgtattttcagtagagacaggacttcaccatgttggccaggctggtctcaaactcctgacctcaagtgatccacccacctcagcctctcaaaatgctgggattacaggcgtgagccacaacgcctggccccggcctgcatttttatttagacaaaatggtgcccattcttccaagccaggctcaagttctatccccaaccagctgtgggggatagcttaccgctatcttcttgtcagacagcattttttaattttttatttttaaattttcttttcttttaccacacctctgaggcaagttcaacagatagcacttagcgtcttgtcctctggttgtcccatgtgtcgtccccacaagtctgggcaccaggatgtatttacccattgaagtagctgactgatttctggctgagacagtccacatttttaaatgttatcattgttagaaattaacttcagggccaagtaattggcatgctgcaggcgatagcagataacagggagggaacaatgaccccacgcaatgaacagtttggttcaaggaggagatccatagagatattaagatataaattatattaataataatatattaatattatattaagatataattcaggtaccataaaattcacctttatttatttattttttttgagacggagtcttgctctgtcaccaggctggagtgcagtggtgtaatctcggctcactgcaacctccacctccaggtttcaagagattctcctgcctcagcctcccaagtagctgggattataggtgcgtgccaccatgcccggctaatttttttgtattttagtagagacagggtttcaccatgttggccaggatggtcttgatctcctgacctcgtcattcacctgccttagcctcccaaagtgctgggattataggtgtgagccaccgcacctggccaatgcacctttttgaagtatacaattcagtggtttttagtacattcagagttgtgcaaccaccatttcaaaaagtaatcctctttcaattcctggacatttaccccattagcagttacttgttcttcccccagcccctggaaaccactgtttctgctgtattgttgacttttatgtctgaaattctctgtaatgaaaagg

SEQ ID NO: 1561689 - DNA, 4001 bp, Homo sapiens
aaatgtgaaatgttcttgggtatgatgatatgtagatattcttctacgttctgtagatgaatgtccttgttcttaggagacacataatgaagtttaggggtggagcgtcattgtattggccatttattttcaaagagtttaacaacaacaataaaaatgaagtgtgttccagtgtctaaatatacacaaataaatgcacacaaatatgacaaagtaccagaaaccaatgatctaggtgaaggatatgcagggatttactgaataacccccacgcttcccatatttttccaatggtttgaaatttttcaaagtaagtagttggggacaaaattctagggtagctaagatatttacatataatctatacaagagagactgtcatgggttactcagtcacaaattccactagtgactttttttttttttttttttttttttttgagacagagtcttgctctgtcacccaggccggaatgcagtggtataatctcagctcactgcaacctctgcctcccaggctcaagcgattcttgtgcctcagcctcccgagtagctgggatcacgggcatgcgccaccacgctcagctaattgttgtatttttggtagatatggggttttttcatgttgatcaggctggtctcaaactcctggcctcaagtgatccacctgccttggcctcccaaagtgctgggattacaggtgtgagccaccgcagacagccacactagtcacttttattataatgaaaaataagcattgatttttataagcaagctccccatttactgcttgtttcatttcttttttcctgttctacttaaaatttaaaaagggcatagcaagatgaaaacacaaccttgagcttcactttctttatgtctgggtaaatttttttttaatatggtagccattttaacttttcttttcttttttttttttttaagatggggtctcgctatgttgcccaggctggactcaaacttctgggctgaattaatcttctcacctcagcctctccggtagctggagtacaggtatgtaccaccgtgcctggcttctttcacctttctaaatagtgaatcttttttgattcatgacaggcatgaagtctgtctgaaagctccagctttgctcacataatgcacaagttaacatgaaaataacatgtaagtgcccactgtgggctcagcacgggaggctgcaggcaagggtctgggctctgctgttgggaggtgagcacagaaaccaaataggacagttagagtggcactgagtgtctttggggtccagagaaagaaggaattagcgggggctgaggcagactcgcatcttgcttcaggagtttgctggacgcaaaatgatggacggcgctgtcaaccaagtaagctgatttctactacaaagtcattttcacccatcttggatgcaaactggtaaggagctttacaacacatctatttcccacacttaaacttatgttaaactttcccatctccaactcacacgtcactggtattcaacctttattagaaagtcacaactaaagctggtcaacacccttaatcatcacagcttgctccccgccagagcccattcaaacagccccacatcactcaccttgggcgcacagtccatgatgcctgttcccttcatgtcggtgatgtggagcagctcccctgagctctgcagctagtatctccagcttcagaggcagattgtgcaatgtcactgcatgcttctggctggttctcagaaactgaattctatggagctatctgacaacacatgggaaacgatcaaaaagactctcccagcaggcaaactttctggaaagcacgataagagtaaaatgaaagcagtgaagcaggggaggaccagaaatacaagccacactcacgtctcaatgcctgacgtctcactttgtctgtaagtagagactgtcactcatttgctatgtgaaaccacaaaagaagaagaagaagaaaaaaacaccactcttctgctttatagggcgaagttcctacttcgaagagctcagtgtatgaacacacagcattcttgtcctttgaactctgtggaacaactccaaccgaacagaccaagctcatttccctgatgagaggccactaggccaaatttctgatagcggtcagcatttcttccttcctgctccctaaaacttgccttatgacagccaggataaaagcagtcaaacaggctgccttaaaggacacagtctccactctacccaccctgtcagttgtgcattcaccctgctcggaaccccatgctcatctcctggtctttgctcatggtacctaatgaataacatcttctgggtactggctctgcactgagggctatgctgagccccgcacctgtattctctctcttaaatcaaataaacttatcgtgtgtgttgtacttgaaacccctgctagctcatgcagtttatcatcacttgccaactctttttacttttcctaaattcagatccaatctctagagaggacctacagcatagcagacactgagcaaaataagtctgcatttttttttttttttgagacggagtctttctctgtcactcaggtgggagcgcagtggcgcaatctcggctcactgcaacctccacctcccgggttcaagtgattctcctgcctcagcctccagagcagctgggattacaggcacccgccaccacgcctggctaatttttgtattttcagtagagacaggacttcaccatgttggccaggctggtctcaaactcctgacctcaagtgatccacccacctcagcctctcaaaatgctgggattacaggcgtgagccacaacgcctggccccggcctgcatttttatttagacaaaatggtgcccattcttccaagccaggctcaagttctatccccaaccagctgtgggggatagcttaccgctatcttcttgtcagacagcattttttaattttttatttttaaattttcttttcttttaccacacctctgaggcaagttcaacagatagcacttagcgtcttgtcctctggttgtcccatgtgtcgtccccacaagtctgggcaccaggatgtatttacccattgaagtagctgactgatttctggctgagacagtccacatttttaaatgttatcattgttagaaattaacttcagggccaagtaattggcatgctgcaggcgatagcagataacagggagggaacaatgaccccacgcaatgaacagtttggttcaaggaggagatccatagagatattaagatataaattatattaataataatatattaatattatattaagatataattcaggtaccataaaattcacctttatttatttattttttttgagacggagtcttgctctgtcaccaggctggagtgcagtggtgtaatctcggctcactgcaacctccacctccaggtttcaagagattctcctgcctcagcctcccaagtagctgggattataggtgcgtgccaccatgcccggctaatttttttgtattttagtagagacagggtttcaccatgttggccaggatggtcttgatctcctgacctcgtcattcacctgccttagcctcccaaagtgctgggattataggtgtgagccaccgcacctggccaatgcacctttttgaagtatacaattcagtggtttttagtacattcagagttgtgcaaccaccatttcaaaaagtaatcctctttcaattcctggacatttaccccattagcagttacttgttcttcccccagcccctggaaaccactgtttctgctgtattgttgacttttatgtctgaaattctctgtaatgaaaaggaaggatggataaacttgcccaaggtcacagagtaaagtaacagacccagaaactgaattcaagtctcttagaaaagactccacagtaactcaagttcagatggtttccatcaacttggcagactcccggcagtgattcttccctat

SEQ ID NO: 1561690 - DNA, 4001 bp, Homo sapiens
atcccctgagttcaggagttcacgaccagcctggccaacatggtaaaaccgtctctactaaaaatgcaaaaaattagtcaggtgtggtggcaggcgcctgtaatcgcagctactctggaggctgatgcaggagaatcgcttgaacctggggcggggggaggttgcagtgagccgatattgtactactgcactccagcctgggcaacaagaacaaaactccgtctcaaaaaaaataataaaataaaataaaataattggccgagcgtggtggcatatgcctgtagtcccagctactccggaggctgagacaggagaatagcttgaacccaggagacggaggttgcagtgagccaagatcacacccctgcactccagtctgggcgacagagcaagattccgtctcaaaaaaaaaaaagcctttcattttacagagatgctgtacctttgcaagcctaaaagagtaatcactatccgcctctttagttggaaatttcatgaggaatggatcaaaccatcaaaagcagtaactgcaagctgggtgtatctactttttctatcttcaatccaacatttaatgggtgcaaaaaaaaagaagcgtaaagcctccctttcacgtgtttaaggacatcagctctgagactagtactcagagtaccttctgttactcagtttcatcctctgcaaaatgggcatcctcaaataatgtcttacttaggatgtcatcaagattaaacaattaaaaaaacatgcaaaacatgtttatctgtttcctcatttactatgtctctccctctcctaactaaactcaaaaccccagttcggtctatcttgtttattgtattcccagggcctggaatggtatttttaaacttactatatgatttaataaatattaagtgaatagaatgcaaaatgtctggtgctcaaaaaaatgttggctattataattacaataatgaaaaacaattaaaattttattgttcttattcagagaagccacccctcccccaaggatctcacacatcaaggaggaacactagataaatactggaatggctaaatggaagtaagaataacaattagatcatggagcaggactaacagacaacaaaacaaaatcttaacacggctagagcctaatttcggacttttccgagtgcggtgcacactggatcagattaataaaggacgattacaataatgacagttttcacaattgtgtgtgtgccacggtcggtgtcaagcgttttactggcctcacaaaacccaagaaccctgggggagggagggaacccgctccacatccccattttgcagatgggggaactgaggcaccgggagagccaaggtcactacctaaatggggaagcctggatgtgaacccaggtagccaactactgagcctgcgctcaaacaggccctccgaggggccattctcatctcctccaaccctcaacatcgggcgggtgtagtatttccccaggagccggacttcgtggccccagcgctgggacaacaaaatgattcttgcccgccggcaagtcccatggacgccggcccggcctaagttccgaggccgcgggccccacaatttccctcacaccgtgagccccgagctcttcgggcggcgcaggaagcgacggggtggcctcaggagcccgggaaggcccgccccgctgcgtgaccttggatccgccgccccgcttcgggcctcagtttccactcccggcctcgcgcccggggcactcggaatcaccgcgcctgcggagccgcaggccctcacacgcccccctcggccgcccgcattcacgccccacttacgctggaaggcggccgctccagggacgcctaccatcgccgagcgccgccgccgcgcgccgcccgcctctacccgcgacacgggtccctcgcaggcgccgcccgcctcgacccgcggcccgggtccctcgcaggcgtcgccgcgagatctgcagccgccgagctaaccagacaccaccaccgctgctgtcgccgtcgccgccgccgccgccgccgttaggccgcgccccgccccgcccccggctggccccgccccgcccgccgggcacgcccccgccgcgcgctctcgccgccaggccaacgcacgcggaagcccggccccaagaccagctcccattaagcaccgccccctaacctgacccgccccttccgcgggaaccgaccgccgaatcccggcgcagcctgcttctcagacctgccccctcggcgtcacgcgcgcccgtcacgcgcacggcccactttctagctccagacttcccggtgtagccagggcagtggcccaggctcgggggccgagtgctagggggagggattacaacgagtggcaacgtctcacctgagttctccaggtacaggcctgatggcttttgcgcatgcctttgagcgagccccctggctcaaagtgtttttggcctgaagtattctaaatgcctaaaatttcatcatcgtaattttaataactgttggccgggcgtggtggcccacgcctgtaatcctagtactttgggaggccaaaggagagtcacttgagctcaggagtttgagactagcgtctctattaaaaaaataaataaataaaaataaaaaatagaccaggcacggtggctcaggcctataatcctaacactttgggaggccgaggagggtggattacctgaggtcagaacttcgaggctagtctggccaatgtggcgaaacgctgtctctactaaaaatacaaaacttagagccgggcgcagtggctcaagcctgtaatcctagcactttgggaggccgaggcgggaggatcacgaggtcaggagtttgaagaccagtctggcctataaggtgaaaccctatctctactaaaaaaataaataaataaaaatacaaaaattagcctggtgcggtggcgcgtgcctttagtcccagctactcgggaggctggggcaggagaatcacttgaatccgggagggggaggttgcagtgagccgagatcggagccattgcactccagcctgagcaaaaagagcaaaactccgtatcaaaaaaacaaaacaaggccaggagctgtggctcacccctgtaatcccagcactttgggacgccgaagctggcagatcacagctcaggatttggagaccagcctgaccaacgtggtgaaaccccgtctgtactaaaaatacaaaaattagctggacttggtttcacaagcctgtaatcccagctaatcaggaggctgagacaggagaattgcttgaaccccggaggcggaggttgcaccgagccaagatcacgacactgcactcccacctgggtgacagagcgagactccctctcaaaaaacaaaacaaaacaaaacaaaaaaattagctgggcgcggtggcgggtgtccataatcccagctactcgggaggctgaggcaggagagtcgcttgaacctgggaggcagaggttgcagtgaaccgaaatcgcgccactacactctagcctgggcaacagagggaagctccgtctgaaaagaaaagaaaagaataaagactcttgtttctcagtattatttcagatatctcacaccaagaatatagaatgcatttgtattttacttgtgtattgaaaacaaattttaaaagacagaatgtaggccggccgggtacagtggtttatgcctctaatcccggcactttgggaggccaaggcaggtggatcgcttgagtccaggagttcaagactagcctgggtaacacggggaaaccgcgcctgtacaaaaaatacaaaaattagccagacatggtgttgcacacacgcttgtagtctcagctacacagaaggctgcggtgggaggatcatatgagccagggagtcagaggtttcagttaccccagatcagaccaatgtactctggcctgatctaacagatcaggcgtgagtaacagagtgagaccctgtctcaaaaaaagaaaaaaaaatgtagaaataagaa

SEQ ID NO: 1561691 - DNA, 4001 bp, Homo sapiens
gcttgaacccgggaggtggaggttgcagtgagccgagaccgcgccactgcactccacctgcgcgacagagtgagactccatctcggaaaaaaaaaaaaaagaaagaaaaagaaaaaagtcccctccacctcaagaaatctgactataaaattgaaggaagaaattgaagagtactatactgtccacttaattacccaattaatataaataaaggctgaagaactttaaggaataaaaatattttttaaagtttctatttgagaaatggtagaatttttgcgtgacttgtaatacacgggggaaaaacaattttccagcgggaggtcgcggagtggggggaacaatttcaacagtgtcgtcacaaagcagtacaattcagtacctcactcctgcttgttgactttttcaaagttcttctgttctggtatagtttggcaaatatagcatagaacatttagaatagatgcagacaatctgagacgagtacagcaagaggaagggcgccctgaaaactagaactacaggccagacccattcttgcccaggagctgaagttaaaaatgcaaggggtttaggaatctatcgcagcaaaaaaagtgaacatctagaactcttgaaaccaacttgtatgctttctatgtgccagacaaatttccccaataacaacatcagtcaggaattacacaaaatagagattcaaagagaacagtggcttgcttgagattacagaactagtaaataatgggtacacagtttgtgtaactcccaaactcatgttctttccatagaacatggaaaggaagcctagattcgaaggcctcaaaaacatgaatacaatgtatggaaacagtaaaaagtggccaggtgcagtggctcatgcctgcaatcccaacactttgggaagctgaggcagaaggatcacttgagcctagaagtttaagagactagtctgggcaacacagtgagacccatctctatttcttatatataagaaatagcaaaaatctaaaataggcatcacaaactaaccaggactacagaacacagtacgtagttatatgcacatgaatttattgcatcacaaaactaccccaaactcacaattcaagtcagattcattgatgttatttattttatatgtagcaagaaaacagaagaaaacagcataggagcaaaatgtaaatgaaaaactgttagatatatctaaaacgaagagatgctgttagttttgcttcaacctcttttagttataatttgcctgcatatactgaaataaaatctgacaatagaaaagagcgttttatgagccatctttttaatatggcctatttgtattatgcatactaaaggggaaaaaaattccctctaaacatcacagaacaatccaacgtggaaaaccttacagaaatatttgtgggactacttttctagctgtagaattcatatactacatctaattattaagtaaaccttgcattcaaaaaagcatgacattcaaatataaggttggcaacagaaaaatagaaacataaataaaatgaagcattaaaataaaactgagtagaaaggctgaactcttgtatcaaataccaagaaacattcatatcatcgtaatttgaaagaagtaaaaagctttgaaaggcagagaattgtgcactttaacccccaaaactatattaaaatgtacttaccccaaatgcccaaattataaacaatccagattcttaaatacaccaaatttatttgaaatagatattccaaagctcctctttttctcctcctaatcttcaaagctcaatcggagaccagccttcctcctcctttcattagctggacatgtgtcagctctctcacatctgcgatttctcactgactagagctgcctgtcccattccagggaaacacagatggatcccagatgggaaggtcctgccaaacagaccagctcttcaccttgccagaatccccagatacagtcagtctctctctttttctccctccctcctgcttcctctctctccactacccttccaaccctccctgttaccagggctctttgccagctgatgtcactaagtacacacctcccagtggctcctggccaatctgacattaacttgttaaatacgtgtaatttgtttatggctgacaataacagcaaggatattgtgcaaaacctatctgtgcaaatccctagtggaataacacgtagagacacacagagacacacagactcacatttttgggaacattcaaatgtttagcaattaccatttaaagtcctatatactgtctggtttctgctattgtttaatagcttctgttttttgagccagtttttaaatcctaatataacaaattccttcttaaaatcaattattaaaaatatgttttgaacatataattggatgaaaaatataaagttgcaaattaatttggggaatataaacagaaatgtatgtaaatgattcacacaagctgcctctcagatccagacttggtagcactgcaaaactggcacgtgattaaaataagacaatgcaggcaacatggttctgatgctgtaaagattataaatggaagatggggacacaatgcaaaattgttttaaaacagagcaaatataaatgtcagaaataacataatatttaacattaaaataactgctaatataagtgtcaacaatgagtcgccaaaataaaaaatattttaagaacaataacaatgaaaatccagagagatgacagaaacccataaggtcagagtttaatcctttatacctcaaagagctagcatataatagctgctcagtcaatttctgctaaataaaaatcgaaggttgacaactgataccatactatagttacacaaaatggtaccactggggcaaattgagtgaagggtccaacggacctccctgtacatttttcattataacttcctgtgaatctacattttaaaataaaaagttaaaagattgtgggtggtggtagccaggtgcagtgactcacacctgtaatcccaacactttgggaggccaaggtggtcaggtcgcttgagctcaggcgtttgagatcagcctgggcaattttgggaggccaaggtggtcaggtcgcttgagctcaggcgtttgagatcagcctgggcaacacagtgagaccccatctttaaaaaagaaaagaaaaagaaaggccaggcactgtggctcacaccagtaatcccagcacttttggaggccgaggcaagcggatcacaagctcaagagatcaagaccatcctggccaacatggtgaaaccctgtctctactaaaaacacaaaaattagctgggcgtgttggtacgcacctgtaatcccagctactcgggaggctgaggcaggagaattgcttgaacccgggaggtggaggttgcagtgagctgagatcatgccactgcactccagcctggtgacagagcgagactccgtctcaaaaaaaaagcaaaagcaaaagcaaaaaaagatggccaggggaaggcgggggtcttggcttcttcctgggtcacattacatgacacatatcctatactaaaatctacatgaatacagattcggcatgaaagatcccctgcatatatatatatatagtcaaacaggtgtggttataattctctaacccttaaccttctaccatacttgggatatatctgcaatctgtaaacaatatttctgtcatggcaatttttgacaaataggaaggaaggctatttctgtcaagggcaacttaattactaggttttagggcttcatttcataccagtgatggtggtaataatagtaacaccagcaggttcagtgtttgtcatgtgtactcactaagtgtcagagactattctagttccctgcattgctacaaaggtcctatgttaaagggcctataaggtaggtattattgtctcaaagttatagctaaggaaagtaatgttcaaacaagttaatgccacatagctagtgtcagcatcag

SEQ ID NO: 1561692 - DNA, 4001 bp, Homo sapiens
ggtacccagggagcagcctcagcggcacccgcagaggagtctgagcaagggcaccaagatctggccaagagataacgacgtccagggaccaggtgcccttcggctcccgccgacctgttgctcgaaacttgccctgagctctcgctgccgggctctgggctcccaagcctctcccccgccgccgcagcagcctcttttaggggcccggaagaaatgggagccggggctggtgagaggggtaggaagagggacggtagaagtttcagacccaggcatatttgggaaggcgagtgctttacatgattccccatttcccaatcggaccagcttagcctgggcaggcagcctcgtgctgaggtgcctggagaccgcccaccccctaggtgctcgcttccccccgggtctgacctgatcgaagtaaatgatgcgcgtcttgttgctcatctcggatggctcgtggttggtgctccgcaccgccgagaaggcgaccttggagttggccgcccggaccgatatccccagcggggaggaagaggagcccttggagtccgtggccgggttcgagtcgcacaccaccagacacttgccctccagcacgatgggctccgtgtcgttctgtgcccagacgggcagccccggcagcgtgaggaccagcagcacggccggcaccgcggacagcgcccggcgcccggagcccatggtgagccgtgtgggcagccgcagccggctggcgctggtgctcgcccgcgtcgcctcctaccccgggatcccggtgctcgggaagatgctagcggctaggtcgacagcgctgcaggagcgacggcggcggcggcgcgcacacttccaccaattctgtggcttgaagtcaaagtctcccctcgagctctctcgctggctctgttacctttgtcctttaaggagctcatgcagcaccctttaccctactctcctccgcccaagaatcagccctgcctggggcccctgcacccactctggttcctagacatctgaaagtcatcaaaccctcacattcacacctcaaggcaaaaaataataataataataaattctcaccccaaactcaagcaccaccagctaaaccacggagcaggaacaaaaagaggggactcaaagagaagccacaagggtggcgggtgcccagcggcgcgggtgccagtcctgtctggcttgcggcagggacgagttacagaggcagaaggtccttcccaggctgagaagaacgcgaggctgtgttcatggccaggacgccagcgactcccactttcgcctggtcaaaaaaatcccccaaacctggtgtcacccagaggtagggagggaggcagcggctagccaggtccctcgcaccgaaagcgcggattcgcaggatcaggtccagggcgccgggcgcagcgttcagggcggctggtccggcggggtcctctcctgcctggccgcccgcccccagtccctgcgcacaactttctcgtccctcgtgcagcccggagagcgcgaagcgggcacacgcgctctatttataggagcgcagcgtccggctgggttggcttatcgcgcaacccgcgggctccgagaaaagggggagaaggcgtctggtgaccccatctgagcagctctctcctgacgtttaacgcaccccaaagcaagcggggcgcacagcactggtgattggcaaggttcgaggcccctcagcccctgaaagcccgtggcgtaaaggatgcgtgcccagagaggagcccacggccctgcgctggccccagctccgcgcccactctctcctgctcgatctgagtccgcagaggaggcggctggtcccctcacccctcccagcgcggaactctgccgccgagtgccctccaagcggagcgcggcgctgccaggccgggtcgcgaaaaaggataagccgccgcggacccgcgctgcgcgctgccccgaacctggggaccggcgggcgtcccgaccgcgcctggccgggagcccgccccacacagccctggggcctggcgagctcagggaagccttggggcggaccagagcccgtgggggcggctgggaggaggtgcctgattccttccttccgctccgggaagatgagcctcagaagccgcaggggcgcgccttccccccacaccgcgaatcctccccaggcatggccaaaaaaaagagtgggagagggagttaactcagcaagaataagtcctccgaaaccgtgccaacaacaataaaaaaataaaaataaaaataaaaataaaagacaatcccactcctaggaatacagcatttttctcccctttggatgcgctttccgcccccgtgccactccactgctatcttggcctctgatttgcaagagttcccttcctcttctgcagctaccacggggaagggaggtttgtctctgtctggacccggctgcgtgaacttggccgagtcactaaccctctctgagaggggggcgcggcgttaactaaggtcctccccacccccatcccgccagctttccaattctgtgatgctgtggggtcatggcgccccttccccaatttcttctacacttccagctgccagagggcagacacgtatggtatctttaaccaaaacagtatcccctccaggcattcggagctcctaaaatggcattggctagttatgaatggaagggatgtttattgagggaggtccttgggatggacggctcccattccttcctgagtgaaggacgccctcatgagcgtggcattcgagccctccacaaaacaaggtgaacctcgtctccagcctttttcccttccttcagaagggccgggcattgagctataagcaccagctccaactgttaaaattgaagacactacgaggaatcccctaaccctcacctccctataatctctcaactaaagtgttaatacttggtgccacaggggccttcagattctgctccagtggggccagtatcaggtgttttgactttatgattttattttacttgtggtggggggtggtctcgctatattgcccaggctagatgcaaaactactgggctcaagcgattctactacctcagcctccccagtagctgagactacaggccggtgtcagttccggctggcaggtgctagtaccatgctatttgttaaaatgttgaaagttacctatctaagctacaaccaaacaaggtgaactagtgccttctgaagatggccaccatttacccagctttgatgccccaccctaagcccagcacaatcttcacctgatccctctctgcactttgtaactctcttccagattttagggatgtctgcctggttaacagcagcaatttcttctcatttgatgcagtcttttgagggtgggtgctgagttgaatttagttccttttatttcctgtaggggtaagcaccctgccttccttgtctgggacagctgttcaataactagaactttggttgttcaatttcaggctgggagaagtttgacaaaaaaaaaaaaaaaaaaaaaaaaaaaactgtgttgaattgttaaatagaaaataagctatcttcctcaccaattccaatatattctctctacctccttttcttctccaggcacttcctgcacgcaagaactgagatttgaagaaacctattctttctctcaccaaaaatattcatttttagtcccaaaatctgcatagtgaccatagtaaagactcaataattgagaaatgactgaatgcttcctaatagaaggtaattatcactcatattatagtataaactgctttaaatgagtctctctcagtaaaatttaaattcaaagcctccttaataattggggataagggtctcggttccttactaaaggatgttctgctcttcaaagtgttctgaagataaggaacacagcattttctgtggacccccgctaagagaagttatcttatattgtgaatcagagggtcctgactctttttcccacaacagttgattaaacacggatag

SEQ ID NO: 1561693 - DNA, 4001 bp, Homo sapiens
ggaccacaggcatgcaccaccaccacacctagctaatatatattttttaaagagatggggtcttactatgttgcccagtctggtcttgaactcctaggctcatgcaatcctcctgcctcagcctcccaaagtgttgcgattacaggcgtgagtcactgtgcctggccagaaatgcaatttcttgaaccccatcccaggcctattggcccagaaactgggggtaagacccagtgatctgtgttttaatgagccctcaggtgattcttatgggtactcagcttatgttagaacccatatcatggagccaggatggggtatgtagcaactttaaggaatgagaagaaactatctgggagaaagcatgccaagcagagggcacagcatgtgcaaaattctggatgcctcaaaggctggatgagggtgagcctggagaagctgtgtgcagtcagtctgccgtggctagattatgagacgaacatatcttgaatgccggctatggagctgggactttgtcttgcgtatgtgtgtgtattaggggtggggaggggtaagtatttttgttggtggccctgaatggctcagctctgcccacctgtccagccccatctgcctcattcttgtcccctgggcccccactacacagtcctccttcagtccctctggcttgctatgtgacttcccactgtggggttttgcacatgctgttcctctgcctcaaacactcttccctacccactttccttccacccgtcagttctcgactcaaactgatcagtttcctccagcactgagtatgggacctcctatgatttttaaaaaatttttatttatgtatttatttatttattttagacagagtctcactctgtcacccaggctggagtgcagtggcgcgatcttggctcactgcaacctctgcctcctaggttcaagcttcagcctccttagtagctgggattacaggcatgtgccaccatgcccagttaatttttgtatttttagtagagacagggtttcgccatgttggcctggctggtctcgaacccctgacctcaggtgatccacccgcctcggcctcccaaagtgctagaattacaggtgtgagccactgcacccggcccttctatgcaattttacattaacttatttattgctttaaaaaaagaaatacctggtgcataataggcactcaataaatgtctattaaaagaacaaactaagagaaaacatgcacgtatgtcttggctcccttctgagccctctgtgattcatgtgggcaccttttagaacagcccggacatatgtttctggtgggggtggggtagaggggagggtggaaatgggggtaagatggaagttaaaatcagagcgcctccctgaactccaaagacaaccaggtgagacacccagagaagcatactagaaaacttcagagtcagaaggggtgaggggaatggcttctggctgacgccttacatacgcccttgtagaaaggtgggaggggcagggggcaggtgggagactcaagcctgtgtaggcaacatcctatcggaattgccctggctgagtccttctgtttggggcagtgacgagcaggagaatggatctgctgggtgtctgtctgtccgtctgtctgagaggctgcaggagggagctgcggggaacaccagggaagcaggtgtggagaatctcccaaactgagtccgtctggccaggtttcctgagaaggtccctgtctgtccacgttagggatgccagaggccactgagagtggagaaacagggagtttagagcctgactgtctggctgtccaagagtgggaaggaagttacttccaaatgagaagaaaggctccacttatgcccctcgctaccgaccccccaccccgccccagtttgcccccttccccagctttggggacattcctctcccttcgtccctcccaacctcccacctaccttcttccctttcttgacttcatattccatggtgaaatgtcccctctactcctgccaccctcctggccatcccttccacccccacatccagttcctttgttctttttcctgcctggtcggaaactccaccagccctggagttcctgcccctcccatctgatggggagggcagggggtgtggaggacacagccttgggaccctgcagctgaagggtggaagcccaggcagagctgacctgaggagggaggctcaaggcctctagccagaaggcgggttattgggggagcttgggaattggccaaggctgggaaagggccccccacatttgaagtcctggtttggaaaattccaagttccagccctacttctgccactgaccttgttgtgtgaccttggcaaggcaagtcagttccccctgtcacagcctgtttccccctcctctctataagttgggagtcaacactgcctccctccctaggctgctgtggtgagaaatgaaaaggtggatggaaagtgccttatagagagtattgtagccaagcaagttatgattttaaaaaattaatcattactattaagggaggcagtatgcgtgggctttgaagataggctgcttgaattcgaatcctggctttggcacttactagggttatgacctttgggaagtcccttaaccaccagtgcctcagttttcccgtctttaaaatgagcataatactagtttaacctcatagtgaccttgcggggattaaatgcacctagaagaacttctggcacatattaagtactcagtaaggctgggcgtggtggctcacacctgtaatcccagcactttgagaggctgaggcaggcagatcacctgaggtgaggagttcgagaccagcctcgccaacatggtgaaaccttgtctctactaaaaatacaaaaatcagccgggtgcggtggcacatgcctgtaatcccagctactctggaggctgaggcaggagaagcgcttgaacctgggtggtggaggttgcagtgagctgagatccagccattacactccagccttggtgactggctgagactccatctcaaaaaaaaaaaaaaaaaaaaaaaaaactgaaaaaaaataagtgctcagtaaacattaactgtttacctgcttagtggttgtcaaattaaagaacaaacagaggctctctaaaataaaagatgtttcacttaggaattaagcattgcagtgggaattacccatatgccatagtaagcgatgtgcattttcagggaggtggggggaagacaaagatttttaaaggaaaaaaataaggattacattattgtttctgaaataattattcttgattgcaaagatcaatagcaagggtgatgccagtctaaagttggacaggcagttgctgggcagatgtccttgcggaagtattttttgtgcaaggtttcaatggcctttgtgcaaggttgtgatttttgtagtcttttttgttatcagtcttgttgttatctgttttgttatcagtcttatttgttatgcaagcatgaaaaccctctatggccttccccagctctatttgtcaaggttttcttaacattagtgactccatttttattctgaccatgttcatagggtcttgagctgttttgctctcttgggagtatattagggaggcaaggtcccctttgtggctctgtgctgaacactttacatattttaacttactcacagtgttgagtaccatgatagtacctattatacagatttttgaaactgaggctgaagttcagagcctggttcaaggaggtcacacagtgagtaagaggaggacctgggatttctggctggtctggatctgagcctagcgttccttacctctaggacctatgcattctgcatgccccacccaggacagatggaaaggttctgtgtggcccatccacaccttgccaagacacctgggttctggagacctaagctctggaactgatttgctgtatatgacctggtccaggttgctcattgtaacctctcttggcgtcagcttt

SEQ ID NO: 1561694 - DNA, 4001 bp, Homo sapiens
cagtgtcaggaacatagtaggtgctcattaaatggcaattttaatcatcattcatttgtttctgcttgcatgatatatggcaagcagcccggctacctggctggctgtccagaatcctacctaactggtggctctcattcaacctgggtatctcagcaaattacttacagaaatgtgtcttacccaaaatgggaaaggaagtagaaaaggctactgccccccaccagctcattgcaagacaccatcctgtgaacgtggagctcccacactcccaaagataggaaagtccttgataccatcttcaaacacatgagaaataaaacgctcccctaaaagtctgtcaatctccagttctcactccccatagttctggtccttctgccacaaaacagctcaggaccagagcttggagactctcactatctgagaggcaggctcgggaatcatgcagatgtagattcacaaccaggttcttccattagctagctatgagacctttggcaagacaatccccctttctgagcctcaatttgcccatctgtataatgggggagttgtgagaaatcagacaaagaaaacaggcagtgtttggctcagagcctgacacacaagaagccctcaatagatagcttctgacattgttgtcacagcccagcctctacctggagccaaagttgggagttatgagggcaaactctgctcttgagaagcctggatcacacccttcaccccacctcctctggctctttctccactcctaccacaagggcccccctttacctctttccagctccgccctccccctgcctccctgttccctaagagccattgcttcaggtgaaagtgaaagctgtgggaccaaagcagcctccccactccctctcttcccttgctgcttcccttgctttccttgataccatgggtcattcctgcccaggcttcaggcaggaatctacagccctctaaagtagggggaggccagaggggctgggatgaaggagccaggtacttgggggattcccagcctccagaatgaggaactacaaaaatacatttaaacaaaaagtgagtcaagtgtaggcttctgaaaatcccggagatatgcttggttggctctgagcccctctggtgcctggagaaacccctggtttctccagccctctgatcaccagccctgtcagagccaaccagaactctggtctcctaaccctttattgtgtcccataaactgttcatctccccaggggtctcctatgtcatcttaaattcaggagaaaaaggcaaagccctggggattcctcctaggttggaacacccaagatacggttcggggtggaaggcgatgttaaaagctccttgccttctcacaaaagtacctgggcctctgcacccatctcttgttcccacaagatgccctggaagaaggcagccccagctggcaaggagatgataactacttacagaggctggcatctgtccacaataagaaggggacaggaaacgggccagacccgccccttcccttggtccgcctcacttcccgccctctgaaccccctaccagtctctgtgtggccagcctctgaggctccctaaacccgtccaggccgtctaggcacgcttgggcagccagtgccttccctgagcggcccctgtaggccgctcccgggaccccagcccgggagaagagagaggcagcccaccccattcagccaggagcgggggcaccttgcccagctcccacccaccctcctgcccccacaaaaatcagccaggaaggcctcttccccgaagtcttccttccctttccttctcattccccactcccaactcccgtctggtcggggcaaaaacaactcacagcggtcagcaagcagccccagaggacgcactgcagaggcagacgaaccatagcgaggtgagaccaggcggcaggaccactgggcgcccgagcgaggcctctgctgactcccctgccccagccttggccccgcccaggaaaggggcggggtcttcaaagaccaatcgcggtccacctatcgggggggcggagcccccagcaattcaccgcgcaggagtttccccagaacattcccacaagtctaattcccccgggagtttagggacgcatcttgctgtgtacgggaggaggcatggtcccagagacagctcttcttctttgcccccaggtcccacaaaggccaagccgaggcgggctaggagctagcctgcttcctgcgaccggagagagatcccatgggtgctggggcctgccacagggaccctcacggttttcccctccctgccccgctctccgctgcctctaggtatcctggcagaaccgaaagaggctccactgcggagaggcctgaggaagttccccccacaccaccacgcagaaaacgggaaggccacagctggggtatggggaggcgtttcaaggaagagtttcccaactcagaatttcgctctctttcaaaggaaattccctcgtgtgggcgcgtcgtctcaacttcccatccattcatccatgcatccatgcgtcctcacctcattccattccatcccacctcccacccagcacctggagacaggcatttattaagagtggggccgggcgcggtggctcacgcctgtaatccagcactttaggaggccgaggcgggcagatcacttgaggtcaggagttcgagaccaacctggccaacatagtgaaactccgtctctactaaaaatacaaaaattaaccggatgtagtggcgttcgcctgtaatcccagctactcgggaggctgaggcaggagaatcgcttgaaccgcagaggcagagattgcaatgagccgagatcgtgccactgcactccagcctcgaaggcagagcaagactcagtctcaaaaaaaaaaaaaataaataataaataaaaataaaaataaaggtgggggccaggcgcggtggcttacgcctgtaatctaacactttggaaggccaaaaagggagattgcttgaggccaggagttcaagaccagcctggcaacatggcaagacccccatctctacaaaataaagaaatttttaagttagccaggcatggtggcaaacacctgtagtcccagctactcaggaggctgaggcaggaggatcgcttgagctcaagaagtcaaggttgcagtgagccatgattgcaatgattacatcactgcacttcagcctgggcgacagtgcaaaactccatctcaaaaaaaaaaaaagagtgggccagccttttgtggcatcataaaacactttaagtatgttaggaaactcgggaccctctcattttgcagaaacacacacacttgtgcctacatttcctgggttcatgaactctgaagacgtgcttttgtttttttgttttttgtttcgttttgttttttgggtgtttgtttggtttttggtttttgggttttttttgacagagtctcattctgttgcccaggctggagtgcagtggcatgatctcggctcactgcaacctctgcctcctgggttcaagcaattctcctgcctcagcctcccgagtagctgggattacaggctggcgccaccacgcccagctaatttttgtatttttagtagagacggggtttctccacgttggccaggctggtctcaaactcctgacctcaggtgatccgcctgccttggcctcccaaagtgctgagattacaggcatgagccaccgcacctggccctcaagatgttcttgaaccagtgttaacactctgctttgcagcatggaacacctgggttctggtgcagcctctgcctctgaaggactgtgttcccttaggcctaaatttttctccaaggaaaacttaggagcttgaactagacaacggttgaggtgatgaccctccaagctctcaatttctggaagaggacaagaggccagacctcacagatcagggaggatggaagaggaggacacttctaaccccattctcatggcttctgctgttaaggg

SEQ ID NO: 1561695 - DNA, 4001 bp, Homo sapiens
ccttcttctcctccctcttcgctctccgcttgcgatagaccagtagccccagagccagggccagcaggagtaggatggccaccacggtgcctaggatgtagaataaaagcagcttttgcccgtcagtgccatcgttgttttgtgtggccacggaggagtccccacctgcaggctcctgggggccagaggcagctgtggcgtgatggatgctgggctccctccagacgcctggggacccactgggggccagcatcttgagtggggcagatgtgatgggggcgtcagatgacagcgaaggtctacttgtggtgggtgtagccttgggggtgccctcggggccccttgtgggactggctgttgcagcacggggcacggtgctcccttctttctctcctttgtcctcctcatcggggggcccagatggtggtcccagagacacaggccccatggtgcaagagaccccatttggggccagcacccagcctggcaggcagccacagtggaaggacccttgtgtgttgaagcacaagctgtcgcagagggggccccccgggcccacacactcatccacgtcctggcactgagtcccgtcctccccggccaggacgtagccctcctcacaggagcagtgaaatgagccatctgtgttggtgcagccctgggcgcaaggcgagcgacccagagcacactcatccacatcctgacaggccccctctccaggaccgcccggctcatagccaacccagcattcgcagcggaagcccccaggggtgttgacacactcctgggcacagggggagtcctggcattcatccacgtccacacagtccagctgactcgagtccagctggtacccttgggggcagcggcacgtgtagtttttcccatggggtcccaggacgcacgtggcccccccacgacatgggctggagctgcaagggtttcgagaggcacaggtcaccaggtcatccagcagccggaatcctggtcggcagccgcagaggaaggagccatcccccccttcaaagcagtcctggtggcagcccccattgttgaagttgcagccatacttggggctgacacagagggggcccgagctgccccagtcgaacacatcgggggccttctccttgcacaggaaataatgactctgagtctcgtccttgtcaccttccccacaggctacattggccgcagaggcaaagggcacagcctccaaggaggaactggtggtctggaagggggtggtgtaggtcacctgacctgggccccccagggccagaggccggcacatgcctttgaagctgaacttgcacacgaagccctcaatgttacttccgggggagcctgggctcccacaggggccctcagaccacttggggaggcggctgggaaggagcggctgggacaggtccagcagcagagacacacagcgcttggagatgcacgagttccggagctccttgtgccagttagagtaaggcgtgtcctcccccccgcccacccagctgaagcccttcagcggcagactagggtccaggcacttgcccttctctcgctggagcccaatccagaacttgctcatcctcgccgtcagggctgcctcccgcctcaggagctgggccagtactcgctggacgtgctgggcctcctccttgctcttcacagtggccaggttgcccccgttctggttgcagtggttctgggcctcggcagcgctcagcttgcccgagtgggccgtgtagcaggcggtccccacgcagaccaccgcctccgtgtcagctcccgtccccgccccgggctgggtcaggagcagcagcagcagcagcagcaggcccatggaggtggccatcccggtctctgtgtggccctctgcgggaggcgagaagcccagcggcgacaggagcttctatctcggctcccagctgggccccaaggggagctgaggggtgagctgcagccactccggcgcagagaaggacacaaaggctgagggctttccacgtccccctgacccaaggcgcatcctgtactgttgtacttcttatttctcaccggatgttggggcttcctgcaatgaatagttctctgactcctgctgccttcatcacggtgctgttgttcataaaaggagtcaggcagctctgccgggtccctggctcagcactgtggaaacagcgacggggggaagacgttacagccccgagatactgccggcttgattttggctccattctctttctcatggcatgaggagcctcggaggcatgccatggagtgagcaggggctttgggggctaggaactcgaggaagctcccttagtaacccataataaaattccactttggtttgcaaaccaccaaaagagaaaaaaaaaattctgagacttaagacacaaggccatggatggttataattttcagccttttttagaagcaaactggactttccttttgcctagctcatgttctctgttgactttgggagccttttttcttttatcctcccatcgtgaaccttaaatagacaggcattttttaaataggatacgggtcgtgggaatgtctgggttttcaacataatgccaagctcctcgataatgttaatccaaattgggtgaaatttggcagttctgggggtttcatagtggaaatattgcattgtgaggtgtcagggtcacaaaaagcatcagaaagaaaatgaaaatgtgtccggcctcgtggcgcagggcttgcaggctcacttcccccggctcaggattcctagcaagggccggaaatctgggcagggagcgggaatcgaagcccgggcaggccctcccgcgacaccgcgactcggcaaaagccagggactcacagtgtgcttttcctgcagccacagacctttgctcattggttgggatcccccaggaggggaccctgagacaggatttggggagactagtttatgtgggaggggaagtgaaacagacaaggaggaagccaacccatgatgacttgctgagaaggtgaccctgggctgctggagccagtgccaggaaactctgggggcctgaggggaccacacctcagcaccatctcagctgagggagaggctccactgctctccaagtcccctgtcattggtagcaggctgtatctctcactttgagagactgactataaattctagccctgcccagtgaccaggggtctctctcacataaaacttgtttctatggacagacacccttgtggctctcgtctgacccatgtccagtttattcctatcaagacagccacttcctaagagatccctgatgggaggagagttgggttggggtgtgggtcaggggagatgcaggaggcagcacaagaagacacaggaagcaacacaagcaccgtgtcacttacagatcccagggagagggcagtgcaccccacggggccagcaaaaagtggggagctgtctgggtcacaaacactcacctggaggggggtgaagggagagagagagacctgggtcctaagcctttattggggtccaggacgtttcccaagcaggtttcccaaggggacttctcactggtgggtttagagcaaacagacacgggctccgtggggtccctgtggctgagaggtgggcatggcggcatgtctgggaagtccctgtggggtgtggagtcactgagaccatcaaatgggctgtatctgcctgtcccacagggaaatggtcaccaggaggtgggtgtacaaggcagatatctgggttggccgcattgaggaactgggagggggtggagccctagacaccgtgtcaagagcaataaaccctgcttctggtaggagagggtccaaattagattcaaaatggatgcaatgcacaattataagaattctctacacagcggcaactctttggtgctctgcactgaccgtgagggccccaggggaagaagcgccacggtggagaacacagtgaacgcctgtggacccggcaccagcgaccaccacagtggcct

SEQ ID NO: 1561696 - DNA, 4001 bp, Homo sapiens
aaagaagggaaggaaggaaggaaagaaacaaggaaaaggatgaaagagaggaaagaaagaaaagatgcatggcaaggagttctcatccaggtaatcttagattcatttttgcccagtgaccacacactcctcttgggccaagcagtgctctggaaaagtctcccacgtgttcttttggaccttgagattaaaagaatatcttttatatctcagggatagggaagtcctctctaagtaagacacaaaaccccgaagcaataaggaaaaaattgacaggttgaagattaaaaacttctcatatccaaaagattccctaaactaacttagacaagtggcagacagggagaaaacatttgcaacatacttaacaagatcttttcttcagagcatgtaaagagctcctaaaagtcaagaaaaagacaaacacatggtcaaaggatatgactagaaaattcacaggattcaaatggccaagaaacatacgaaaacagaaatttgcactaaaacagcagtgagttacactttcttcctttggcttccagaatgccacagtagcctggtttttctcctgcttcaggggctcctccacttcaagagtctctatttggttctttctttctttctttctttttttttgagatggagtctcactcttttgcccaggctggagtgcagtggcatgatcttggctccctgcaacctctgcctcccaggctcaagcgattctcctgcctcagcctcccgaatagctgggactacaggtgagtgccaccacacttggctaattttttgtatttttagtagagacggagtttcactatattggccaggctggtcttgaactcctgatctcaagtggtcccgcctgcttcggcctcctaaagtgctgggattacagacgtgagccactgcacctggcctctttcttgagcccttaaccttggaggacccagggcactgtccttggtcctcttttcttctttgtctacactcacccacagcttcatccagccccaggtcctcagcctgtccccctgggtcacagccttcccctctgccaatgctggagttccccttagtgctgccctaagagatttttaaaaacacagctatacattcattgttttaagagcttggcattttaatgttttgctgcaggagagggaggcttcagggattcacacttatgtatatacatgatgttatttctgtaagtgcaaacacatacatttatggctatatgcatggaaaagcccagaaagtgacacaccaagatgttatgagtgtttatctatgggttgtgggattactagaactttaaaaatgtcattagcaccatcaaatagatttacaactgtaatgctgattttaaaaataacttaagtgtgtaacaataggttacatacgctagtgttcattcatagctggaatgctacacaatcattaaaaagcgtgttggcaatgatacttaccgatatggcaaaattctcactacttgatgccaggtaaaacagcaggagatgccagatatacagtctatacagtctgatgccagttttatataataaatttttaaaaagaaaacgacatgcatctagagaaaagactggaaggaaatgtatcaaaatgttacctgtgcatctctccaggtgacgtgaaaagcgtttttcaacttcttgaatttttcaggttccgcaaaaaaaaaagtgcgttatttttaccttaattaaaaaaaaaaaaaacaaacaaaaaccctggttcttattctttttgagcagcaagtcgctgtccgccgggcgcagtagcgatgcaccgcgtccccgcccgcgtcgctgccgggtcgccggaggccgcagcacgggcaggtccagcaggccgcagcgcccccccgcggtatgtcccggcggcgggaagggggtgggcgcggagggcggggaggaggcgccgggcgtccccgcgcttcccgcgagatcccgctccgcccgctccgccccgctcgccgcgctcccagctccccgcgccgcggcacttcctgccttccgcgcccgcgccgcccgccctcgtctgcgcccgtcgcctgccgcccgccgcccggcgacgcgcccgccggcgtccccggaggtgcccccggcccggccgggtcgtcgccccgccgccgcgcccgcgagccgctttgtctcgggcggggcgcgcgggagaggccgccaggtgccccccgccacgggcccgggccccccgccccggggcggcggcggcggcgccgggccccggggcggggggcgcgccgggatgggccccaagaggcgacagctgacgttccgggagaagtcacggatcatccaggaggtggaggagaatccggacctgcgcaagggcgagatcgcgcggcgcttcaacatcccgccgtccacgctgagcacgatcctgaagaacaagcgcgccatcctggcgtcggagcgcaagtacggggtggcctccacctgccgcaagaccaacaagctgtctccctacgacaagctcgagggcttgctcatcgcctggttccagcagatccgcgccgccggcctgccggtcaagggcatcatcctcaaggagaaggcgctgcgcatagccgaggagctgggcatggacgacttcaccgcctccaacggctggctggaccgcttccgccggcgccacggcgtggtgtcctgcagcggcgtggcccgcgcccgcgcgcgaaacgctgccccccgcaccccggcggcgcctgccagtccggccgcggtgccctcggagggcagtggcgggagcactactggttggcgcgctcgggaggagcagccgccgtcggtggccgagggctacgcctcgcaggacgtgttcagcgccaccgagaccagtctatggtacgacttcctgcccgaccaggccgcggggctgtgcggaggcgacggacggccgcgtcaagccacccagcgcctgagcgtcctgctatgcgccaatgccgacggcagcgagaagctgcccccgctggtggccggcaagtcggccaagccccgcgcaggccaagccggcctgccctgcgactacaccgccaactccaagggtggtgtcaccacccaggccctggccaagtacttgaaggccttggacacccgaatggctgcagagtctcgccgggtcctgctgttggccggccgcttggctgcccagtccttggacacctcgggcctgcggcatgtgcagctggccttcttccctcccggcaccgtgcatccgctggagaggggagtggtccagcaggtgaagggccactaccgccaggccatgctgctcaaggccatggccgcgctagagggccaggatccctcaggcctgcagctgggtctcacggaggccctgcactttgtggctgccgcctggcaggcagtggagccttcggacatagccgcctgctttcgtgaggctggctttgggggtggccctaatgccaccatcaccacttccctcaagagtgagggagaggaagaggaggaggaggaggaagaagaggaggaggaagagggtgaaggagaggaagaggaggaggaaggggaggaggaggaggaggaagggggggaaggagaggaattgggggaggaagaggaggtggaggaggagggtgatgttgatagtgatgaagaagaggaggaagatgaggagagctcctcggagggcttggaggctgaggactgggcccagggagtagtggaggccggtggcagcttcggggcttatggtgcccaggaggaagcccagtgccctactctgcatttcctggaaggtggggaggactctgattcagacagtgaggaagaggacgatgaggaagaggatgatgaagatgaagacgacgatgatgatgaggaggatggtgatgaggtgcctgtacccagctttggggaggccatggcttactttgccatggtcaagaggtacctgacctccttccccattgatgaccgcgtgcagagccacat

SEQ ID NO: 1561697 - DNA, 4001 bp, Homo sapiens
agattcggaggattcagacgacagggaggattcggatgcccgtcgagacagggataggtgcgtcaggcggctgcggctgcggaagagcagggtccctacctgactctttggggtttcgctgggaagggaacagggacccgggaaaggagaaaggtaaacgtggggctcaaggcctggctagcccacgttcccactcccttgctgagaaaagaactgagcgaaacactacaccgggaaagcaatggccctgagggccccctcttctcaggtcaaggaaggttcattctacagaggccctaaagcgtcttctcttcgttgactggtttaggaaaggtcctctcaggagcagggcaaggtgagcccagggtgtgagcaaggctgcctggctggaggccagcctaagggttggtggtctagcagagccgccccagagagccttcccctaaactgtcagacccccacctttccaggacccttcctgaaggatggaccaagaccaggttctcctactggaacaacccagctctccccttgcagacttagggagcaggatcagtgtttaattaattgtcttaattctgggggcagaactggggtggagggagcaggggcatggatgtgtgagtgctccacggctctgccacccttaagttccctctccaggcttgagattcccatcctggggcaaaatggtggctatccgggcagagattacggaggcagcgtggtggaggcacaatgagggaggagggagtgaggggaaagaagatttggagaggcttgtgcagactgagagcaggtcacctggaggtgtggggggcacagcccaggtctcacttcccatgtcctgggcccctaggagggaacaagggcgtacctctccactgctcaggatgcctccccggactccacctcctggattcgactaccatgcccagttctccaggaggcccaggactccagacctagcctctcacccccatatgcagcctccttggggtgtcctacctgccgagcccggcgaggtcgtgcatggtctgggtgagggtggtgaccggcgaggaagcggccgcccgcaccggggaccccaggaggccatgagatcccagcaggaggcccgggaggtggcccggacgctgggcgccaccgcacacgcctgctggactgagagccgagcctggcgcgggctccggctggggcacctccatcgcggcggggccggcagaaggctggctggagggccgggcgcagggcagccaacaaacgccggcacagctggctgggccgagggaggcagcgggcgaggggtggggggggggggaaggagggagggaggaagagccacagggccaggcgcgagggaggagagggatgcggggagggcggggggcgagggacgccgggctcaggcaccagccagggaagcctctagttgcagctgccacttccacctccttatatattcgaaaaataacagcagccgcgccgccggacgccaccaatggggtagcgggttagatgagggcgggactgagggcggggcccgcagggcaagaggcgcggaggctggatttccaggctttgggtgggccggaggaattaagatttatcccacaccctcgcacatccccctggcgcgaggatcccggcctcccaaaatccgcctctcgcgacatggtttggagctccacactcccaaaggcagcagcaacgccctagggtggcctccgcaggaccccccgcggcatgtcgtcacctgggatcaccgctagggatggggagaggctccaactggctcccggaagtttgctaaacccagctgggctgtacggtctgcgttagacaccccattttacagacctggacgctgaggcgtgaagttcattaactcaatcaaggtcacgcggttgggcaggcggtgggccaggattcgctcgctccaggcgcctctgaccgcgcagcctccccgcctccgcgactggctgcgctgagcagcagcaaaacgtcattcgcaggagaagcgcccagcgtaggaggtgggagggcagtggggcccccaagcggaactgatgggctctttcgcgggaccccaggttagatgttaccccaaccggcccaattttcgcggcagccccaggagaggctctaaacggtggaactaggaatggatttccgcggctgggggtcgaggagggtgtcagcaaccagagaggcgaattaagtatcacgcccattgatgatttggctaacttggtgccaatggcaccatattatttaattggtgtttctttgatgaccagaccagggaggctgaatttgtcattcgttttaagcggagcagcttccaattatctttctttttgttttgttttgttttttttgggatggagtctccctctgtcaacccggctggagtgcagtggccatctctgctcactacaacctccgccacccgggttccagcgattcttctgcctcagcctcccgagtagctgagactacaggagcgcgccaccacgcccagctaatgtttgtatttttagtagagacgggggtttcaccatattggccaggctggtctcgaactcctgacctcgtgatccacccacctaggcctcccaaagtgctgggattacacgcacgagccactgtgcccggcccatcttccaattatctaaatgccttccagccccgctcgttttccaggcctcctggaacaagaggcctgaaggctgcacccaaaagccggtgggtagtgagcagctttcgcatcctgtctccccaggttagaagtggcctctggctgggcgggtggtggtgcggggggcgggctgcagctcagcaaggcaggagtaccccttctcgtgcagtcccagccacccagacccaaggtgcattggatgggggtggcaaaagggagggcctggtgatggggggctgggtgggccaatgcatctgaagggtaggggaagaccccagccccacctgagaggggtggccaaggtgggaacgtgacctttccttttctccaaattttgcccagctcctgtgctgtgcagagggctctgcaagactgaatttccggttcatcctccctgggtcaggggttatgccctggacctccagccactacttccagtgaggatgtgactgcccttagtgccaggagggaagggggaagtgtccttgtaaagccacccagcccaaaaaccagaaaaaaaaaactgccccgagatttgcattttcaaaataaacacaacaggtatcccccccaccccccacccagccaatatacatctgcacagggtgtatgtggcagggcaggcattatactattgaatcccttgaaatcccacagtcaaaaaacacatgaaaaaatgctcatcatcactggccatcagagaaatgcaaatcaaaaccacaatgagataccatctcacaccagttagaatggcaatcattaaaaagtcaggaaacaacaggtgctggagaggatgtggagaaataggaacacttttacaccgctggtgggactgtaaactagttcaacccttgtggaagtcagtgtggcgattcctcagggatctagaactagaaataccatttgacccagccatcccattactgggtatatacccaaaggattataaatcatgctgctataaagacacatgcacatgtatgtttattgcggcactattcacaatagcaaagacttggaaccaacccaaatgtccaacaatgatagactggattaagaaaatgtggcacatatacaccatggaatactatgcagccataaaaaatgatgagttcatgtcctttgtagggacatggatgaaattggaaataatcattctcagtaaactatcgcaagaacaaaaaaccaaacaccgcatattctactcataggtgggaattgaacaatgagaacacatggacacaggaaggggaacatcacactctggggactgttgtggggtggggggaggggggaggga

SEQ ID NO: 1561698 - DNA, 4001 bp, Homo sapiens
cgctccgcctccgcttattctgcacgggcgtgtccctgtcctggggccgctccagcctcttgaggatgggccggatcacgctgcagggcatggacggagagcggaagagccgctggcacttgctgtacatgacgaggtcctggcagggacagcaggttagggatcagggtgcccaggccccgtcccatccctcaaatccactggagagtaggatggaccccatgcctccaaattcggagggggccaccccagaggcccaccttttcctcttccttttccaaggtcttgaccagtggggcactaatgagactctccatgcctgggggaactgcatcatcatcctgaggccagattagcaaggacagggtcacaacccacaggcataggccaaacccctccagtcccggaatcctccagcacagccttccctgtttccctggcaaactccaggttggggtgagaagctcccctacctcccaaaccgccctccactgtggcaccagccacctgttcttctctcattggccagaggttaggctgtgactcagttacctcagattcttcttctgacactggaatgacatcatggtcctgccacaagggctcagagctctcttcttttgggcgaacccagggataggaaggtaggggcctggtgggacaaggctgtttacctttaagtcactctctaggatgtccacaaatccatcatcttcctcagtatccccctctgcaggggtcagagagaagcgacctagggccagggggctgagctcctccacttccatcttccggtcaggactgagacactgtccacatgacagacagacacagacttagaggtggagatagttcccgcccccatcctcctgaggaaaagttcccagtgcctgggggttcagggccaccctcctcttctccgaggctgcctccccaggcccctcccagggatccgctctctggatgtaccatcaggtcgggggccgagctgggtctctgggcaaaggcttccctgcggctggcccactctgccagagcatgggtggagctgggatgtgtgggcttccatggcatcttgaagacaaatccatcctgcagccaagatgggagaggagggtcctcacatgccagggaaccaccccagcatgccccctcctcttcccggagagctcccaccccggccttccagaagcgcacattctccttgtcttccccagagctgctggcagctccactgcccgcctcgctcttcctccggccgtcgggcgcctgggagttggtgatgttccgaagcacggggctgtggcccagcagcctcacctagagagccaggcagggcggcaggcagaggaatgaaggctgcattcctccggcacgagcccaggccctaccttctccacctctcctccagctcctcccacttacctacctacctctgaaaccccatctcctacagcctgcctggggacacccagctgggaggtgatccctgaatgcatcctgctcatctaccccatgcctggctagcatgcctaagcctcagtcaggcctcgaagacactcaccggcatagactggaagcgtctgatggcaaactgctcgctacaggaggaaatggggacaggtgagagctgggagaggcagggcagggaccaagagcatgcagcatgcccttctggagccctgtcctaagggaaagcttgtggtagatggaagaggcccaggaacacttactttcgaatgatccggctggctgcctggatggcctgttcaaacctaggacagagaagggtcccatgcaacccatgctccctccgcacccatcacccaccccagcaccaggcccccagtccaggggggagtaagggcaaagacaagggccaaggctcaaggcagtggaaggggtggggtgggaagaacgcccaccatcagggggcccaggtattggggagggggaagataagaggcagcttggaattttaaaggctgccctgaatgaaagaaagcccagagaatggcagtgatagagacagctggggcaggtcagggtcagggaggcgtcaccaaggcaacagtctcgccagcctgcaccaggccttccacctgtatgcaaatcacctcagcggggccatatggctgccaggaaaggcatccatccatcctatgataggccaggggcacccagcaatgtgggtgtctccagggcctggacaacagcaaggctaggcttcctctcccctgtgaggagctggcctggctcccggtcctctgaggactggggcctgctttagggctcccccagtcagctccagtctgatacagtagacccccagtgacaaacgtgcaggctcacatcctctcctccctcctatggaattttccaggaccagcctctgtcccaccccctcctcctgccttagaagaggccagcaggcaaggaattccaacacatgttccctctgaggccccgccccctcagccgtgttacaggagaccacctgccacgcggagcttttgtgcatctacgcgcgcgcgcgcacacacacacacacacacacacacacacacacacacacacagcttctgagaaactctgtataactgtcagagcaggtgcagggcagggaaccactcagggataaagtatgagggggatgcccccccggggggctgctgtgcccagccaacctggcatcagggatgaccaatttcattggcttgcacatgggccttgggggtagggcaagattgctctgtgctgccaccaaaaccaacctgcagtcccccaaccccacccaatcctctccccatttcctgtttgtgaaccaatctgcagcccaacccagtctgatcaaaggcaatgggaggtaagacaagtcactatcctaaacccaaagccacagtccccagcacaggccagagatgcccagctgtccctactaatggctggcagctgccccgctgcttgggctttaacaactggatgggaacagctgtgctctggaagacaccacccatgcccacagccaaggggatggtctgtccaggccagagcccaccaactctctctccattcccttgcagaaagggcctagaccagggctggccagagggtaaagtgtcatcgaagtcagaggttgctgatcggccaagagccaaatcaatctgcaggcaactgtgttttgtttggcctagagtgagttaaagttttgaattagttggatcatatttttaaattgtaatatttcacagaaaaaaatgggtataggcaagaaagaaaaacgggacatacgctgggcttgtattcctgcaagacatgggctgtagtctagtatctgctctcccagtggccactgtccccactatccctggccctgagcccacactcggttggctcccatgagagcagatccttctctgagacagggagcagaatgccaaggcctgagaaagtcagtgagccccccggccatggggatcctgaagccaccccatggtctgtctgctttcccaggcctcccgggtgaatttatggtagaactaggattcttaaagacaggtgctgaatgcttggaagtacacattcccttctctactcacgtctgctccgccatgtgggggtccatagggctgggggaatccatgcagagacctgaggggacagagcaccttggtttgaaagtagtggcactttctgtattctttcccccaccatgtcccaatatgaaaaaaaaaaaaaaaaaaaaaacagtttctagtttggactttgacacattagaaaatgaaacaaaaacccaaccatggaccctgagagctgacacatcgtcccccagacggtacagggctccactccctgtttactatggaaattccttcatatgcgtctttaaaccacaatgctcactaagcatttttcttgaactggtttaaaataatttgttctagaagagacaacagatttttaaagaagaggttataggctaagaatgttttaaagaccaa

SEQ ID NO: 1561699 - DNA, 4001 bp, Homo sapiens
gcccccgaggcactggcagtggtggaccgggaagggcacacagacatctccaggaagcagtgtttaaatgttggcaatgcccttcccttccaggaggaatggaagaggagtgtcccagacactgggacaaggagggaaataagggtgaagtagagaaatggctggggcagggaacagttgagtgctacagaaaaactgaggcagacaggatagaagatgggtcggggttgggggggacgaggaaatggtcattggtgggcaaagaccaaaggatgtcactatgggtgtagaggccaagtttcaacaagggctgtagactaggggcaactgagggggacggagtgggcactgatggacacatatacgggatacaaatgaaggacagagagtcgcggtggttagggaggagcctttgggccctagggcagtggtgatgctgatatagggtattggcgctgaccagtgggagaagaggatgagatcctgaacctgggtggagagggagagagagctggcaacagccaaagccctcaaatgagccgctgcctgtgctgggggcacctcggccagccccagaaacctggggagtgctggaatcagccccacggaaaaagaagctggcatgcgcaaccctggcgacgcccgaagggtttggagagaagaggttccaaggagcgagcacctcggaagacctgagcagcttcaaacagcagcttctctgcccgccacaagggggtgccctgcacctcggggagacctcgggggatcctggatcagccctaccctctgcagccccgcctgggacagggcccgacgttgccagagaagaggcagcggggaggcgcgagcgagacgggtccacactgtgcccacccagggctgcccggcaccccgcgcgcccacgcagtccactcttcacagtaaacgccgcggcccccgagggttagccctaagtggcgctctctttggacgttaggctgtcgggggccccgtccttcttccccagcggggacggtgtctccggagtcgggtcctaaggaagagagcagcgctggctctcgctcaccgccagcccgcccgacggccatagggcagggggggtcgcgccggtggggccggcaggggtccctgtgggccgcctccccggctcagaggggaccagaaccgtgcgtgtcgccgcggctggagtcagcctccgggtgtccccggacgcggcacgacctcgcacacacacaccgcgcgcacacgctcgcgccgtgcggtattttcccggccccggaccccgcctctgggaggggccggggagccgagccccgctagcagggttgggggaccgggaacgcctgggtcccagccctcgcgtcagggctgtgcgccaccttcccagccccttttggcgcgccggctcggcccctggcgctgccacccctcggcccgcgggggtcccggaggctcccgggcgcgcggcggacgaggttgtggggacgggtgggagctgcgggcttcgggccgagaggcggctcggctccgcgccggggaaagtttggacgtgggaaactccctccccgccctcccggccgagaggagggggcgcgcagggccgggcgcaggcaccccggctcctcctgcggctggaggctcgccccccgcgccgcctgcccggccgctcccgccggccagggggctccctccctgccgggcagcctcccctcggcggcgatccggccgctcctcccgcggcaccccgcgctcttacctcggggagcggcccggggctccccctagtcctgccgcctcgggacgctgcgtggggcgggagccccggcgcgggcagcgggcgagtccggagccccgcggccgcccgcaggagccggagggagagcgggagcgagagggggagccgcggcggcgtgtgcgcgcgtgtgtgtgagcgagagagcgagagagcgagagagcgagggagtgagcgagcgagcgggagcgagggagtgtgcgtgtctgactggggggaagtgtgcaagggacggatcccttccttcctcccgcagcctctggtggagactcggagaatgcagggcccgccgggcaggagccgcgcagcgccaagccgcaggcggccgccggcccggacccccgcagccggggaaccccagcccccgccccccggatcgcgcccctcctacaccaggaggggacagcctttccctctctcgggcggcccagtcccaggaaaccccccaggggacagtgcccctccctcctccaaccccagatccgcgcgaagggagcgcccccaggagggggaccatctacctcctcgcctggcagctccccaggtggccgcagtttgagaccagagcctatttccccacctgattttactgcgaatagggcttcccatttccgccccctgactactgcgggaggccgccttcagaggagcaggggcgcaggccagggtaggagcaggcttctcgaacagtggccgccccggcttgctgcccagaaaggcaccttgcacagaccagatctgccagttcagaaacagtcactgtgcattgaggtggacaccgaccaggtgcccagggctgagtctccaggcaggtgggaggtcgggtgtccccgggagagaaacttgtgggcttttcctctggagagtcccgctggacatccttgcaaccaacaaagtaagcaggcaaaacaagacacctccatccttaacttggtgccaccttgacctggagaagtctcccaataaaatcttcccactgcccagaaactccttgctggttgggttttccgttcttttaaaaatccggctggtctgctccctgatgttttttccacctggccctgtttctttctcctggctgcctggctctccttactacttcatctctctgggatgaggcctaatggaggagaccctcccaccccactcctgagttcccaatatgaggtcgttgatggtaggataggaccagtgactcccatagacccaccctttgtcttgggttgtaggtccccttaggagttgcccgcccccctattccccatggcttccagataggtgagtgaaggataacaggagactggacagctgcagacctctgtcccgccaagctgccaatgaccagccatttaatcacccacaagcagctgctgaagttcatggcaaagagggggcagggccctccaggacccccagctctacctcgcccctatccttctctcctcctcgcctccttccccaatttccatctccatctccacaccctagtccgtcttgctgatgattggaatcacctctcctgctggctgcccctctggcccctcctactaaactccatcattcatttatttattttgagatgtattctccactgtgccagtctgttccctcccctacgtccttctcttggtttatttcccttcattgatctcttccagccttgcctttctatcgccttccttttctccatctctctcttcccctctcctctctattcttagcctccactctttcatgctttcagagaccagaggccagccttccaggtgcatctcttcacttttggttctctcctcccgctctgactcacttttgctgtttgctccagttcccattccttctttgcctcttcctccaggctctggtgtgtgctgttcatctctggagtcagacctacttagttgtccacaggttgttttggtctgggacactgttgctgtcacatctgcatgcacacagtaggtgctcaataaatgttattgaatgaactgttgtcacatctttctcttttgctctggtctctctcttctctctcttttatttttatttttttttgagatgggggtctcactatgttgtccaggctggattcctggactcaggtgatcattctgcctcagcctctcaagtaactgggacaccaggcatgtgctgctgcacccagctccccatgactctttattagaccctcaggttttcctatcccaat

SEQ ID NO: 1561700 - DNA, 4001 bp, Homo sapiens
cagggcatccccactgtcccttccacctcagctacaacctgaactcaggttgtgtgacattcctgccagtctcctccaagctcagcagctttcactctctccctccaaggaggagactgaggcacagctcctgggactgggaaccatttctgtttcccttcatggttgagcctctgagccactggaactgtccaaggcaagaaattctactgttacacaaagactgctgtttgtccagatggttttcttcttaaaattacacaacaaatcaagtttactgctgctctcacatttgggatgcggagattccttccaggggacttcacaatctggagagtttggatcttgctcctgtttccccacccaggaagggctcacaggagggtgcacaggcacatacctgccagaggagcctaagtggctgctcccttccctccttcatgccgcagggaagacaaaattcaaagaaccctgggagccttgggcgagcaccagcttcttcaatcaaatatttttgagaaactctctaattacaggagcatcatatcaagttcattggaatatcttttccctaaatgtctgacttcattcaataagtctctcccttccaggaaaaaaacattggtggaggtgtaagatggggtgaccgaatcctctgtgtgtgtttccttttgacatttcttttgtgttcattttctaaatcaaccacttaattctagatgaagacaaacaggagagctcacaatgctttcatctctttgtctgtctaaccccagcccagggttgctgcaaggatgactaagataatgtagggcccatttcagaagcagccagtttgaaaaaccagtggccattggccaattactttatatggctctgccttgtgttaggtgccttcataggcatcctctctgatccacaacctatctaagaatttgactttatcatcccagttcacagatgaggatgtagggttaaatgatgaagctaatgagatgcaaaagcagaaacagagcctaggccttgtacctccaagggcagtgagctttctggttggcctttgccggacaatggtagaagagcaggttctgccatgatctactgaaagccatggccaagaagccagctcagactcatttaactagtgagcctaacacaatcccatttagggaacgtctacttaataaaaaacactatttccctaagcacagtttctcaaactcagcacttaggaaactggggcagataattctctgtggtagaggctgtcttgtgcgttgtaggctgtttagcagcatctctgacctcaacgcactagatgccagtagcactcctaactgtgaccatcaaaactgtctccaggcattgatgaatatctcctatggggcaaaattgctcatggttgagaaccattgatctaaaagaataaattcatttatctgagttagatagtatttgcaagaattttttcccacttgctactgaaacacgggtaagagtgaagaattaagaggtggcacaatggggggaaaaatacatgctatatgtctgtgtattagtgaattccttgccataagacacaaagcatgacattccactacctgggctgaagtgcctttgctctccgcattatacatgaccagtgtttggtggccttcatcattggatacagagcatccatgcctcttaggttcaagcacaaaatagcatcgcaacagaaaaagcagagccactgttataagacaaaggggaaaaacagattagacaagctcacccatatcagaggtttcatgaggatcttgttctgttcatgtataactcagtcatgaactggcaaggccaaattgcgtcttagtcatctgtgtagctataaagttcagcacagttccagggtaccagtagatgctacataactgtttgttgaattaatcaataatactatctggccagtaatattgtattgtttcttggaaaagctgctttcttattagccttgccaagtccaggagcctgaatatctgtacattgctgtctccatggttattacaaacaaagggccactccttgactatatttaccagtggattccattgtgagtagaagctgcttttgctggccagggatcttgcctggccagcatggcaacctctgatctacatctaggagcctgagtacacccagaagtcattctcaaagccattccaccaatcctgccaccgctgtcccctaccccagcaagccccttacccctggcctattgcctggggagaggagccacagtcccaggacacccctacagaccactgacctgccagagccacaaatgctgcacagacagggaacagggcccccacatgaagccccacttctgcatctgcaagctccacacatgtgagcccactggcacaggggcagatccttacatggacagtttgcttctgggaaagtccctgtttgtctccaatgaagagtggcaccaagtaattaccacgtggcaggcttctcaaggttaaaagttcaactgattgacctgcaaagggaaaaagaacatggcatgcattgactcactcatctgctcatctgctcaacacacgcttactgaacgccctgcacgggccaagctctgtatgaaagtaagccaactgcagagttagagggaggggtcctcaagggtaccctcacttctgacatcaactgcaagttcacggattcctaagaccaccctcaggttcaacaattctctagaaagactcacagaacacactgaaagttgttacagtgatggtgccgttttttacagggaaaagatacagacgtaaatcacacaaggaaagaggcacctagggcagagtccagaaaagcaccagtagcagagcttctcatcatccactcccgagaagccaggtcagcatcgatgagggacagcacacatgggatgctgcagtcagggacgttcacctgagcctcaggctccagtgtcctcctggggcttggtcaggcaacctggtgggcctcccaggtgggcggcctcagtctccagcctctctggtaatagactgatactatgtgaccagaagtccccagtgtaaatcacattgcccctatccggctcagcccaagacaccccaggtaaagagacactggtgtcagacatgataccccaatagagatcacccagaccccaaggacaaagaccagacctctctttgggcaaggcgaagtgctttaccacacactccaggtctgagaactacaaacttgagcacacagtttcagctgaaaccgtgccacagtctacagacgccacggctagaggcacagaagagagtgttgacagtggatgccagttgcttttaacctgctcagcatgttcatcttctggtaacagtgccccagtgtttccttagggaagcccacacttcctgaattctcagtatgaatcaggagagggtgagcccagatcccaacaaggtccaggtgtgggctgggaaccagccaatcagcacatccgccctcccaagtcccacccacagtgattgacagggcagctgacccaggccaaacagtgacgtcaatcctggagcttccctggaaacacccttcttgccagatgcaagaatatgtctcagggactcccagcagcctcctaccccctgatgaggagagtttcctaaaaaagaaggaacctagagaaaggcagaccatgtgtgggaaggatatccagggatatcctttgagcacctagagccagctctgccagaacgcagacctctccggttttttaagctaataaagtccttttttgcctaaatctgtttgaattggatatctggcattttccactctttgcccgtaaccaatacaaaaactcaccccaatttctccccaacttccatgtgtcctccgcatttccccaggtattgtccaattcaaatgtaaatgggtcagagaacggctccaggtccggatcctctgcctcgatgtggaggggctcatgcaca

SEQ ID NO: 1561701 - DNA, 4001 bp, Homo sapiens
gtgtgtgtgtgtgtgtgtgtgttttaacataaggaactccattctgattctgacaactttcgcagtaccaagggcttttacgcatttcctcattcactggtacaaccactggctcagataaattcagttactagctccattttcaggtgaagaaaaataggcttaacaaggttatgttaaaaccagtgcactgacacccagtgcactcccaggtcagctcaacctgaacctttgggggcaaaacccaggcactgagatcccttgaagctccctaggtaagttcaacttgatccaaggtaaggaacaaagttaagctggcctaggtccccagcgggctgtgaaggagcctaggtcaggacgccaagcagcccagtccagagctcacagttaccagccactgggctgcttcccaccctcagctggtattcaaaggaagaaatgattccctctccctacctacagaaagccaacgaagcagatcataaccaacaagcgcatgcaacattacctctgtccactctaagtacaaacagagcaagcccatgtgtttcgaatcctgactccactagtttgtattcccatttaaacagtggcagttgggggcaatggatttagccattccatccccatgggtttgctcaaattgccttggatccagacaactgagatttcctcaatcttatgtaaagtgtgaacagaagtatcattataaaacttggcagggcgcagtgtctcaagcctgtcatcctaacactttgggaggctgaggcaggcagatcacttgaggtcaggagtttgagaccagcctggccaacatggtgaaaccctgtctctaataaaaatacaaaaactagccgggcatggtggcgtgcacctgtagtcccagtactcgggaggctgagccaggaggttgcttgaacccagtaggaggaggttgcggtgcactgagatgtcaccacgcactgtagcctggatgacgagaccctgtctcaaaaaaaaaaaaaaattgtgtgtgttggctgggtgaggtggctcatgcctgtaaacccaacacttcggaagggcaaggcgaataaatcacttgagcttaggagttcgagaccagcctgggcaacatggtgaaaatccatctctataaaaaatacagaaattagccagcgtggtggtaagttactgtagtcccagctactcttgaggctgaggtggaaggatcacctgagcctgggaggttaaagctgcagtgagccttgatcatgccactgcactccagcctggatgatgaagccagaccctgtctcaacaaaaggagaaagaaacaaagaaagaaaacacgtgtgtgttgatgtaatctcactaaaaatagtgtgaactatataaattagttttaaacaggtcccttagcctgctcccactgttgccccaaacagactgggacccttaacttccctttatataaatccagagcccctgctacctaagccattctcaagacagccagccctgggtcccagcaggtcacactcagtccctctcccctcccttagcctagaaggggcagggccagcttgtgctttgctttcagttccctgcacctgagcactaggctgcaggctcagcttacctgcagcagccacagcagcagcactagaagcagcagcagcgaggggtgcctcccggatctcatggccatatgggaatacccaagacagacccagaacgtgcagctgatgaccagtcctccaagctggtggtctcaccggagccacacacctccttctcagccagcagcttcttctctaaaggttttcaggtcactttggcccagatgctttcatcccatcttgctcctcccttttcagcttttcttgcatttatcagagtggggtgggctgacttgtaagcttgaacatacgtttgccacaagtagagttcctaggaagggtggggtagaaactaaagccaccatggtcctgcacgtacacaaaagactggctggggtctgacctcaggaacaacagctcagccagcggaagtaaaaccagcacctatcggaaagcagaattatttgtttctttgtttccttgtttgttctggtttccaaatagaaggtccaatcatctctttctatagcaggatatgttagtgactattttctataatcttatcctcttgaaccaaacaaaaaaaactagaaaatgacaagaatgataactttattaagggggaagggatggggaagaatgaaagaaaagaaaaatcaacttttactttccaaagcactaaaaatcgttattccaacaatatcccagggctctggggttttcaaattatttctactaaaaccttttttaagcttagattaatctgcctttttgagtttggaattaaagtgggagggaggagagatgggaaagagcctccctatggacagggatctctgtggcaacccgggagtctttgcatgagaattctgaaagagacaatttgagattatattataccaatacttaaggttgcagtaagcaagttttaaaacacaatctgtgatacattaaccctgattaccttaacatgacctttttatcacattaccttgtttaaagtagtaaacagataaaataaaaggtaaactttctttgcttgttctagatattggcttaggcaaggatttcatgaccaagaaccaaaaagcaaatgcaataaaatcaaagataaatagctgggacctaattaaactaaagagcttttgcactgcaaaaggaacagtcagcagagtaaacagacaacccacagagtgggagaaaatcttcacaatctatacatctgacaaaggattaatatccagaatccacaatgaactccaacaaatcagtaagaaaaaaacaatcccatcaaaaagtgggataaggacatgaatagacaattctcaaaagaagatatacaaatggtcaacaagcatatgaaaaaatgctcaacatcaccaatgatcagcaaaacgcaaatcaaaaccgcagtgcgataccaccttactcctgcaagaatgaccataatcaaaaaatcaaaaaacagtagacgttggtgtggatgtgacaatcagggaacacttctacactgctggggggaatataacatagtacagctgctatggaaaacagtgtggagattccttaaagaacaaaagtagaactaccatttgatccagcaatcccactactgggtatcttcccagaggaaaagaagtcattattcgaaaaagatacttgcacatgcacgtttatagcagcaaaattcacaattgcaaaatcgtggaaccaacccaaatgcccatcaatcaactagtggataaagaaaatgtgtatatgcgtatctatatgtatatatacacatatatgcgtgtatatatgtgtatgtacatatatacacatatatgtgtgtatatatgtgtatgtacatatatacacgcatatatgtatatatacacatatatgtgtatatatgtgtatgtacatatatacacatatatacatacatatatacacacatatatgtatatatatacatacacatatatacacacatatatgtatatatatacatacacatatatatacacatatatatgtatatatatgtgtatatacagatatatatgatggaatactactcagccataaaaaggaatgaattaacagcatttgcagtgacctggatgagattggagactattattctaaatgaagtaactcaggaatggaaaatcaaacattgtatattctcactgatttgtgggagctaagctatgaggacacaaaggcataagaatcatacaatggactttggggaattggggggaagagtgggaagagggtgagggataaaagacaacaaatatggtgcagtgtatactgcttgggtgatgggtgcaccaggatctcacaaatctccactgaaaaacttactcatgtaaccaatatgccacctgtaccccaataacttatgga

SEQ ID NO: 1561702 - DNA, 4001 bp, Homo sapiens
aaacaccaacacttttcagcatttcccaagcaggccacactccatttgtctcagtcaccccaatgctctctctttccacccgtctctaaccgctgttctgcacggaagccagaggcaataatgtattagctgtattatcgcaggctgcaggcttcaaggaatgattgccatttaaactatgaagctctaaacatcagataaggagactggagatggcggatggcagcgccacctcccccagcctgagtctattgtagctcagagcaggagcggatgtggcctgttttgggctctacagaaacatgtttctggtcttaaccagagaagaccttggaaatcatgaaccgtctgtcggagaagaaagttctctcctccccatttcaccagagccattcccaagggcctgcctgctgtggacacaggaatgacacgatgtcaaggagagatatgcttagcacaatgctgcaaagagagctgagtgctcaggaatttgaagagtttccatttcctgcctccacatcaagagcggctgcgtgggcctgagggcatgcctgcactgggggctggatgtcccagtgccagttcaacctcaaggctcattctggatgggctgtgaggctatacgtcaagtacttgacacgccaacgatatgaaggaaacaggatttataaagactaaatattaacatgcacagaaaatgcctctgcctaatgctgcagagacagttcctcttcccatcagtcacacagccctaccttcttatgatacgcaggtgtctgtgcctctcagaggtcttttcctctctgtgtcttgagaggaaagagcacacattgcagaatgcagacattcccttccttctgtgttttcccagcacaacaaatatacctggttactcaagtctctttgcagtgagctgcagggcctgagacaggacccagagtcggcacaggcagccacccaggtggaaagacactgcattttgtttctctccctctccacgcccgtgatgtggaattgtaatgagcaactactggggactctgttcccaaacaagcatcttaattcacgctgcaattccgaacgcgagtgagcaatggctttataattggtgatcattgtgcacgtggctgccttggtgcccatcctttatcagcaccgtgcatcctctgaaaaatttaatttccatttcccagtgcagcttatgatgatacttccattatttgacaaacacaacagtagtatgaacatgttactgacacacgggaccatcccgaggccaggggacgccctgctccattcggctgggcctcctcctcctggctgaggatgccacagtgattccgacagggaagtgacagccctcacacccagcgctgttgtcatagcaacaagagtcataaaactaataataatagttctcatggcctagcgcatgactcagggacatgtaagctgcgcccgtgcctcctgggtgctttgcataatggtgccactgacccttccaaccacccctgccacagacagaatcgatgcccacatctggaggggagaaaacaaggttccatggtacaggctgggggagtgcaggagcactcagaggtatccggctcaaggtgcagatgaattcagggtctcctcatcgtccccaaagccttgctcataagccctgttcctggtgtctgctcagcacagaggtgaggagctcaaggttgacacccccgtgttcctgccctcatgggatggcaggtggcactggcctgcgtttgtgggctgggatctgtcctgtgtctgcaggctgaggtctaaattctggcttggagccctcctccctgtgtgacctcagggacactgtctgaagcatcagggcccagttagataaagaagtggcccacaaacaaccctaagcccccctagcacactcacacttgccttctttaaagcagggtagaaaggaggcgctgagaatgaagtcacagctgccgttcatcgaatccttgttctgaaccaggcacacctgcaccccagtcccgcataacctttaacagggcagagcaagaggcactgctatccttctaggtggcgaaactgaggcataggggatgaaagtacctggccagagtgagcagcatgaaggtccggggctgtgcccccaacccagatgctcctgactgcctgacgctgaggatgagtgggcaaaggtgcctactggcttccgcaaccagggctccaggagctacgaaaacacaaccacaggcagcctgacctccacagccacagtgcagggaggctcaggagggacctgggtgtccgaagctcctttccatgagcagtgaggaccaccgtaagcatggaaacctgcccccgccatgcagcctggaggccatgctcccggcaagtcacaatacgcccccatctcctactcaaggctcaggacacgtggggttctatcctctactggaaggagactcattccgaggagagaagctggggctgaatgctaggttccctcgtcctttacagaagacagctggagtaaagggctagggcaaactcatcccacctgaggtcctcagagcacttgcggcccaggacggcttcgaatgtgacccaacacaaatttgtaacctttcttaaaacgttatgagatttttttttgcgattttcttttagcttatcagctatctttagtgtattttatgtgtgacccaagacaattcctcttccaatgtggcccagggaagacaaaagattagaccaccctggacagagattctggagatcctggttaaactacgtgtgttttttgggaggtcctcctgtggccctgtgaggttcacctgcagattgtaacaggaaaggagggtcactatgtgatcctggaggttcctcttcaaattccatgttatttttatattaagagtggatttttaaaaattcagcagtgagtagacaattctcaaaggtgtcaccggaagtcggagctgtttgtctctgatctgagtgtgtatagcattatcgattacactatcaatacagttccatggcaggaagagtttcagtgtacactgtggtcatctgagctagaacattctgaaactcctttttcaattaactggaaaatcaaccggccaaccggtgggaacacctcactagtcttgtgtgtttatttgcccatccgatctggtcttcacaagctgtggccttttttttttattattatactttaagttctagggtacatgagcacaacgtgcaggttagttacatatgtatacatgtgccatgttggtgtgctgcacccattaactcgtcatttacattaggtatatctcctaatgctatccctcccccctccccccaccccatgacaggcccctgtgtgtgatgttccccttcctgtgtccatgtgttctcattgtttaattcccacctatgagtgagaacatgcggtgtttggttttttgtccttgcaatagtttgctgagaatgatggtttccagcttcatccatgtccctacaaaggacatgaacgcatccttttttatggctgaatagtattccatggtatatatgtgccatattttcttagtccagtctatcactgatggacatttgggatggttccaagtccttgctattgtgaatagtgctgcaataaacctacgtgtgcatgtgtctttatagcagcatgatttacagtcctttgggtatatacccagtaataggatggctgggtcaaatggtatttctagttctagatccttgaggaatcgccacactgtcttccacaatggttgaactagtttacagtcccaccaacagtgtaaaagtgttcctatttctccacatcctctccagcacctgctgtttcctgactttttaatgatcgccattctaactggtgtgagatggtatctcattgtggttttgatttgcattttttcgtttttctttttttaacaacaacaaaaaaccccaaatctttcagtagcctgtgatgt

SEQ ID NO: 1561703 - DNA, 4001 bp, Homo sapiens
tgcatccatctcctctgcacagacctgggtggtgaagaatgggctgcatgcgccccgccaggtgcaactcaactgagaccagggaaaggccagacagggcccagtctctgccttccctcccctggactctgcagcattgtgggagaggtgggcacacacacaggagggcagagggtgcatggtgggcagcgggcgggcatctgaacaggccccgggaagagcagggccgagggttaggccggggctgacgaggagcaccgcagtgttgggccgcaggctgcccaggtgactccggagatctgcagggagggcacaggtgaggggtgtggggcactgggcaccagaggagggaagccaggggacacaggttagatgtttgtcctacccaaatctcccgttgaactgtgatccccagtgttggaggtggggcctggggggaggtgttgggtcatggggatcccttgtggcttggtgctgtcctcaccacagtgagtaagctctcatgagagccggttgtttaaagtatgtggcaccttccccctctgtgctcccctatcaccatgtgaggtgcctgctcccgctttgccttccattatgagtaaaagctccctgaggcctctccagaagctgagcagatgccggtgccatgcctgtacagcaggaccatgagtcaattaagcctcttttctgtataaatcactcagcctcaggtatgtctttatagcaacacgagaacagactaacacacaagggaagctgtttcagggaagggcactcaggcaaggtgcctaaggctgagtaggagctcgccagacagcaggcaggactggaaacaagtccacagggtcatggtaagatacagctggctttccacacccgcgggttctgcacccgcagattcaaccaactgaggaccgaaatatttaaaaaaatatgaagtgacaatgtaataataaaagacacagtctaactatttacatagcactttgattatattaggcattataagtaatctagagttgatttaaagtatacaaaggatgtgtgtaggttacttgcatatactatgccttcttatacaagggacttaaggatcctcggattttaatacccctgggggcgggcctggaatgaatcccctgagggacaatagttgtgaagacagcagtggctggctgagtgcttcctgggctgaggcactgcgcagggtgagttgcgggcattcatttctgaattagattctcaccgctgtcccgccacctgagcaccactatggctcccgttgcagagatggctcaggctcagccactagagtgactccctcaaggccccagagccaggaccccgaaggaccctgccaggcaccgaagcctgtgtcctcaatcacaacatgcctgtgcctcgcaggagatgagctgcagagaggacactgggccatccccaccctgggaaatacggcacgctcacagctgggaaagcaaggaatcccggaatccaggtgatcattgaccccgacaccctctgtctccataacattcttcactaaaattagatgcacaggcctccggttctgcagcagcggcctcaccgccacgccctcgcgcgggacctgtgctgctttctcacggcttccccatttcattctcagcagcatccgaggagccagctggttttgaaaaccatccccggagagtcagacagtctgttcaaatagagaggctcttaaattataataaacccttcacactttccccatcattagcacggggtacctgtcacttcagctcagcagcagcagcttctctgtggagaggccgttcctctaccctgtggctgggactccttcctccctttattttccaagctgtgagtgcacggctgagaagattgctcctgtgttgtgtgcggcgaagggaagcgggcttcagcttcaaccaggaacaggaaaggggcagcatcattaaggcagagggagaaagaagaaagccagagcgccagtgcgtgggagaggcagagccgcgtcaggaggaggagcggggcctcggcagatgaaggagcccagacgcagagaccacgcgagaggcttctccactctgtgtctttcactgggacagggctattgtcttggagggaaatgccgcctgcctgcgctgctgaaatgttcctgcactgatctgggggctgccccgcctgggaggctggccggcttaggtctgtcttccacgtatccccttgctgctccccacacctccagccacagtggggtcaggggggtcaggagggtcggcctttggaaagcccttgctgagtgcacactcagggtgctgatgaattcacattgtgggtgagaaagggcagggccgaggcctggctctgccacctgacacttgcctgtccctcaggcacatccatccagcgtgccccctcttgtctgcagagtcccccagcagaaggaggtccccagtccgacacccggcacagctgcccgctcagccgggtgaaagagggcacagcccttggctgcagagatggtgaatggcatggcagggcggggtgggagtgatcagcaggacatggaaacgaagccagctctccaagagcgacctctaggggcagcaccatggtgggagatccaccaacctgcaggggcggattggaggtccctgaaaaggagagtgggaacttcccagggacgtggtgtcaagaagtcagcatcgtcaaatttattcaaaagggagaggcaacactgacagaacctgaggcttctcccatgaccactgagggactcgtgttagcccaacggacctcaagatgctcataaaaaaggcgaccctcactgaccgcagagacgcccaggctgcgcagtgtcagccctggaggagccatccagggaagcttggcgggcagtgcctgcagtagggaaggggcctcgggtactccgaccacacttccatggaggaccccgccatgtggggtgccccgcagccagtccctcgggtgcgtcagcaagcctggcctctgggacgcgtggagaagagggtgagaaacacgatgagatctggcctgtggctaaggcacagacggcaaagtccccgttctacaggaaaactggtcccagggtcgggtgggaggtgggggctccctctgcacatcctccccacacgcgattctggaaaggggtatctccacaccttactgccggcaccgcaggggtcgtcactccctgtttcggccactcaggtcccttttgtttcaggagggggtgtggctctggctgaaaggcgagtgctgaggccacagatagcaggagccatagtacggaaggagggaggagcatgctctgctgaggtcctgggctgggggttttggggggtgcatgacctctggagcagcccctgaggtgacagtggccgggggggtggggtcccagtagggagcaggggtggcaggggctggtgttggaggcaggcatgggaagcaggcaggccggtgggtgggaggggcttggagaggtcccagcagccaattcctggaaggtgctagaaggaaaacatcccagcaattcagcagatcagagggcagtggggtcttcccatccagcatgcccccaagaggcaagtccccggcgggtcaccatcacccccacagtgcccggcgtgtctggccattgacaagagcttggcatgtgttcactgagacggaggtgggaaggggcttgggatttaacctgctgacaattcaggagccctaaaggggctttttaggaaaacatattctaattacaaaatgaataagtgtttaaagcaaaaacttggagaaaataggaaaaaggaaagagttctctgctggtccaccctgcccttcagtctctggtgggttccgtccctgccctctgaggctcactccacgcccggctgcatctgaggcttggtcttgtttgtggttggctctttcattgttttgtccactttggatgaacatttttgacctcaggttgatgt

SEQ ID NO: 1561704 - DNA, 4001 bp, Homo sapiens
attcgcgctttaggcccaccgctctgcgctcttggtaaggcggaggaggcagcttcttgtctcctctccaggtcaccgggagggaggagaaagaggagagaaaggaagaagattctctaggactaggtccggagccggtcgaagaaggcagctctgcgggaggctgccggtggctggggtgaggaggcagtgggggcgcttccaccttctagtcttcagcccgcattttcaccctcggagcccccatctccagcccaggcagggagacggctcccctaactgaccggaaagggggtctcctcctgtcctccggagctcgctcgcctttcctgctcagtggggaagtctagagcccatggcacagggccagggaaggatggggtggacgacagggccctccgaccaagcttctgggagggggcgtgacaggcaggaggaggtggtggagggagaggcagtgtgtgcaagcgggaagccagccccgctgaaggagcaggagcacagcggtgcttggctccccggcgagcgcaggaagcctcgggtgcagcccgcaccgggcagtggcgcctcccgcccgccgcctcctccagctccgcgcgctgccgtcgcccgcccatgcttcgactccggaggccgcccccagcccggagctccaggcttcccgacgccggcaccgcggagggcgcccctctacccccagcaccgagggaggagagcgggacgcagggtcattccttacgaaaagctctaaaccgcggctttcttcatcggccacgaagctccaaatcgcacccgcagcccggtgggaggctcaactcgcccaggaaagtttccgcccgcccgaagcgtgtgcccagcgcgtcccccagcgccccgcggcctcggagcgggcctcccgccgctggcacttgtttatttccgaggttacaacagcgctgcccgggagaaggcagcgaggccgatcggccacgagagggggttcctgcaactcccgccgcccctccgcctccgcccaggggcgcccccggagccgccgcgctctctgcccccgcgggccgcgcacctcgccaggcgcagagcaaagctggcaatccggcccgcggggctctgcagaggcagcgggagacccgctcgccctcccggggcgccctcccgcgccgcgcccgcccggcgtccggcttcccggcccaagcccggcccagctcccagcccccggggccccgccggacacgcaggctccagccccgccgagggctcgggggtgagagtgccccgcagtcctaccccgccgcccacccgcagcgcgggtcctgccggcacccacagaactgagcggcgccgctagacggacccccaggccttgggcaggagaggtcgggcaggcgccccgcactcgcggatccctggcccgcagccgccgggcgccccacgccttcagccacggccggggctgggctcggcaactcccgcggcgcgcggctcccgggcgatggagggcgcgccggctccgccagtggaagcctgccccatgcaggcaagccgagctccgggtagcggctacgggctttgggcgttcgagggaggctcggcgggtccggtgcaggcggagctccccgggtcctccaccgagccccactcccaccctgctccgccgctccccgctgcccaggcggcttcccgctcctgccgaccgcaggcagcttcgccgagcgcgggcgccgggctggatgcagcggggagcgcggcgggggagcccgggagagccccgccgggtgtgtgagcgccccgcgggatccggggacgacctcccgctgcccggggcttccgaacggcgggggcgggaggcggcaacttacccggagcgcgccggagagcgagagcagcagaaggagcacgccggcgcccgcggtcatcttccccgccgcccgcccggtgcccggcaccgggagcccgctccctgccgccgccgccgccgccgccgccgagaccaccgccgccgctccgatcgccgccgccgccgccgctcccccgcgcctgcccggagcctccagccccgctgcgcccgccgcgctcgccgccccggctccgggagccaggccaagtccggccggcggcgcgttccctcgggccggtgcgtccgccggcctcgcagccgcccgcgcctctgttccgcgcgctcggagctgcaggtgaagccgcggccgccccgccgaggccccgccccgccgcccggcccctgcgctcgctctgccgacgcgggccttaaaggcgcagagcccgcgcccgcgccccccgcgccgcaccagcccagcctctgccctcctggacgtctggagccgcccggttgcggccgaagaggccaaggacgctcgttttccaggggaaaaaggcgcgggtgtggagactgaagacagcgctggggtttccgcccccacacccggggcaccctttctggatggggcggtcccgccgcggtcttagtccgacttcccgcccgggcccgcggtgggagtgtgcacttccattctgtccttttatttttcaggtgtctccttgctaactcccctgacccgggcttgaacccaggtcgggcagctcaggggtgagagtttccacctggagcagatgagcagagggccacgctgagatttcagcctgtggggctttgcagaccctcccgctcctaggaaaactcaaagccctggcctgggctagggatgtaccctaggattggggacggtagtaattcctgtgtgtgcatcaaaacaccctgttaggcctcagaagccaagaaagaaattagaagctccaagaaagaaagaagtgcccagacaggagctgtcaggagtgtctgcgccgacaggctgggccagctccagctccctttgccctgcatgggtgatggctgaactggggggcacttctttaagggttatcaggtaaaatatatgtacaggtcggacagtgagtaaatgtttctgcacttttccttttggcttggagatttaaagaaacgcggttttgtttgttcagatacatcgaattttctttgtctggggtttcagggactctgtgtccagaatacattagttctggtttaagaaataggttgcaaaggagagggtggaagattgagtgacactgttgagctccaagatcagagtccacttgggcaagccagtagagaaagctacagagcagccgcttccctctctccctcccagaacccccacccttgggggcagggtggtctcccggttagagctctgccttacgcttaaggaaaccagattttagataaccccagaggaccagagtaagcactacatccgagagcacaaggcgagattcggttttgcaacttaactatggaactagtcaggagacacaaaatctgccccagcctggactcctatcagttatggccttgtcccactccccacctagccgaagaaggagaggttaccagttgacatggctggaggtttagactcactcgaaggtcctgcgtagccagtgaggtttcatgaacagatccatccaaaatcctcatggacagagaattccattcctcggccatgtgcccgtcctttgggaagacgccccctctgctttcctccttattcaaggtgcttcaccactgctcgagcgacatcagaagctgtccaagactgctttagacaccaagacagctctcttgtcttgtgtccctggtctattttcttaaaatatctgtcgctggggatacacctttgtctgcaggaggcctgagcattatgcgagttatttctttggagaggcatcacagacccccgcatttgctccaacgtgctctgcgaaactgttgaagcgctgaggagcgcgccaatttgaaaaagaaaaggtatgagtgtgtggcagggagactggggtccaggagcaggtgggtcctgaactccaaacactgtgttaagcacatctccctctactactgaatgaatcttgagtctactgcagcgtga

SEQ ID NO: 1561705 - DNA, 4001 bp, Homo sapiens
tctcccattgtggtagctgcctcacggcaggtgctaaacatcagtggttcccaacctttttggtactaggaattggtttcatggaagacaatttttccacagacatggaagcaggggtgtgttgaaactgttccacctcaggcatttagattcttacaaggagcatgcaatcttgagccagtgcggtggctgacatctataatcccagcactttgggaggccgaggcaggcggattgtttgagctcaggagttcgagaccagcctgggcaacatggcaagaccatgtttatttgttgtctctacaacaaattaaaaaataaaaaattagccagccattgtggtatgtgcctgtaatcccagcaacttgggaagctgaggtaggaggatcacttgagccagggaggcagagattgcagtgagctgagattgcgccaccacactccagcctgggcaacagagagagagagaacttgtctcaaaaaaaaggaaatggaatgcacaaactagatgccttgcatatacgcagttcacaatagggtttgtgttcctgagaaactaattccgtggccaatctgacgggaggcagagctcaggcagtaatgccagctttgctgctcacctcctgctgtgcaacccggttcctcacaggccacagacaggtaccattctaccacctagggttaggggaaccctgctatacacgtgtaaagagcagatgtggcccattacctttccaatgagatgacctgccacatctgctactagcacttaggagcaatgccaacccagtttcaagagtcagagaagaacagccttaaagtgtgaactttaaaatcgcccctttctactccataattgctgtgtgacctttggcaagacaaatttctgtctctgagccgccaattccacatgtgtaaaataaggataaaagcagcacctaccaccccataagtgttattaagaataagatattaaaaacccaacttgagatacagtaagcgttcactaactgcacatttacagcccacaccccctttcacagagagtattagagcatcctggttaagagtatgaactccactaaaaatacaaaacttagccgggtgtggtggtatgcgcctgtaatcctagctacccaggaggctgaggcaggagaatcgctggaactcgcggggcaggggctacagtgagccgagatcgcgtcactgcactccagcctgggcgacagagcaagactcccgtctcaagaaaaaaaaagtatggaccctggagtcagaatctgaccccactgctgccaagccagctaaaccttaggcacctgtcttaaactctgggagcctctagatggggataatagcacctatctccataagcctaccgtaggatcaaatgcaataatacaagcaaaatgctttgcataacgcaatgtagaagcctctctggaggctcgaaattaattctgacagtcggcaatgaggctggaacaacagcgtacaacatcccaaacattttattggctggttacaatgcgttaggcatggtgcaaagcattttccgcgaattattacctataaccctcatagcaaccctgtgaggcaggctgtactgtcaaccccacttcacgggtggcgaagcgaagccttgaaagaagtggaggtgacctgtccaaggtcacacggggttaggcggcggggttagggtacgaacccctacagcctgacgccaggccccacgccataaccaccgtgccatcctccctcttgaacaccgtgcgcttcccgggatccgcggcccctcctgccccaggcgccagtcaaaagcgggtgcgcagcccaccccggcggccgcgctgctcacctcccgcagcagcaacagtgcccggggtcccgcagcgtaagttctgccggcaagtcggatcccctcacaggtccgccgctgcgttcatacacaagcgacttccgttccgccgctacttcaggccgggtcatgctaacggaagtgcttcctttttacagtccgggtggacccaaagctccgtggcggtgctgaactttagggcagccactagccacggacttaagcggcaattgagctcctcaaagtgggtgagtgcaaatcaaatgtgcgctaaatgtcagatacactggatgtggaagaagaaatgtcaaatagtgtcaaatagttcatatatataatgtttatattgattatgtgctgcaataattgttgggatatattggattaaataagtacatttgttgaattagttttttttatttgtagctatggtggtagaaatatttgaattaagttcacctgttgtttctttttactttttcaatgtggctagcagggggaaaaataatatggtgtgatcatggctcactgcagcttccgcctcccatgctaaagcaatcctcccacctcacactcccaagtggctgggactacaggcaggcgccaccacgcccagctaaaatttttttaatttttttgtagagaccggtctccccatgttgcccaggctggtctcaaactcctacctaggcgcaagccatcctcccaccttggcctcccaaagtgctgggattgtaggcatgagccaccgtgtccggtccttactgggaaattttaagtcacctaagaggttcacgctctatttctattggagggtgctgccctgtaggttaatgacttcctgattcacatctccagctggaccctccctgcagtaccagagccatagctcagctgcctacttgacaccccttcttgagtgtctgatgaccatctctaacttatacagaactcttcatttccacacatgcaccttcaccaaaaacctgtacctgtcattctggcccatctcagtaaatggcccaaccatccttccaggtgcactaggaggaactgaatggtcattttcttcacctccctggatccccacattctatctgtcagtaagccctgtcaactctaactccaaaatgtcaaatctgtctactcggtagctacaactacccaggccaccattgtctcatcagaaacaatcacagtagcctgctaatggtcaccttgtctcctgagaacagtttcccacacatagcctaagggaatttgtgtttgttttattaaatcaaattatatcacccctctcctgaaaactctccgtggcaggccgggcgtggtggctcacatctgtaatcccagcactttgggaggccaagatgggcagattgcttgagcccaggagttctagactagcctgagcaacatgataaaaccccatctctacaaaaaacacaaaaattaccccggcatggtggtgggtacctgtggtcccagctactcagaaggctgaggcagggaggattgcttgagccagggaagttgaggcggcagtgaaccatgacctcaacactgcactccagcctgggtaccagaatgagaccatgtcttgaaaaagaaaaaaacaaaaacagccgggcacggtggcttatgcctgtaatcccagcactttgggaggctgaggtgggtggatcatgaggtcaggaattcgagaccagcctggccaatatggtaaaaccccgtctctactaaaaataaaaaataaaaaatagctgggcatggtgccgcgtgcctgtagtcccagctactcgggaggctgaggcaggacaattgcttgaacccaggaagcggagattgcagtgagccaagatcgagccactgcactccagcctgggcgacagagcaagactccatctcaaaaaaaaaaaaaaaaagaaaagaaaagaaaaaaacaaaaacaaaaagcttaagagctttccattgcccgtgcaataaaatccagatttcctactgtatcctaggggcctgcatgatgtggcccctgctttttttttttgagacgacgtctcactcactctgtcgcccaggctggagtgcagtagtgcaatctcggctcactgcaacatccgcctcccaggttaaagcgactctc

SEQ ID NO: 1561706 - DNA, 4001 bp, Homo sapiens
tgcatactcaccaactagtagtacaaggtaagtcagaattctttcaggctgaaccaggatagccaaatgaaaaattagagacttcaaagtatcttgtctctgcaagcgactgctaaatcctcagccccagccctaaatgttctccaaaatatgtttttgtttttgttttttgagacagggtctcaaactcctgggctcaagcgatcctcctgcctcagcctccctagaagctaggattacaggcgagcagcactgtgcctggccaaaatatatgttctaaaaatcggtaggaacagttctctttggatagtccactgtcaactgcaataacacgaaagttgtttaaaaaaaacccatgatctcattatctttcaccaaaaacattcctcctagtgtaactgctctgttgacatcctgtcaccaaatcttgtgctttcttccttctgggtgtctccctaatgtccgttgcgtccagtcatcaaaaagttacaggctgcattaggggaagccgtgagcctggtgtaaggcaacagggattggtgggaaccgatgatcctcagctccagccaaccattgagcaggtgacaaagtgatggtggaccctccaattatctaagacaggcaagaaatttagattgttaggagaaactttctgatttttaaggcaatatgtgggccaaagaaaacatctacaggtcactcatgggcaatcccgagtgaaccaggctccctcagtctggtccaggctccctcagtcccttctacacatcactgtctgatcagtttcccaaacacagggctcctgatcactgctatctcggaaagcacaactactgctacaaagtcctatactgccattcaacctccacagtaataaaaccaatccctaccttccttaactcccctacacagatctttcacttcacccaaaggagtccactcccccacccgtcacccccgccactgtccccgccaagatggcctccttcctactctcctcccctacccaccagagcccacacggtgcaggaaacaacccatcaaccgggaggacgccctccaacacctgctgatgacggactggctcactgggtaacacccctttgctcaaagccgatgatttcatgcccaagaagggatttacatctcccaggaggcaaatgctatggccttgtcctgattcccccaccccccaaaataataacattgtaaaagggaacggagagcctaagttgcgctcagaggagccgcctccctaagaaggctctgcatatcttcacctccaggaaggcctcacggagttgggggagaggggagtccccgcagccagcccagcgaggcaggaggccgtgcgccactcccgagaagctccttcctgcgccccgggggagccacttcagtcagaccctgagccgggaccccgacccgccgacccctgacgcgcgcgccgcgaaggccgggcacccgagggcccttcgcgctacccgggcccggggccgccgtcggctgcgacaaagggtcagagaacaagacgacccctctgcgcgcgtcccccgcaggcctcccggatgcgccgctgtcccggccgcgcccaccccgacgctgccgctaccttgtcctcgggtggcgcaaccggctcatgggccaccctctgcctcagctctgtcatcctgggaaaatcggcccgacgtcgccgcgagctagcagcgaagccgccggagcaggcagctcggcgcgggcacgcgcggactcccacggccggccccgccccgcccgggaggcgcgcggctctgagcggctcacagttcccttagcagcccagcagccagccctggagctcggccccacccagtgccgtcaccgccctttcacccgggccgagcggggtcagccttccctagccccgacccgagagctccctctcccgggagcagggctcggagcgagtgcgcacgcgcagcgccaccatcacggtccggaatatccaccaatggcgcaaatacgccagggaggcagggcgacgggggcggggcggggcggagcagagtcgagaggcgcgcattggacggcagcgtcaggggcgggaaaaggcgtgcgtttcagtgtgcgattagccaatgggagctcccgcttaaccgcggatggccggagctggcgccctggttctggaggtaaccggttactgagggcgagaagcgccacccggaggctctagcctgacaaatgcttgctgacctgggccagagctcttcccttacgcaagtaagtagacgttatttaggtcgaatggaaaggccaggtgagccgacctggttaagagcattttatcacttatcacatgatgagaaatgaaacccacgcttcagtctgctttgctttgccaagcggtcgctagtacttgttaagcactaattgtatactaggcactgagctgagtaatcgctttagttggcttatctcgtttaatccacacatggcttggaagtgggtatgatttgaattttacagttaagatcttcctcagtggtttgtttgtttgttcgtttgtttgtttgttttgtgacggagtctcgctctgtcgcccaggctggagtgcagtggcatgatctcgactcactgcaacctctgcctcccgggcgcaaacaattccaaggtgcgcgccaccacgcccggctaacttttgtatttttagtagagacggggtttcaccatattggtcaggctggtctcgaactcctgacctcaggtgatccgtccgcctccgccttccaaagtgctgggattacaggcgtgagccaccgagcctggcccttcctcagtttttcaaatttgtcttctggactatggaaagaccttttttgggacagaagtgctgtctactttgtttactgtgcatcctctatgtctttgacacatccattgtaagtacttgttggatggatttaaaacttttaaaaggaccttagccaaggtctcccagctagaaagtgcctagtaagaattagaacacaaacaggtttgttaccagcccacactctaaccaccatactatactgcctgcctgcatttattaatacttgtgttgctccagcattgcctttggtgtttcctgttctttctattcactgccctgtaagtgatgtaaaacacatataacactgcgtccccaacttaagcatactgtaatctcacaatgagacacttgcacacaaaagaattgcaatttcgttttttaaaaaaatataattttacatttttcttcttttcaatttttaaattttaattaatttatttctcctttttttagagacagggtctcactatgttgcccagactggtcttgaactcctgggttcaagagatcctcccgcctaggtctcccaaagtgctgggattacaggcatgagctaccatgcctggctaaaatttcctattggtaattttgacctgagctgtgagttttggggcaggtagtgagaattctgaaaacagcattatatattcctgatttctatatgagtatatgcccgagtagcttggactacaggtgtgcagcaccacacccagctaacttttaaatttttgtgtagcgatgaagtctcactttattgcttaggctggtcttaaactcctgggctcgagcaatcctcccacataggcctcctaaagttctgggattacaggcatgagccacagcactcgagcaagatgatcttctaagacaggtgaagatgttagtgtctagaacttcaccttcaggggcacgtaggtatgaaaggtcatatctaagtgagtgtcatgtcagtccttctagaaactcagctgctccttttcaaatccagcctaataaaaggaggcttggagaatcaatgcacataagtcagaattatagaatgcacagcatgattactaggatggataacatgtggtctgaacaaacttctcatccattacactcagccctctcaggttaatggaactcagatcaagtatattcctga

SEQ ID NO: 1561707 - DNA, 4001 bp, Homo sapiens
ctcatagaaatagattattttttataatacaaaaaaagaccaaaaaacaaaacaaaacaaaacatcaacagcaacaagcccgtaggaacatctttaagcgattactcagggcccggctgacagttacacgtgggttgcgtcagtcccgtgtacacacgcgttcagccatgtttaaaccgattgcatcaacttcgaaaccggcccgcccgccggcgcctggagaggggcagagggagaagcagagagtttatcattcatctgtacacatagacgtttcttctttaaataacaccacgggcgggagccccatctgcatgtgcggttggtttggacaaaaatatagatatatatatataataaaatattaaaattaccgacgggctccccgcgctgccaagtgccccagtgccaaagttttgccggcgccgccgggggcgggggcgagggcgcgggcgcgggcgctccccggagtctcagccccggccggcagggggacgcgcgcgggggccgcgctagcagtggccggaggaggcgagcaggggctcgggcagctgcttgaacaagttccgcagggtgctgagctcgcgcgacagctgctccaccttcttctgcagccgctcgttctcggccgtgagctccaggaccttgtgctgcgtctccaggttgcgcatcttggccttgtcgcggctcttgcgcacggcgatgttgttgcgctcgcgccggatcttgtactcgtcgctgtgcttgtccacggtcttcttggccttgctcttgacctgcgagggcgccggcgcggcccccgcgtagcaggcggtcgggggcgccttggcgtcagcggggctcggcgtgccgggcgggctggacgaggaggacgtggagaggctcccgctgctgccgctcggcaccgcctggtagccgaggtaagcgcgcagcgcgtacgggaagcccgccgccatgcctgcgccgccgcccggcgccccggcctcctccttccgcttgcagtccgcgggctcgaagcccggctccgccttgagctcggcgggcggcggcggcggcgggggcggtgggtgcaggggcgcgaagcagccggggtgcagcgcgcccttggcggcccccaggcgccccaggctcacgtagccgtactcggccggcttcttgcagttcttgcccccgtagtcgtcggagaagaggtcggagaggaagtcgtggtgctgcccggaggaggcgggcgcgggggcgggcgcgggcggagccgcctcgaaggtgtccgtggccgtggcgggcgccggggcctgcggcgcgcccagcggctccaggtacgggctgaagtcgatggcgcgctcgtggtcgccgatgctgcccagctcgccggcgggggggcgcggcccgggtctggccgcggggggcgccgcgggggccgccttgccgccgtacgcagcagccaagcagtccgcctcgtagtagaagttggccacttccatggatttaaaggcaggcggcggcggcggcagggggagacatgctgggtcccaggccaccaggcgttgcatgaacgcgggtgcccggggagggggcctggggctgcccgctccggccggcccgcaggtggcgcggcctccctgctctgagctgtcgccgctgcgtcgctgctgctgctgccgccgctgccggggtggccgctattagtgagggggctggtggctggaccctcgggtgggtccccttcccagtcccgtgcgcggctctgactcgctaaagtttctcctgagcccggttatttataagggcggcccgtagcaaccgctgcgtcacgccggcccctcccgccgcgccgccgggacgcgaaggacacggccgcggccgcccgagacccccgggaggacggcggcagggcgcagcggagggaccgggcacccggagcgcgttttcggggggcccccgggacgcaggggcggcctcacgccccctgcccacccccgcccggccgccccgggattgggagcgagagggggcggtgcgaccccgcccccggaccgcccctctgggctggaggctgtcctggaaggcgggggaatcggaggagggggcgacctgatcgccttccccccgagacgcggccccggcccgccccctgctggaggaggcggaggtttcaggagggccgagcagagccccgacggccgaccagggtcggctccccgggccgaaccctggagaccccagcccgcagctctagctccaggagaagcgacccatctccgtggcccttcctcccgtaaactcccacctcctccccaggtccccggctttagaaagaagacttgacgcctgtgacgactcccctcttaagccacagacaatatgaggaccccgggggtcggcgcgaccgggcaggatcgcgccccgcttggggctggaccctggtccacggagccccgcccctagccccgcccaccacacctgccgcctgctcgaggcttggacacgcccgggtcttctcttgccccgcgctgcgccacccgacctgggccctgggatggggcaggggcggggggtgctcggccctgccacactgtgtgaccttgggtgagtcacttcacttctcccagctgcaatccatgaagggtgtcgctactgtcagtggtggtggcattgttcccaccagactcccaaacctaaggcttacgttgtgggctgcacatcagagagaacgggacccccacggattgtgccagtggaggcccagagagagcatggcgtggcataccaaggtcacatggccgcatgtcccccattcatcccaaatgaaatgccctcatctgagccctaagacctattgccagtcccagaggccaaaaacttctgtttctgaagttgctagggagggacttaagcgaggcctcacgggagggggtggtatgcaggaaagagaaggaaagagaaagataagtttttaccaagtccctgccctgtgcttacggtgggcctgcaccccgaggttcaacttttttcaccccaccaggaagatgcttttgctgctgccatttcacagacgggaaagcgacaacggcccgcctggacttgaacacaggcccaaggccttctgaccacttgcccgcctctgctgggtaggctcaggttagagggccctttgccctcccggacccattcctaggccattggggcagctccctgggcccacctctctgccactcctagcccaggccacctaggcaggagctcccagcctgcccggggctgatccccagcccactgaccccagccctggccccagcgggcaggcgggcattgctcaacctttggtgttatctgctgagctggggtgacctccgcccccaagagctggagaaatgacatctctgggcacccttggtgggtaggaggcagggagggaggggataaaacactggcccagcctgctggctttctgggtcttcccagcagcctctgggttggggagggatcaaggcccagaggggtgcggcagcttccctagggccacccggccagcccttcctcactgcaaaatgggacactcagggctgagctagaggccacggcttctgagaggccctccctgtcccacctgctagtgaatttccttccctatcgccagccaccattatcctagctgtctacctcagtctccctgcaggctgccacttggggagggctggcccacgagggactcctgagcacagcacgctcaacatttaccagtgaaggaatgcatttgctgttccctgtgcaccaagaacactgtcaccccacctctgcccaaggcagctcctcaggtctcagcccaaaagctgcctcctccgggaaaccctccctgaccttcccatgggaagtctaggccctcagtcactcctctcacacccctgcttcatttccgtcaccattctcattataatcagaattatcttgcctgccagtcttgctgtctgtccccacggccttcactactgtgtccctggtgc

SEQ ID NO: 1561708 - DNA, 4001 bp, Homo sapiens
tgatgtccaagacctcgaactcccgcctgcctggcgtggttcttcctggtcacatgaaccagatcgtgttccaagtggaggatgtggctctgcacgcggtcatcaatggggaaggaggtcaggtacctcttgaccatggcaaagtaagccatggcctccccaaagctgggtacaggcacctcatcaccatcctcctcatcatcatcgtcgtcttcatcttcatcatcctcttcctcatcgtcctcttcctcactgtctgaatcagagtcctccccaccttccaggaaatgcagagtagggcactgggcttcctcctgggcaccataagccccgaagctgccaccggcctccactactccctgggcccagtcctcagcctccaagccctccgaggagctctcctcatcttcctcctcttcttcatcactatcaacatcaccctcctcctccacctcctcttcctcccccaattcctctccttcccccccttcctcctcctcctcctccccttcctcctcctcttcctctccttcaccctcttcctcctcctcttcttcctcctcctcctcctcttcctctccctcactcttgagggaagtggtgatggtggcattagggccacccccaaagccagcctcacgaaagcaggcggctatgtccgaaggctccactgcctgccaggcggcagccacaaagtgcagggcctccgtgagacccagctgcaggcctgagggatcctggccctctagcgcggccatggccttgagcagcatggcctggcggtagtggcccttcacctgctggaccactcccctctccagcggatgcacggtgccgggagggaagaaggccagctgcacatgccgcaggcccgaggtgtccaaggactgggcagccaagcggccggccaacagcaggacccggcgagactctgcagccattcgggtgtccaaggccttcaagtacttggccagggcctgggtggtgacaccacccttggagttggcggtgtagtcgcagggcaggccggcttggcctgcgcggggcttggccgacttgccggccaccagcgggggcagcttctcgctgccgtcggcattggcgcatagcaggacgctcaggcgctgggtggcttgacgcggccgtccgtcgcctccgcacagccccgcggcctggtcgggcaggaagtcgtaccatagactggtctcggtggcgctgaacacgtcctgcgaggcgtagccctcggccaccgacggcggctgctcctcccgagcgcgccaaccagtagtgctcccgccactgccctccgagggcaccgcggccggactggcaggcgccgccggggtgcggggggcagcgtttcgcgcgcgggcgcgggccacgccgctgcaggacaccacgccgtggcgccggcggaagcggtccagccagccgttggaggcggtgaagtcgtccatgcccagctcctcggctatgcgcagcgccttctccttgaggatgatgcccttgaccggcaggccggcggcgcggatctgctggaaccaggcgatgagcaagccctcgagcttgtcgtagggagacagcttgttggtcttgcggcaggtggaggccaccccgtacttgcgctccgacgccaggatggcgcgcttgttcttcaggatcgtgctcagcgtggacggcgggatgttgaagcgccgcgcgatctcgcccttgcgcaggtccggattctcctccacctcctggatgatccgtgacttctcccggaacgtcagctgtcgcctcttggggcccatcccggcgcgccccccgccccggggcccggcgccgccgccgccgccccggggcggggggcccgggcccgtggcggggggcacctggcggcctctcccgcgcgccccgcccgagacaaagcggctcgcgggcgcggcggcggggcgacgacccggccgggccgggggcacctccggggacgccggcgggcgcgtcgccgggcggcgggcggcaggcgacgggcgcagacgagggcgggcggcgcgggcgcggaaggcaggaagtgccgcggcgcggggagctgggagcgcggcgagcggggcggagcgggcggagcgggatctcgcgggaagcgcggggacgcccggcgcctcctccccgccctccgcgcccacccccttcccgccgccgggacataccgcgggggggcgctgcggcctgctggacctgcccgtgctgcggcctccggcgacccggcagcgacgcgggcggggacgcggtgcatcgctactgcgcccggcggacagcgacttgctgctcaaaaagaataagaaccagggtttttgtttgttttttttttttttaattaaggtaaaaataacgcacttttttttttgcggaacctgaaaaattcaagaagttgaaaaacgcttttcacgtcacctggagagatgcacaggtaacattttgatacatttccttccagtcttttctctagatgcatgtcgttttctttttaaaaatttattatataaaactggcatcagactgtatagactgtatatctggcatctcctgctgttttacctggcatcaagtagtgagaattttgccatatcggtaagtatcattgccaacacgctttttaatgattgtgtagcattccagctatgaatgaacactagcgtatgtaacctattgttacacacttaagttatttttaaaatcagcattacagttgtaaatctatttgatggtgctaatgacatttttaaagttctagtaatcccacaacccatagataaacactcataacatcttggtgtgtcactttctgggcttttccatgcatatagccataaatgtatgtgtttgcacttacagaaataacatcatgtatatacataagtgtgaatccctgaagcctccctctcctgcagcaaaacattaaaatgccaagctcttaaaacaatgaatgtatagctgtgtttttaaaaatctcttagggcagcactaaggggaactccagcattggcagaggggaaggctgtgacccagggggacaggctgaggacctggggctggatgaagctgtgggtgagtgtagacaaagaagaaaagaggaccaaggacagtgccctgggtcctccaaggttaagggctcaagaaagaggccaggtgcagtggctcacgtctgtaatcccagcactttaggaggccgaagcaggcgggaccacttgagatcaggagttcaagaccagcctggccaatatagtgaaactccgtctctactaaaaatacaaaaaattagccaagtgtggtggcactcacctgtagtcccagctattcgggaggctgaggcaggagaatcgcttgagcctgggaggcagaggttgcagggagccaagatcatgccactgcactccagcctgggcaaaagagtgagactccatctcaaaaaaaaagaaagaaagaaagaaagaaccaaatagagactcttgaagtggaggagcccctgaagcaggagaaaaaccaggctactgtggcattctggaagccaaaggaagaaagtgtaactcactgctgttttagtgcaaatttctgttttcgtatgtttcttggccatttgaatcctgtgaattttctagtcatatcctttgaccatgtgtttgtctttttcttgacttttaggagctctttacatgctctgaagaaaagatcttgttaagtatgttgcaaatgttttctccctgtctgccacttgtctaagttagtttagggaatcttttggatatgagaagtttttaatcttcaacctgtcaattttttccttattgcttcggggttttgtgtcttacttagagaggacttccctatccctgagatataaaagatattcttttaatctcaaggtccaaaagaacacgtgggagacttttccagagcactgcttggcccaagaggagtgtgtggtcactgggcaaaaatgaatctaagattacctggatgag

SEQ ID NO: 1561709 - DNA, 4001 bp, Homo sapiens
caagatgctcaaataaataaataaataaaatactatcacctctccacataacactagtacttttatttaccttaccatgctttttctgtccctatctaattattatgtaatatacttaccaaaatgcaaattccacaagtgcaaaagcattgttttatcgaatgctgtattcccagctcctacctaaaacacagcctggtttataacaagtgcccattattactgactattataggacattaggtaacatgatccatattatcaccaatggtcttgcaaaatgctaacagctctattacctatataaaaagcaaaaaaacaggctgggtgtggtggctcacaactgtaatcccagcactttgggaggctgagttgggcagatcatttgaggccaggagttcgagaccagcttggccaacatggcaaaaccccatctctcctagaaatacaaaaattagccaggcacggtggcgggcgcctgtaatcccagctactcaggaggctgaggcgggagaatcgcctgaacctgggagacaggatgttccagtgaacccagatcgcaccactgcactccagcctgggtgactgagaccaggtctcaaaaaaaaaaaaaaaagtggggggaggcatataacttatagcttggtcagtggcagagcaatgactgaaccccaatctgattccaaattctacactctctccattacattagctgttaaagcatgaacattacattagttaaagcatggactacgaactcacagctctgtgaggggcacttcttaaatagtgagcgataatgacacctatgtctgcagctttctgatcgaaaaggagcaaagaaagatagaagaactaaaggaacagagggcgtaccagtagccttggttttgttgtgacctctataaatctgggaccagttctcctttctaagccttcgcggtaaaatactgatcacaagcctagcctccaataactcccagggccaaagtaaagatcaattcaacagacgttgattaaacccaaaggcaatctagtcaagtcatcaaatgccctggggacagtttcccagctccatccacttattagttgtgggactcctggcaaattactttttctatgaatacctcagtttcttcatgggtaaaacgtgaagctatagaaagaactcaccccataggattgttgggaagattaaataggcctttggctgagcgcggtggctcacgcctgtaatcccagcactttgggaggccgaagcgggcggatcacctgaggtcgggagttcgagatcagcctgaccaacatggagaaaccccgtctctactaaaaacataaaattagccgggtgtggtggcgcatgcctgcaatcccagctacttgggaggctgaggcaggagaatcgcttgaacccgggaggcggaggttgaggtgagccgagatcgcgccattgcactccagcctgggcaacaagcgcgaaactccgtctctaaataaataaataaatgggcccttatgtgtaatgcattcagtagcacctgacaatttgtgatcattccgtacagtaagccatgactattatcatcacgtgctaggccctgggatctagagatgaaaaaggcaaggcataacatctaacgaacgagcttacggtgtcaacgaggggccgggaaagtaactcggtgcacagcgagtgcaaaaaccgagaagcgaatgcagctgcgcctggagaaggcggctgagaagcgatacttcagcagggtcctgaagaatgggagctccagagtcgggtggcgggtgggactgggctttcggatagattacgtgcaaatccgccaggacacagggagcgaggggcgggggggcggcagagcgcggcgcctcaccctcccagcctgggattgcggctactggacacgagggtcgggaagctctccttcggcgccgactggagcttagcgtgctggcggcagcaagaagctgaggcaagcgggccccgggccctaacgacgcgtcccagcccctctctgggcctcgggttcctcccgggtaacaagaggccgctgcccgaacgggattccctcaggcgccctagacgggcgggtctccgggcctcggacggttaacccgagcacctcccacctgcccctgaggccccacctcaccacgctcggctcccgcagacgcccggctagttgctccgcgattgagctgcggcagccgctgctaaggccctgcgggggacgggggcggagcccaccccgaggcagagggccaggccccgcccccccaaactcccgccctttgggaggggcccgcccctccaagtcctgcacctataggcagactgagccggcgcagggcctcccgccatgttgggtattggcagccgacttactagagaggccctgaaggaaagggggtattattttaagaattataagatccctagccagaaatggggacggtcagggtctctggattcgcgaaagggacatttcggaagcagaaaagaaaaattgccctcaatcatttcgcttttggcttcagtgttacatacagcgcatgtgcaaggtcacctggttctaggtgcgcctgcgcacagctccacctacaaaccagactacaattacaactgccgagaaacaaaggggctcgctgccactggttagcgataatactggcagcgcgaccggtttctgagggttgttcaccttgctgctcagacgctccgagaagcttcaggcagcataacacttacaggcgagttacttactcaacactcggttttgtctgcatgtctctgcacagagtgttacctttacctgacttaatccgtcccggagctgcagttctgcttaagcctgacttctagagaactttttcttcccaataggacccatgcgttattcctgtagcattttgtgtataaatttttttttttttttttgaaatggagtcttgctctgtcgccaggctggagtgcattggcacgatctcggctcactgcaacctctgcctcccaggttcaagtaattctcctgcctcagcctcccgagtagctgggactacaggcgcccgccaccacgcccggctaatttttgtatttttagtagagacaggatttcaccatgttggccaggatggtctcgatctctcttgacctcgtgatcctcccgcctcggcctcccaaagggctgggattacaggcgtgagccaccgcgcccggccttgtgtataaattgttaatgcactttcttagagttgtaaactccatttacctgcctcactcttgcactcagtggttctcaatttttagtaggaattaaaaacaaaactggtaaatgcagactcttggtttccacccccagagaatccctaaaccgggggtggagtccaggaatctgcattttagaaagtacccagggtgattctgataattgggaacacgttttaggaagcgctgcatgagattgtgagcttgagcgtagagactgtaatttggtcatctgactatagcgctcagcacaaggcctggtacaaaataggtgctcaataagtgctgagtgaatgggtgaatgagtggatagctcgagtgaaacagcaaggcttcaggttaatccacagccaaaggtaacctgagaaaggaacgcttaaaagctatattttatctttctcctgtaagaacacaaaaaagatcttaatagctaatttgagaaatagagaaagtggagagtaaaaggggaaggaaggacacggattctgaaaggcaaactatctagagaggggaaaaggaacatctccaggcactagacagagaaaacgatgcaaagaagcagtggtgtgggattccatcctagggaaataatcccacaacaggcattgtgcttgaatgttcactgcaacaatatttgaaatacaaatgaaacaatctaaatattatgcacatcaagctcttttctgcctcagggcgtttgcatacactatgccagctacctaga

SEQ ID NO: 1561710 - DNA, 4001 bp, Homo sapiens
atccccctctattccatgctaaggctgagtgagccctcactgtccatttttatttagtgggtttatatcttgttcatccctacaatgaacatcccaattttatacaaaggggtcacatgctttcctccttaggtggagggagtagttatcttccattctttgcaaagctgtcaaaacagaaatatgaagttgctattaatagaatgtggcaaaaatcctcaaggatgaagctagcattggttcctgtttatctaatgaagtttctgatttcaatttgataatgttccctacacagtccttagcttttgtgtgtatcagtattttagttgtttccatccaatggacatctttaaggtactgagtccaccataatgccaaaaaataaaatcatttcattggtatatctattttttaggcattttataactattgccctactgccctctagtaaaattgtgccaatttatattacattcatcaggggggtaattagaaactacaaactttaatgtcttaggctggccttagcttaaacatttcaattgtatttgatatgaagctttatgaaatccaaaatactaggatatttaatattttcaataaaaataatgcggaacagggtcgagcacagtagcttatgcctgtaatccaaagactttgggaggccaaggcaggcagatcacttgaggccaggagttcgagaccagcctggccaacatgatgaaacctagtctctactaaaaaacaaacaaacaaacaaaaacagctaggcatggtggcatgcacctgtagtcccagctactctggaggctgaggcaggagaatctcttgaacccaggaggcggagattgcagtgagccgagatcgcaccactgcaccccagatctgggcaatagagcaaacctctgtctcaaaaataaataaattaattaaataatgaagaacagattcaaggatatttatattttggcacccacagaaggtctataaacaaacaaaacagagagaaaaaagatcttttaagaaacaaatctatgcatactttaaagttcagaagaacactttaacagcagcggctgtgaacaaatccaggtttccaacgtactgtttgaccctgcgccagcctcccattctcatctgtgagatggacatgatagtggccacctcagagaagtatcagaacaataacataatgttggcatagcacagagcctgacataaactaatttctcaaaatctggcagctaatattattaacttgttttaagtgactccactagtgagtgaggcagctgagatttgaaccaagtttgtttgaatccaaagcccatgagaaacctttttgatttgcatattattataggaaataggaatttgttgttcccagagatttcttgctacaattttttcactgtgcagtaagctacccatttgctcacaataagccccataaagacaaaaaggtaggatccttttctggcatgtcataaaattgaggaaccttctttttttttttttttttttttaattgagacaggggtccgctctgtcatccaggctggagtgcagtggcgtgtcttggctcactgcagcctctgcctcttgtgttcaagcgattctcatgcctcagcctcccgagcagctgggattacaggcatgcgccaccacgcccagctgattattgtatttttagtagagatgaggttttgccatgtcggccaggctggtcttgaactcctggcctcaggtgatctgcctgccttggcctctcaaagtgctgagattacaggtgtgagctactgcacccaaccaaaattgatgaacattcttgaacttagttatctacttacagaagatagatgatatttagcttcccaaacagcttgcaggtaaattttctaataaggcttttgatacaataaacatcctgtgattctgttcttcggcaatgaacaacttctacctttcctcttggagaagtgagtactgacattttttatcctgtccccaaaagagagaaaaaagtccactattaatctgatatgataagccagtttggttataatacacacaaaactgaacactaattcaatttccatgtggtcagagtgaacatggtgtgagaatactggtgtgacacgttttcccctgggtgtagtctgtgacaactgtcactgcaaaccagctgacgttcctccataggagaatgaagtttctgagaactggcctgtttagaagtttctgcaactatattctttgtttccaacaaagctgctttaaaaaattctaacaatagaattggaaaaacattgaaaggaattatttacggattcagggtcctcttatatttaatcggccacgatggcatgtggtgaagagttactggggaaatactgacagctgctgcctatgttcttaatagagttctccaaactggagccctgaaggtcagcagtcttgagacatattttgagaccaaaaaagttctgtggttaagtgtaggaaatgctcgcaataggcttcctgaagggccaccaggcccattaacatctttgagaggttccataataaagcaacttgttttctttgtataacccagcctttccgacactctttgggaagagaatctctaatgacggcaacagtggagaacctaacgttccagaaggacactttgggaaatgctgttgacaaaaacagtaggtcacaaaatgatttcaatttctctctcattgtctcaatttctgtaagtctctcttctctctttccctcccttctttccttcatagggaaagccattttattatatactagccagtgagctcaaaacagggaaaacaatgaaggagaaattaataatgtctagactcctatcgaagctaaccataaatattgtcattccttgttctggttttaaattgaaagcaaaattggaatgagacatcttgtttgtgaaacatatcataaactaatgctacaagtatataaaaattctgaataaaataaggaagtataattaattagataactgactttggtaaaaagaaaacaagaaaagaagaaagaaagcgagcgagggaaattctccaaccaggtggcaatgatgtgagccgatctgacacaggttttggggatagaatggacctcactccaaacagagaattaaaaattaaaccatgcatctacctgggactttggatgggcccctcggtaagtgagggggctagaaaaattaaactcaccagcccaagaaagtgacaagctttctctacacaaagctctaggtagaaaataaagcaaaaatactgctgagaagtccaaattctagactaaagtgggtatggcattctagtccacacaatctgtgtattatgggagtcaccaagaactttagatgatagactctgaaacagactacaaactaagtatgtttataataaagaaatatagaaagagaaacaaaagtcatgagaagagaacaggtcattatttaaaaaagaacagaaacttaaaaaatgaaatacgtggttattaaaatttaaactaagaggatgggttaaaaacagaagaataaagaaaataaactggaagatacttatgaacaaattatctagaaagaagcacatagaaacagaaaatacagaattcagtaaagacacatgtaagacagaatgaaaaacatctgtcttatgggaattccaaaaggaataaatgaaacatttgaaaataatggctaattacttttagcatggatgaaagacatgaaccttcagttcagagcaaaaaatacaaataaactccaaatatatagtaaaactacaaaaccctaaagacaaacagaaaactttaaaggaacctgacaaaagacagactgtctataaaaaataattagactgacagaatatttctcatgagcaacattagaagccagtagcacgggggttagcaaacttctgtaaaaggccagagaataaatacattaagctttatgagccacatgt

SEQ ID NO: 1561711 - DNA, 4001 bp, Homo sapiens
tcatgtgccatgtaatttttaaaaaatgtttaaaatgtaaactacatataaagtttaatgtaaaatgtgtgtgtgtatatgtgtatgtatgtgtgtgtgtatatatatatatatatatccctagctcattcacagtccatacaaaatagtcaatgggctgaatttagtctacggcccatagttttctaactactagaatagtgttttaaaaatataaaaggaaaaaataaccattaacctagactgataaacctaaacaatcactttaaaatgaagataaaataaagacaatttcatacaaagactgaaagaattcaaagaatcttgtagaaagaactaggagatggtatattctgagaagaataaaatcagaaagaagtggaatacaagattaaatgctgggaaataagaaggtaaacatgaaggtatatctacaaaagcattgatggcaaaaagtaagaaggataatacatttttcctaaaaaaaaaaaaaaaaaaaaacaaacaaaaaaaacacacacagagatgaactgaattgccagacaacagaaatgtaagagagaaggatggtgatcagaagcaaagtattctagcatgtttgtacttttgagcaaaggcaacagatgattaaaccaatgattcatttggtaaatcaattgtttacagtaacacatttaaggaaaatcacttcaaagaaacatctttttaatatttatttattttgttaggtggctttatgaaagtgatataaaatcttctctatttaaattttgaaaagtgagataaaatatctaaataatatggttaataaagagttatggcaaatacattgatgttggttataactgactgcagttctagaaatctgcataaatcttttgttgaaagtaatatctgcattggtagacgtgatattactacatacataaatatatattttccccaaacaccaaaagagctttgcaactgtggaaattatcctaacaaatgagctgccaagtcatgtcattatacatttgtccaacctcatagaatgtacaccaagagtgaaccctaatataaactatgaactttgggtgataatgatgtgtcaatgtaggttcaagattgtaacaaatgtactgctctggtggaggatatttttaagagttggaggctgttagaggagggaagaggtacaataattgatagcaggaagctgtggagggaggaaatctctgtgtcttccacttaattttgttgtgaacctaaaacttctctaaaaatgtctattaaaaaaaattctcttaacctttgcttttcagtttttgagggcaggttaagtattataacagctaacatctactgagcatttgtctttaatcctagtgaaacagatgttattagccttgttttatagttgaggacattgaggctaagaaaatttaactagagtaattaaggcacacacagaatttaaacatgtttcttatcacaagactgagttgttttccagttactctatttatattttttcctaatatctggcttcaaagtaccttctgttatttttaattccaagccttagagttaattatttgggcaccttagaattatttgggcacaactgtcccgaaaccagaaacgagggggcgtggacccagagactactagaatgcaatgctcgaggcattgcagcctaaaagggcggcagctcgccccgtcgcatgctgggaatggtagtttcctcgctctcccttcttcccccgccctcgagcatccagattggagctccgttcttactcccttgcagggcgccacggctcgacagagccactcgtcctcgcctggtcatcccagttccggaggctgacctggggatgcgccctggacgccctgcaccgcagtccttgcgtcgctgctagtcagcacggcgttacccacctcatccgcagctccaggacgccgcactccacgcgctgccgcaaggaggacgcgcagcctggtcaccatggaaacggtgccgcctccgtcacggctcaagcgagaggtcaaaggtcagtcctgcaagttccgcttccggttccgagatcctgtttgttttctgaaagctttgtggtttcggtgagctctcagagccgatttctagcgtccgtgccggggacaggtgtccagaggtcgactgctgcagacatggcggcctccaccgcggccgggaagcagcggattcccaaagtggccaaggtaggcgatcgcgaggggccttgtaggaggtggcctaggaaaggggcatccctcagccctgagggtgcccgggttgggagagagtgttcccgccggggagaaggctcaccctgagagatggagaggaagggcagctggtggtggggcgcgggctcttgtcatcgcggagcacgacccgcgttggcgtggccttcgttctggggtggttttgctggggagtggagtggggtggttcggtgaagatttactgagccaggcactgcactgggcgctgggaagctacgctcgtacgctggccacaagcagtactcaaaacacgagtttctgtataaagacgaccttgctagatgttaccgagaggcaaagtagaatatgccatgggcgtgaataagggggtcgtatgaaggggtcctgaaagtaaattttgctgaggaaatgacctttaagctgagacttgaaggctgaataggagttagcccagctgacagcggagggcgagagtagacggtaggagtagtatagtatcataagttaattaaacagtagacttactatctggtatttcctttgatagctaatacttaccaagtgcttaatatgtggcagactttgaagcctttacagataccctccctccagtctttcttgagcccggatgactctcttgaactggacctttacataactatttgtctgactcgcaggagtaatgcatatagagcaagtaacactgtgtctggcacttagtgcttattaaatatgagctatcaccattatcatcattactccacatgtggcattaagtaacattttttataattcagctacataaacttttattgggcatcactggtccaatggaaatataatgcacaccacatatgaaattttaaattttctcatatctacattaaaaagtaaaaacaaagcaaaaaagtgaaattaattttgataatatatattttatttgagctaatgtatccaaaatattatcatttcaacatgtaatcggtataaaaaatgtaatgaggtagtttattcttttttatacttcatcttcaaaaccaatgtgtattttacacttacagtccacctcaatttgtactcaccacatgtgactcatagctactgtgttggacagcacagctctaagctacgttagactgtaagcttctaagacctcaagaagcttacagtctaatgatgagaacttactgaaattgcctttgacttgaagtgccatgtaaaaccaaacccagttatacaccggggcattaaataagttgaagaattctgtaaatgcaggttgtaatgctgttaataagatgtgctacacattttgataaaacaaaacctctggtcagaattttacctagacggcctcaaagtttattattatactcatctaaaagggaaaacttgctattatttttgccacctttttctcttgagacttttacctatggctttgcagtagatactatgaataagagagaaaacggtattttttttttcttttcagtctcatggaggaatgggaacatgtcatacaaaaagggcatcttgtgataatactaacaaagttcatatcctaaaaaatgtatgtttgtttcttaagccttgtgtgaagagcaactactaaaaatagaaatgtcttctttcttaaaaggtgaaaaacaaagccccggctgaggtacagataactgctgaacaactcttaagagaggctaaagaaagagaacttgagcttcttccacctccacctcaacagaagatca

SEQ ID NO: 1561712 - DNA, 4001 bp, Homo sapiens
gactccaaagcaaacaaaacggtggggaaagatgtgtgcaggatagcttttagtcacccactaatcaagaaaaatgtttaaattcaaaagaacttataattcatctatgaaatctgccctggaacaaaaataactccaaaattaataatcttaccactccgcattttcccaaggcctttggttataaagatgcattgcttatatgaaaccacctgctctgcttggcataaatcatgttacttgaggattcatgcctaatcattttatcaaacacagatctcaaatcttctttctgttgccagagagccataaagttcacaaaaactctctctctgaggttgccaacctgattttccaatttggctgacagtcaaactcgactgtgccatgaaatcaatgggacagacccccaataagttacacagctcacatcagcctagggagcaaaaccgagtggtctgccccggtgttttttccccaaacgccacaaacatatttccacaaagtacatcaaaattgggggcccattgggatggtactcttacataccatctgggaaacaataatcaaatttcaggcaatatttcagacatcctgaaaactgtaaatatttaaaatgtgtattttctgtgttcgtggatctgccagcagaaacgaggagttttcagggggtgggaaataaggcacacacacagccccagagagatgctcagagatgccaaggattcaccagaaaccttggccagattactaatggtccataaaccctaatttggagaacagggtcctacgagctcaaaattgaattatactgccttattagatcccacacgactgaaaccacagtcacattagtcataactggaactaggaatactttatgtacacaaatataaagtgcctgcttatgcatttttaattgtatcaaataaaactgaagctgcaaacaaactcaaatttcaattatctcactagtgaggggatttcctaataacgcctttaaaaaaaaccaagtagctgccaaccctctgcacatccgataggcatgtccctggaaatctgggcgcaacggactccgttacttctcaacagcgaggaaaataaataccttgaagaggacagatagatctttttttaaagctccaacatgcgatctaataatgcacaaaacttggcagcggggttgcaggacccctcctgggctccaattttcggggcgagtgcgcgctagtgcgtaagaagggggcggagggggtgcgcgatccgaggccgcgcaggggcccccgccccctcccggaacagcagcctggcaccagcccaccctcctccacccctgcaaacagacgcaggacgcgaatagagcaacttctccgcgggggcggcggcgggaatagcggtcacccccgccccgccccagcgcggctgggcccgggggtcccaccgcgcccgccccggggggggcctcggcacgccccgcccccgcccgccaggcccgcggccggggtctgcccggacccccgcccctgcgcgcggcccgcagcggcgcactcccaaggacggccgcccggcccgagcgaaagcgggagcgggagcagtagcctggcgtggcagaggccgcccctctccccaggccgcaggccgccgcctgccctccgccaggccgcccgcccgccggccccgctcggaccccagcccggccgggcctggacgccgccgcagcccctcatcccggctccattcataggggcaccctaacccggccggcggggcggggccggggacccgcggacaaggccggtccgccgaggccagggaggaaaataaaaagttaagagaagaacttacctaaaatggctcctgcagcagccaaaatacaaacagctattatttggtgaagtttagctcagacaccctgcaaggacaccctaacccatctcgggcccgccttccctgtcgcgccattgggcttcgccggtccaaaacacagacccattggtcatcccggctgccgctcagacagaagcccatttcaagcttgcttgcaggggcgagtgatgggctcgctccattgtgctcgtatttgcatggatgtgatcgcggccttgattggccggcgctgagaccgccccgccccctgcctcgtgccccccgccttggagacgccgctgcgctcggccccgcccccccgggactagcggcagggccacgggggcggggcggggccggggtcccgcgggccgagggggcggggcggggtcctgcacgctgcagatcgcaggcagggggcggggacctggcgcgctcgggcgccggcgggggttcagcgcccaggtggaggtctctcaggtagctggctagtgatctggaagacccggggctggcgtctccgggggtgggggaggatgtggctggggtcccgcgacacaggggttccgcaggggccgaggccacgcgggcagatgcaaggagaagcgagggacccgcaggtcaggaaaagaagatcctgagtggccaagcgaacggagcagcctccacccgcgtcttctgccgctcagcccggctccctggtactcctggctcccaacgggcttcttcccaaggcccagcgcacccgggagttttccagccccggggaccctgcagcgccttggatagatctccgtgaaatcaggtgtcgagctatggtgcatttattttcgggcctgtcgcccctaccatccttgtagcatcctcaaggacagggcccagtgtttggcagagattcaactaattgttacactctcgaattcattcgttagcaggtaatctttgagtgcccactaaattccagacattgatataaaacgggatattgcggtcaacaagacaaagcccttgctttcatggaataggcgaaagactaaatacaaggggtaggtagtgataaatgctgtaaagaaaatagatggaagaagaagggaaattagaccagggtttaggaattaggaaattcctaaattatgaaaggaggtatggagagtttgccctgcctggctgaatactctgtatggcgtctcattactgccccctcccaccctaaccttggcagtcaccagccctcctcgcgccctgcttgcccatcgtgttttctaagcacccactaaaaaactgattggattctgactgtagaggctcattctacctcaaagcagaaatgatctgagtctgatgattctaagagcagtttgtgggatacatttaggataagcacattttgactgtgtcaggggccatgataatgatttagcagaggcttactaactccagagagagaatatttttagcttctttgaaatcccagttttctgatggctttcagcctgtggccctaactctcttctgagtaacactcttcacttcttggcagacacaagagatttctccagcttgaaaacagaggcagcagccccctgctgcctatctctctcatctgtgtgcatttctgtcatttgactcaaggctggccaagatgtcttatggtctttctttcttgtctttcttcctcccttaaacagatatttattaggcaccaactatgttccaggtattgttctagacacaaggaatgcagcattaaacaagacaaataatatctttgccctcaaggagcttacaatccagttgagggtgagatagagagttacgcatagatcctgaggatctccaattttgccaagctgctggtgagtgagtatactgagggctactcgcctgctgctgcctcttggggacagcatgcttgaccttctgaaccagctgcttcaggagctgaagctgaagctgaggtaggaccaggcagctggtagccacaacctctccagctcaaacaccagaatcacaggttccaaagctctcaacagtgcccatgggagtcttggctctcatgtcttgaaagagtttgggagcagagttgttgttttttttgttttgtttttgagacggagtctcgctctgtcgcccag

SEQ ID NO: 1561713 - DNA, 4001 bp, Homo sapiens
ttctggggtgatgaaaatgttctgaaatttgatagtggtaatagttgcacaatctgcgaatataccaaaaaccactgaactatataatttaaaagcgtggattatatgatatacaaattaagctcaatttttaaaaagattatgtcttcattttagctgctattaaaatataaacttttatttaaaatattctgttacataagagatctgtaagtattgtaccacaatagttaaatcattcccacaaatgtcactgtttttgtggtctacagcctcctaagcaaagcaattcttttctgaaagtattttgaccagaaataattataaatattcatttgattttctttaatgaaattgagaacatttattgacaatttgtgagaatgacaagaattttagcaaattctgaatgtatatagcttacaataaaattaattacgactggctttcattttgtttctaccttttggatctagtaattgctgccaataaaagcttcatattcatggatggcagtatctcaattctaggtaggagtctcaatctcagatatggacaattttctaaatcattaaaacagctgaagaaaacctgtagtttaatttggtgctagtatacttacttctcaatagtctcaatatctcaataccggtaggtgactcgacttcaacacacacacacacatgcacacacacacacttcagatcttcagagatcatttgtttgagattcagggtagtttgaaagattaatcctacaatcttccctacaaaagggaaacagtcaaatatctactacttaaaattcaatcctcctaaattggctaaaacatttttttttttactactccaaaggaacttttgtggttattttgtactctaataattttcctggagtacagaagtcaaaatactgcggtttccattcataactaaaaaatgaggagcacatgttctcaggactgctgaggctttcacaggttaaaaaaaaataattcctttgagtgtgaaattagaaattacctgtccctagagatggaaatacaaaatagaggaacatattatattaaacttgtacatacatgagcacacatacacacacattatatatggacatgttaagaaaagggatatatcttatatatatatgggactcacttttatctcatcatacttacatgacaataacaataataagggaaattatgcaggcactaaatagcatcatacatgtattcctgcctctctgtagtcgcctggctttaaaaagccaaacagatacagaatcagacaacagaatctctctagacgggcagagagagtgtgacatcttagaagcgaatacaaaatgtgaggtttccttgcaggtatggcacgttttcttccttcctatctagaggaaaactcagatacagaaagactgaggctcccctggttgggctaggaagccctctagctttttccaagtcaaacgggtgggaggagctgaaggaaaacacccagggaggagaagaaacgaagcaagaggtaaaccttcccctcaaccctccctctctcccgggatccgccagcctggctgcgggagcggcggggaagagcgaggctggcgctgtccgcggtgctgaccggcccgccgcgcccactcacccgccagccccacggctcccaggaggctgagaagcagcgttggctgcatggccccgctcggcggcccctgtgcggaaaggaagatggcggctggaccggagaagcgaggcgcaggaggaaggcgcgatggagcggccccggaaaaccagcgtgcctcctggtccccgcggtgtggcgcggccggcgcaggccccgctcttttaaagggcaggcgggggccgcagggccgggaggagcgggcagccaggagcgggcgccccctagctcagccctgacgtcacgaagcagcacccccaggcggcgacgcaaatgggcggaaatttacgccagtccagtcgcctggtgtgcagggtctggagcgggggtgggggaaaggcgggccaaagaatggacggccgaggggagtagtgcagatctgagatggtaggggaggcgggaggtcccgcttcgagtgcctcagcctgctccccatctccccccacacaccatcaaatctaaaaccgtgtgtttgagactatatgcctgtgtgctgagatgtgtgcgtgacgaggtctgtttgtgtctcctcgacctagctgaggaaaacactcctgctaccgagagagaactaaatggttggtcagggaaaatggaaaagacagtgatagctttaaaagttaaaagtgcagccggagaatatgggacctgctgttctctcaaacttttctttttgtctgcatatccatctacctatccatgattatatctcctattcatgattctctgtctctcttcctcctccctctctgaatacataacatatacacatggtttaaaaaaaaaatcagacggtacaaaaggatttactataaaagtctcccttctccctttatttccaaatctcaagttcctcaattcctctttcagtcaacacaactttactactcctataatttaggtttgacttattttggaacatatacagctgcatcttcttttgaatgatgtattacattgaatggatacaatagaatgtatttaaccagttccttttctaatgagcattcattcaggttgttaccctttggtctttactcctttacaacacagccttagtctcaggggtgggtcgtgtaataacctgctagtaagaaatagtcgatgctacaaaccctgtgcatcctctcttgctttcaaattgagacagtaaagtatttttgttatgatgtgtgagaaaaagacgaaagcatcttccaggatatttttgatgtgggttccctcagcctaatgaggaatcgggaagcagcagcaggcaggtgacctgcacagaataggaataacacaggctttgtggaacggagtgagacttcactgggttctcttcattcagggaatgaagatgtctgcatgcacagctcaagcgaggtttcagtttacttttcttgaaaattaatgaggttcaaattctttttgtatgtgctgaatgaatggctacatcttcctgaaaaagctggaaagtatttcaccaagaccacagccacagaacagttaaaagaatggacttaaaaaggatattagtggaacaatggataaatgttgaataagatctataggttactgtattgtattgtattgtattgtattgtattgtattgtattgtattgtattgtattgtattgtattgtattagtgttgatttcctgattttgaaagttgtactgtgtgccgggtgtggaagctcacgcctgtaatcccaacactttggaagactgaggcgagtggatcgcctgagctcaggagttcaagaccagcctgggaaacatggtgaaaccatgtctctaccaaaaatacaaaaaaaaaaaaaaaaaaaagaaagaaagaaagaaagaaaaaaaagaaaagaaaaacaaagaaagagagagagaaagaaaattgtactgtgattatgtaagaaaatgtccctgtttttaggaaacacatcttgaagtgactaggtgtaaaagggtatcatatgtacaacttcctttcacatttttagaaaaaaatataaagatagagaaaaagagaatgctaaggtaagtatggcaaaatgttaacattcagggaattgaggagaaaggtataagggaattttttttactatttttgcatttttctgaaatctgaaatacttttaaaattgaaaaaagaatatttggggcacaaaagagtctgtttaaaacctctgtagagcagaaggtacagaaaaagaagctgttgagtgagggctgttctttgactgcagatctgcaagcaatttttcctctagagctgaaattatataagggttctaatactctttaagatgcgctgattgccaacaattctttaaagtt

SEQ ID NO: 1561714 - DNA, 4001 bp, Homo sapiens
caagccccgccccctttattccataccactctccctccaagcactacattctggacacaagggtctctctcttcggtttcttacaacctgctaacctccgagccttttcccatgctgctttccacgcccagaaggctcctcccccttttttttttttttttacagagctggttccttctccagactcagttcaaactttaccttttcaaagacgccttccctgaccattctatccaaagtggcatccctcccactccaccactccctatcagaccatctttttgtgtgtttagtacttatcacccccggacaatattttcttcatttattttcctgtttctgtcttctctcccattagggttgaggccgtgttttgttcacccctatgaatacagcgcatgcagcaggcactaaaaagaatttccagaatatctgttgactatcagcagagaagcatcctccagataggctattttgttctcctattagaatggagaaaacatcgatttagcccctactatgtgctgagcactgtaaatccatgattttcctttcagaaaggtaaatgagctcaaggtcgcactgctagtcactagcagacttctgagtgaattacctcaatcctaaacccctctcaaggggaagggatgtcgttctgtgattcactctcacatggccataacaagaaaaagcaaacatttctaaactgctttacagttttaaagcattttcacattcatctcacttaagaaaaacacaaagcacttggaatgcccagaaagccatacgacaacaggaagtaaagtaagcagtgcctcaagattcaatactggggccctgaatcctagtagtggggactggggagcagtcgggagtctctatttctggttcagacggatggggaagcggtgagtcatggggtgaaggcttgcgccacgggaaactttggtaaggtcaagctacgaggcaacaaaaagtgaatcacaacgctggaaaacaccttaggcctcaacagaggccgaactctggctgacggatggggaaactgaggcctcaaagggaaagcaacttgctcaagttcactcagcaagtgaatagagcaggaatcgggggtctcatctcccccagtccccttttctctccagcaaggaggcttttcaacgagaattctgagacaagaggacaggggagaggccaaggggcagctcacagattccaccgaggagtcgggagagggcacaggtaggaccaggaagcacagaaatgctaggatgggggcagaaatgagccgaggaggaggcaggggcagtagctaggcaggtgggtgaggcgagaaggaaaaggcggaagagaaagggacagagtgagggcggaggaaagtgctgtgagattggggtctgaagggacctggcggggtggagagaggctgaggggagagggcagaataagtctgacgatggaaaagtccagggatcggggagacattgaagggagtcggggagggggtcccagacccggcaagaagtctgacccggagagttccagggtcagaccagaccccgaggcgagtctgatgaaggtgaagtccgggcccggggagcctggggggagcccgtggcaagtctgaaggggccgggcagcctcaccgcgcttgtttttggtgccgtgcttcttggcggccgtcagctcctgctcgattttcttctccaggaactcctgtttcttgcttaacatctcttccgtgtcccgcagccgctggatggcctcctggggggtcgggccgcccttgccggccttaccccctccagccccgaacagcttcccgaacaccgacatggttgctgctcgccgcgccggccttcgccgcccgctccggctcggctcggctcggctcggctcgggtcggctccggcgcccgctcccagtcccgccgctccctgccgccgcaggcctctcctccgcctccgcctccgccccgcagctgggcccggccgcgccacctcccacaggcccccacgcccggcccggcaggcgtcagggcaacgcgccactgactacaactcccagtgggcaacgcgccggccgcgcctcaaatctaatagggggaagcgtgctgcatgccgggaagctatagtcttccggcttcaggcgctccccggcgcgtcttttgctgtagctggggtcaaagggcgtgtggcattctgggaaatgtagtctccttggcctgcgctctgtaggagtggcagaacagtaagagaaatgacagtaagtgtgcaacactgctcaaaaatttattgctagtatgggatactgccatgcttgaacttcacatgtatattcatgtgaagttgtcttaaaagcgtgaaggcaacagttgtttccaatttcaacctgtcaattctgtggtcacagaagcaaagcagtatcttctccagttaagtacggtagtgtcccccttatctgagattttactttgagtagtttcacttggccagctaaggtctgacagtattaaatagaaaattccagaaataaacagttcataagtttttaatttccattggcctaatgaaatctcgtgctatcctgttccatcctacctgcaatgtgaatcatccctttgtccaacatacctctaccatctgttagttacttaccagcttaggagttatcagatggactgccacggtgttgcagtgctttggttcgagtaaccctcattttactatataatggccccaaagtgcaagagtagtaatgctggcagtttggatatgccaaaatgaagctgtaaagtgcttcctttaaatgtaaatgtggaagttctgagcttaagaaaaaaaatcgtatgctgagcttactgaggtctgcagtaagaacgaatcttctagccctagaattgtgaaagaggaaaaagaaattcatgctggttttgctgtcgtacctcaaactgcaaaagttacagccacagtgtgtgataagtgcttagttaagatagaaaaggcattaagttgtatccttacttacaggggaaaaaaagaaaataaatttttttacaaaagaaaagaaaaagcattaagcttatacgtggaagacacgaacaaaaaatgtgttccaactgacagcaacctgttaccccccagaaagcattgagcctgtataaaggcttcagcaaggaatctcctaaaaccagtggcaccaagccacttactgaaagtaatggatggttgcactgacttaggaataggtttagactgcaaaatataaaaattactggatgggctgggcacagtggctcacacctgtaatctcagcactctggcaggcctaggcggatggatcacctgaggtcaggagtttgagaccagcctggccaacgtggtgaaaccccatctctactaaaaataaaaaataaaaataaaaaaattagctgggcgtggtggcgcacgcctgtaatcccagctacttgggaggctgaggcaggagaatcacttgaacctgagaggcagaggttgcagtaaactgaaatcgtgctattgcactccagcctgggcgaaaagagcaaaattctgtctcaaaaagaaaaaaaaaattactggagccgggcgcggtggctcacgcctgtaatcccagcactttgggaggccaaggcgggcggatcacgaggtcaggagatcgagaccatcctggctaacaaggtgaaaccccgtctctactaaaaatacaaaaaattagcctggcatggtggcggcgggtgcctgtagtcccagctactctggaggctgaggcaggagaatggcgtgaacccaggaggcagagcttgcagtgagccgagattgcgccactgcactccagcctgggcgacagagagagactccgtgtcaaaaaaaaaaaaaaaaaaaaggccgggcgcggtggctcatgcctgtaatcccaggactttgggaggccgaggcgggcggatcacgaggtcaggagatcaagatcatcctggctaacac

SEQ ID NO: 1561715 - DNA, 4001 bp, Homo sapiens
ctggtggctgtcgttctgacgtaccagcccgggccggacactcacagccacggggagtgttgatggctgtgtcccctctgcccacccagacccctgtgctccttgcagggcgacctcagtcacagtgcacgatggccacgccctcacctaccacgtcaatgagctgagcgatggacaggccgaagcggacgaggaccacgtccgagatgttggccacgggtcgggaccacttgttgtaaccggagaagagtttcttcaggagccgctcctcggcgtgggcccgggtctccacatggctgctggctgcggggagaggcaggccagtggctcaggtgcaggcgggacaggagccgggagctgtccaggagctctccaggctgccccagccccctgcccagcacgtccacttcctttcagctcctcacatgagcccttcccaccccaggacctgtgtgtgtgccgggcgtgcgctctgtgtgtgtgtgtgtgccgggcgtgtgctgtgtgtgtgtgtgtgtgtgtgtgtgtgtgtgccgggcgtggcgtgcgctgacctctcttggcctccggctctctcccacccctgggtgtaattgtgatttcctcggggaagcttcccaggcccctcagcccacggaggccttcccagcaccttgaccgcaccacaaaaccaggcggcggatgggccgaggactgctttgggtctcctgtcacactgacttccagggaagggctgtgtctctagcagctggcgagtcagaggacactcgggggtaacagcagcaaaggagggagtacagggcagcggggccagcccaggcaggaagagggaggaaggggaaggaggatcgggcccccacaagcgcccgcttcctacggaacctcccctggttcatcaatcccctgatgcccgaggagtgtttcagatgcagaccccaacgaggtgccagccccctccgcaccccagcctgcccgtgctgttgggcagacccagaacgcccctgatgagtcgctctggaggagcacagccctaggtccatctgtgctccaggtccggggccccaggatctgaggcattccccgcctgtcctgggcgctgccataaggggcgggtctgggcggagggggagacctccacctccctggtgggtcccgctggcctgagagcgcagacaggactcggggagggggaggggtcagttctacacccctgggagccttgactcccagcccagagtccccacccgcgaccttgtccttcctgcagaaaaggtgggtggcggccgccaagggcagaggccacccctctgatcccctaaaccggaggaagcaggcatgggggtcttcagggaaatttagctggatggatgggggaagggcgaaggtggccccacctctgctcaagttcgagcttttggggccagccctgaaatagcagcggaaccccccacaccccgcggaaagcccctttcccagccctccgcattcgccggcggtcaactccctcctcgcctggctcagcccgggtgcgagcgcagcctgtgcggctggggatggggagcctcgcggtcgcccagtcgcgcgcacccgcggcttgggaccgcagtcaggagcctgcctccctctggctctgggggtcccaggccatccgaacgcgggcgaaagggggcccatcccgcgccccgtaacttaccgcgcaggaggccggtccccagaagcagcagcagcggcggcagcagccgcggcgctccggggccccctagctccatggcgcacgcacctcgcgggctctagatgcgggcggctcccggctccccgccgcttcgaggcccgtgcgcgcccaacttcatgcctcccgcgcctcgcgggccgcttcggccgccgggcccggttcgtcttctcctgtggggcgcggtgcggcggcggcgcggcagggagcgccgggctgtgggctccgtggcgcggccccgcccggccctgcccgcctcagccggctgggagggggagcaggggaggggggaggagggggagcaggggagggggagggaacggagagtgaaaagggaggagggagcaagggccagggagaatgagcagggatggaccgcgcgcccagggggacggggaggctgcgctgggccccgggcgggggtaaagtttccttgttctcctggggttcgagacgtgcctgagccggggacggggaccccggggtcactgagtgcgactggggggtcccggagtcagtctgacctccctccccacatctccagcctgggcgcccgctccctgcctgcaggggtggggggcacatctaggggatccggcgcaaggaggggcacccctagcacatctgggttactccatcgcgccagccggtgtctgcagcctgaaaatcgcgtctctggtcttgttccccagcgagccgttcaggactctctgtccgcctgcagcccccgccttccctggtacctccgcagagacccaagaggcgtccagaggggagcccaggcgcacggtccccagggaggggccccgccctcaggtgggtgccgaggtggccgcccacagagcagcaggtgcgttggaggaggggcgccttgtgcggctgaatctcgtgtgcaggaggagagggcgaggctctgcagaaacatcagacccggccatccctgtagccgcgcccctggcccagcctcaggctctgcagctgggacacagcccccgaaaacggagatttccgtcgtcggtaatggaaggcagagcagaaggggctggagaggtccggtgaccctccgcattcacgcccctccctccaaggctgcaaggctgctggtcgggcgagggggctccgtcaggagttccctgcagcaaccccctctccagcacaggcctctggagccctacagctcctgcccctcccatcgctctcccatctcccctgtccctaccccctaccttccttctcctcctccccccagcttccctgagcagccactgctcctgcccacccctctcccccctccctgcccacctctggttccaggttgagctcatggctcctcatacacctgctttgggacgggcaggagctcttcctcactggccagagctgtctgtccgctctgtgggcagtgcctacaattagagctttcagaacacacagccgctgcacagtggctggtccaacgacgacactgccctcctgaattgcctggtccagcgacaacacctgccctgcttctgtggccttcccacatgctggtccaagcaagctggatgcagggaccccctgcacttccacggcccccttgaggtggcctcttcaattgtccctacgttaccaaagagataacacaggtgcggagaggccgagcgacttgccgaagctcacagtcagtactgggattccaacccaggccatctggctttagggtctgcaccccggcctcctgctggcctcagatgtagttttgggctgacgtgccctcactgggacagcctcctgggagatcccaggtctactttcctgaactctttcctggagccatgggtgtctgccacccaccctgctgacggctctccctcagaccaccctgcagatccaaccctcgatggtttcaagggcctgtttccctaggcagactgaagtcccccaaggaaggattccctctcctcctcctcctctccttgctcttcccaagcccctgggcagtgcaagaccctggtccttctggcctacatgaagcccctccatgggccagttctgtgccaggaactagaaggttccaagctggatggatatttgggctgagcaagcagctggtaaacacagggaggggagaagagcaaagtcccccgaggccccgtgagggcagcctgctgacctctgacctctgacccactcacagaaccccacccccgctccctgcggcacagcccatgaggctctctgcttaggaaggggacagagaggtggcaaggccagcggttcccgcatggta

SEQ ID NO: 1561716 - DNA, 4001 bp, Homo sapiens
tggccaacatggtgaaatcccatctgcactaaaaaaaacaaaaattagccgggcgtggtggtgggcgcctgtaatcccagctactcaggaggctgaggcaccaggagcacttgaacctgggaggtggaggttgcagtgagctgaaattgcgccactgcactccagcctgggcaacagagtgagactctgtctcaaaaaaataaataaaaacaaacaaaggaaaaaagagaatgttctttttaaagtgtatcataaacaaagtgagacaacgaactacagactggaaaaatatacttactatgcatataatcaacaaaggattacgatccaaaatttattttttgtaatcctacaaatcaaaagaaaaatacaaataacccaatagcaaaatgagcaaaggtaattcaaagggaaagttcaaattacctataaattgtgaaaatattgtttttattcatttgtatttatatttacattgtttgtaaagagggggtttcactttgttgcccaggctggtttccaactctggcttcaagtgatccttccacctcagcctcccaaagtgctgggattacaggcatgagccttcatgccccagccaaattgtgaaaccatttttaacattgctagaaataatggaaatggaaattaaagtaataacatgatactattttgcacttatcactgggaactgggaaacatggtacaaccatgttgaagagcaatttggcaacattatataaagttgaggatgtgtgtacttcacaatggaagaattgtatgtactttatatgtcctcttcagagaaacatacatgtacaaggggatagccatgagggtaatcatggcaacattgtgtgtaacagtgaatggctgaaaacaaatgttcattagtagggatcgaagggatcaatacattatggttcagtcacaggattgaacacagcactaagtctgtgtgtgtcaatgtggataaagctgaaatgattttgagtgggaaaaaagaactatgatgctatttatggtatcatttttaaacagtgtgccacatactatatattgtttatggatacatacacatgtgataatatataaaaatataaacaggaagggtgacaccaacttcaggaaagtggttactattaaagagaaataaaggggcatgggatggtaaagagctttccctacacctgtaatgttctatttcttaaaaattagatatctatggaaatatggggaaaggtactttatgaataaaattaatacttactgagtacaatttactattgtcaggcattatccaaagcactattctgatatgtaaatcatttaatcagtaaatttatgcagtaggtactagtattatcatctcactttacagaggagaaaataaaggcacagcaaaccaagcaacttgcctggggtcacatgactaataggtgatagggatttaaacctaggtagtctggctccagagttcacaagcttaacctatgactcaatgttgctaccctgactctatcctccctcgttctctctggatctcataatagcaggaagagtgggtacagaacaggactcagtggctctgagtgtggcttatggcttgcccagtgtggggggctggtaggctacagggcaggggtccctcctttgtgccatgctgtgactccaaaaggtacaggatggccaccattcatccaagacccctcctacacctgcatcgaccttcctcaaaacacctgtctgttcagtcttctgctcttccctcccagggcccttgcccctcctcaccagttccttcttcaggagctgccaggcataagttaccatatgtctcctcatggttcctgtgcaggcaaatggcacaactagcccctttgcctttcaaggggaggactacaaatttttccccaaaaatccagtaatactagaaacaaatagatttcctcagtaacaaggcaagagctccactccactcctcctaccataccatcagctactggaagccctgctctgagaaaaatcattctcagaatctcctaaggtcacaatgaaagattctggaggcaggggacacagggattggaatgtgggagtctaacatttatgggatactcacaggcattatctcagctaatcctcacaaccacccaaacttttactcaactccatacataggagactggggctcaaagtagctaaatggctgccagagtcctggtgagacaggagaatggcacaaccctgctgaccaaaacaggatctaggaccccctagctgtccccatccctcattaacataagacactcctaccagtgccatgacagtgtacaaatgtcttggcaatgaccaggaagttgctacctctttcctagaaaactctaaaaacccactccttaatttgcattaacctgccccttaatttgcattagcctgccccttaatttgcatgtgattgaaagtgggtaggaatgcgtatactacacttgatctcagccaaaaggctgagaagggattagagatgagcataaatacagttgccaacatctcatacactgggtatcgactccggattcattgcccatgagttagccctgccccacaaggagaagcactattcaataaaagattgctgtctaacaccactggctcacccttgaattccttccttgggcaaagccaagaactctcctaagctaagtctcaatttgggggctcacctgtcctgcaaagatagggcttttttgttttttgagacactgtctcactttgttcccaggatggagtgcagtggcccaatctcagctcactgcaacctctgcctcccaaattcaagtgattctcctgcctcagccgcccaagtagctaggattacaggcgtgtgccaccatgcccggctgatttttgtatttttagtaaagacaggctttcaccacgttgcccaggctggtctcaagctcctgacctcaagtgatccacccacctcagcctcccaaagtgccgggattacaggcataaaccaccactcctggccagggccttttttttttttttttttttaagaaagcagtgtagctaaatgtcaggtacacttgctctccatttgtagcatccaattaacagaagcaaggtctggtccagcctggccaatgtggtgaaaccccatccctactaaaaatacaaaaaaattagccgggtgaggtggtgggcacctataatcccagctactcgggaggctgaggtgggaggatcacttgaacccgggaggcagaggttgcagtcagccaagattgtgccactgcactccagcctgaacgacagagcaagactctgtctcaaaaaaaaaaaaaaaaaaaaaaaaaaaagcgggagggggaattggcataaatggcatgcagaggagggaatgagcaggtgggagtctccatgactcactttggtgccttatctaccgcctggtcgagctgccaccatcttgggcagaactaggttgtaaagtggccttgtctcgagatactctccaggtggggcagagtttcctggcaggcatacttttggttgtaaattgactattgtctctcaaggcaatctggtgggagaggtttctactctggagcttttaagtaagcacacagatacacttgctctaggagtgtctggtgaagggaaagcaaaaggttataactgcatttctaatcagctaagtaggaagtggggaacagaagaaaaacacaaaagagaaagaagaaaaagatgatttaaaaagataactcattctctatctcatagaaaaatgggtgtactttgttacagcgggaggcttctaggctgggagtaggttcatccagcaccttagcccagggaccactctgagacttagaacttggaggccctggaacgtgggtgcatagtactgtcccataagtctggttaaatcaggacaataaaaaaaaaactcagcaaaacagaagacctcacccaaatcaagtgtcaaatat

SEQ ID NO: 1561717 - DNA, 4001 bp, Homo sapiens
gaacttgctctcttcccagggtggcgcccagccacagccagaggcagaggccgaggtgtgcagggtctccggagctcatggtgctcgggctgtggcagggaagaggccatgcccttcagccgtccccccgtctgtcctctccctgaccacaacgccagagcttctccaaatcctcgagggccaggcagcctgtccccacaccgggctccacccctcacatgtgtgaggaccagaggcctgcaacctgttgtctaggggatacctcccagctgcctaaaactcaaggacccaaggctagagctggggctgcctcccactcccaccccactcttggcatttacaccaccgggggctgctctgagtgacaacaggacccccagcccccagttgtccccacgcccagtgcaggggtggctgggacgggcacggggcctcctgcttgtggggctcccgagggccacggagggctgaggcaaggggcgagctctccaggcaatgtctgattgctggacatgtggagtccctgtggccccagcctcgccctggaggcggaagggtcatcagagacctgtggaggagagtgagagctgcctagtaggagtggggagcgggtgggtctgggggacgccagccgggggtgcagggtgtgtgtgccacgggcacacggctctgaggccgagacagggaggccgccagggccactggagagctgagtgggctacaaggaggaccagaaaaaaccaggcccggcccactcaaaggggctgggagtggaggttggatttggggtgctctgaggagcagctgagggggactcagaggccagggtaacccagtgaccagtgcccagaggtgccactcggagaggtggggagcatgtcagctgccaggcccgagtcctccacctgccaccacgcccagggctgaagaagaaatgccgggggttcacttgcactccgttcccctgcacccccagtcccctgcacccccagtcccctgcacgccccctcccccgcactcccctccccccgcactccccctcccctcacactccgctcccctgcactcccgctccccgagactgctcatgccagcccctcaccccacgcaccaactcgggccttcagaaagcagacagagcactcccggcaggccgggcccctacccctctgtgctgagctgagggcatggcttgagtgcaggccctggttctgtgagccccagcctcccacacagtagggttctagggtcctgagtgacccaggccctcccaccccctgcagccgaacagagacccccccaatacacgccccctcccagtgtgtgaccccagtatccccaccagggaatctgctcctctgcaagggaaaggcctcacccggcgggaaagccaccggcttaaatcagggatttcatgcccgcccggccggccaagggcagtcaggtaagacccaggcattggaacaggaggcacctgagggctgggctcccaaactgatcacagaggcaccagtgggcagcccgagtgcccccaagtccctggatcctcccaccccagaaacctggcttgactcagtgggacccctgccagggccacaggcatccagcctgaagtgcaagccgctctctgctcgatgtgcaccctcctcgttcccccacagccctggatgttgtctgagacccccagaagggagcccttggtgagagctcaggcagccccgggctcccactgccccggcccctcctggccacaccctgtgcgtgctgggcaccccggtcctgtggctcacaggggcacttggcctctatctagacttttctgaaagtcagtcaccctcagatcacaggctgagtggatctcctggcagccccttatccacccagcctcaggaccacagggaagtcacccacctcctcctactcctgggaccccagtcctctctcctggggtgtgctggtccactctggtcctgctgtggccacaggaaggctggagcttatgaaaggcttctcctccacagaagtcactgccccagcccaccccccgacccacccctcggcctgcctctctctcctcccctccctttgccctccacccttcctgtctgccgccccgggcatctctccaagaacggggaccacaaagatcccagcacgaaggaccccactgcacagcagggcagggtcccaccagtgaggaggcaggggctgcacggcccaacacttttactcctcactcccagagggtccatcctgcaaggaggggctcacagggaaagccactcagatgccaaggccgccacgtgtgggtgctggacactagggattctggctgcccactgtggggagcaggctgcagtggcacctggtcccccacccatgtggtcacccttcccctcccccagtatgccctcccagcccatcctgaaggctgccaccacccaacccactttgcagactggtgccggtaaccagagcttcagcaggtgcccaggcctggaaaacaggcccctgacccgacgggaccctgggctgctcccaactggaccagcccaacactggccctgcccctgccctggccctgcccctgtcccacccgtgctgtgacgtaaggccccacctaggcagcgcagagtcccgtagcacctgctggctataaagggcccaccgctcacagctgtccctgccccgggactgcctgggagataacagatgcaccccagcggcccttgcccaatgactgggtggtgacgcaagtgtgggcatcccggcctcactgcacagcctcctaagacactcactgtccacagctcaaggtggatccggccgaggcatctgcctccccgatagacccgagtgcacccaaatacgtgtccctacctctgtctttaaggaccccagcctaataccacgcgtcgcatgggtgcttcaggaccactggaggcagctgtcggccttgtgagcccagtccccaagtccatgcctcctctgcactcaggacagtgcgaaagggccagccccctcgaggcctcccgaccctgggttgcctgaggcctgagggaggatgagcctctcccgaccctgcctgctgctctggtagctgaagagaaaccacttggcctggccccaggctcagcctccagaggcaagagatgagctggaggtgctcggtgagaggccagcgctggcacagcggccacagaggaagaggtgacacctgctggaggcaaaggcccaggctggatgctgcggaggagaggggccaacctctccacacctccctggatccctgggccacaccgattcagattcaggatacacctcttcatgagcacctcctttttctcgagatggagtcttgctgttgtcacctgggctagagaacaatgccgcaatctcggctcacggcaacctcagcctcccgggttccagcgattctcctgcctcggcctcatgagtagctgagattacaggcacccaccaccacacccagctaatttttgtatttttagtagagatggggtttcaccatgttggccaggctggtctcaaactcccgacctcaggtgatccacccgcctcggcctccgacagtgctgggattacaggtgtgagccaccacaccccacccatggccacctcttgcacagcccatccaccaactggctgtcccggaggagcagcctgagagatggtgtcaggtcgtcgccgtggcgggctcccagggggccggtggtgcctgcagtcctggccatggccagaggagggcgcccaggctggcagacgggcaccaggcaccaggcaccgggcgcaggggtgcagccccggctcacaggctcctgggaacaggtatgtgcacccacatcccacacatgcaagccagcgtcagggtcatcacagaccaggcagtcaggcacccagcactcctggctcatgaaatgtgagctccacaagggcggacccgtctgcctgttcaccccgcccctgctcctggactcctg

SEQ ID NO: 1561718 - DNA, 4001 bp, Homo sapiens
tggggcacgtgtgtcctgcttgcccacaccttgctggcccaggaaggctgcccgccccatccctcagtggcatctgtaagaccttcgtctggtcacctcggcctccctggctaagggccagcaggcatctctgtcggacccccagtgggcccagacagggctctgagccccaggaccctcaacccctggaactgaagaaggtgggagggctccaggtgacctcaggcctgggggacctgaagggctgtaccagccccggtcccggcctgcctggcgctggtccaaagaaagcttcaaagccaggccctgccctgaacatgcagaggctgagcccacacactcccctcccgccccgctggctccaggcctgctccaagccctctgaggcctcccctcaggcaacccgggctccggcaggatgagacaggatatcaatgacccctctgttctgagttccccctttctctccagactggaaaaaggctgtctccccagccagggacactcaccgggggcccaggcagacctggaggaccagcttctccctgtgaggaaagacacccacatgtaaccctgaaaatcaggggtccctcaagaaccccgcctcggggaaaagagcagcgctggcctccaaatcagccccagaggcccagccccagcagacaaaaggggcccctgagcccccgatccctacctagagggcaccctcccatgtgtggggcagcactgggcaaaggggtgaactggacagactggaaggaggctgtggccattgaggccgagctgggcaggggggcagagggtgggtcatggggggctcttggtgcagccctccacagccctccacggggaccacacagcgtggacaggccctgaggggactcctgccctggtggtggtcacatggggaggttcaccccagacggtccctccgagggaggcacaattgtagaatttcagccgcctcctcctgctgcttggcccacaccagtcctgagatacccataggggacatcatctcaggactgagtcggctcctaagccccctccatggctggctccagagcccagcagcctccaacaagacccccggcccccaaccacccaaaggacgtgcctctccccacttcagccagaggccagaaccccgaacacaggggcacgggcccctcaggggacccagagacacacacctcagtgccggcattctgggtggaggaccaccacatgacaccctccacccctacccaccagcagtccccgcagggccacccccatcccgtgaaggcactggctgtcccctgatgtcaccccggctctgggaggtggggcctggttttctctccatcaggccggggagctcagggaggtgggggccagagccagaaccccagagcgctcggggccctccccacccccaaactcacgtcaatgccgtcctggccgggcttcccgggcggccctggggggccgggggggccggggagtcccactctctgaaacggagaaaactcattaaggagcgcaggtgcccccgtgggcctgacccggcgtcccctcctcccgggtcccgagcggctccggggcctgcgacgaccgccgctctcctcggtgagacccaaagcctcgggcggagcccggcgcccccgcgcagtgtgtcccccgcctccctccggcggcgggaacaaaggcccccttgtgctcccagaggaggcggcggcgccggccgacccgggccagcgaggacccatcgaggacgcggccggacggggctcatcccgaggcgctggcgactccgcgccccgacggcgacacgggctgggggcgtcgaggctgcgccgggcaccccggagtggcgggttcggggctggggcggtcgcggctccacgtccagcctcagagcccggagctcgcgctcacctgcgccccggcggccgccagaagctccccgagcaggagcaggagcaggagcggggcgcacgcgcgcggcccggccatggctgagcggagtctgagctgcggcgtcggggcgggcggcgcgcgggcgggcggggcgggaggtgggcggccccttccccttccccttcccgcccccgcctgcacaagccccccattcagccgggcccacctgggcgggggggcttccacccgccccgcgccgccgcccagcccgcctgggcgaaaacaaaaaagacgccgggcgggcggcgcgttctctccggccgcgagttaaaattatcctgggactggcgcgttgcacacacgcagctttgagcaagagagaaagacgctcttttctctccttgctcctcaacccgagtgtgggggcggaagcgcgcggcgctgaagggccgccttcagggaggggcaggggagacccgcgagtttccgaagccgcagacccctccccaggcgccggagcggacccaggcgacccaaggcccaggaacaccccggggagggtgaatccccggtaccagggcccggtcagtgcccagcgcagccctggttcccgctccggggtcactgtccagcgctgcctgctgggctgggagcacccccaccgcggcccctcacccgtggacctggacgggccgggtggtcaggccacgtcagttgctaccggctaagaccagactccaaacccagactcccaggagagatcgcaaaacgatgaccctggccgaggggaagaacccctccccgggatccccggcctgaaggaaccgtgccctgggcaggaacctgaaggcggtgctggccatgtccatttcccagaagctcaggggtcgccaggtccggccaagctctgcctcaggctgccagggcagtcgctgccctaggggactcaaagcttccagttgcctgtaggctcagtgaaggcgcagatgccagcccctcccccaggaatcttgaaaattcccgagaaaggctgccctgggggttgtagggggctgcaggagcttcctttcggcaggtggggactcatgactgttgcaatgctgtgagttagcaagggcgggaggggatgagaggggagtgggcgcaaaactgctcagcaggagcaccgcactctggccgggcgcagtcagcctggcgacagagggaggcctcatctctaccaaaaattgaaacatcggccgggcgtggccagcttggagacagagggaggcctcatgtctaccaaaaattaaaacatcggctgggcatggtggtgctcgcctgtagtccacgctacacgggaggctgaggcaagaggatcgcttgagcctgtaaggtcggggctgcagtgagccaagacggcgccactgcactcctgcctgggcaagagagtgagaccctgtctcaaaataatagtgtcgctctaatctctcccgcggtgaagtgagtggagggagattctcccttcactgctgggtgagcgcggtggctgggctgggaggggtgtgtgcgaattccatcaggcgaggtgggaggagctgaaaaggcccaccctcctgaggagtccaagtcatcctggcacagagcttcctaacagaggacttttgattacggggagaggtgggtggagcaggtcagcccagacagcagggggccttaggggctcccagcaccagccccaccccaagcccagggtctgggggacaggataagtcctccctaccagttccacctggcaagatgaccctgtggccagccccctcctcagtggctctcccctggtccctggccccacaccccactttgcctatccccatgatgcccagcatgcagtcagcaaggactgctatctgacccaaatcagacaaaacacagctggccttcacctcaggccaggggagccacctcatgcctgggacacctgcttggtgtcccccccgaaccaccttcaagcccctcaaaaaaccacccccagctccaggcagatcctaggcagagggtgggcactgtcagagctcagcctcccccggctcacttttgagtggggcagagcctcctgc

SEQ ID NO: 1561719 - DNA, 4001 bp, Homo sapiens
caaaccccatctctactaaaaatacaaaaattagctgggcatggtggcgtgtgcctgtagtcccagttactcgggagactgagacagagaactggttgaacctgggaggcggaggttgcagtgacccgagatcgcgccactgcactccagcctgggtgacagaatgagactacgtctcaaaaaaaaaaaattaatttccatttctatttaatttttaaatgtggctactacaaaatgcaaagttagaaatgtggcttgcaaatttttctattgcatagctcaagcttagaaccttcctgtcgttacaagttctaagtttggtttttatctcgcaagcagcactactgtgtgggaagttgtggggggtatggagatgaaagaagaggggcgctacctcctgggaagtgacaacctagcgggggaaatagatgtatcttcccagtgggggtgagaagtgtcattctcacctatttcagcagccttggtggtatgaaaaggcatcccaaccagcacagaagcaggatgcctccaagactgccttggttggcacctgcagcctgaagggggagaaaaaggctttgctagctcccctaccatcgaggatgaagacccccactgtacacagtgtataaggtttctttccatgtgaatcccagtgactctccttaactgggtggaggtggaaggtgtcatcagccttgtcccagatcgagcccctcaggcccacagagccccagtggggcctggctattactgacactcatgtcacactgagatgtaagacggcagcccaggccaagcttccccgggccccctcagattctcgggccctcccactcccctcaggcttcctcggcctccctgccaaacatctatctccctttggaccccactgctccccaaaactccccacgcccttagtctgttccttcagttccccaaactccttcagcctcatctagactcccctccgtccctcttctaggaccccaaaagctctcctcggccccaggaccccgcagaggtcccgtagtcccatctctgagaccccacaaagcctttcggacccctcaggtggcccttaggcctccggagatcccttggctccccacactctcctcagaccccagctcaccttagcctcgccccgaacccacctcacacaccccaaacgcccacaagacgccgctctgtctagtctctcccaactcccgcgcacccccggacgtcccccccaccccaggcccggatcctggaatcacctgggccccgcgccccacgccccgccgccgggcccacctgcgcgcccagctggttcagctgctgcatgtcgccgcccacggcctccggcaccgggtcctcagtgcagtgcaggcggcccatggcgcgcgccccagccccgcaggttccaccgccgccgccgccctgctcagcttcctcctccgctgccgctgccaccgctgccggcctctccgcgcatccacaaccgcactttcgccacggccgtcgcagcgcactcctcccccggccgccctgggctgtccggagccggggagccctcgcagggccgcggacacgcgcggccgccgggctccggggaggggcaggggcggcgccggcaccggcagacgcgaggtttcctgccagctctcccgctgagtgacctttgggtacggcgcttggcctctctgaacctcagtttcaccatctgagaaaatgatggctggggtagctccttaaatgagttaagcctccagaaatgtttaacgcagagaccggcacacaagaggtcttcaatcaatggctagctgctattatcatcatcactgttactatgcactccagagatatttatggcagcctactcgatgccagacactggggacagggaagggaacaaagcaggccagagtgtctctcggagagctgacatcagagtagagactaggtctcaaccttggaagggcatcagcatcaccccagcatcacctggtattgccgggccccgcccccagaggatctgattcgaaaggccagggtggagcctgagaatttgcatttccaataagcacccagggactacactttgagaccttctggagtggaagaaactgacttaccaaagtttcctcaaaatagtgcgagggctttgactgtgcggggcagggagggtggtggtgaggtgggtgaggggaggttactgagaccgtgatcatcactgcagcccctcaaacactctaacccccatgccctctcttcccaggggctcctcacagttcccaggtgaatattaccctaatccccactggaaacatgagaaaatagagacatgctacccagaatctaggaactgaacgccaagcctaagggcttcacctagcccctaagtccagccttgagggtaaagaggtaatgccgagaaacctggagcagggaaatgtggggggtttggctggccttcctcaccagccctcctcctctcctctaccctttcctgaaaatcccttctgtaaaagtataaacaaaatgtcttctacccggcccggcgcggtggctcactcctgtaatcccagcactttgggaggctgaggcgggcggatcacttgaggtcaggagtttgagaccagcctcaacatggagaaactccgtctctactaaaaatacaaaattagccgggcgtagtggtgcatgtctgtaatctcagctactcgggaggctgaggcaggagaattccctgaacccgggaggcataggttgcggtaagccgagatcgcgccattgcactccagcctgggcaacaagagcgaaactccgtctcaaagaaaaaacaaaaaagtcttctacccaaaggccaagcccatccccttcagtcattatatcattcatacattcattcaacaaatattgagtggcacatgcctgtggtcccagctactcggaggctgaggcaagaggatcacttgagatcttgagatcgagactgcagtgaacccagatggcgccactgcactccagcctgggcgacagagcaagaccacatctccataaaaaaaaaagaaggtctgctgtgaggcagataccatgacatgatagggggtggggattccacagtgacacaaccagatgaaccagatgcagtgcctggcctctgagaagtcagaattgacccagggggcagacgcaagtgtgtgtgaaagtattaagggatgccaaaaagtaggaggtgctttgagaatgtgtacaggacacagtccgagtttggagtacctggaagagaataaaccttcgggtgacaaacagacaggaactcagaggccctactcaccgtgcaagaattttttttttttttttttttgagacagattctggctctgtcacccaggctggagtgcagtggcacaatctcggctcactgcaatttctgcttcccgggttctagtgattctccagcctcagcctcccgaatagctgggaatgcaggtggccaccaccaaacccagctaacttttgtcttttttttttttttttggaaacggagttttgctctttttgtccaggctggagtgcaatggcgagatctcggctcactgcaacctccgcctcccgggttcaagtgattctcctgtctcagcctcccaagtagctgggattacaggcatgtgccaccaccccggctaattttgtacttttagtagagacgggtttctccatgttggtcaggctggtcttgaactccccacctcaggtgatccgcctgcctcggcctcccaaagtgctgggtttacaggcgcgagccaccgcacctggcccaacttttgtcttcttactagagatgggttttcaccgcattggccaggctggtctcatactcctgacctcaagtgatccacctgcgtcagcctcccaaagtgctggcattacaggcgtgagccactgcacctggcccggaatttttatttttaaatatttttaaccttgttaaaaaagaagatctgggctgg

SEQ ID NO: 1561720 - DNA, 4001 bp, Homo sapiens
caccctatctctaactatattaataaagaaggtggccgggcttggtggctcatgcctgtaatcctagcattttgggaggctgaggcgggtggatcacgaggtcaggagttcgagaccagcctggccaagacagtaaaacctctcctctactaaaaatacaaaaattagccgggcgcagtggtgggcacctataatcccagctactcgggaggctgagtcaggagaattgtttgaacccaggaggcggaggttgcagtgagccgacattgcgccactgaacactctagcctgagcgacagagcaagactctatctcaaaaaaaaaaaaaaaggaggtttataatagcttggggtactagtaagggctcaataaatgttatctttgttattctccatgggtcagcaaggcccttctgctatctggctgaagtctctcctactttaggtctctttcttcttactagcattgaaactagggtctggaaaggaggaatcagggtccaaggttctgtcagcatcctccacctcagaacaaaaggtctaggggcctgaggcttgggggctggctcctaaggaagcttggaatggagatgaccactgtctgctcaccccgcgcactccatttcctggagaaacttgaccttggaccaaggagtgggatcatgggaacatgggaagtgtggtaggaacaggcccagggtggcatggaagggcaaagggggcagcctgcagaggggacccctgcccctatctctggagttaggcagggaggaaggagtccaggtctcactggtgccttctgagctgtgcatccctcgtcttccacctccacctttcctcagcaccaagctccaggcagctctggggagcatctgggggcgtgaaggtatagatgagttctgcccccacatcaccctctgcccccaaaccgcagggccagatggaaaaatccttttccactggtatggtagtggtaggggtgtcccagtgtttcaaggtcaccctcatgcccttgacccttctaattttgtctgatatccccagcggggggccaatgggggtcctagacctttgaagcccctttttgggacctcaattcaccatctgagaagtgggaggaggcctaagtcttgggccagggtctgaagagtttgaggctgagggcttgggttctggtgccagccccagctcagtctggccagattggagaaccccgctcacttgtttgctccccagaggaagctgggtggggtccaggtggagagggagcagttcttgagtctctcttccctgcaggggccagaggcccctgcaccggcagaacagacagacggtctggcccccaccccttcccccctaattggctgcctacgtgcacacaggcctgctctgctggatctggttggggtggggactgggcttagccagtctggctgagcccagtctcccacccccagggaagactcagggtttggcatccatggtggtggggaggggctttagaggatggggacttaactgggtcagagggagggagacacacatctggggaaaagaaggggagtcccacatctagggagagagaggggcacccaacaaatagagtgagggagggggcacactacaggtgataagtgggagggggcggcccacacttctggaaaagaggggctccggccagtgattatgattagtgggtgggagagctccacatatcaagagagggaggatgtaatctatatttggggaaagagatggcacacatatgcagactccccaggagtcttcaactctaacctacaagaagccccccaaccctctaagacagggaccactggggcgtgacccagcggcgaaggcaggagaccgagccgcgcccctgacccgcgcgggcttgggtggcggggtcctcccccaactcactcacctcgcgggctcggcagtgggagcgcgacctgggtctgcccagcgagcaactgagaacccgctgcggagggacctgagtgcgggcgcccgcccccggcccgccccacagcctttctcggggccgccccagcgtgggaacgtcctgcttcggcagggcgtgggagcgcacagcctgcgtccctgggggcaccccggcccacagattggggggaggcactgcagagcgcctcctgcatcagtgtccctaccggggtcctgcctctggagaccctctgcagacagtagtcccaagaacagggtctccctgcctcctccacacctcccctccttgctgtttctcccacctgggatgttctcttcaggcctttgcagacgcaaaccttccagccaggcccaatgcctcctactccagaagcatcttttaggccagcagtggctcacgcctgtaatcctagcactttgggaggccgaggcgggaggatcacctgaggtcaggagtttgagaccagcctgcccagcatggcgaaacaccttctctattaaaaatagaaaaattgggcgggcgcggtggctcatgcctgtaatctcagcgctttgggaggccaaggcaggcaaatcacgaggtcaggagtttgagacagcttagccaacatggtgaaaccccatctttactaagaatacaaaaattagctgggcgtggtggcacgcacctgtaatcccagctactcaggaggctgaggcaggagaatcgcttgaacccgggaggcggaggttgcggtgagtcgagatccggctactgcactctagcctgggcagcagagctagactccatctcaaaaaaaaaaaaaaaaaaaaaaaaagttagcagggcgtggtggcgcgcacctatagtcccagcttcacagagggctgaggcaggagaatcacttgaacctgggaagcggctgttgcagtgagccgagatcgggccactgcactccagcctgggcaacagaacaagactctgtctcagaaaaaaagaaaaagaaaaagaaaaaaaaaattcccagcactttgggaggccaaggggggcagatcatgaggtcaggagatggagaccatcctggctaacacagcgaaaccccgtctctactaaaaatgcaaacaaaattagccaggcatggtggcaggcgcctgtggtcccagctactcaggaggctgaggcaggagaatggcttgaacccgcaaggcagaggttgcggtgagccaagatcatgccactgcactcgagcctagtgacagagcgagactccatctcaaaaaaaaaaaaaaaaaaaatagacaaggctcaggcacatttattcaagaattacttataaaactgggcgtggtggctcatgcctgcaatcccagcactctgggaggcggaggcgagcagatcacctaacgtcaagagtttgagaccaccctggccaacgtggtgaaatcccgtctctactaaaaatacaaaaattagccgagtgtggcaggggacacctataattccagctactcgggaggctgaggctagataatcgcttgaacctgggaggcagacgttgcagtgagccaagatcgcaccactgcactccagcctgggtggtagagtgagactcctcaaaaaaaaaaaaaaaaaaaaaaaaacttaaaaaaaacttataaagacctgtttcagctggcatttattgcatacttgtttaccaggataaatgttgggggctatagagccaaaaaaaaccagacatagttcctgcccccacagggcttacaattctgttctaggcagaggaaaaggcctgtgcaaagacccagaggcaggaaaacacagcatgttcaaaaaacagaagagacaggccaggtgcagtggctcacgctgtaatcccagcactttgggaggtcaaggcaggtggatcacaagatcaggagatcgagaccagcctggctaacacggtgaaaccccatctctaccaaaaatacaaaaaattagccaggcgtggtggcatgcacctgtagtcccagctacttgggaggctgaggcaggagaatcgcttgaacccg

SEQ ID NO: 1561721 - DNA, 4001 bp, Homo sapiens
taagcaaagtaatcacatttaatcgagcatatataaaaatgtattccctgtttcattaaaaatctgtccaataatatatactaagcacatcttcattgttttgtataaacacgccaaacatttcactttcttcataaattaccataacgttatttgaaccacctgtaacagttcttcccaactttttatactctttgaaaatgtctgcacactttccactaaatccagaaatcctccattcttatcaaaactgccaaatttcaaaaacaagtacaaccagtcttgtattgtagttctataatttaaaaaacaagatttccctatgtgtccagacttgagggatttttctcgactgcaaatgctctgagatgcattaacaatatacactagttaacaaggtcccagacaattcttgttgctaagactgcattttgcaaaaattacaccatttcaaaccattcaagcaagaagctctaaaatactgcagtcacaagcctagcctctcccttcaacaaaccttcagttgccatcacacttttttccagtgggttatactgactctattattgaataatataaaacggtccctaccaacttcttcaatttatattaggttatctctgagaatcctggagccaaggagggttttagggcccagaaatctcttaaagtctgcaattctcagcatgacaccacgcagatgagtaaatgtttagcacttaatactgagtaaccctcacaagagcccctcagatttgtcactataaagcacacgttggaggcacacaaaaagcccgtacgtttacaacctagcagctaagcctgctgcactggcgtccaaccccgtcactaacctgtagatcctcaaagtccctcccaccacccaattcacgtggctgcaaactaatgcagccaagcttcagagaaactcaattaactctccatcaaaagcacccaccctccgcagcccactggatctcgtcctcctgaaatgccacaggatcctctcccgagggagccgtaaatgtgctgctcacagcagccccttccctactgggggaccaaaggcctggcatcttactacaattctcagagcctcaggaggcgtactcaccccaccccctcacctcctagcttcagacgccggcttctcaaaactgctacaccctcgagtaaagcccctccccagcaatggacctcggaggcatttcactgcaaacccctccaccttcaggccacgaaggcggccggttgtgacacttcctttctgaactcacaggagtgtaccgactacagcttcctccccacaggtgtgacctgggtccccttttgctggtaggccacaaaggcctcctttccatttcgggttgaaggagtgtcctcactacgattatctccccacctccaggcacagagatgtagttataacctctgcttcactgggggagacaagaaatcctccgtactcgggatgtaggcgtgtttttactgcagtccccgttagctcgcaggccgctgagccagccagctctggcctgccccctctcagaccacgggggagtcctcgctatggcctcgtccccacttcggtacgcaggctcatcctcttgcgtcctccttgcatcctctcagatctcagaggcctaagtggcatcccactccccctgcagccctgcctcgaccctttgtgtggggcgctagttgccgcgggctcgaaggcctccgaaggccccgccccgggccaccaaggggcaccacgagccccgcacagccccacccgttcaggggctgcgggagtcttaccggggaaagctgcgcggcaccagaacccagaccccgaattaccccccgcgcgagtgcctccgccccgcggccgacagccccagcccgaacggcttcccggagcccaacgcagccaccacctccttcgccgcttcacaaaatggccgtcggcccgctcagcggctccgcgttccagaagggggaggaacggcgtggttgacgtcaaggggccgcgcaagcgcgctgacggtctcgggcgatctcccggaagttactgggttttgtgctaagagggggatattcagtccctgcttgcgactgttggcgcacaggaccgaccttgggctagtggccctggcgggtgggctgggtatgagtgtctagcttggcccttcactgcaagactgtgcaaattgcttcacgtcttccagtttccgcggaaggagcgaattgtgcttacctctaagttttttgaggattaaatggaccacaacgtggtggctagttattatatcctgacaaaacagccaaaacctgattcttttttcccatttaagagtttatacaggccgggggccgggcgcggtggctcacgcctgtaatcccagcactttgggaggccgaggcgggcggatcacgaggtcgggagatcgagaccatcctggctaacacggtgaaaccccgtctcttctaaaaaatacaaaaaattagccgggcgtggtggcgggcacctgtagtcccagctactcgggaggctgaggcaggagaatagcgtgaacctgggaggcggagcttgcagtgagccgagattgcgccactgcactccggcctgggcgaaagagcaagactccatctcaaaaaaaaaaaaaaaaaaaaaaaaagtttatacaggccgagcgcggtggctcacgcctataatcccagcactttgggagtccgagaagggcggatcatgaggtcaggagttcgagaccggtctggccaacaaggcaaaacccagcctctactaaaaatacaaaaactagctgggtgtggtggcggtgcttgtggtcccagctacttgggaggctgaggcaggagaatcgcttgaacccgggaggtggaggttgcagtgagcccagatggcgccattgcactccaccctggatgacaaaagcgaaacttcgtctcagaaaaaaaaacaaaaaaagagttttaatctagggcagggcgcagtggctcacgcctgtaatcccagcattttgggaagccgaggcgggcggattacctgaggtcaggggttcaagaccagcatggccaacatggcgaaacctcgtctctactaaaaatacaaacattagctgggcgtgctggctggcgcctgtggtcccagctaccagggtggctgaggcaggagaatcgcctgaatccgggaggtggcggttacagtgagccaagataacgccatagcactccagcctaggcgacagagcaagattccgtctcaaaaaaaaaaaaaaaattaaatccatcgtgacccctccacggcttcactatagtattattttattatagaaaaagctattctctggctgggcgtggtggcttacgcctgtaatcccagcactttgggaagccgaggtgggaggatcacgaggtcaggggatggagaccatcaggagagcgagactacatctcaaaaaaaaaaaaaaagaaagctgttctcaagccgctttgggcctagccccccgaacttcatgcccctgctaattaaaagctggatgtggtggcttaagtctgtagtcctagctactcgggagttagaggcaggaggatcccttgagcccaggagtccgaggctgcagtgagctatgattgcatcactgcactttagctcaggtaacaagagcaagaccctatcacttaaaaaaaagaaaaaaaaggttgaaattatcacaattccaacaacctttcgggatttctatggcagactggactggtgctagcccagtatgccaaaaacagcaagttggaaaaccaggccacactgttaaactaaacctatgctttataggtttttataggtttgctctgtgtaggtaaaacatagtccattaaaaacaaaacctactaaatgcaatgtagcatccagggttggatcctggaacagaaaaaagacaggaaaactggtgaaagctgaataaaatctgaagtttaggccgggcatagtgcctcacacc

SEQ ID NO: 1561722 - DNA, 4001 bp, Homo sapiens
cagttctgctcatttacaaatgagtcaattagacaaacaaagcagcaacttctgaagcaggactgtctatacagcaaggacccttaagaagcaataaaggtacatacaatgaatctgtatacagaaattttattcaattttaaaagaaaatgaggactttagacaaagctttaccctataacaaagcaaatctgtccagctttaaaccaaattctgagagtagccaacttctattttcagcagctggcaagagcaccctcaatgagttctactgacatttctattttcttcatcccatatggtataaaacaaaaccaatctagactccttgataagctttatgtggtcatttgagttttacaaatggtttctctaatggtatgccaaaatcatttatgtgttctctccagatagctttactgtaacatacagcaatgtttatcctggtgagtgagtcttctgtaaacagtcaaccaatgctctatgttatggaaaccaagctatatgcaattgaaacaatccacaggttctaacctggaaatactaggaaaacaatctggatgcattaatcacagcaatatgaagatctaccctataaaaaatgatgtgaatggctaccctaatacaagttttacttttcttgaacctataggcctgtcatttaagtcaatgacagcagctgtggcttcatcccgagactcaaaggccaccatggcttcacctgtgggcatacctttttcattgtattttaaacacactgagcctgggattacttgatagccataaaagaaatctaaaatctcatcaatagacacagtaaagggcatgttttgcactttaattactgtcggtcctggttttccagaactagatgcaaagccagggggaccaccaatatggattgggccagggccggggccggggccggggccaggcccaaaagctggtggcccacccaaatgcccaggggcacttccaagaccaggagggccacttccaaaccccgggggaccgcctaagctaccagggccatttccaaaattctgagggccccctccaaatcccgatggcccacttaaattgtttggtccacctccaaaacccggaacatccagtcctagaccaggcaaaccactgtttccaactgaaggcataccaggcctagcatcaccaaaggccccgcctcctaatcctggaggagggattggtggcccaaaggcatttgatccaccaaaattaccaggaaagttaaatggaggcccattattggcttcctttgatcctacagtcaggaaggcatgctcttcacctcctgcactaggtattcctgcactgggcattcccgcaccaggcagtcctgcactggttattgctgaaccaggcagtcctgtgctgggcaggcctgcaccgggaagtcctgcactgggcagtcccacaccgggcagtcccgcattgggcattcctggaactgcaggattacctggcacaggcatctttaatcccttttttccttgggcagggggatttttctcaatctctctcatatcttctagggtaactacatgaacaaaagcttctctcccattaagttttttacggtgtaagcgttcagacttacgtgcatcatcttcatttttaaactgaaccaatgcctgtcctagaccttgcccattgttatcaacaagaacatgtacagcattttcatccactgggattccttctaggaactgaagaacatccatctttgtaatgctgaatggaatatttgttatgtgggcacagactttggcagagttgacatccccctctggatttagtatcatttccctctggtcatagctgaagttctgcagtctttttcgaatcatatctatcttttctagcatacctttcttagtaattggatgaacttgaataaagcgattgcccatgtactgtttatgacgacacagagcagccttatagtcagcctcatttctgaactctacaaagccttcgccagttgctttcccattgggtccataagctatataaatactatcttccacaatatccagctttttaaaaaaatcaatgacatgtttgttttctgcttcaaatggtagccctttcaagtaaacacaaaaaccagcctcatgtggtgatcttgaccttgatcttttctgcccactgggcgattttgacctgggaagtgtctgaggagggggatgagtttgtccagaaggtcccatattttgcttaaaagtgatatggcctccagcagctacccactgtctttctgtggcagggctaacttccacatagcgttgaatcatcagcattctgtttcgtttcaaagcttcaaatgtatcttgaggggagagaaacttaaccaatccattcccattatttcgacctacatgatctttcaacaaatgcactgcatcaacacggagcccatgaaaaaaatctctgacatcattttccattgcagaaaagggcattccatgcacactgacatacagatcatcagggttgatggggagtggcttcacactgctctgagagttcatctggatagggttaacaggattcaacggaccaagaaacataggattcagattattgttcaaattcataggtgctccagagccattcattccagcaggtagaggtgccacaggtggcggattcaagggcggcatgcccgacatgggtggcagtggggtcatgggtggcacagaaggaactgggggaatcgggggcacaggaggcacaggaggcaatgtaggtactggaggaggaactggaattgggggaatggatggcattggtggcagagatggcatcgctggaattggaggaattggtggcggcgggactgtgttcattggagaggctgtgcttggaacagttgagctaaacgttgggctcccaaaggaagcccccatatttggaggagctgttcctacgctggctgtggaaaatgtctgtatgtttttgttgctttcatgaacagaagtggtggcagtaactacactgggtgatggattattaaagttggatactgttgtgggcaagtttaccctgctactcattcctgagctaggtggtggtcctgatctactggcatttgctggtggtatatctaagttggcagtttcaaaacgcctacgactcagttcaatcatattctgcatttccgtcttactactcaacaatagtgttacttttgaccctttaattgtaccacctgtgcgcatcataccaagccttgcatcttcatcagtggcaaaaacgatgaaagcctcacccagttcaccccctacaatatgcacgcccccatcaggaatggtcaatccagagaagaagtggcgaatgtccatggtccccgccacaattgggagaccttgcaaacggatgaccacagccatgctgcgctgaaaccacacacacctgcagatgagaaaaggcaacggccaggtcagactcctgtttatcacaccaagtttttagctacaagaatgaccagctaccatattaggccctcaaatattccctcaagctatcacaggcaatgtctttaatttagatattctaaaaactgaacattacgtgccatttacaatgtaaaacgtagacaatttcaacttccagaaggcattaattttggaaacagttcagtcccaagactcaaaaagttcaagaaaaaacaactgtaggacagtaaaatacatatacatcattcagaccactaatcattcagtaagatttaaaagaaatgtctaagtcaaatcaggaaacaaagtttaacaatctatagggaaaaaacatgcaaagaatatatagaagttagtatttaaaactggcttagcatcttccctatatacttgataatttcatagaattatcaagagtgtgattttatagagctcagtctcaaaatccatccaacagaagcaaaaaactagaatactaatgaattgtaaataatacttaagactaaaagtagattcaagtct

SEQ ID NO: 1561723 - DNA, 4001 bp, Homo sapiens
tgcccatgaggccaagagctgtgctggtaaagtgccccaggggctgcaagtctgggctgggcccctggagaggaagtacctgtttcttgtttctcagcggggtcgagggtccctgctggagtgggggtcacaaggggcccggcagtcaccagtggggtggggcgagttagagttagcttcttccgcttcttcataatgacctttttcttcttgatgactcgaatccggacatgctgttctgaggtcccttggggtccgagaggcacagcatgggggaaaggaagaatggtgaaaccccggatggaaaggtctgccagcccaagaagacatgtgagcccacagcaggccacaccaccaggatctaacagccttcacaggacatcaaaggcctgcaatctgaccccaacctgcctctccagtcacttccttggctcctccttctcctccctgatgtaactacatgcttggccagcctcccctgtgaacctctaatccaatggagagctgcacccagcctctagaaactgttcggttgctccaaagagctgagtctggcactttacctccgggcctctgcactagctatcccctcccctgtaatgctacccctcgcctctgattttttcacctaattcccattcttcctttgcatctcagcccagatgcctttccaaggaggctttcttagctccagactcagcatcatgccccaaaacccctgtgccgcttccattgttgtgtctgctctctgggctcagatggcctgtcctggaatccatgtctgcctgggtgtcgaggctttcagggctgggcctgcccgccggcccttcagcacaaggctctgcccaggcaggtgctgggggtacccatcgaagctccacagctgcctccagaacaggctgcccatttccgcatctggtgcccctgtgcctttgcccgccgcttccttcttggcagccctctctctctctctctctccagactcccctgactcggggacatcacccttcaagaccctcctccacttgcctcctctagaagcccctgagtgccctccgcttgcgctcctcctctcctattccacatctggaaagctgggaggtcgggctgccttcctctcccgctctgccccatcctcccggcagcctcagcgaggggctctcccttctttccttttgttctttctctccagccctcgccttcaaactctctcctacgcagtcttgctctgcaccttgagagcttctgcccctctgtctcccctcctgccagttctggcctgttttgtctttggtgaaaagggaaggtttggggcttggaagaggcagcatcccactggcgcctgtcctgggactgctgactaggtctggcagggaactggggctgccgagtcagcagccattgctcccagcagggagttgagggagtgtgagtgtgtatatgtgtgtgtgcactgtgagtgtgagtgtgcgcgcgcgtgcactgtgtgtgcgcgcacgcgcgtgtgagtgtgcgtgtgtgtgcatgcgtgtgaatgcgcgcgcgtgtgagtgcaagtgtgcgcgtgtgtgaatgtgtgtgagtgcgcgcgcgtgtgtgcgcgtgagtgcgagtgtgcgtgcggggtgagtgtgcatgactgtgagtgtgcgtgggtgtgcgtgtgcccgcgtgttagggagggatcgccccacggggcaggagagccgggcagtcggcttgcgggggagcggaccgtcggtcggggaactcaccgttagctgtctccgccggcggctgtgccgggctgctatgcagggccggggtcgagcctgggaccttggtggtcccgggctgcgcgaggcccagcaccgagttcctgggcgcccccagagccgggccgacggccggcgcgaaggcggccagggcgagcaggagcccccacatggcggggattgagtgccaggggcgcgcgggctacggcgggtggcgggtcggtctcttcctgccgagtgcgccgagccccccgccccttcctgccccccgcccctccgcagcctcctgcccgcccacagcccgctgcccgcctcggacctcggagaggaggagagggccgggaggagcgagcggggctgacctccaaggggccgccccaagtctcaggaccgccgactctgcccttcctctccgccgtctggggccaacccgcctcgttggcgcgctgcgcctttatagtctgcaaagccacactgaagagaccagagatcacctggtggccatcaagtcgaccaacaggaggcaaagccccttatctgagcaattcagaatgacacttccctattgtctaaagccacatctggtaccaagcttccgtcccaagaatttataagtaactagaatttctgtacgtttccggaatgagtgcacgttaagacccattgtgcaaactttgctgacatcaaggcaccaaaatatcgacaaatgtaaccatttaccatgacctaagtgactaatgtggtccaaattaccctgcagttccccgcagggagctcagtcctctcttgctgaagcgcctactgcgctctgctgcctcgtcctttccgtctaataaaactttccttttcagacctacacggttgttgataagttcttttaccacccgggagccaaccacttcccggttccggagctctgacacctcgcctggcatcttggtggcccatacggggacttcactgggatttccctcttcctttttctctctgcttccttccacggtctggttctttactctttggggaactgccggtcccggtggaggcagctcttctgtgggatcctgaagccctagagaagggatacctggctgtccttgcccttaggggtgagggactggccagggctcttttctgttttcggactgccagtgaaccagcttgagttctcgttggcaactgacagtttctggccaagcgccatcccccggtattaccccaaggccaagacaaaagagctattgcctgtcagagtggcagggcactttcattttaacactccataagccttgtcctggaagcggtggatctcaattctacacagggatgcctcagggatcttgtagttccttgtctaaacccaacttcggttcaattaattcagttccatccaactcgcccttggattgcctccttaaaaatggtcccattggtctcattttgacccacaaactcttaaaaataagcatataaggctgagcacaatggcttatgcctgtaaccccagcactttgggaggccaaggcaggcagatcacctgaggtccggagttaaagaccgggagtctactaaaaatgcaaaacttggccgggcacagtgactcacacctgtaatcctagcactttgggaggccgaggcgagtggatcacctgaggtcaggagttcgagatcagcctggccaacatggcgaaaccctgtctctactaaaaatacaaaaaaaaaaaaaaaatcagccagggggctaattatatgtggcgggcacatataatcccagctactagggaggctgaggcaggagaatcacttgtaccccgggggcggaggttgcagtgggccaagatggcgccacagcactccagcctgggcgacacagcaagactctgtctcaaaaaatacaaataaaaaataaataagagtttaaaaagcatatccttttttctaatattgcttgggttcaatacaagctccctaatcaatcaatttggccaattaatgaaacttgggattgcaatgctactttacaacttaactgattttttgccggaaccttggaaaggattcagaagtcccatatgttcaggtcttttttgctttatccccaaatccaaacccaaaattacatacaaattgtcatgtatgcttccaaggaacgtcctcccttcccggttctgatgtcttagatgatccttccttttgcctattacatcctcctcaacctgctcactcttcacctacaccctctccatc

SEQ ID NO: 1561724 - DNA, 4001 bp, Homo sapiens
ctcccgggttcaagtgattcttctgcctcagcctcccaagtagctgggattacaggtgcccgccaccatgcccagctaatttttgtatttttagtagagatggggtttcactgtgttggccaggctggtctcaaactcctgacctcgtgatccacctgcctcggcctcccaaagtgctgggattacaggcgtgagccagcatgcccggcctattataggttttcttaagagagggaagacagaacacatgtattatctgccatataagctaagcctttaatatataacttcattgtaagaactcagaactttcaacactctgcttttaaaggtgaaacttcaggaagatcttgtaaatagacaaacagtgtctacttacaagtaaaagtgtcaggaaaaaaggccaaattatcaactccaggcattcagctttaaatactgcaaagaatctccctcactcccttacacatatctaaagaatgctaaatgctatatagagtgtatggaggtttgaatgaagagaacaaaaacagatttaattctataacctcatcactaagtcagagaactgctagaagaaaatggagataggaatagggattgtgatatttggaaatcgagaaattgtgtaaatttgttcaaaacagtcatggaaatgttaagatcctcaactaaaaaccaaggactttcacagctcccatctgggggctttgcaattcctagacaactcatttggagccaagctgtttgaagttggcactaacaaaagagctctttggcagctgtctgaagaacatccccttcttgccaaacagaatctgactcatgagaggatatttcagctttgaaaagcctcggcccagcggagctaagacaccttgcacaacagggtacagaaataacaacaagaaaacgcctttccctgaagcctagattttttttctccgctgtgtcaagactgccaattccactccatgggactttctcttctctagaaccccttttaacctctttcttaatcagtactagccaacttgcctgaatcttaattttggttgtaaaaaaggtggcaaaggccatttctgaagattcttttaaaattccatttctgaagattcttttaaaattctatgaactatcctgtaaaaaaaaaaaaaaaaaagtattctctaaagacactatgtctgtgtttataaaagaaacccagcaagaaagcacctcagcttggagggataattaaatagttattgctggggtcaggtggcagaatactgtcattgaaagctatagaaaaacttcaaattatccgaagagcaatcacaaaacaagaagcaatacaaacctctactctgagatcttttactgaaagtaatccacattatacaatgaaaacattcttggaatacatcccaaattcaagttcaaatatcagagtgtttcagagtccaaagaaaaaagataagtctgttgaccatactatggtagagaataagtcaaatactgatcaaaggttacagcaactcaaagggaagagtgggaggggagaaggctgcacacggttgcaaaaaagcagtaagcaaaagatcagaaaaaaggtccccaaattaacttcagaaattatccacagggcaaaattaaagacaaagttgtaaacagaaacatcatttcatttggcgaattaacaaacagaactcaatgttgctggaacagtgaagggagttctttttagctccacatagaatatttcagttaaggtgtctcattaatttgtaatcattaaatccgtaaaagtttcaaagttaatgttaggagagctaatctcagattactcaaccagataacctgtggcatactcgaccaactactgccgttctgggaaggacttcagtcaggatatggcaacttcaaagtatccagcattcaaaccccaacatgctttagctatcagtggagttgagacccctgccaggatctggccacctcaacccatgctgtacaactgatgaaagcagtacaggggccactgaagacataacaattgaagatgtaataattgcatgagtcttgctaacatgacatcaaaagctctcccacactcatgctcgggtgtcttctgtctgggtagcatatcaacaggtaagtggacaaatacttccctccgttacctcaagaatagtttaaatctttttctataattaaaggttaaaagatcttttaattacgacctaaattatttaattaccttcatcctataatgtgtaaggttaccaaaggtcaaatgatggtgaacggaacttgcacaagcaaacagaagggcctgtatacctttctaaatattcccaaagacttgccctaaacactggggattcacttcaaaagaattaaaaataggcttttagtaagacaagcgaaggctacctttatcaatgcaatatgcagaggcggcccttccagcaacgggtgcagatagaagggggatgagaggatttctaacttgaccacagagaccgtaggtggaccccgctggtgaccctgaaattcatcccgaccgaatgacctgccagtaacttcttttcagggaagagtctaaaagttaggaaacggaagcgtccgagctgcaccacccagagcttgttacctgagtgcaggggcggcgaccccagcccagggccggcccgccgccgcctcatcggtacgtaccaggctgggggtgctcgccgggccccactggccgcccggggcttcggcagcggcgcccgctccggccgctggcctgggagccgccttccccgcgcccgaacagtggttccgctggccgatcccgggcagccgcaagccaagagcggccggacgcagcctccagcgttcggccaggcagcccaagcagcagggcacgggcggcagcagggcccagcaggcgcgtcgcttactcggccgcgttcccggagcccaagcggcgccgcgcagggccccccacgagccgcgcgccacgcgcaaggctagcatggccctgcggccgcgccgcggggtctcgggcggcgagagctcagcagcctgggacactggcgagccgcttctccatggagacccggcaaccactcagacactgggctaccgctgcctccatactactttacacaccccagcacactccacttatacaggtggcaggaagccgccaagggcggacgccttcgcgacgcttttacgacaccgtcgtcgtcgggcttcccggcgcccctggcacagcggaggcgcgcgcatcaggctcagtgggttttgggaagcagcgggtacgcggcgctctcttctcctggcccgcagccgggagccaaggcccgggggtgggcggggaaaggggagaaacgaacaagataggatgaccgcgcagccgacgtagccgcgagggggccggagccacctcaggccctggcctgaaaccctctgaggcgggtggccggcagaagggccccctccaaggtgcgtgcggcgccctacggttcttgtgggtggtttacagtatctagtgcagaagaaatgattaataaatattggctctgtaattctctcctctttgagcattgaataaagatgcatatgctaaaaatataagcattagtaaatgttagtaatagcaatggctgattgttttgctgaaaacagtaatactatattatccagaatcaatgtttacctatgagaattgtctttttaaatagtttttattttaaatttttacattgctagtacaaaagtttcaattatactatataaccaggctatagtgcatcatcccgtttaatcctcccaacgactgcaagatgagggttccattattacttttacagataaggaaacttaggtttagagaggttaagaaacttgcctataatatccgagacagttatgaatcagctcaccattaattagctgattaatatattcagattagtatactaaacatattgatacatcaatatttgcaatgttacagaattttt

SEQ ID NO: 1561725 - DNA, 4001 bp, Homo sapiens
aaagtattctctaaagacactatgtctgtgtttataaaagaaacccagcaagaaagcacctcagcttggagggataattaaatagttattgctggggtcaggtggcagaatactgtcattgaaagctatagaaaaacttcaaattatccgaagagcaatcacaaaacaagaagcaatacaaacctctactctgagatcttttactgaaagtaatccacattatacaatgaaaacattcttggaatacatcccaaattcaagttcaaatatcagagtgtttcagagtccaaagaaaaaagataagtctgttgaccatactatggtagagaataagtcaaatactgatcaaaggttacagcaactcaaagggaagagtgggaggggagaaggctgcacacggttgcaaaaaagcagtaagcaaaagatcagaaaaaaggtccccaaattaacttcagaaattatccacagggcaaaattaaagacaaagttgtaaacagaaacatcatttcatttggcgaattaacaaacagaactcaatgttgctggaacagtgaagggagttctttttagctccacatagaatatttcagttaaggtgtctcattaatttgtaatcattaaatccgtaaaagtttcaaagttaatgttaggagagctaatctcagattactcaaccagataacctgtggcatactcgaccaactactgccgttctgggaaggacttcagtcaggatatggcaacttcaaagtatccagcattcaaaccccaacatgctttagctatcagtggagttgagacccctgccaggatctggccacctcaacccatgctgtacaactgatgaaagcagtacaggggccactgaagacataacaattgaagatgtaataattgcatgagtcttgctaacatgacatcaaaagctctcccacactcatgctcgggtgtcttctgtctgggtagcatatcaacaggtaagtggacaaatacttccctccgttacctcaagaatagtttaaatctttttctataattaaaggttaaaagatcttttaattacgacctaaattatttaattaccttcatcctataatgtgtaaggttaccaaaggtcaaatgatggtgaacggaacttgcacaagcaaacagaagggcctgtatacctttctaaatattcccaaagacttgccctaaacactggggattcacttcaaaagaattaaaaataggcttttagtaagacaagcgaaggctacctttatcaatgcaatatgcagaggcggcccttccagcaacgggtgcagatagaagggggatgagaggatttctaacttgaccacagagaccgtaggtggaccccgctggtgaccctgaaattcatcccgaccgaatgacctgccagtaacttcttttcagggaagagtctaaaagttaggaaacggaagcgtccgagctgcaccacccagagcttgttacctgagtgcaggggcggcgaccccagcccagggccggcccgccgccgcctcatcggtacgtaccaggctgggggtgctcgccgggccccactggccgcccggggcttcggcagcggcgcccgctccggccgctggcctgggagccgccttccccgcgcccgaacagtggttccgctggccgatcccgggcagccgcaagccaagagcggccggacgcagcctccagcgttcggccaggcagcccaagcagcagggcacgggcggcagcagggcccagcaggcgcgtcgcttactcggccgcgttcccggagcccaagcggcgccgcgcagggccccccacgagccgcgcgccacgcgcaaggctagcatggccctgcggccgcgccgcggggtctcgggcggcgagagctcagcagcctgggacactggcgagccgcttctccatggagacccggcaaccactcagacactgggctaccgctgcctccatactactttacacaccccagcacactccacttatacaggtggcaggaagccgccaagggcggacgccttcgcgacgcttttacgacaccgtcgtcgtcgggcttcccggcgcccctggcacagcggaggcgcgcgcatcaggctcagtgggttttgggaagcagcgggtacgcggcgctctcttctcctggcccgcagccgggagccaaggcccgggggtgggcggggaaaggggagaaacgaacaagataggatgaccgcgcagccgacgtagccgcgagggggccggagccacctcaggccctggcctgaaaccctctgaggcgggtggccggcagaagggccccctccaaggtgcgtgcggcgccctacggttcttgtgggtggtttacagtatctagtgcagaagaaatgattaataaatattggctctgtaattctctcctctttgagcattgaataaagatgcatatgctaaaaatataagcattagtaaatgttagtaatagcaatggctgattgttttgctgaaaacagtaatactatattatccagaatcaatgtttacctatgagaattgtctttttaaatagtttttattttaaatttttacattgctagtacaaaagtttcaattatactatataaccaggctatagtgcatcatcccgtttaatcctcccaacgactgcaagatgagggttccattattacttttacagataaggaaacttaggtttagagaggttaagaaacttgcctataatatccgagacagttatgaatcagctcaccattaattagctgattaatatattcagattagtatactaaacatattgatacatcaatatttgcaatgttacagaattttttcttgttgaattcagtgttgaactgaatttgaatgattattgccgcctctccactatcgccccactaaccccatctatgatggctgaactaccttacagttgagtttaaagtcttaattcgggtagttaggaaagggaaaggccaactgaaagtgagcaacattgtagatgaagcagcgggtatttatccaaaaaaaatctatttcttacattgaaatcctgacattgagagaaaaatggaaacttctgcaacagcaatgtaaaaattttaaaaaatttaaaaactatttaaaaacacagttctcataggtaaacattaattctggataaccctggcaagagggagtgggcaggattccagtctctcccttcctttcatgagattgcctttattcactctccgcttcctaagacactcattgtgtcttgggacttctttctattccctatattcagcctgtacttcatctgcctctaatccttggcactgaggacacaaacttgtttttgtgttttttccctttgttgctctgataggttttatttctattacttatggtatttgtccaaccttttattaattttttctaaattaattctagttactgtgttgatttcttcaacttccgtactactatttatggtaatctagttttatccaggctttgtgccctcaagaataacaccattacctgagctcttcacttatttgccttattgtttggagctagcattcataggtttctgttttagataccattttagttgtatatattttttgtatatttcaaaatatggaattatactgttatcaatgtttaaaatagaacatccccaaaattatctatgtagcaaattttatgttcttcctatttttcacttcaatataaaattagagaaaaaaactccaagatacaatagagtccgccaattaaaatataataaactgttttgtatttaaaaagccagctctactacaaactgctgatggctaattgtctttaaaaagtaggaaaataaagtggctggcattttggcctgaaagacaatgactgctcaatacttatgactaaagagtaacatgcttttaacaaactgtttccctaacattttaagacgggagaacatccagctatcagtctttgatctcattttctag

SEQ ID NO: 1561726 - DNA, 4001 bp, Homo sapiens
ttatccttcttactttttgccatcaatgcttttgtagatataccttcatgtttaccttcttatttcccagcatttaatcttgtattccacttctttctgattttattcttctcagaatataccatctcctagttctttctacaagattctttgaattctttcagtctttgtatgaaattgtctttattttatcttcattttaaagtgattgtttaggtttatcagtctaggttaatggttattttttccttttatatttttaaaacactattctagtagttagaaaactatgggccgtagactaaattcagcccattgactattttgtatggactgtgaatgagctagggatatatatatatatatatacacacacacatacatacacatatacacacacacattttacattaaactttatatgtagtttacattttaaacattttttaaaaattacatggcacatgaaaattatacataagtcaactttcagtgtatgtaagtaaaattttgtgggaatacattcatgctcatttgtgccgatattgtctctggttgttactgtgctacaatggcagagttgactagttgtgtagacaacatgtggctcataaagcttaatgtatttattctctggccttttacagaagtttgctaacccccgtgctactggcttctaatgttgctcatgagaaatattctgtcagtctaattattttttatagacagtctgtcttttgtcaggttcctttaaagttttctgtttgtctttagggttttgtagttttactatatatttggagtttatttgtattttttgctctgaactgaaggttcatgtctttcatccatgctaaaagtaattagccattattttcaaatgtttcatttattccttttggaattcccataagacagatgtttttcattctgtcttacatgtgtctttactgaattctgtattttctgtttctatgtgcttctttctagataatttgttcataagtatcttccagtttattttctttattcttctgtttttaacccatcctcttagtttaaattttaataaccacgtatttcattttttaagtttctgttcttttttaaataatgacctgttctcttctcatgacttttgtttctctttctatatttctttattataaacatacttagtttgtagtctgtttcagagtctatcatctaaagttcttggtgactcccataatacacagattgtgtggactagaatgccatacccactttagtctagaatttggacttctcagcagtatttttgctttattttctacctagagctttgtgtagagaaagcttgtcactttcttgggctggtgagtttaatttttctagccccctcacttaccgaggggcccatccaaagtcccaggtagatgcatggtttaatttttaattctctgtttggagtgaggtccattctatccccaaaacctgtgtcagatcggctcacatcattgccacctggttggagaatttccctcgctcgctttctttcttcttttcttgttttctttttaccaaagtcagttatctaattaattatacttccttattttattcagaatttttatatacttgtagcattagtttatgatatgtttcacaaacaagatgtctcattccaattttgctttcaatttaaaaccagaacaaggaatgacaatatttatggttagcttcgataggagtctagacattattaatttctccttcattgttttccctgttttgagctcactggctagtatataataaaatggctttccctatgaaggaaagaagggagggaaagagagaagagagacttacagaaattgagacaatgagagagaaattgaaatcattttgtgacctactgtttttgtcaacagcatttcccaaagtgtccttctggaacgttaggttctccactgttgccgtcattagagattctcttcccaaagagtgtcggaaaggctgggttatacaaagaaaacaagttgctttattatggaacctctcaaagatgttaatgggcctggtggcccttcaggaagcctattgcgagcatttcctacacttaaccacagaacttttttggtctcaaaatatgtctcaagactgctgaccttcagggctccagtttggagaactctattaagaacataggcagcagctgtcagtatttccccagtaactcttcaccacatgccatcgtggccgattaaatataagaggaccctgaatccgtaaataattcctttcaatgtttttccaattctattgttagaattttttaaagcagctttgttggaaacaaagaatatagttgcagaaacttctaaacaggccagttctcagaaacttcattctcctatggaggaacgtcagctggtttgcagtgacagttgtcacagactacacccaggggaaaacgtgtcacaccagtattctcacaccatgttcactctgaccacatggaaattgaattagtgttcagttttgtgtgtattataaccaaactggcttatcatatcagattaatagtggacttttttctctcttttggggacaggataaaaaatgtcagtactcacttctccaagaggaaaggtagaagttgttcattgccgaagaacagaatcacaggatgtttattgtatcaaaagccttattagaaaatttacctgcaagctgtttgggaagctaaatatcatctatcttctgtaagtagataactaagttcaagaatgttcatcaattttggttgggtgcagtagctcacacctgtaatctcagcactttgagaggccaaggcaggcagatcacctgaggccaggagttcaagaccagcctggccgacatggcaaaacctcatctctactaaaaatacaataatcagctgggcgtggtggcgcatgcctgtaatcccagctgctcgggaggctgaggcatgagaatcgcttgaacacaagaggcagaggctgcagtgagccaagacacgccactgcactccagcctggatgacagagcggacccctgtctcaattaaaaaaaaaaaaaaaaaaaaagaaggttcctcaattttatgacatgccagaaaaggatcctacctttttgtctttatggggcttattgtgagcaaatgggtagcttactgcacagtgaaaaaattgtagcaagaaatctctgggaacaacaaattcctatttcctataataatatgcaaatcaaaaaggtttctcatgggctttggattcaaacaaacttggttcaaatctcagctgcctcactcactagtggagtcacttaaaacaagttaataatattagctgccagattttgagaaattagtttatgtcaggctctgtgctatgccaacattatgttattgttctgatacttctctgaggtggccactatcatgtccatctcacagatgagaatgggaggctggcgcagggtcaaacagtacgttggaaacctggatttgttcacagccgctgctgttaaagtgttcttctgaactttaaagtatgcatagatttgtttcttaaaagatcttttttctctctgttttgtttgtttatagaccttctgtgggtgccaaaatataaatatccttgaatctgttcttcattatttaattaatttatttatttttgagacagaggtttgctctattgcccagatctggggtgcagtggtgcgatctcggctcactgcaatctccgcctcctgggttcaagagattctcctgcctcagcctccagagtagctgggactacaggtgcatgccaccatgcctagctgtttttgtttgtttgtttgttttttagtagagactaggtttcatcatgttggccaggctggtctcgaactcctggcctcaagtgatctgcctgccttggcctcccaaagtctttggattacaggcataagctactgtgctcgaccctgttccgcattatttttat

SEQ ID NO: 1561727 - DNA, 4001 bp, Homo sapiens
catttaattcttcttcatctgtgatcttctgttgaggtggaggtggaagaagctcaagttctctttctttagcctctcttaagagttgttcagcagttatctgtacctcagccggggctttgtttttcaccttttaagaaagaagacatttctatttttagtagttgctcttcacacaaggcttaagaaacaaacatacattttttaggatatgaactttgttagtattatcacaagatgccctttttgtatgacatgttcccattcctccatgagactgaaaagaaaaaaaaaataccgttttctctcttattcatagtatctactgcaaagccataggtaaaagtctcaagagaaaaaggtggcaaaaataatagcaagttttcccttttagatgagtataataataaactttgaggccgtctaggtaaaattctgaccagaggttttgttttatcaaaatgtgtagcacatcttattaacagcattacaacctgcatttacagaattcttcaacttatttaatgccccggtgtataactgggtttggttttacatggcacttcaagtcaaaggcaatttcagtaagttctcatcattagactgtaagcttcttgaggtcttagaagcttacagtctaacgtagcttagagctgtgctgtccaacacagtagctatgagtcacatgtggtgagtacaaattgaggtggactgtaagtgtaaaatacacattggttttgaagatgaagtataaaaaagaataaactacctcattacattttttataccgattacatgttgaaatgataatattttggatacattagctcaaataaaatatatattatcaaaattaatttcacttttttgctttgtttttactttttaatgtagatatgagaaaatttaaaatttcatatgtggtgtgcattatatttccattggaccagtgatgcccaataaaagtttatgtagctgaattataaaaaatgttacttaatgccacatgtggagtaatgatgataatggtgatagctcatatttaataagcactaagtgccagacacagtgttacttgctctatatgcattactcctgcgagtcagacaaatagttatgtaaaggtccagttcaagagagtcatccgggctcaagaaagactggagggagggtatctgtaaaggcttcaaagtctgccacatattaagcacttggtaagtattagctatcaaaggaaataccagatagtaagtctactgtttaattaacttatgatactatactactcctaccgtctactctcgccctccgctgtcagctgggctaactcctattcagccttcaagtctcagcttaaaggtcatttcctcagcaaaatttactttcaggaccccttcatacgacccccttattcacgcccatggcatattctactttgcctctcggtaacatctagcaaggtcgtctttatacagaaactcgtgttttgagtactgcttgtggccagcgtacgagcgtagcttcccagcgcccagtgcagtgcctggctcagtaaatcttcaccgaaccaccccactccactccccagcaaaaccaccccagaacgaaggccacgccaacgcgggtcgtgctccgcgatgacaagagcccgcgccccaccaccagctgcccttcctctccatctctcagggtgagccttctccccggcgggaacactctctcccaacccgggcaccctcagggctgagggatgcccctttcctaggccacctcctacaaggcccctcgcgatcgcctaccttggccactttgggaatccgctgcttcccggccgcggtggaggccgccatgtctgcagcagtcgacctctggacacctgtccccggcacggacgctagaaatcggctctgagagctcaccgaaaccacaaagctttcagaaaacaaacaggatctcggaaccggaagcggaacttgcaggactgacctttgacctctcgcttgagccgtgacggaggcggcaccgtttccatggtgaccaggctgcgcgtcctccttgcggcagcgcgtggagtgcggcgtcctggagctgcggatgaggtgggtaacgccgtgctgactagcagcgacgcaaggactgcggtgcagggcgtccagggcgcatccccaggtcagcctccggaactgggatgaccaggcgaggacgagtggctctgtcgagccgtggcgccctgcaagggagtaagaacggagctccaatctggatgctcgagggcgggggaagaagggagagcgaggaaactaccattcccagcatgcgacggggcgagctgccgcccttttaggctgcaatgcctcgagcattgcattctagtagtctctgggtccacgccccctcgtttctggtttcgggacagttgtgcccaaataattctaaggtgcccaaataattaactctaaggcttggaattaaaaataacagaaggtactttgaagccagatattaggaaaaaatataaatagagtaactggaaaacaactcagtcttgtgataagaaacatgtttaaattctgtgtgtgccttaattactctagttaaattttcttagcctcaatgtcctcaactataaaacaaggctaataacatctgtttcactaggattaaagacaaatgctcagtagatgttagctgttataatacttaacctgccctcaaaaactgaaaagcaaaggttaagagaattttttttaatagacatttttagagaagttttaggttcacaacaaaattaagtggaagacacagagatttcctccctccacagcttcctgctatcaattattgtacctcttccctcctctaacagcctccaactcttaaaaatatcctccaccagagcagtacatttgttacaatcttgaacctacattgacacatcattatcacccaaagttcatagtttatattagggttcactcttggtgtacattctatgaggttggacaaatgtataatgacatgacttggcagctcatttgttaggataatttccacagttgcaaagctcttttggtgtttggggaaaatatatatttatgtatgtagtaatatcacgtctaccaatgcagatattactttcaacaaaagatttatgcagatttctagaactgcagtcagttataaccaacatcaatgtatttgccataactctttattaaccatattatttagatattttatctcacttttcaaaatttaaatagagaagattttatatcactttcataaagccacctaacaaaataaataaatattaaaaagatgtttctttgaagtgattttccttaaatgtgttactgtaaacaattgatttaccaaatgaatcattggtttaatcatctgttgcctttgctcaaaagtacaaacatgctagaatactttgcttctgatcaccatccttctctcttacatttctgttgtctggcaattcagttcatctctgtgtgtgttttttttgtttgtttttttttttttttttttttaggaaaaatgtattatccttcttactttttgccatcaatgcttttgtagatataccttcatgtttaccttcttatttcccagcatttaatcttgtattccacttctttctgattttattcttctcagaatataccatctcctagttctttctacaagattctttgaattctttcagtctttgtatgaaattgtctttattttatcttcattttaaagtgattgtttaggtttatcagtctaggttaatggttattttttccttttatatttttaaaacactattctagtagttagaaaactatgggccgtagactaaattcagcccattgactattttgtatggactgtgaatgagctagggatatatatatatatatatacacacacacatacatacacatatacacacacacattttacattaaactttatatgtagtttacattttaaacattttt

SEQ ID NO: 1561728 - DNA, 4001 bp, Homo sapiens
ttgcactgatggtaagaagtgaaagataaagggttgtaggagcggagagacgaggtccattaggatcctctgaaagcatgtcaaaaaaaaaaaaaaaaaagagagagacacacacagagaaaggccaaagatatgactatgtgggcccaaggtgagaaaaagagcaattggtggaatccaagactaaagggtccccttctgtgcctccaaggaagaataatacttgtgcatctaccatgtggcaagcacaggtgggatggcacccaccagggagagagaagtaagcaagacagacaaggtccttgctctcaaacagcttacattctagcagttgagaaagataacaagtaagcaataagtaagtgttagtaaatgctatgaagtaactaaaaccaggtgatgttgatggagagccatgggagaaaggtcctagacaggttgattagacagcctgatcaacatggtgaaaccccgtctctaataaaaatacaaaaattagccgggtgtggtggcgtgtagtctcagacctgtagtctcagctattcgggaggctgaggcaggagaatcgcttgaatccgggaggcggaggttgcagtgagtcgagatcgcgccactgcactccagcctgggaggcagagcgagactctctctctcaaaaaaaaaaaaaaaaaaaaaaaaaaaagaaaagagaaaagaaaaagaaaaagaaaacaaaagaagaggttggttaggggaggcctaaggtgagggaaacttgggagaggcggcctgccttgcaaaaatgttggtacttccccagcaaacaaaaggcatgtgcaaataattttaaatcggaataaccctggaatatggaagaaacagaaagccacactggctaaggagaaagatgggtgggagagatgaataaacaaccgtcagctcccagggaacctttgtaaaccacggtaaataactcagcgcatcctcaaagccactttccgaggtagattctgttattaaccccattttgcagctaaggaaatggaggctcagtgagatgaggtgaccagcctcaagttacacccctaacgagaggctacgtctggaatgaacccaggcgatctaattccaaagtctatgctccgaaccaccacagcacagcgtttctcccaaaacgagggaaccctcccccaacccgcgttacaggggatttctatgtcccgggtgtaccgactagaattctcacaaacaattcagcaaagtgagatcacgatgcccgttttacagtcagggatacaagtacagaggttagagaagggtgagttcgggggcttcactagagttagggcaagggacgacgcgaggcagccgcagctccacgcgcccgcagtccccgcccgggcaggcctcgccgccgcacactcagctcgcgcggctagcagccaccgtcgcagagaatggacatgcgagcgcgaccaataaggagcggccttcccgagcggagaggcggcggcgcagccaatcagcgccgtgatggagaggaaagggcgggcaatccgcaggctcgcgttaggccgcgcctcagttgccctcagccctcacaggccctggggtcgccgcacctgggccagagacctaggatgccgcgaggcgcggcaagcgctccctagggaagccgaagaccttgcctgagcgcaccacccgaaccccgggcccacattccgctctcgcccagaggcgcggttctcactccctagcgctcgttagtaccgggagcgcctcatcccttcctcagctgggccccaagagccactctggtaggccgtgcacgccccgcgcctcacctcgtggggatacagaaacggaggagggaaccccagccgcggaccgtagctggcactacccgctcctgccgccgctccgcctcacattcaaaccccggcaaaatggcgcgacagcgagcctgaggccagagcgcatgagcgagcggcccgctgcagggggcggggccaggaatgctctggccccacccaagttcgaagggccaatcggggccccgctctgtttctgcgctgatctcacaagtgacaatgctctttggctctgaccatgccagcaggcttcacggttctcgttttccaaagaggaacacagattcagcgagcggctgctggcttctgacccattttgatgtcagggcttggcacgtaggaggtgttcaatgttgatcgatccaaggtcgtgcacatagggtctaagacggaagagaacttcctgcccctcttggagcttctattttagagggagacacggccagacaggtctcgaactcctggcctcaagtgatccgcacaccttggcctcccaaaatgctgggattccaggcgtgagccaccgcgcctggcctggtatgtaagttttggtactcttattacagcccacaaaccatatgggatctggcccctgccagcctgcctgccctcatcaccttccgcttccctcctctcctcaccctcactcagctccgccaccccaccttcttcctgttcctctaagctccaagcttatttccactttagagcatttatacttgctgttccctgtgctgggatgttctagattcctgaatgattggctccttctttacatttaggttccagctcaaatgtcacctccacaaaagaggcctatctgaaattgcccactcaccaccacccagcacacaaattagggttgccaggtttagcaaataaaatgcaggctgcccaggtcaatgtaaattttagaaaaaaatttataattttctagtataaatactgtgtaggacatatttatacttaaaaatcatgcattgcttatctgaaattcacattgaactgggtgcccagtgtttgatctggtaagcctagttccatgatatcattatggtatttatcactctccaactaattgtctcttctttattttgttcctccttccgcttctcccctcctaaacccctgccctcctccccatccataacctaagggattctatacagcaagggcttttcttttttttttttttttttaaagacagagtcttgctctgtcgcccaggctggagggctggagtgcagtggtgctgtcacagctcactgcaacctctgcctcccaggttcaagcaattttcctgactcagccccccaagttactgggactacaggtgcccgccaccatgccccgctgatttttgtatttttagtagacacggggtttcaccatattggccaggctgatcttgaactcctgaccttgtgatccgccagccttggcctcccaaagtgctgggattacaggcatgagccaccacgcctggccagggctttttttttttttttttttttcttttaagaggcagggtcttgctctgtcacccaggctgcagtgcaatggcacaatcatagctcattgcaacctcgacctcctaggctaaagcaatcctcccacctcagcctcctgagtagctaggactacaggcacctgccaccacacctggctaattttgaatttttttgtagagatgagctctcactatgttgcccaggcaaactcctggcctcaagtgatcctcccacctccgcctcctaaagcactgggatagggctgggcatggtggctcacgccggtaatcccagtgatttgggagaccgaggcaggcagatcacctgagattgggagtttgagacctgaccaacatggagaaaccccgtctctactaaaaatacaaaattagccgggtgtggtggcgcacgtctgcaatcccagctacttgggaggctgaggcaggagagtcgtttgaacccgggaggcagaggttgcggtgagctgagatcttgccattgcactccagcctgggcaacaagagcgaaactccatctcaaaaaaaaaaaaagccccgggattacaggtgtgagccaccacatctagccccatattgatggtattcacagctgtacccccagcactaggcacacagtagct

SEQ ID NO: 1561729 - DNA, 4001 bp, Homo sapiens
ttcttcaagtcatacaccctcccgcaatagcaaaccaaagccaagtatttcaaagtcacagaaggacaaaaacatgccctgctaagactgcaggtgaacttttgagaataccacggaggagaactagtattggtactggactttcagccccaggtccaccaagccagtaaagccaaatgacttacaacaaaaccctacaacaactacaaagatactactctaaagccctgtctacagtcaaattcttgactataaattttacttagaacagaagagccccaaatataccagctagtccctttacagtgacaggtaaaagctacttactacacttactacctgccagacactgtagtaagcacttgacacaaattgtcttatttactcttctccgtaaactcacaagctagaaaataccatcatcccccttttacagacgggaaaactgaggcttagagagtttaggtcacacagctaagtagcaatggccctgatatttgagaacctaggcagtctggtttttaaccactgggcctacactgcactcctcagatggaatgaagtctccaattcttggaaaaatcttcccttcttagttttcttttttctttttgaggcggagtctcgctctgtcgcccaggctggagtgcagtggcggatctcagctcactgccacctccgcctcccaggttcaagcgattctcctgccttagcctcccgagtagctgggattacaggcgcgcgccaccaagcccggctgatatttgcatttttagtacagacggggtttcaccgtgttggtcaggctggtctcgaactcctgacctcgtgatccacccgcctcggcctcccagagtgctgggattacaggcgtgagccacacgcccggcctctcttcttagttttcatttcctctccccatgtcccattctcgtagaattaaacagctgaaaagtaatcaagtcttcccaaataatttgccaccttcttttcaaaactctttcctccacacaaagcaatagccaagatgcaacttctcctgaccctgactctgcttccccaaaacaaactacagaagctccacccatcacctgcttaatctagcaatgttccaacactgcaaaaaacacacaacgaaaaacaaaattgaaaagtcctactctttcaaaaggtcaccaacatatgtatacccttagccaagctttctctccatacctctttttctatccaggctcctaactagtccttaactccaactccagacgttctgccccacgtcttggtcccttccccctttcgccccagcaaccccgcctggggttctctccacctcgcacccactctgcaggtgggaagctcagccccgcccagagggaccctaagaaggcccctactccagctgcccagtttcgcgggagggttcactgcacactacccagcaggcaccactccctccgcaccctcccccagcacccccctgcggccccacccctcaagttcccttccccctctgacgaccccctcctccaagttgtcccctagtccccacccagttcagtcctctcctctgcaataagctggactccggcagccggttcccaccctcacatcggcctctgcccccaaacctcgccctccgccctgaggggtggcccctgggcctccccgatgggctgcaggggcctcgcttggtttatgtgtgaaggtgggggcaggggaaggcgacgggccgctcaggagtctgctggaagcgtgagggtcggccgcgctccgctgccctatcctgggcccaccccacccgccaacgacctcgcctggctgctccctaggtacctgtggtggaagcggcagcggcggcggccgctctcccctctgctcacacagacaatatggcggcgatggaggaggagacacacggctcggccgccagccgcagggaccagagcgaggctgcagccgctgctgccggaagcggaaaccccctcctaccaggaggcggggcgagacagcttccgactccgcccccagaggaatctctctgaatgcggccatgctgggatgtcctattgtaaccttagggattcagttctggcctagggtgcaaaatggaaggaatccccaacgcaaagcagaataaggagacttgcaatagttaagcgcattttatttcaatagtgttaacaagtgacaacagagagaacacgaacctcccattaggtgaacagttggtttgacccaagttaagatggcggtacccaggtttcccacacttcacccagctggcccccctttcttgaaaagaaccatgcgcgacctgcagagctgtagagccaagcattctgggagctgaagtctcttttgctctgacccctcgttttaaattagggtttcagcaacactttctattcaaacttggagttcggaagaagtgaatgaaagttggaccctaggaagggcatggcgcaggagtctgagaagtgaggatactagctctcaagagaccaaggcccaattccttcctcctacaggagtcctgccaagagctgtgcgtccaaaatacagtgtttttttttccttctatctgcctcccacccctgctctccttgcccgagctacctccccaaaacagccacaaagcactttctaccatgcagagctcatcatggtctccctatggtcaaaaatctcccatggacctctttatgcaccaaagatagcccaaactcttcacttgacattcagagtcctccataatttggccaaaccctcctttccagcctcctattctgccactctcttctcaaattccggaagattccacccacaagactgcaaacaattcctggaacttagctgtgttgcctccctccctttacactggcagttacttctcttactgtcacctcatggactggataatttctgtatgccgattgaactaattcagggatcctttcctctaggggtctcctctctgtttaactccctccaacccagacactatcagtcagtaacctgaggacctcagtctgtctcctccatcagactgggagcccccagtggacagggctccatctgatgatcaacctctcctttgcaggccctgataaaagctgaagcgtctaagagttgctgaaaggagttcaagtattagtctcacctctggtgggacagaggtgtgagcactggaacgagggtgaggaggccaggttctttcagtaccaaccattatccctaactgtctcagaatagctggttgtctcaggaatgggcctctccaccctccacagccctgccttcacagtttgtcagctgactagcacctctgctcccaaagaggcacctcttccccatgtggggttagggctggtggtggctgcagacttatagtgatggcctcagggaggtggctgtggccttctctggacctcatctgctagacagcttgtgacatctgatcccaattgcctgggaacccacaacagtttttctctcagtgtcctgtaactgggcctcaatttccccacttgtggactgaggaggttatacaagataatcccaaagtttctgggaagccatcttccaggaaatgatacccttctacctacctctcgaacgtatctttttggctcttgtggctttgtttttcccaactgtattcacatttgtttaactcacaacaattcatcatttgctatgagccagacactgtgctaggtactggggatgtgttatgaggaagacatacaccagttgctcactggtggagcttaccttctaaagtgagaagcaagtaatgcacaggtaaacaaatgcataaacaaagtaatttcaggtagcaataagtgctacgaaaggaaaagataagtagctgtgaagtatagagctttagcttgagtggttcagaaggtccctttgagaaggaaacagtaagtgcaaacgtcccaaggcaggaaagagcatcacaagtttgaagaaggaggccatggtggctgaagcac

SEQ ID NO: 1561730 - DNA, 4001 bp, Homo sapiens
ctgcatttcctgtgaaaatgttactattaatttgttaacagtgactaaatttgaagttgaacccattttaagaaaaacatttccacatgccagaaaatgaccctcttcacagttatatatgtatttctctgacttggttacaaattatattacacaaaggcattcctcaagtacctatatctttactagtctcttgcctaatgggaaaatcctgtttcggtataaaccatatgatggctggcaagccatactcctcaggtgccaggaagctggccattgaaaatctcaagatcagggccgagcacagtagcacatgcctgtaatcccagcactttgggaggccgaggcggatggatcacctgaggttgggagtttgagaccagcctgaccaacatggagaagaaacctcatctctactaaaaatacaaaattggccgggcatggtggcgcatgcctgtaatcccagctactcgggaggccgaggcaggagaatcacttgaacctgggagacggaggttgcagtgagccaagatcatgccattgcactccagcctgggcaataagaggaaaactccgtctcaaaaaaaaaaaataaaataaaaaaaaaaattagccaggtgtgctggcaaacactataatcccagctacttgggaggctgaggcaggagaatcgcttgaacccaggagccgagatcatgccattgcactctagcctgggcaacaaaagcaaaactccatctcaaaaaaaaaaaagaaagaaaagaaaatctcaagattgaggcaatcagggagtgtgtatgaggtatctcttgccagcagaaaaaaaggaaaatggaaaaaaagactggtcctagaaaaagggcaaaaaacaccttcaatctgctaattctaacctcttttcagtatacaatagcaggagttctccacgtaagttaaatattaacaaagtaatttttataaacttgaacatgaattcaacactgggactggaatttggccctaaatctctgtgaccttgttagaaaaatatggctaattctttaagtaacacaggatttccaattttctcaattttattgagttaccaccaaaagtgttaatttaacaatgtgatagaggttgacagtacgtttcattagtacaaacatgcctatgttttatataaatttatagctgatcaactagagaataaatataattatccttttatttaggtctcttttacattcacgtttctttcacaggttggaaaaacaaaccttcacacaggaattgacaaatcaaaggaattgagaagctccttactggctggtatccatttttggcacttgtcacagaagtaggacagctgctcctccatccaagacacgtctccttcatcactgttgagggaatccccactctggtcgtgcgataagtccactgatgcctgatcctcggattcgacgatcaggagcgtctctccctccacttcaccttcctccagtccttctgaggtcgatgttctcgtggcttcgtcatcatgccgactgatcagactactcaggtggatgctactatccatcccttccttctcacaagctcggcagtgcttctcagtaacaaccctaagcactggacagtgaccctaatggggcttctaccaggatcacccagacagactcttccaaaaagtgtctgcccacactcctttattcagatataagggaccctgaaagcagtaacttatatgacccactgtcctttatttgatcaagtttaaaaggacagtgaccaaaaaaaaagatgaagatactactaagctactctccatcaacacacacacacaaactcgtgttgtctgtccaacagatatttcacattcaagtcatgatttttgagatccttttgccaataacatcttctctctttctgcttcaagttgctcagtcaaaataatctgttctcccaaaagacgaatgttttcttttttccgaatttgcctctcaatgtctctgataactccgtcacgaagcctctaaaaacgtaagaaacagatttcagtaacatcccgaacaggtggtccccatccttgtgccattcaaatccaaataacagtgttaccaaaatatacttaaaactttcagattccaaatacccagttactattttaattttctgtacaaatgtaaaatgtaataaacgatcaaataaatttggtagtgtgctaaatgttattactgaaatgatttcttatcatattttaagaaattcctgaacatttagtacagaaaatttaatgggaaataacagaaaaaaaaaactggcactatgttaaatttttttttatttattttttgagacaagagtctcgctctgtcgcccaggctggagtgcagtggctgcactccgcagctcaccgcaacctccacctcctgggttcaagtgattctccggcctcagcctcccgagtagctgagactacaggcgtgcatcaccatgcccagctaatttttgtatttttagtagagacggggtttcaccacgtcagccaagctggtctcgaactcctgatctcaagtaatccacctgcctcagcctcccaaagtgccggattacaggcgtgagccactgcacccggccaatgttaaatttttaaagtttaattgatatgtaatgctttaaaaacttggcgagttactacagtaacactctaaactactcttctgttagcacttatcctagctgaacaataaacaccaacagaaaaaatgcagattactaaaatctcaacttggcttctagcatgtaaagttaacaatgtaaaaatcatgcagaattattaattaattatataacagagaaagaagaaaaagaaggatgctactaccagcggaaaaaataaatgctcatcaatggtagttaccttagtaagcactaaaaaaccacagcacttcagaacgtggacctggcacccaagaagagacttttaaaaacatcagtcattactaataactaacattttatagtttattgctcacaaaatactctaaaggttttaggccaggcgtggtggctcactcctgtaatcccagcactcctgtaatcttaggccaaggcaggcagactgcttgagctcagaagttctagaccagcctgggcaacatggcaaaatcccatctctagcaaaaataaaaataaaaaaaaaaaaaaaaaaaaaaattgcagggagtggtggtgtgtgcctgtgttcccagctactccggaggctgaggtgataggatcacctcagcctgggaggcacaggctgcagtgagctaagattgtgccacttcactcccacctgggtgacagaacaagccccatctcaaaataaataaatagggttttttttgttttgttttattggttttttttttttttttttgagaaggagtctcgttctgtcacccaggctggagatcttggctccatggcacgatcttagctcactgcaatctccaccttctgagttaaagcgattcttgtgcctcagcctccccagtagctgagattacaggcgtgcgccaccaggcctggctaatttttttgtatttttagtagagacggggtttcaccacgttggccaggctggtctcgaactcctgacctcaaatgatctgcctgcctcagcctcccaaagtgctgggattacaggcatgagctaccgtgcctggccaataaatggtttttaatagtggctatatagagtagaattaatgggagtggggcccagggcctgcgtatgtttgtggggttttttccaaattattttacctatttttaaaaactcacctaatataatacctacttgctggacctcctccaggcctacagcttcattatgagggatttgaaggagtcccgggattgatataactcaactgaaacacaactgtcttgaaccatgcacccttggcaagatcaccactgagacaaaaacggaggtgcttattccactcccccaactgcaggtcttcctg

SEQ ID NO: 1561731 - DNA, 4001 bp, Homo sapiens
catgtgtagggcagaggctgacacatacgcacccctctgcagtgcatgactggcccgggacctgcatcaggaacgtaccttctgcagttctggctgttcatggaaggcacaggtgtccaagttgggctgggacttggtacatatggtgcggcccacctctacgtcgaagaagtaattcacccccccaacggtctgcacacaggagaaaacaggacagcgcccccatcagttcatgcactcacaggcacttcactgtggctgagtcactggacttgcttgggggcttcgtgagctgcccacatgtcaacacaaggcacacaagccccctcttcctgtcaactggcagggtgctgagcctcatacccgctcttaaacattgctttctctgtgctgggtaaaaggattcattgaattctgctgtctgtggctcaggggcgagggaacactgactcttttctaggaagtctgtctgatgacaaaatttcacctaacttctgaaaatcttattccctccatttaacatagatttattacttcactcagagtaggaaatgagatgcttcacacacacagatattttggatcaatggggccgcccggatgccaccatttcaagtgtgagattcaagatacatttctcaagtcagcagcacacctgcgtgtcttacagttgcagattagaattgaaccctttccctgcatagggcctttcccagacacaatgtggcagagctgtggagaaacctgggatgagggactctctggaaccaggaggaactgctgagatccctcgagtgtcagtttacccatgtctaaaataggcttctgggcctgatggtctgcaatgccctgtgcttcactccaagttactgtcatgcttgaaagggagatgcaggccagcggggaccacggcaccagggagtgtatctcgtatgcagggagagagccccagctgacagctgcaagaggagaaacggggctggtggggattcctttgaatttccaggagaaggtggaggagctctaaagactgtgtcactatttgctgctgtgccatgggatgcaggtcaagctgggcccagttgccctgctgaagctccctcccgacctgacccctcctctgctctgctgggtgaccactgtcctcatctggctgaggtctaactgcatcagctggtagaggcagggtcaggcatgctccaccccagcagggactcagcgccctgggctgtaggggtttgtcagccggcctgagggtgaaggccgctagccataaggggctgtgcccaggggcgtgacttggggaagcagggctctgcagaacagtgagccaggttcctgtgtggcccctgcagagaggactcagggaggagtatgaacctcatggcctggatctcatcctgagcagcatcaagcccacccagagtaagcacagtctccatccacacctgctggaccctgggaaatgccacagtcatggtacagacacagtggctgctgcaggttaaaggaagctgagtttgtgcacggccggggagcgtgcttaggcatgaagggcatcagcggagagccagggaaagctgaatgaatctgagcattagatcatgaatgtatcagtgttgatttgctgggaatgctcttgggggttggggaacaaaccaggctgggacccaggacccctggggtggagggagcacctacctgttgcctggctcttagtacccgcagcggacgtctgtagtagtcatctttggtggccttgttatactcgctgatggcgaagtgaagggcacgctgtacccactcatcattgaggtctgcgttatagatgccacccgggattatcctatcctcctccttggggctccaggccagggccacagctagggtggccagcaggagcagcagggtactcagatactgggccatggtctcctcagaggcagagcacaaagctggagctgcaggagaggagggtgagagcccgaggcagggagcccagaccagcaggcaggtgtgcatttatcctgctttggcagcccagccccacccacctccatgccccacccctgactcctcctcctctttcttcccatcccctctttctccatctctcttttcactcccccgctactacaagctccctccctgcctaagttccccctgcccctcccaggcctcctcctccatctccccctcctccccactccagtcctcactgcagcctccccgagccatgcctctcttccccagtgctcccaagcttgagtcacccaggtctccacagaggtgacactggtcctttgactgtgaaagctatgtgacttcctgtttgctcagaaaggggaaaaatacagggcttggcctcccagggtcttcagatatcaggggcatccaggagcacttggtcacagtctctgaatctctggaacagggagattatttcagaaagttccagaagaccctgtccataccctaatgtggagaatttctttgccaaatttaagggaattaacctttttggaaaaggtcactggattctcttttcataattcattattcaataagcaaacctatcaccagctactccccgtgccaggaggtctagggcttgaagacggaacctggatgatgagccatagaggtgacattgcagagctgctgcccaacagacatgtgacacgaactcacgagcaattgaaaatttctagtagatgcattttaaaagatgagaataaatgggtgaaagtaatgtttaaaatatttatttaaccttatatagccacaatgtgatttcagctaatgggaacaattattaatgagatcgtttatgttttttttttttttgttttttttttttttggttttgtaaatctttgaaattccctgtgtatttttaacacttagaccagaagtaattttggactggccccatttcaagtatcctgtggcacatgtggctggttctatggaactccatagtccattcctacacaatgtgtgtaggggatggtaggttacgatcaaaaattagggtcagggagttatgctcactcttttggaagtgaaatagaacaggggctagagagagaccactggaccctggtcagggtggtctctatgagactggagaggttgagaagccccaggcagtggggaacagccagtgcaaaggccctgaggtggggttgggacatgcctgctccagaaagtggaagctcctggagggggtatgaggagggaagggaacgacctggagtctcacagtaaatgtgggtggggcccggtggaaggtgcacggagacccctgtgaggcagtgggggtgtcaggaaagggagcagcagccacgggatgaatgtgggaacccacaggtctctcttgcttctgtcctaggcagccatgcttcaggctcctttcctctgttcactgcttggaagactcacctgatattttaaaaattgccttaaatgaggtagaatttgcatacaataaaatgcctaatagtatgtgctcaatctggggtgtttcataaatgcatacacttgtgttaccactttatccagacctgtgacatctgccttgccccagacagtatcttcctgcctttccagccaccctcgtgcccaccccaccttggcagtccccatccggccccatagactccttggtcgcctgtccttgagcttcccaggaatggagtcctgcagagcgagcccatgtgtgtctttgtcctttgcccagtgtggctttccggcggcccccgagttgcttcattgccaggattgtgagttctccttctccgcagactgagaggatttggtcagttgggtgtcctatgggctgacaaagcccccagctcgggatgctgtgggcctgggctggaatgtgactccaggagaggagagggtggaaggaggctctgaacagacagctgctccctttgttctctcaaccccaccctccatgcctgaaggtgaccctgtggcaaatgcccttatgg

SEQ ID NO: 1561732 - DNA, 4001 bp, Homo sapiens
tgctgattcttttttccctcttcatttttactcatttttttaaacttcacttcttcccttatttgtcctctcttggctccatttattcatccacccattcttccaaccatctatttatccctccattcatctacccatatgtccatccatccatttgtccatccatttatccttcagtccatcccccatccatccatttacccatctgtcgacccatcaacccattcatccatccttccattcatccctcatccatctccattcattcttccatttatccctccttccatccacccatccatctttacttcctgactttgcttcctctccctcagtgcatgcagccttgcttcatttcttcatccatctgtccattgcaccatctcccacagatgggccagtgccaggtgggatgaaggcctgttggagctggagctgccttcgggggtggtggcttcccagcagagcacacgcatgcaagtttgtgcccctcatccaccctcacccaccagtcaaatcatttctgaacttgtttcctcacctcctcctccccctggatgaacatggctggatgaaatgagagaggacaggagcccagcacttgcgcggccttgtcatgttgactctgaggtattcagtcagcgcacctgacaggtccctcccacaggctgcttaaatattaggaattgtctgcttccctcgccccagagtgtgcccctgcagctcggccacctcaactcctctctctggacatgttcagcctcctcacactccttccagcaacaaaggagcagcatctcggctgtctccacctttgctttccctctctgaggaaggaggtgttacccatgcattcttttcaagccagcttgagtaaattccaattaattcttcccaactcattctaaagccacagaaaaacctcactgaaaaggacttctgtctacgttaaagtgcttttacccaataccttgtgaagctccctttcctgggggacacagttcgtggtctctggcttttggcaggtggtccactgcatttccacattcaggtgatactccaggtggtcagtgacctgtgggcgccaggcgtgggggaggcacagcttgtccccttctcccctgtctgcggtttctgtgcctgggggctccgctaccccacgtccaagggcaaggagctggtcctaggcggattagcgggctcctctctcctctatttgactcatgattgtttttgtcattccaagagaattaaccagaaaccatcagaaacatgaactttccccctgggcaaatctatcccttgggtaatgcaagtgacgctagtgattctggataggggtctgtaaactttttccgtaaagggctacatagtaaacatcttacgttttattggccatgtggtctctgtaactactcagttcggcatgagtgtggcagcagcaagcagtggcagacaaagcacaggcatgctcatggctaggtcacaagaacacgacttacaaaagtgggcggcaggcagttttggcccttgggatgtaatgtgctgaggatccctggtcctgggttttgtttaagtgccttaatttcatcaccctagtgaatttatgcttctcttaaagtgctcacatcaagctaagcaaggttgaatttcccttgagtgggactattcctgacaccagtggccacccgatgtgggcgtatcaggcctggggagaggcgggaagtcatacactcacctgcctctggactttaaggactcggaagatcctgaagtggtacttgtcatcactttccttgttatactggtcggtgatccactgcaagctgtccttcgcatagttttctactgccatcacttcatggacgcttagaaaggttttcttccttgcttggtaggggagggccatcagagtcaatagaatggccaacaggagctgtagggcctgccagggctcagccatcatccttcagctgcagaggaacaggaagagtgttctctgtactcctcagggacaagtcgaatcacactgaccctacctgccctggcaggatttaagagcagctggtggtggacacccacagctctcctctcctcctcctcccccttcatcagcagctgaactcgaggggagagcagcaagagactgtgcaatggtttttgcataagttcatgccacacacacacaggataacacacacattttctcttttgaggggctgctccctcagcaacacacaggcttctgtggacccagcattgtcttggtgggagccaggcgagggcccctgggagtcctggaggatggtagctgctggagacacggggagattggatgccaggactggcgcattcataggtgagcagtggggggtgggcactgtggggaggggccgcctgcaccggaagccactctcccccagcctggttcctggagacgagttctggaaaatcccctcccttagaggacaaaggagcagaggcaccctacagaaaggtgtgaagggagggagagtcaactctgacaccgacgattccccagtaccgacaagtcctagagtggcctccgctggacttgcatgttttggaggaggaggcagtggcgaggaagcttcaggtgtgagacacagggagctttctggttggacattctggtctcctaaaggtcccatcctggggacctgatgggagtccccagacttggctgccagttagagaaggaagaagccactggtgggtggaggctggagcttgtgtcccacggcacacagaatgcaggcttagtgcggttatgttcgattcctagaaggcctgttatggtgtcttttgggaagatgcgatataaaaatgtgcagtgatggctcctgtgtgggaacccggggaggagccctgggcacacccaacgcctgtttcgaggcttcctcatgtgcctccaggggatgccaggaaccaggaagccagggcctctttcctgacacccctgctcagccttccctcacagacacacttgctgcatagccacattcacacccgaacacacggacacacaacacatacacatacctacacacacagtcacactcacactgaaacacagacacacaacacacagagacacatacctatccacactcacactgaaatatacagacacacacacctacatgtatacatccacattcacagtgaaaaacacagatgcacaacacacacacataccgccacacatgcacacatacacactgaaacacacacacaacacacagagacacacgcacctacatgtacacaaccacactcacactgaaacacacatactacacacacatctacacatacacaatgacactcacactgaaacatatagacacacaacacacacctacacgtacatgcccacactcacattgaaacacacagacacacaacacacagatacacacacctacattacacacccacactcacactgaaacacacagacacacaacatacacacacacctacatgtacacacccacactcacactgaaacacacacacaacacacatagacacacccccccacgcatacatacccacactcacgctaaaacacacagacacagtacacacacagacatacatacctgcacacacacacactcccaaaactcatggacctcagggttcactccttggagtacagtggagcgcacatcctccatgccctcttgatggagggtttggcatcaccacagagcgaacactgtggaagggctctgtctccacctcctgtctgtgcttccaggacggcctcaatttgtctggtggcacaaaggcaaagcagaaaaaggtgagaagctgggcatcagttgggcctagtgtgaggtctgcttggcctctgccctgagctccctgagcggctgtaagtgggatatcaatgctcttttcattgggttactcttacattataattaagagcctatgggcagagactgctcattttattttcctcagta

SEQ ID NO: 1561733 - DNA, 4001 bp, Homo sapiens
ctgtggctgcatgcaggtacctgaggctgggattagacagagccccttctccctgcccagcacacagccccacagctgcttcttcctgtccaacaggcaacaccccaaagcaggcagagttgatctcccagtaaccattcccaagctgaaggcttcctagcaaatcaaacacatcaccctcctccctcaccaccccatctgcacacacataggcaactacgtaaactcacttggacccctcaaccccatggatctatgtacaaacccccagaatccccacacacaggcacacatgctcccatacagctccctgcacacactggcacatgtgtgtacacacatgcacctttccacatgcacatctacatgcacaaccctccacaagtacatgaacatgtatacatccatgcatacatgactccccacatacccacctgcacacacacaccctccaaacatgtgtagggcagagactgacacatacgcacccctctgcagtgcatgactggcctgggacccgcatcaggaacgtaccttctgcagttctggctgttcatggaaggcacaggtgtccaagttgggctgggacttggtacatatggttcggcccacctctatgtcgaagaagtaattcaccccgcccacgatctacacacatgagaaaacaggatgcacggacagcgcccccatcagttcatgcactcacaggcacttcactgtggctgagtcactggacttgcttgggggcttcgtgagctgcccacatgtcaacacaaggcacacaagccccctcttcctgtcagctggcagggtgctgggcctcatgccccctcttaaatattgttttctctgtgctgggtaaaaggattcattgaattctgccacctgtggctcaggggcaagggaacactgactctttttacccatgggtgtcagtttacccatgtataaaataggcgtccgggcctgatggtctgcaatgccctgtgcttcactccaagttattgtcatgcttgaaagggaggtggaggcaagcggggaccatggcaccagggagtgcacctcccgtgcagggtgagggtcccagttgacagctgcaggaggagaaatggggctggtctggattcctttgaatttccaagagaaggtggaggagctctaaagcctgtgtcactatttgctgctctgccatgggatgcaggtaaagctgggcccaatagcccttctgaagctctctcttgacctgacacctcctcctctctactgggtaactgctgtcctcatctggctgaggtctaactctgcatcaactcatagaggcagggtcaggcgtgctccaccccagcagggactcagctgccctgggctgtagggggtggtcagccggcctgagggtgaaggccattagccctaaagggctgtacccacgggtgtgacttggggagtgaagtagggctctgcagaacaggaagcgaagttcctgtgtggcccctgaggagaggactcagggaggagggtgagcctcatggcctggatctcatcctgagcagcatcaagcccatccagagtcagcatagtctccatcccccgggagcatgcttaggcatgaaggccataagcagagagtcagggaaagctgaatgaatctgagcattagatcatgaatgtatcagtgttgatgtgctgcgaatgctcttatggatcgggcaacaaacaaggctgggactcaggacccctcaggtggaggcagcacccacctgctccctggctcgtagcacccgcagcaggcgtctgtagtactcatcttcagtggccttgttatactcgctgatgacaaagtgaagggcacgctgtacccgctcatcattgaggtctgcatcatagatgccaccctcgattatcctgtcctcctcctgggggctccaggccagggccacagcctgggtggccagcaggagcagcagggtgcacaggggccaggccatggtctcctcggaggcagagcacagagctggagctgcaggagaggaggttgagagcctgaggcggggatcccagaccagcaggcagctgtgcatttatcctgctttggcagctcagccccacccccctccatgacctgcccctgactcctcctcctctttctgctcattccctctttctccatctctcttttcactcctcagaaaccacaagatccctccctgcctaagttctccctgcccctcccaggcctcctcctctatctacccctcctccccactcctgtcctcactgcagcctccccgagccatgcctctcttccccagtgctcccaagcttgagtcaccaggtctccacagagatgacacttctcctttggctatgaaaacaatgtgacctcctgtttgctcagaaaagtgaaaaatacagggcttggcctccggggtcttcagatatcagaggcatccaggagcacttggtcacggtctctgaatctctggaacagggaggttatttcagaaggttccagaagaccctgtccacaccctattatggagaatttctttgccaaattcaagggaattaaccttttttgaaaaggtcactgggttctcttttcataactcattattcaataaaaaaacttatcaccagctactccccgtgccaggaggtctagggcttgaatactgaacctggatgatgagccatagaggtgacattgcagagctgctgcccacagagatgtgacatgaacccacgagcatatgaaaatgtgtagtagatgcattttaaaagatgagaaaaaatgggtgaaagtaatgtttaaaatatttatctaacctaatacagccacaatattatttcagctaataggaactattattaatgagattttttttttgttggaggggttttgtaaatctttgaaattcgctgtgtattttttacacttagcctgggagtcattttggactggccccatttcaagtgtcccgtggcacatgtggcaggtggctatgaaactgtacagtccgttcctacacagtgtgtgtaggggatgataggttatggtcaacaattaggatcagggagttatactcactctgttggaagtgaaatagaacaggggctagagagagaccactggaccctggtcagggtggtctctatgagactggagaggttgagaagccccaggcattggggaacagccagtgcaaaggccctgaggtgggattgggacatgcctgctccaggaagaggaagctcctggaggggatgtgagcagggaagggaatgacctggtgtctcatggtaactgtgggtggggcccacaaggtgcagggagacacctggcaggcagtgggggtgtcagaagagggagcagaagccaagggatgaatgtgggagcccacaggcctcacttgcttctctcctaggcagccatgcttccagcttctttcctctatgcactgcttggaagacccacctgatattttaaaaattgccttgaaggaggtagaatttacatacagtaagatgcctaatagtatgtgcccacctggaagattttgtaaatacatacacctgtattaccactttgtccagacctctgacatctgccttgccccagacggtgtcctcctgcctctgcagctcatcctcgtgcccaccccaccctggcagcccctgtccagtcctgtagactcctttgtcacctgcccttgagattcccaggaatggaatcctgcagagcaatcccagatgtgtcttcgtcctttgctcagcgtggctttccagtggcccccaagttgcttcattgccaggattgggagttctccttctccacagactgagaggacctaatcaccacagtgctctgtggggtgacaaagtctccagcttgggatgctgtgggcctgtgctggaatgtggctccaggattggggaggatggaaggaggccctgaacagacagctgctccctttgttctctcaacccaaccctccatgcct

SEQ ID NO: 1561734 - DNA, 4001 bp, Homo sapiens
gcacaagcaaggcctgtgatccctctggtgtcagtctgctcctctgtaaaataggctccagggcccaacgatctacaatgccccatgcttcactcccagtgagagagaggtgcaggccagcggggaccctacaccagggaatggccctcctgtgcagggagagggccccagctgacggctgcgggagaaacgcggctggtctggactcctctgaatttccaagagaaggtggaggagctctaaagtctgtgtcactgttcgctgctctgccatgggatgcaggtcaagctgggcctggtagccctactgaagctccctcccgatccgaccccctactccggtctgctgggtgtcttcatctggctgaggtctaactctgcatcagctgatagaggcagggtcaggcatgctccaccccagcagggactcagctgccctgggatgtagggggtggtcagccggcctgagggtgaaggccgctagtcctaggggactgtgcccaggggtgtgacttggggagggaagcagggctctgcaggacaaggtgccaggctcacgtgtggcccctgcggagagtattctgggaggaggatgagccgcatggcctagatctcatcttgagcagcatcaagcccacccagagtcagcatagtctccatccacacctgctagaccctgggaaatggcacggtcgtggcacagacccagctgctgctgcaggttaaaagaggccgaggggacaggacagggctgaactcatgcactcatggcccaggagcgtcctagggcacgaaggccgtcaacagacagggaaagctgaatgagtctgagcattagatcatgaatgtgtcagtgctgattttcaaaatggaatagtgattatgtgcgatattgcccttgtttttaggaaaaacacactgaagtgtttactttcaaaagattcaggcaaaaaatgcatatacagtacatatacacacacccatattcacattcggaaagtgagctggggggaacaaacagggcaaaatgttaacatctgtgctaacatctgagggatctgggtgaaagatctacagggatgccctgtgctattttgcagctgctctgtaagtctgaaattacgggagaataaaaagttaaaagaaacaaaagtgcttaaaaattatttggtggaagaacaaggaggcagccagatgaggggctctgtttttccttctcctgcgtattcagcagcgcacccggagcccagcgtcccaggaggtcgggacagagctgtgtgggacgtcctgtgcctgcccccgcgctgcggcgcagctcgagctggctcctggaagctgatcttaggcgccgggcgcggacctgacgtgtccgtgcggttccaggccaggccagactcagggcattcccggacacgcccgccaagggctcgggggtgacagcgaagaccgggaacagggtccgggtgagaagcccaggcgccggagaggagcagcacggggtccgggagcagcgcggggggaggctgggacggcggggccggggcttcggaccctgcggggggcggcacgcacctgcttgcgggcgcgcaccacctgcagcgcgcggctgtggtacatgtcgttgctggctttgttgtactcgccgacggcaaagtccagtgcacgccgcacaccctcctcctccacgctggcgtccatggggcctcccactaggcgcggcggcttgccgggactggagccggccgcggggctcacggccagggccacggccaggatggccagcaggagcagcggggcgcgcaggggcccggccatggtcggctaggacgcgggacgcggggagtggggcgcaggcgagaggctggagctagatagagaggacccgctgcgataccgaggcgaggccgtgagccccgcgaggccggcgactgcggttttatcccttccggccttcgccgccccaccccaccgcggcctgcactcccttttccggaacgcctcgtccctcccacctcccttctccctccccgcctcccctgcctctccccgcctcccctgcctctccccgcctccaggtccctccctatcagtctcctcccatcccagcctcccctgcccctccaggcttccctgtccttccccatccatccccttccctcccctcccagcccctcccggcctctcctctcccttcccgcctcccctctccctcccctcctcccctggccccccagtctccctggccttccctatccattcccatccatcccctcccctcccctccccctcctctcctactgtcttccagcctcccctgcctctcctatcctccccattcctccccatccatccgaccattcccacctccccacttcgggcccctccatgccgccactcttcaggctccttctcctctgtccctttcccctttcaacccccagacaccgcctcccatgcccctcatctccctcctccactcctgtccttgctcccacttcgcccccaccccagctcggcccctcttcatcgcccctccctcgtcccgcccctcctctgtcttcccttcctacccattcctggcctctccctgtccctgtccctcctatcctcttctttcccctcttctcaccccactcctggcccctcttcccccaccccttccacacctatgccccccttctacccactccaccccctcagctccatctcttcccaaagacctgtccctcctcccaagcttaggtcaccctgccctccagagaggtgtcaaggccccctgggccctaaaagcatacgaccccctagcttcatttcctcagaaaagggaaagatagaggtctcggccttccggagtcttcagaggtcctgagtatccgtgagcatttggtcaaggtctagaaatcactaaggcagaggtgtgattccagaggccacaggagactcaggccatgccctgtgctagggaacttttcaaacagaagaattaacctttatttgagtaaaaaactctgggttctcctttcacaactcattattcagtaaacagacttttcaccagcttccccctgcaccaggtagtctaggagctagagacggagcctgggtgaccgagccatggacactacattgcagggctgctgccagacagaaatgtgacacgaacccaggagcaatttaaaactttctgggagacacatttcaaaaagtaaaaaagaaacaggtgaaggtaatgtttataatatttcttacttaacctaatatatccaaaatattatttcaacacataagaagaatcattaataacataggttattttattttgggtgtgtgtactgagtctttgaaattccctgtgtatgtgggtgtcaattgtactggccccatttcaagcaccctgtggccacatgtggctggtggctgtggcactgcacagcccagcattagggtgtgtgggaggatggcgaatagtgatcaataattaatatcaggaaattagtctctctgttggaagtgagagtatgggatagagagagatgatgccactggacctggtcagggaggactctatgagactggaaaggtgagaagccctgcctagacaggaaacagccccaggcagcgggaagggccagtgcaaaggccctgaggcggggctgggcatgcctgctccaggaagaggaagctcctggagggagtgtgagcagggaagggaacgatctggagtctcatggtaactgtgggtggggccgggtggaaggtgcagtgagacccattggcaggcagtgggggtgtcaggagagggagcagcagccacaggatgaatgtgggagcccacgggtgtctcttgctcctcccctctgggcgtcatgctgctggcgctggtcctctgcactgcttggaaaactcacctgagtttagaacatcactgtgagtgaggtagaatttatagacaacaaaatgtctaatctgggggatttcattaacgcatatacccgtgttacc

SEQ ID NO: 1561735 - DNA, 4001 bp, Homo sapiens
gctgacacatacgcacccctctgcagtgcatgactggcccgggacccgcatcaggaacgtaccttctgcagttctggctgttcatggaaggcacaggtgtccaagttgggctgggacttggtacatatggtgcggcccacctctacgtcgaagaagtaattcacccccccaaaggtctgcacacaggagaaaacaggaagcacggacagcgcccccatcagttcatgcactcacaggcacttcactgtggctgagtcactggacttgcttgggggcttcgtgagctgcccacatgtcaacacaaggcacacaagccccctcttcctgtcagctggcagggtgctgagcctcatgcccgctcttaaacatcgttttctctgtgctgggtaagaggattcattgaattctgctacctgtggctcaggggtgagggaacactgactcttttctaggaaggctgtctgatgacaaaatttcagctaactcacgaaaatcttattccctccatttaacctagatttattacttcacttagagtaggaaatgagatgcttcacacacacagatattttgggtcaatggggccgcccagatgccaccatttcaagtgtgaggttcaagatacgtttctcaagtcagcagcacacctgagtgtcttacaattgcagattataattgaaccctttccctgcacagggcctctcccagacactacgtggcagagctgtggagaaacctgggatgagggactctttggaaccaggaggaactgctgagatccctcgagtatcagtttacccatgtataaaataggcttccaggtctgatggtctgcaatgccctgtgcttcactccaagttactgtcatgcttaagagggagatgcaggccagcggggaccatggcaccagggagtgcacctcctgtgcagggtgagggctccagctgacagctgtaggaggagaaacgggactggtctggattcctttgaatttctagaaggtggaggagctctaaaggctgtgtcactatttgctgctctgccatgggatgcaggtcaagctgggcccagttgccctgctgaagctcactctggacctaacccctcctctgctctgctgggtgactgctgtcctcatctggctgaggtctaactctgcatcagctcgtagaggcagggccaggcgtgctccaccccagcagggactcagccatcctggcctgcaggggtgggtcagcctgcctgagggtgaaggccactagccctaaggggctgtgcccaagggcatgacttggggaaggaagaagggctctgcagaacagggagccaggttcccatgtggcccctgaggagaggactcagggaggagaatgagcctcaccgcctggatctcatcctgagcagcatcaagcccacccagagtcagcacagtctccatccacacctgctggacgctgggaaatgccacggtcatggtacagacacagcagctgctgcaggttaaaggaagctgcagcacttcctttaactgtctgcagtgcatggaccgggagcatgcttaggcatgaagggcatcagcggagagtcagagaaagctgaatgaatctgagcattagatcatgaatgtgtcagtgttgatttgcttggaatgctcttgggggtccggcaacaaaccaggctagggctcaggacccctcgggtggaggcagcacccacctgctccctggctcgcagcacctgcagcgggcgtctgtagtactcatcttcggtggccttgttgtactcgctgatggcgaagtgaagggcacgctgtacccactcatcattgaggtctgcatcatagatgccacctgggattatcctattctcctccttggagctcgaggccagagccccagccagggtagccatcaggagtagcagggtacacagaggccgggccatggtctcctcagaggcagagcacaaagctggagctgcaggagaggagggtgagagcccgaggcagggagcccagaccagcaggcaggtgtgcatttatcctgctttggcagcccagccccacccacctccatgccctgcccctgactcctcctcctctttctgcccatcccctctttctccatctctcttttcactcccccaccactacaagctccctccctgcctaagttccccctgcccctcccaggcctcctcctccatctccccctcctccccactccagtcctcactgcagcctccctgagccatgcctctcttccccagtgctcccaagcttgagtcacccaggtctccacagaggtgacactggtcctttgactgtgaaagcaatgtgacttcctgtttgctcagaaaggggaaaaatacagggcttggcctcccggggtcttcagatatcagaggcttccaggagcacttggtcacggtctctgaatctctggaacagagaggttatttcagaaggttccagaagaccctgtccacaccctaatatggagaatttctttgccaaatttaagggaattaacctttttggaaaaggtcactggcttctgttttcataactcattattcaataaacaaacctatcaccagttactgcccatgccaggaggtctagggcttgaagacggaacctggatgatgagccatagaggtgacattgcagagctgctgcccacagagatgtgacatgaacccacaagcatttgaaaatttctagtagatgcattttaaaagatgagaataaatgggtgaaagtaatgtttaaaatatttatttaacctaatatagccacaatattatttcagctaacgggaacaattattaatgagatcgtttatgtgtgttttttttttttggttttgtaaatctttgaaattccctgtgtattttttacacttagcccaggaatcattttggactggccccatttcaagtgtcctgtggcacatgtggctggtggctgtggaactgcacagtaaattcctacacagtgtgtgtagaggatggtaggttacgatcaacaattaggatcagggagttatactcactctgttggaagtgaaatagaacaggggctagagagagaccactggaccctggtcagggtggtctctatgagactggagaggttgagcagccccaggcagcggggaacagccagtgcaaaggccctgaggtggggttgggacatgcctgctccaggaagaggaagctcctggaggggatgtgagcaagggaggaaaccacctggagtctcacggtaactgtgggtgaggaccggtggaaggtgcacggagacccctgtgaggcagtgggggtgtcaggagagggagcagcagccacgggatgaatgtgggaacccacaggcctctcttgcttctctcctaggcagccatgcttcaggctcctttcctctgtgcactccttggaagactcacgtggcattttaaaaattgccttaaatgaggtagaatttacatacaataaaatgcctaatagtatgtgcccaatctgggggatttcataaatgcatacacttgtgttaccactttgtccagacctgtgacatctgccttgccccagacggtatcctcctgcctctccagccaccctcgtgcccgccccaccctggcagcccccatccggccctgtagacacctttgtcgcctgtccttgagcttcccaggaatggagtcctgcagagcgagccctgatgtgtcttcatcctttgctcagtgtggctttccagcggcacctgagttgcttcattgccaagactgtgagttctccttctccacagactgagaggatgtggtcagttgggtgtcctgtgggctgacaaagcccccagcttgggatgctgtgggcctgggctggaatgtgtctccaggagtggggagggtggaaggaggctctgaacagacagctgctctcgttgttctctcaaccccaccctccatgcctgaaggtgaccctgtggcaaatgcccttat

SEQ ID NO: 1561736 - DNA, 4001 bp, Homo sapiens
gcacacaagccaccttctcctgctggctggcagtggtagtgtgtcccagtccttcctagtaacttgttttctctgggtatctcaagcaagctgtctcatgcagcccagtagaaagagaagcaggggcagggcagatggaagccagggcctaaaacccccttcactggattcaggaacagaaggcacagctctggggaaccagccagggtgggacaaagaaacagtcctggcaccaggcttgcagggcagggtctaagcaccaagtgaatgctctttcccacagcaaaggattaactgaattctgctacctgtgctcagggggcagggacactggtcccatcctaggaaggctgccacctgatgatgaaatttcagctaacttccagctcctggcattcagtccacagagcatctcattcctgccatttaacccagaggtatttttcctcatttctcagtaggagatgagatgctcacatacattgatgttttaggccaataaacattgcctcctgcatgcctccattccaggtgtgattttcaaggcaatatttctaaagtgagtcacacacctgcatgtcttagggttgcaacttcagaagagaactgaatgctttccctgcacagtgccgccccaaaacatgacttgtcagaactgtggagaagcatgggatgagggaccctgggaccagggtgctagaccttgccctgtggaaccacacacaagtcctgtagaaccacatggaagtcctgtgatccctccggtgtcagtctgctgctctgtaaaataggctccagggcccaacgatctacatcattctgtgcttcactcccagtgagtgacacacttaagagggagtgcaggccagcagggaccacagcaccagggaatgcccctcctgtgcagggagagggctgcaggaggagaaacagggctggtctggactcctctgactttccaagagaaggtggaggagctctaaaggctggcaggccatatagccctgtggtcgctgtgtcactgctgctctgccatgggacgtaggtcaagctgggctcggtagccctgctgaagcttcctccctctggacccaaccacctccttcactctgctgggtgattgctgtcctcattttgctgaggtctaactctgcgttagctggcagaggcagggtcaggcatgctctaccccagcaggaactcagctgtcctgggctgtagggggtggtcagccagcctgagagtgaaggccactagccataacgggctgtgcccaggggcgtgacttgggagggaagcggggctatccaggacaaggagtcaggttcccgtgtggcccctgtggagaggactcagggaggaagatgaacctcgtggcctggatctcatcctgagcagcatcaagcccacccagagtcagcacagtctccatccacacctgctggaccctgggaaatgccacagtcatggtacagacacagtggctgctgcaggttaaaagaggccgaggggacaggacagggctgaactcatgcactcacggccaaggagtgtcctagggcatgaagaccatcagcagacagtcagagaaagctgaatgagtctgcggtttagataatgttgatttgctgggagtgctctggggggtgaggcaaaaaacccagctgggactcaggacccccagggtggtggtagcacgcacctgctggtaggcagccatcacctgcagagggcggctgtagtactcatccttattaatgaccttgttgtactcgctgatggcaaagtccagggcacactgcacactcttgtcattgaggtctgtggcatggatgccacctgccaaggtcctagattgggccgaggcactcccggccacggccaccatcaaggcagtcagcagcagcagtggggtgtgcatgggccacatcatgttctactgggacacagagcaaggagctggatctcccagagagcaaagcagcagaaggctgaggcaggaagcccaggccagaagctagctgtgcatttatcctacttgggtgtcccccaaccccacctgctccctggccccgcccctggctcctcctcctctttctacccctcctcttctgtctctatctccctttccacccccaaccacctccctccctccctaagttcccttcgctcctcccatgcctcctcctcatcctcctccccactcctgtcctgaccgcaacctccccacagccctgcccctcttcctcagtgctctaaagcttggctcactctggattccagagaggtgacaccgctccctgggctgtgaaacctggtgaccacctatgtccacaggaaagggagaaatacagggcttggccttctaaagtcttcagatgtcaggggcatccaggagcacgtggtcatggtctgggaattcctggggcagggagctgtttcagaagctccgggatgaccttgtccatgccctcttctggggaacttctttgccaaacataaagtaattaacctttgggtaaagttcactgggttctcgtttcataactcctcattattcaataaacaaacctgtcaccagcttccccctgcaccaagcagtctgggcaatagagccgtagacatgaacttgcagagctgccatccaacagagatgtgacagaaacccaggagcaatttaaaacacatttgaaaaagttaaaagatacagctgaaagtaattttggtatttctactttaacctaatatatccaaaatacttcaacacttcaggactattcttaaggagctagtttacattcttttgtgtgagtgtaatgtcttgaagttccctgtgtattttttacagttagaccaagcgtcactgtggactagccccatttcaagtgccctgtggccacgagtggctgctggtggctgtggtactgcatagcccagccattagggtgtgtgggaggatgcagagtggtgatcaacaatttagatcagggaattatagtcgctcagttagagagagggtgggtgctactggaccctggtcagggaagtctctaagagaccggaaaggttgagaagccccaggcagcagggaatagtcagtgcaaaggccctgaggcaaggctgggcatgcctgctccaggaagaggaagctcctggagggggtgtgagcagggaagggaacgacctggagtctcacggtaactgtgggtgtgtccaggtggaaggcgcagggagacccctggcaggtggtgggggtgtcaggagaaggagcagcagccacaggatgaatgtgggagcccaagagcctctcttgctcctcccctctgggagacgtgctgccagcactggtcctctgtacactgcttggaaaactcatgtaatattttaaaaattacattgaatgaggtagaatttacacacaataaaatgcctaattgtatgtgcccaatctgggggatttcataaatgcatacacttgtgttaccactttgtccacacctgtgatatctgcctcaccccagatggtttcctcctgcctctgaagcccaccctcatgcccacccgaccctggcagcccacatctggtcctgtggactcctttgttgcctgtccttgagcttcccaggaatggaatcctgcagagagagcccaggtgtgtcttcgtcctttgctcagcgtggcttcattgccaggattgagagttctccttctccacagactgagaggatgtggtcagttgggtgccctgtgggctgacaaagcccccagctcgggatgctgtgggcctggactggaatgtgacttcaggagtagggagggtggaaggaggctctgaacagacagctgctccctttgttctctcaaccccccctccatgcctgaaggtgatcctgcggcaaatgcccttatggcgaggtggcaggcttggccagaaacaccaggaaaccctgggccttagcaggacacccagaggactctcctgggagtggtggaggtgaggg

SEQ ID NO: 1561737 - DNA, 4001 bp, Homo sapiens
gactgaggctgagggcccgctctgtgtgtgtgaacgtgggctctggagcttctctctggggtttggtggctgacagcaggtctgctgagaatggagggaaaggcttggtgcagcattacataccagcgaggggccgggaacaccacccaggaaaatgacgttgccagctgcccagcacatcggctcccacgccaccctgttatagtccctagcctgctccgtgagatgagcagagctctgaaacccctcagcagtcagtaggtttaattagatcccaggacacgctaggacagctggctccatgtcccctccaggagagccttttctgaggtgtgagaacgagccacttctctggagtgaacttgcctctcttccctgcttcccccttggaccttggagacacgaaggggcagggcacagaatggcagcaggcaggcagcactgcatcaggacagggccaggaggagaggcccctgtgaggctgggaagcaggtggagggctccttgcgtgagctaagaaggctcccaagctgggaggcagggccgggtatgctgtccccagccttctgccagccatgggtcagctccatgttcgctgagcactacccagagctggtggcggtggcatgttcccatcagtgagagcagaagctgcccccggcccctcctccagcctgccgtgtccccttggctgctcagtcgcagcgtccgccctaggccaggcctgggagctcgacacagtgtcccccagcatcactgagtcctcagtatcctgactcaccaggaggaggtgagaaccctccaagaaccccttgggtgctctggagccatcctcttgtcagtggtcctgctgcacagcccccacctgggcccctttggccaggctccagcccccttctgtccctgtctgctgggtgggggtcatatgacttgagcgggtcacctcagccctctggtgccagcttcctggttggttaaatgaggtgggggcctcccaagtccccatcagtatcctggtctgattcctgtgccagggaggccatggcccagttccctttgggggagagcaggttgtccctggctgtgtgacttgggcaaatcacctagcctggctgtgtctcagtttcccagtgcacaggcagtggctctttcctccctgtcccccctccccctgagtgctgaccctcagggagtggatttcaggaagggtgaaagagtctgatcgttagggtccctggagccaagtcacaggacaacagccagcaggaaggaatgacaagccatcagatagaagcggctaaccacaggcatgtggctgccctgtcgcctccgtcccgcagaggagctgcgggagacctgccttacttagacctttctcagacctctgtgaagagccagagaatagaagatgcttcccttgcccctagccttctggggcagcccccaaacccttcatccctgtagcctgctacccccaaaggtagctgcagccagatggagccccttgcccctctcaccactcccagcacctctcaccaccgcatggtcctgtgggggctccaagctaggaaagtgccctggggaagacccaaggcaccagtggccaatctcagggagagacccccggggagcggacaggggagaacgccacttacctggggaagggcccccagtggtgctcaagaccaggcagcagaaggccagcagagttccagccgctcgcatggctgcccgggtagggacagtgcggggcagttgggggtggccgtgcagtgccttctcaggcagcatggggcagttggaggcagtggttggtgcccgtgccgagccttcttgggtagatggcgcagggcaggtgggggcagtggtctgtgcccgtgccaatccttctcaggcagcacgggccagtgccgggcaatggtttgtgcctgtgctgagccttcttgggcagcatggaacagtgggctgtcccagcccaggggcaggtgccagggccacagcatggaaccccaccctgcaaaccactgtgggatggggcaggggcggggctagggggctgcctgcgtggtgctggggaggggagtgttttgctgctgaatcattttggccagaagctcttcaccttcagatctatcagccacaaagcaaccgcttcctttataaaagtttccgagcagccgtcatttgctgggggaggaggaagagacatgagacccatgagcaaatcctgatgcaatgttctacccctgagccacacacgaaagagatgttgcatgaaaaacattagcaggaattttcaaaagcaaaatcacttgattttcctttttcttttaattacttaagttctggggtacatgtgcagaacatgcaggtttgttacataggtatacacgtgccatggtggtttgctgcacccatcaacccatcatctacattaggtatttctccaaatgctatccctcccctggccccggatccccagatagtccttggtgtgtgatgttcccctccctgtgtccatgtgttctcattgttcaactcccacctatgaatgagaacatgcggtgtttggttttctgttcttgtgttagtttgctgagaatgatggtttccagcttcatccatgtccctgcaaaggacatgaactcatcttttttatggctgcatagtattccatggtgtatatgtgccacattttctttatccagtctaccattgatgggcatttgggttggttccaagtctttgctattgtgactagtgctgcagtaaacatacgtgtgcatgtgtctttatagtagaatgatttttgagtatatacccagtaatgaaattgctgggtcaaatggtatttctggttctagatccttgaggaatcaccacactgtcttccacaatggttgaactaatttacactcccaccaacagtgtaaaagcgttcctatttctccacatcctctccagcatctgttgcttcctgactttttaacgatcaccattctaactggcatgagatggtacctcattgtggttttgatttgcatttctctaatgaccagtgatgatgagcgttttttcatatgtttcttggctgcataaatgtcttctttttagtgtctgttcatatccttcacccaatttttgatggggttgtttttttcttgtcaattgtttaagttccttgtagattctcgacattagctctttgtcaaatggatatattgcaaaaattttctcccattctgtaggttgcctgttcactctgatgacagtttcttttgctgtgtggaagttcattagtttaattaggtcccatttatcaattttggcttttgttgctattccttttggtgttttagtcatgaagtctttgcccatgcctatgtcctgaatggtactgcctaggttttcttctagggtttttatggttttaggtcttaagtccttaatccatgttgagttaatttttgtataaggtgtaaggaaggggtccagtttcagttttctgcaaatggctagccagttttcccaacaccatttattaaatagggaatcctttccccattggttgttttagtcaggtttgtcaaagatcaggtggttgttgatgtgtggtgttatttctgggcttctgttctgttccattggtctatatatctgttttggtaccagtaccatgctgttttggttactgtaggcttgtagtatggtttgaagtcagatagcatgatgcctccagctttgttctttttgcttaggattgtcttggctatgcaggctcttttttggttccctatgaactttaaagtagttttttccaattctgtgaagaaagtcaatgatagcttgatgggggatatcactgaatctataaattactttgggcagtatggccattttcacaacattgattcttcctatccatgagcatggaatgtttttccatttatttgtatcctctcttatttccttgaacagtggtttgtagttctccttgaaga

SEQ ID NO: 1561738 - DNA, 4001 bp, Homo sapiens
gccgtcacagatgagtggttcatcacctacccttttcagcttggagttttcttgaatggcgcagatttcattagtgcttaaaggctttctgcaatcgctgcgggcaatttctacatcaataaggtattccagaagatttgtgacctgttggttagcaattatgcaattttattcaaaagagttgtacttttttaaagttttgacaaaaaaaaaaaattactcttactctcgtcctttcctctttccttcctccctcacccccagacagagctttagcggaaggctaagatgcccactgcctggagccctgtgtacaacaagatcagtcaggactccataggctcctggagctggacacttgagtaaagactcctctccagtttgtcacctccttgaaagcaaggccttctcattccatttcctgtccccaagcccagggcatgctgcatgctcagtgaggactgagaggtgaaaggtgggctcttcagaaccatcagctctcctgggcctgagatgctcaggttcacacaggcctgaccaggggacagccccctcagccacattaggccccagtccctcagattcctgtgaaacctcccatcctctggggtttccccacccaaagcccctcccaccagctcagcacacagtccatgaggacccatgcaggcatgagtttgcctgtcttgttctctgctgagtctttagtgagtagaacagcagtaggtttatagcaggacattagtatttgttgaactcattagtgactgaatgcaatcaaggctacttgtgatgtccatttaaatctgttttcatctggcattaaaggattacagcaggagatgaaggagtgtctgctagttgggtccaggttcacctggactcacctttatcagatcttttctcatggctagcattctatctgtctcccaaccttagcaaatacatgaacatttgatttgcagtttggggtttaaatgagttaatctatgcgaaggacttagaacaaaagcgcaagcgtttgtagaaagtgctctgtgtgttcactgccttattgatgctgtggaagtgtctaggctcttaagcattcacatatttaggatttttgcatagtgatatttttcttatatgcccactctttcagtctggcttcaactgtgccaccatatgcaaatgtccacctatatggaaagacacctttacctgaagctgggcttgcagtgtcttgaccaccaggaagacatacttgtcctcgctctctttgttgtattcttgcatggcaaaccacagacactgcttcacgttggcatttgaggcattgacgggttttaatttcctcagcacccctgtctcattcttttttgggtctttcctggccaccagggccaggggaatggtgaggaggatcagggagagccaccggcacctgggcatggtcccttgggcaagaggcaaagtcgactctcctcctcgtcgtctcagggctggagctgtgggcaggatggggtggccgcagctgctgctgtgggttcaagaatcttcgagccacacactgcctcctgttagcgtcagcccagctggattcaagacaggccattagggtcactctttggggtttgtcctctctttctccatggaaacccacccaggaatgccagttaaggagtctctctaccagcctcccctccttaccctgagagcaatctgtgtgtctagggagagttcctctccccttcggccccagtgtgtctatgcctacccctgtgagcgtcactcttgttatctgcttctcagtcctgtatgatgtgatcatgaaaactgtggctgccccagaggccttgtggcctcagcccttggtggactttcagcctgctgtgcctgcagctccttcttactccctgtggagctgggagctgacctgaccagtggttctcctaggtcttcagcactcttagttcatgcctgtggcccagtcaagggtctctgtgggtcctggtctgcggtctctcttgcccctctgagtccacgccctgcagggaggttacgctttgtgatgtaattcagcacctgtgtcttgtcccagtgaggacatctcccacttgccagcctccggcctttggtctaaacagctctcacaggggcacagagagcaagcaaatgcctcctgctgtgccctcagagtcaggggcctgcaatggttaatactgagtgtcaacttgatttgatcgaaggacaccaagtattgatcctgggtgtgtctgtgagggtgtttccaaaagagattaacatttgagtcagtgggctggggaaggcagatccacctttaatctggtgggcacaatctaatcagctgccagcgaatataaagcaggcagaaaaacgtgaaaaggagagatggtcctagcctcctagtctacatctgtctcccatgctagatgcctcctgccctcgaacatcagactccaagttcttcagttttgggactctcagactggctccccttgctcctcagtttggcagacagcctgttgtgggcccttgtgatcatgtaagttaatacttaataaactcccttttatatacatattatttatatatataatttatgtatattttatatatatataatttatatgtatattttatatatatacaatttatatatatattttatatatataatttatatataatttttatatataaattatatatattttatatataatttatatatataaattatatatattttatatataatttatatatataaattatatatattttatatatataaattatatatattttatatatatataattaatatatatataatttatatatatattatatatataattaatatatatataatttatatatatattatatataattaatatatatataatttatatatatattatatataattaatatatatataatttatatatatattatatatataattaatatatatataatttatatatatattatatatataattaatatatatataatttatatatatattttatatatatataaaggggagtttattaagtattaactttatatatatacacaaccatatatatcctattagttctgtccctttaaaagaaccctgactaatacagggcccctctggcatcttctgcccacctgtgccaatgactctggcttcctgaatgcctggcctctgaactcccttggcttgggccaacagtaaccccctgccctgtcctgccagggtaagggtcacgtggcccactctgatgcccaggcctggcccttagtgggaggaggggggcacgcacctgttaagctctcaaagcttctgcttttctgtgaaaatcccaaatcagtgtccagaaagttcctggtgaggcagagaggtgagcattcttcctaggctgcaaagatcaatgggttctatgagcaagggcaacgtacagaaaacacatatggggcaggaatctgtcaggcaggtggcaaagcattgcagactacaaatgcattatgctgtatttaaactttctccctatgactagattcttcagtttctcattttcagctgttacaaacagtattgcagtgaacaatccctttccaatatcttcatgatgttacacaagtgtttttgtaaaataaaagactagatgtaaaattgatgcaaagctttacgcaaatttaaatttattatttattgccaaaatgttcgtcacttactaattatatattcatgattttcaaatcctgctgcatgttaaaagtactgacggagatttaaaacaccagggcatacctaactgataaaatcagaatctctggaacagggtccaggaagccagctgtttttaaagttccccaggggttccaatctgcagccaagtttgaaaatcagtgtagtggatctgcacttcctgatattaatgtgcacatgaaccacctgggactctcgttaaaatgtaggtgctgagtttgtg

SEQ ID NO: 1561739 - DNA, 4001 bp, Homo sapiens
cccactaacacattatccacctccacccacccccatttcccacggtgagactccagcttcactctcagtaggcatctgatcttgcagctgcattcccagaggacagagccacatgtccgggagggtgttggatctccaagagttttcagggtaacttcagccctgggacagagggagcctcatctacagtgtgttgtcaaaccttccaagtgacctccagcaagaagaatgacacacagcgctcccactacacacaggcacacaccctgggaaaatgggttcaagaaataccatctgccctattgcaaagtgcatgctgaagttctccttgccctccttcccactccattctatttaattccactccatagcctccctctcacccatctattcttcccagcccccaaactgatgctgggattgccatatccaggaagccatgtggaaagcttttaggacttactgtcatttaggacttatagaccatagtaaggagcttagattttattctaacggtattaagaatggaggcttacactgaggtcttggagaatcaagcaaagcactgggaaagcagaagcatgaggcctggccaatctcaatctctgagacttccaaggttccagcatgaatattagcagccaccattactggaccagatgcccctctgagggttgcatcaggcttttaattctcctgagaggaggcagcaaatgagcaaggaggaaaattcctctgtaccagcattggaatcctgaggatggcagtgaggaatccaccccaggaggcagagaaccagccagagccttgcacagagtctttccagagcttaagctctgtgcggtactagagtccctctgcctttctttcaggctcttggtgctgagaaaggaagagcaatgctccttctctctctaaaccagaagttctccactaggagggcattttaattgttcatgcctgaagcccagatgaactgtgcattcctgaccacatttaatgatttcatcaaaaaggcaagcattttaggataaaggtccattgaggaagagtgtaaattggccttcagttcattaagtgcagacagagcaaggagcccagagaaggtggagatcagagaactaacctttcacggtggcctctcagggctgatggtgttctttattgccctcgaattctcactgttctctctctgtctgcctgtctctctctctctctgtctctctctctctgtctgtctgtctctctctgtctctctctctctctccctctgtgtgtccttgcttttccattttcattttatgacctggaaatgtttatcagtctctttggttattttctcttcttgtcagcttcatctccttagaagtccttattttgaagtcactcttcagttatacaatgtcttaaaaatcatgaagattgaaaaatatattttgcatgtgaatagacatttacctaatttaaaaaaaattttaagttcaatgttttccaaaactaaaactaccgtaattggttgtggactacctgactatggactgctgatggtgaaccaagtctcctagactagacatcttggtccctcacttaggggcagatggagaaggacaggccagaagaggatgtggtcaccaacctttctgtccatgctatcctccctccatgaactcaggacgcgcaacagcctgtaggcatgctcctccttgctctgcacgttgaaagtgttcaaggcaaactccactgtggcgaggaacataggatcctggactattttattattaccacccatttcctcttcagaacaccaggcataagtcaccaggagctggaagcccatgagaagcagtgacagtgcccagggcatagccttcctcctctgcggactcgacatgatgcaggctccagcagcccttgcctttgcccttcagatccctggcgtccactggagccttccagggctcaggtctggcctttaaattcacctgctggggcagaaactcctccctccaggcctcacctctgcagttacaccctgtctctcccacacatggcctcccttcttccaaaggcgtttaaatcatctcctgtttaggggagaggaacagcacccaggcaggtgggttggaaaagactagcaatgggagagatagtgccctgaacatgaggcccagccccagctgccccagcacctccgcaggctaaaggagacctctactgggcgccccagagtcagagcccggcacaggaacacaagtgtgagaggtatgagtggaaggtgagccctggactcagcagtgggggtgggctgggagggggaggttaggtggaaaggcagagacaaaaggatggaaagggatgacagtggatgctagtatcatgggtgagcaggtacagcgccccgagaaagcactgggcctcttgagagagaggcggggagcccgggaggattggcgggatgtcctgcaggtgtctgctcccccgagggtctcgggaggggggcaccagcctgggggtcgtgggcagaggttgaggaaatcaagagcaggagcccccaaccctgttctctgcacctccctaaatgcagcttcccagcccagggacgcgctgccaagtgctggtactaggggcctggctagttatggctgcccctattcctcaaaggtgtttccaggacgggtggccgcttgcaattggagcagtggagaaccagaaagacgaagatgccctcagggatggctgaagtgcacccattaggttgtcacgggttccctcctgtggccacagccggcacagcactctgcggcacagtttgtgggtggagattctgagttctcgaccaagacccacatagcctccaactccaaccgcaaatggggctctcaaaagactgaataatgcactcttcacagaccagacttaagctttgtccctgtgaaatatgcctttgatgtttatccgtagctccttgtaaacttcagaagcaaccagcatcccctgatgtcacgttaaaaagcaagttcctagtttccccacccaaagattctgacccagtagctgtgagcagggccagggaaactacatttctcaccagcttccagaggatggttgtgttcccggtctcagaaccatactttgagtggtgcaggttcagaatacttcctgggaagtgcatacagaccaaaccacatatgagaagtaactcagcttgaggggcatggaggtcaggggatgagaatggcttttgtggggcacacaggatgggggacaggcttagacagcatgcctggtgataaagaataagagtttgtttctagaccctgtttgcaaagaaaaagcaactcaatgtgacaattccaggaaagcagccagatgtgccaaaaacatcacccaaggagtctgtatcctttctctgatggcgttgagttcactggaactgcagctgaagcgtaactaatgtggtttcttagctggagagtgatggtgcacgtaggggtaggaagggggtgtcagtgagggcggaaatgcctttgtgggttttgggatgagcaggccataaggtgctgtgagaactagaatcctgatgcctggaataggttgcgagtgtcctgagagaggcctgcaatgcccatggaggtcactctcaccttgtaagttcagcggctgacaaacttggggcatcctgccaattgccagtggctcccccaccattctgagggccgatacccacatgtgctccaagggagtgcccacactcactcttacatgagcagtggtttagggtcctgggcaccagctctgtcctcactgtgcagccaaggaggggacagggatccccacacccagatgtgagaccacgggtgtacagacaccatggacccttacaagtgtgtctattttcttgttgaatccccagtggcctgggatggcctcacttcccaggtggagagagacgggaatatcaagacatagccaggtaaagagaaatacatgtgggctccagg

SEQ ID NO: 1561740 - DNA, 4001 bp, Homo sapiens
ggcaggtgcttgtaatcccagctactcgggagggaggctgaggcaggagaattgtttgaacccgggaggcagaggttgcagggagctgagattgtgccattgcactccagcctggttgacagggtgagactccatatcaaaagaaagaaagaaagaaagaaacaccatctgccctattgcaaagtgcaccttgatcttctcactcctttcagtttcacttcattccatctcctttctccctatccgtccatttccccaactccaaaactgactctggaattgtcacatccaggaacccacgtggcaggctccagcccagagagcaggggtcagagaaccagccagggccttgcacagggtctttccagaggctgaagcttggtgcagggttggggtccttttgctcttcttgcaaggtttcagtaatgaggtaggaagagcatttttgcctctctacccaactagaagtcctcaacttagctgggtgcagtggctcatgcctgtaatcccagcactttgggaggccgaggtgggcagatcatgaggtcaggagttcaagaccagcctggccaacatagtgaaaccctgtctctactaaaaatacaaaaaattaaccaggcatctggcgggtgcctgtaatcccagttatttgggaggctgaggcaggagaatcacttgaacctgggaggcggatcttgcagtgagcggagatgacgccactgtactctagcctgggtgacagagcaagattccatctcaaaaaaaaaaaaaaaaaaaagtcctcaacttggtgactattttcattgttcatgcctacagcacagatgaactgtgcattcctgattgcattctgtagtgacttcattaaaaggagaacatttaggattaagacctgtggtctgaggaagagtgtgaaacagtcttcagtttattaagtgcagacacaccaaggagctcagagaagttggaaatcagcaaagaggaactgaccacccagaggtcttttgggactggtgggggtttcttattgctcctgaacccttactgttctcttttttaattttcattttttaaattatctcttttttattacattttttggaagtatttctcaatttctctctattcacattttctgttcagcccttttccttattccgtatcttcattttcttggtagtcctcattttgaagtcattcttcagttaaataatgtcataaaaagatggagattaaacaatatgtttttcatgagagttgattaggatcaaattatttgaaatttctaacttagatgttttcaaaatcaaaaactaactaaactaccttgtattttcttaagtatggactacaactggtgaacaagactcttcaataagaccccctgtccccaccccactcccatttttcactgagcagcacatgccagatgccagggcaggagggtacgtggtcaccaacctgctccttccaggaattcaagatgtgccccagtctgtaggcatagtagtccttgctctgttggttgaatgtgtggacagcaaactccactgtggcagggaggtaacgagccatgacattgtgttcatcacagtccctttgctcgtggaaatgccaggcatagatcagcaggatctgggagcctaagagaagcagcagcagcgcccaggacagacctcccttccacggcaggcccagcatggtgctgactgtaggcaccgctgactttgctcttcccagcccccgtgcccacaggagttaattgagcacagacccagcccttaatcttatctgctcagacagccctgtgggacaaacttgtctcaccccacactggcaacaggcactcctacaggacaggaaggacaggatcctggattaaagggaggcagctctggatgtggagtcactcatctgccatccttctgccctatactctctaggccagcacaagccacaggcaggaggggagctaccctctgccactagctttgaaggctgctccttcagaacccacaggttctggttgtcctcaggtgcttggtgtccttggatgattctgtgccttcgcctcccacagcgaactgagataagacctggggacatctcgactctcactctcccctccttcaccccgtcgaagagaggatctccgttgttcagaaaaataactaagatatcagtttgttcttttgttgtataatacctcaacagttgtactctgtgaaccaagggaaaaaatgaaaaaaataaatggcaatttttatcaaccattttgacctgggatggacaatgagtattgtgagaaaagggcaggaaagacagagacccaagtcctgaggccccagcctggtcatgcccagcccagccctgcttgcatttctaaaccttgtcagccctggttccagctgagccagagccaaggtttctacagggcccaccgccctacatctgcagccccaccacacacactcatgttttattagactggaatatcattctagaccaaatttttaaacacttctctgggagatcacatgtttctgcctcagtgagatagaggttggaccattcttcagccccttgatcatttttgtctccatctgaccatccttcttggtgttctagagtgagctattttgccagcacttaggtgatactaggtggttacttttaaatcaatttcctggcaataactaacctgaaagaggaaataataatattttgttgctgtaagaatgaacattaaatagtgcaggacaggtgaagtatgcaaaagtgagagctttgagtttggctgagaagactatggtgctgcaatataggcaagaacctagcattgttgccagataacagaatagaaagttcagtcccaagtcagggagactgattctacaagaactgttctgactgtgtcccataccatgttcccagatcacagcagggccaggcctgggaagagcatcactgcatctgtccacactagcacagcactggccaggtcaagacagctgcaggtgaagagagtcatgctgcctgacccaacactggggtggtcccgagtgtctcctcacaggagacttcacccatcacagacagaagaaagtagctagtgtgtggggagctgctgcccaggagccatgtgcatcttgatcttctgccttgactccaggaagtgggtgacacagagtagctgaaacctgtgtcctgattagcaatgataacaggtgaaatctggcccattgcgttgtttcatgggttgtttttttttttttttttgacggaatctctgttgcccaggcttgagtgcggtggtgtgatcttggctcactgctgcaacctccgcctcccaggttcaagagattctcctgcctcagcctcctgagtagctgagattacaggcgtgttgcaccatgcccggctaattctttgtgtttttagtagagatggggttttgccatgtaggccaagctggtctcgaactttcctggcctcaagtggtcctcccacctcagcctcctaatgtgctgggattacaggcatgagctactgtgtccagcccccattgcactgtcgaaatgtcactggtcttctggatcacacccagctgacccattcttctcatatttatttaaccttggcaaacaaacagctcaaccacacaactatttgcaaaattatttgtgagatctactgggttgtgaaagattttcacatgagaaagattttcaatcaaacacaactcacaagtcaagggatccatgacacaagattcacactttccttttcacttggcaaagtcttgcttataattgtgaagcagaagccagcactgcaggattccttaccactgcatgagttacacaagaatgaaaacttctcatgggttccctaaaaactgagattggaaaatgacataataacaacaaaaataatggtgcaaattgacatagttatatctcatagatgtgtcttaggtcttttcaaagacaagagatagg

SEQ ID NO: 1561741 - DNA, 4001 bp, Homo sapiens
tcaggtgatctgcctgcctccgcctcccaaagtgctgggattacgggcgcgagccactgcgcctggcccagagcctgatttcttacacactgtatgacactgatggtgttaataataaccaataacattaagcacttcctgcatgccagataccgtcatgctaagtactttgtaagcatcagttcactgaataaaatcattcaatgtattcaagtatatgaagtagtacatgaacatagtaggtctatgcttgagtagaaaatcctgggacacaaataaagatgatgaaatgggttcaaggaggtcaggacacctactcaacgtaaaaagtggctgagttacttgtccaaggttaaagcacaccagaattgccaactccagatccctgagcttaaccactgaaggagttcaggaaatgccagcccaaaacaagatgctttggcgggctgattaccttgaactgagggcacctggagaacagcaggcgggaagaggctttccctgtgctttccttacctgcctaaagtctgaccctccaaaaatacctcaattgtcacgaatccttataaaccagggaagattaactcggatcacatgagagattagaggctgacaccacccagaagatcacctattctgtctgcataacaaacttgattcaccatacatttcctccgttcaccgtcccataacttgtgttagagctgcttcccgccccccgcccccaattctctattcattcctttcagtagctcaggatgccatgtaggctttaatcatctgacttcaacttttagtctcgtattttgtgggactcctgtacgtaattaaatatcgtttttctcccatggacaatgttcagttacccgaaaaaaatgggagattcttaagtaccaataaagaatgaaaatcacaagtgggtagtctggcaaagaaaagttgatgagagattctactgttaacgttgggttaatatgactcgaataatttccgtatgctagctcaatgctttacatgcacatcctgtttaccctgcagtaatctgttaattcgtcttatgtgaatttaactcttagtcctaataaggtacctggaaggatggagggaagccatttttggttcccctacaccactgttctatccggtctcttcacttctgctgagcacatcccgggtgtacatacacacacacacacacacatatgtgtgtgtatatatatgtatatgtgtgtgtgtgtgtatatatatatatattttaagtggcccacccctaacttctcaactcccacagaacgttcactcgccaggtaaacagaagcctaattatccccaatttgcaggtgagcacacgaggacaagaacccgatccaggaccggatacatcgcagttggaaaggctagaacacagatgccccctcactatatgcgccgcgaccatctggatgcagaggcgaactaaggactgggtgggaatggaagcgaggcccttcgagaagaggaaggggtgcaggccaagccgggcaacttaggaaacgcaaagtagaggcgcatgccaccttgctaactctcgactcttccagtctcgccccagtcgtttctgtggttttctctaaatgccccagccgaccgcaccagctactctccccgtgtcccagtaccagctggtccggttctcttggtatcccgctctctcctggaaaaatggaggcgcgaatcctgcccaatctaccgctccgagcgcacgttcactgcgcacgctgaaagggcgccaagccgaccgctgcgctatcgatcggtcccactctctcttgcttttctcgccatcttacttactggcacgttcaaaggttagttcacctccttggactttatctccaatgcgtcaagcttgacgtcaaggggctgttgcttcaccgataaatggccgaccgcggagagcaccctggggctgggactgccacaggtctggctggccgttggctccaccacttccgggttcttagggagcaagtgcgcctgcgcgcggtgtgcgcccttaaacgcgactcaaggcgtcgggtttgttgtcaaccaatcacaaggcagcctcgctcgagcgcaggccaatcggctttctagctagagggtttaactcctatttaaaaagaagaacctttgaattctaacggctgagctcttggaagacttgggtccttgggtcgcaggtgggagccgacgggtgggtagaccgtgggggatatctcagtggcggacgaggacggcggggacaaggggcggctggtcggagtggcggagcgtcaagtcccctgtcggttcctccgtccctgagtgtccttggcgctgccttgtgcccgcccagcgcctttgcatccgctcctgggcaccgaggcgccctgtaggatactgcttgttacttattacagctagaggtacaaggggtttgttgagtggtgttgacatgcgcgggaggggtgggtgggcttcagattggattttgtcctccgagatcacctgggtaagaaaagcacagaaggtctctgctgtgttggagttcacgttctagtgggtggggagacagacggtaagcgtacggagaacttgcagctggggtgggtgttacagaggaaaagcaggagtgcggtttaacgggggccgctttagatagaatagcctaagaaggcccttgtcctggctggatgagtgggtgaattgatgaatgagaacctccttgcagaggccttcccggtccgtacttctcagaccgtagaccttggagcagttgtaccgggataacttgcagtgcttgttaaacatatagctccaccgagagcccggtaaatcagaatctctgaggggtaggacccaggtgtctagttattaacaaactctccagatgattcttaggtttcattgagaactagggatgcagaccggtgcatacaaatcgtctggggacgttaaaatgcagaatctgtttttttagacctggggttaggcctcagagtctccatttctaagaaccatccggctgaggtagacgtagccactgtccttaactctcgtaatgtctcttcctcttccgtaaccttccttgtcccttgaattaaacgtttttcagcaacctactcagttcgtccttcccttcatctctgcagacatgcacaggtctgagggaggaaggaataaaccgtataaacctcctgcgctattagcctaacagcttttctattcaaaatagtaggacttctggtttgaactgaatggatcctgtgaaagtcatctggttcttcaatctggttgcagattagagtcacctgaagggcagtctccttggcgttgtctccagaattctggattagaatcttattccattctgcttgttattcaatttccctagaaagaaaggtagaataaattggagcaaatgcctgtagcttctgtcagaagaatgttgaataaatgttgttaggcctatgtgatctcattagactgctacttagaattgtaagggaagtaaagcattagagcatgtgtgaaattaaatatttgattaacacaagtgtgcatttccttgttgctgtttatcaacttttacttacccactgtttttttataagggctgcagcctgtagtctgggcctggcttcatcatggaattatttgcttaattgtaaaatggtaatcttaatttttttttttgagacagggtctcactccattgcccaggccagagtgcggggatatttgataagaaacttcagtgaaggccgggcgcggtggctcatgcccgtaatcccagcattttcggaggccgaggtgggtggatcacctgaggtcgggagttccagaccagccctaccaacatagagaaaccctgtctctactaaaaatacaaaatcagctgggcgtggtggtgcatgtctgtaatcccagctactctggaggctgaggcaggagaattgcttgaacccaggaggtggaggttgcgggtgagccgagat

SEQ ID NO: 1561742 - DNA, 4001 bp, Homo sapiens
caggtgtctggggacagcaataaagaataaaagtgacctcagagcctgatttcttttttctttttgagacggagtctcgctctgtcgcccaggcttgagggcagtggcgcgatctcggctcactgcaacctccgcctcctgggttcaagctattctcctgtctcagcctcccgagtagctaagactacaggcgcccgccaccacaccaggctaatttttgtatttttagtagagacggggtttcaccatattggccaggctggtctcgaaactcctgacctcaggtgatctgcctgcctccgcctcccaaagtgctgggattacgggcgcgagccactgcgcctggcccagagcctgatttcttacacactgtatgacactgatggtgttaataataaccaataacattaagcacttcctgcatgccagataccgtcatgctaagtactttgtaagcatcagttcactgaataaaatcattcaatgtattcaagtatatgaagtagtacatgaacatagtaggtctatgcttgagtagaaaatcctgggacacaaataaagatgatgaaatgggttcaaggaggtcaggacacctactcaacgtaaaaagtggctgagttacttgtccaaggttaaagcacaccagaattgccaactccagatccctgagcttaaccactgaaggagttcaggaaatgccagcccaaaacaagatgctttggcgggctgattaccttgaactgagggcacctggagaacagcaggcgggaagaggctttccctgtgctttccttacctgcctaaagtctgaccctccaaaaatacctcaattgtcacgaatccttataaaccagggaagattaactcggatcacatgagagattagaggctgacaccacccagaagatcacctattctgtctgcataacaaacttgattcaccatacatttcctccgttcaccgtcccataacttgtgttagagctgcttcccgccccccgcccccaattctctattcattcctttcagtagctcaggatgccatgtaggctttaatcatctgacttcaacttttagtctcgtattttgtgggactcctgtacgtaattaaatatcgtttttctcccatggacaatgttcagttacccgaaaaaaatgggagattcttaagtaccaataaagaatgaaaatcacaagtgggtagtctggcaaagaaaagttgatgagagattctactgttaacgttgggttaatatgactcgaataatttccgtatgctagctcaatgctttacatgcacatcctgtttaccctgcagtaatctgttaattcgtcttatgtgaatttaactcttagtcctaataaggtacctggaaggatggagggaagccatttttggttcccctacaccactgttctatccggtctcttcacttctgctgagcacatcccgggtgtacatacacacacacacacacacatatgtgtgtgtatatatatgtatatgtgtgtgtgtgtgtatatatatatatattttaagtggcccacccctaacttctcaactcccacagaacgttcactcgccaggtaaacagaagcctaattatccccaatttgcaggtgagcacacgaggacaagaacccgatccaggaccggatacatcgcagttggaaaggctagaacacagatgccccctcactatatgcgccgcgaccatctggatgcagaggcgaactaaggactgggtgggaatggaagcgaggcccttcgagaagaggaaggggtgcaggccaagccgggcaacttaggaaacgcaaagtagaggcgcatgccaccttgctaactctcgactcttccagtctcgccccagtcgtttctgtggttttctctaaatgccccagccgaccgcaccagctactctccccgtgtcccagtaccagctggtccggttctcttggtatcccgctctctcctggaaaaatggaggcgcgaatcctgcccaatctaccgctccgagcgcacgttcactgcgcacgctgaaagggcgccaagccgaccgctgcgctatcgatcggtcccactctctcttgcttttctcgccatcttacttactggcacgttcaaaggttagttcacctccttggactttatctccaatgcgtcaagcttgacgtcaaggggctgttgcttcaccgataaatggccgaccgcggagagcaccctggggctgggactgccacaggtctggctggccgttggctccaccacttccgggttcttagggagcaagtgcgcctgcgcgcggtgtgcgcccttaaacgcgactcaaggcgtcgggtttgttgtcaaccaatcacaaggcagcctcgctcgagcgcaggccaatcggctttctagctagagggtttaactcctatttaaaaagaagaacctttgaattctaacggctgagctcttggaagacttgggtccttgggtcgcaggtgggagccgacgggtgggtagaccgtgggggatatctcagtggcggacgaggacggcggggacaaggggcggctggtcggagtggcggagcgtcaagtcccctgtcggttcctccgtccctgagtgtccttggcgctgccttgtgcccgcccagcgcctttgcatccgctcctgggcaccgaggcgccctgtaggatactgcttgttacttattacagctagaggtacaaggggtttgttgagtggtgttgacatgcgcgggaggggtgggtgggcttcagattggattttgtcctccgagatcacctgggtaagaaaagcacagaaggtctctgctgtgttggagttcacgttctagtgggtggggagacagacggtaagcgtacggagaacttgcagctggggtgggtgttacagaggaaaagcaggagtgcggtttaacgggggccgctttagatagaatagcctaagaaggcccttgtcctggctggatgagtgggtgaattgatgaatgagaacctccttgcagaggccttcccggtccgtacttctcagaccgtagaccttggagcagttgtaccgggataacttgcagtgcttgttaaacatatagctccaccgagagcccggtaaatcagaatctctgaggggtaggacccaggtgtctagttattaacaaactctccagatgattcttaggtttcattgagaactagggatgcagaccggtgcatacaaatcgtctggggacgttaaaatgcagaatctgtttttttagacctggggttaggcctcagagtctccatttctaagaaccatccggctgaggtagacgtagccactgtccttaactctcgtaatgtctcttcctcttccgtaaccttccttgtcccttgaattaaacgtttttcagcaacctactcagttcgtccttcccttcatctctgcagacatgcacaggtctgagggaggaaggaataaaccgtataaacctcctgcgctattagcctaacagcttttctattcaaaatagtaggacttctggtttgaactgaatggatcctgtgaaagtcatctggttcttcaatctggttgcagattagagtcacctgaagggcagtctccttggcgttgtctccagaattctggattagaatcttattccattctgcttgttattcaatttccctagaaagaaaggtagaataaattggagcaaatgcctgtagcttctgtcagaagaatgttgaataaatgttgttaggcctatgtgatctcattagactgctacttagaattgtaagggaagtaaagcattagagcatgtgtgaaattaaatatttgattaacacaagtgtgcatttccttgttgctgtttatcaacttttacttacccactgtttttttataagggctgcagcctgtagtctgggcctggcttcatcatggaattatttgcttaattgtaaaatggtaatcttaatttttttttttgagacagggtctcactccattg

SEQ ID NO: 1561743 - DNA, 4001 bp, Homo sapiens
gcctcctgggttcaagctattctcctgtctcagcctcccgagtagctaagactacaggcgcccgccaccacaccaggctaatttttgtatttttagtagagacggggtttcaccatattggccaggctggtctcgaaactcctgacctcaggtgatctgcctgcctccgcctcccaaagtgctgggattacgggcgcgagccactgcgcctggcccagagcctgatttcttacacactgtatgacactgatggtgttaataataaccaataacattaagcacttcctgcatgccagataccgtcatgctaagtactttgtaagcatcagttcactgaataaaatcattcaatgtattcaagtatatgaagtagtacatgaacatagtaggtctatgcttgagtagaaaatcctgggacacaaataaagatgatgaaatgggttcaaggaggtcaggacacctactcaacgtaaaaagtggctgagttacttgtccaaggttaaagcacaccagaattgccaactccagatccctgagcttaaccactgaaggagttcaggaaatgccagcccaaaacaagatgctttggcgggctgattaccttgaactgagggcacctggagaacagcaggcgggaagaggctttccctgtgctttccttacctgcctaaagtctgaccctccaaaaatacctcaattgtcacgaatccttataaaccagggaagattaactcggatcacatgagagattagaggctgacaccacccagaagatcacctattctgtctgcataacaaacttgattcaccatacatttcctccgttcaccgtcccataacttgtgttagagctgcttcccgccccccgcccccaattctctattcattcctttcagtagctcaggatgccatgtaggctttaatcatctgacttcaacttttagtctcgtattttgtgggactcctgtacgtaattaaatatcgtttttctcccatggacaatgttcagttacccgaaaaaaatgggagattcttaagtaccaataaagaatgaaaatcacaagtgggtagtctggcaaagaaaagttgatgagagattctactgttaacgttgggttaatatgactcgaataatttccgtatgctagctcaatgctttacatgcacatcctgtttaccctgcagtaatctgttaattcgtcttatgtgaatttaactcttagtcctaataaggtacctggaaggatggagggaagccatttttggttcccctacaccactgttctatccggtctcttcacttctgctgagcacatcccgggtgtacatacacacacacacacacacatatgtgtgtgtatatatatgtatatgtgtgtgtgtgtgtatatatatatatattttaagtggcccacccctaacttctcaactcccacagaacgttcactcgccaggtaaacagaagcctaattatccccaatttgcaggtgagcacacgaggacaagaacccgatccaggaccggatacatcgcagttggaaaggctagaacacagatgccccctcactatatgcgccgcgaccatctggatgcagaggcgaactaaggactgggtgggaatggaagcgaggcccttcgagaagaggaaggggtgcaggccaagccgggcaacttaggaaacgcaaagtagaggcgcatgccaccttgctaactctcgactcttccagtctcgccccagtcgtttctgtggttttctctaaatgccccagccgaccgcaccagctactctccccgtgtcccagtaccagctggtccggttctcttggtatcccgctctctcctggaaaaatggaggcgcgaatcctgcccaatctaccgctccgagcgcacgttcactgcgcacgctgaaagggcgccaagccgaccgctgcgctatcgatcggtcccactctctcttgcttttctcgccatcttacttactggcacgttcaaaggttagttcacctccttggactttatctccaatgcgtcaagcttgacgtcaaggggctgttgcttcaccgataaatggccgaccgcggagagcaccctggggctgggactgccacaggtctggctggccgttggctccaccacttccgggttcttagggagcaagtgcgcctgcgcgcggtgtgcgcccttaaacgcgactcaaggcgtcgggtttgttgtcaaccaatcacaaggcagcctcgctcgagcgcaggccaatcggctttctagctagagggtttaactcctatttaaaaagaagaacctttgaattctaacggctgagctcttggaagacttgggtccttgggtcgcaggtgggagccgacgggtgggtagaccgtgggggatatctcagtggcggacgaggacggcggggacaaggggcggctggtcggagtggcggagcgtcaagtcccctgtcggttcctccgtccctgagtgtccttggcgctgccttgtgcccgcccagcgcctttgcatccgctcctgggcaccgaggcgccctgtaggatactgcttgttacttattacagctagaggtacaaggggtttgttgagtggtgttgacatgcgcgggaggggtgggtgggcttcagattggattttgtcctccgagatcacctgggtaagaaaagcacagaaggtctctgctgtgttggagttcacgttctagtgggtggggagacagacggtaagcgtacggagaacttgcagctggggtgggtgttacagaggaaaagcaggagtgcggtttaacgggggccgctttagatagaatagcctaagaaggcccttgtcctggctggatgagtgggtgaattgatgaatgagaacctccttgcagaggccttcccggtccgtacttctcagaccgtagaccttggagcagttgtaccgggataacttgcagtgcttgttaaacatatagctccaccgagagcccggtaaatcagaatctctgaggggtaggacccaggtgtctagttattaacaaactctccagatgattcttaggtttcattgagaactagggatgcagaccggtgcatacaaatcgtctggggacgttaaaatgcagaatctgtttttttagacctggggttaggcctcagagtctccatttctaagaaccatccggctgaggtagacgtagccactgtccttaactctcgtaatgtctcttcctcttccgtaaccttccttgtcccttgaattaaacgtttttcagcaacctactcagttcgtccttcccttcatctctgcagacatgcacaggtctgagggaggaaggaataaaccgtataaacctcctgcgctattagcctaacagcttttctattcaaaatagtaggacttctggtttgaactgaatggatcctgtgaaagtcatctggttcttcaatctggttgcagattagagtcacctgaagggcagtctccttggcgttgtctccagaattctggattagaatcttattccattctgcttgttattcaatttccctagaaagaaaggtagaataaattggagcaaatgcctgtagcttctgtcagaagaatgttgaataaatgttgttaggcctatgtgatctcattagactgctacttagaattgtaagggaagtaaagcattagagcatgtgtgaaattaaatatttgattaacacaagtgtgcatttccttgttgctgtttatcaacttttacttacccactgtttttttataagggctgcagcctgtagtctgggcctggcttcatcatggaattatttgcttaattgtaaaatggtaatcttaatttttttttttgagacagggtctcactccattgcccaggccagagtgcggggatatttgataagaaacttcagtgaaggccgggcgcggtggctcatgcccgtaatcccagcattttcggaggccgaggtgggtggatcacctgaggtcgggagttccagaccagc

SEQ ID NO: 1561744 - DNA, 4001 bp, Homo sapiens
gaacattttttcttgtaattattccctaaacagtacagtataataattatctacatagcatttacactgtaccacttattataattaatctagaaatgatttaccatatgtgggaagatgtgcataggttatgtggaaacactattccattttacataaaagacttcagaatccatggatgtgggcatcctgaggggtcctggaaccaattcctcatggacaccaaggggactgtatagtttattatctgaccttgaggaaatgttgtaccaataaaaggggttccctaacaacttttctttcttctattatccttcaattgatatatttcagagaaattttatatgtaaaacagaaggtgaggtgatctggctgaaccctatctctcacatcctctccacttccagaataaaccctctgtataatttgaagtttgtataacacagaacacccagttttgaattttacaaccctacacattgaaaaaatattgggggctacaggcctacagagaatatttgtattttgccaaatgagaactttaaagggagcaaaattatccttgctgtcactccggcagggtcaaatatcagaatgaaaggcatttcttcccaaggaaaaagagctggccgggcgtggtatctcacgcctgtaactccggcactttgggaggccgaggtgggcagatcacctgaggtcaggagttcgagaccagcttggctaacatggtgaaaaccggtttctactaaaaatacaaaaaatttagccaggtgtggtggtacgtacctgtaatctcagctacttgggaggctgaggcaggagaatcacttgaacctgggaggaggaggttgcagtgagccaagatcatgccattgcactccagcgtgggcaacaagagcgaaactccatctcaaaaaaaaaaaaaaaaagagtttaatcctcagtgaacacttttgcctctaagtgtattggagttagagttcatgccagtccttaggaaagcattttggaagcatggctaaggacattctgggatctgaacaactctacaatgtacctgctacaagtgaagatgcttcccccttgggacctcacggaggaccaccacttggttctcttgggagctaccccagaatcctcacatgtctgaactggcaagaacagggcctgctgatgtcttgggagagcaaggtacaaacctgcatctgacttcgaattagcctctggactcgatataagtaggtgtcgttgctggcattgttgtaggattgaatgaagaagttgagtgttgaattcatgttcttcttgctcatgagcttctgctggaagccctcccacctttggaagtgacccagcttggctgacaggaccagggcaatcagcagcagcagggggtttctccagcatccgatccccatgtctacagcctcagaaactttcttcccaactgcaccttccagggtgtggtggtgccaggctgcagttcactcattctcccatcataaccctcaccaacataggctttcctgggggatggcctgcctgcatttaaacagagattcagacctgaaccttgtcactcagtttccagccagttcattttctacccatttacaccacccattcagttctttggtgatccaggcaagcaaaatttttaaacacctgctaaggcgtgcaagcccctctccctgccttcacatgtctcagggaagaaaagccccagaacagcccctacagtgctctgcaataagagctggggttgtagatagagaagcatcacttacaggaagggaggcggccttacggagaaggtaatatctgaactgagatataaggaagcagtcatatggagcaaggagtggtacattattcttaccttccttgggttccaactgtcttacaaagccaccacctgttccctgtgcttcctttacagacacgttctccttgctcacctgccgcccgcccaccacagatttctgcttgcaggatccccctatacctgcaggccctgcactggcttttgctatcttgttgtgaccctagtggagctttgtgaggtaattgcagcctccctatgagggaggaataaactgtgagccccatttagaaattatccgcagacccctgaagattaggtgtcacttacccccaaaagcccatgaatgccctattttaaaaacatttgctggctgggcgcggtggctcacgcctgtaatcccagcactttgggaggctgaggtgggtgaatcaccagagatcaggagttcgagaccagcctggccaacatggtgaaaccccatctctactaaaaatacaaaattagctgggtgtggtggtgtgtacctgtagtcccagttacttgggaggctgaggcaggagaatcacttgaacccaggaggtggaggctgaagtgagccgggagggtgccgctgcactccagcctaggtgacagagcgagactgtgtctcagaaaaaaaacaaaaaacaaacaaaaaaaaacaccttaaatggaatcctaccagaaaaaaacattagtggaatagttgatgaaatgtgaataaaatctgcagattagttaatagtattgtgtgaatgttgatattctagttttcaccgttgtactgtgattgtataatatgttaacatttggggaagtggaatgaagggtatacgagaatgctttatgctatttttgcagcctttgtgtaagtctgaaattattccaaaataaaggttaaaatgtccaaaactaaataaagcgttgttctgtgaggagtagcgtgctgagggaggggaagcaggagacttaggatccaactgtcctggctcaagtccttcgctggggactctgggagagttacctcatctccctaagctgggtttcttcacctgtaatatgagaatggggagaaagactccacttgaattgtggtagagactaactggatgtaggcaaagaacctgctcccaagtcaggtgtcaggtgcataagaatgtcttcttcgtgattcttctgtgactctgaacccacacttcacccatggcctgtcatgtcccggaagccaggccaccttccatcatgacaatgttgctagcaccagtcacaacatcctcccttggccccagagcctgtcttgagaggacttgtccagccggtggaggtgatacatttgaaattccctgagcctgagctgccgagggccacttgctgtagaatagataatgaaggattccgagtaatccgggaagccacacagacctgtgccgtctcagcatgccccagacacctgggatacccccatcaggctgaggcccatagagaggaaaaataacattgggtgggccatattagaaaccccatggatgtggggctcaaagcataaacaataaatctgcttaagaaatatgggagttggttgtgtccataaagaggaaaatgagtcactggcaattttaattgaagaaaaggaaaacatagaccctgactatgccacagaaagagatgtgaggcgcctaacaggtcacactggcgttccttagcttgtgtcagcaaaatgctgatttctgactctgtggacatggaatcaggaaaaaaatatgattctggtaaggtacatgtataaagggagacagggagcttggttacagcatggaataggggcagagcatagtggctgacacctgggaggctgaggctaggaggattgcttcagcccaggagttccagaccagcctgggcaacatggtgaaaccccgtttccacagaaaatacaaaaattagccagacatggtggcccacatctgtagtcccagctactctggaggctgaggtgggaggatcacctgagcccaagagaggtcgaggctgcagtgagctgagatcacaccaagcactccagcctgggcgacagaacaaagggaaatagagggcttagttgttgtctggttactgccatgaaacaatggaaaaataggggcctgagtatttccgtgga

SEQ ID NO: 1561745 - DNA, 4001 bp, Homo sapiens
ccagctgtaccttgatcagtccagtagtttcagccaggctcaccgctaacttactgtcttcactggccaccatcacattctcctctagagcgtggaactgcaacacctccatctcttgcggggagtacagctcttgctggatactaatggccacacactgctgcaggctctgccggggcccttcctcaagccacagcaacccagggccaggctgttgcaccaccacctgcaccccttcttgctgctgtatgctcagcaagctcatatcctgcaactccacagcttcagaagtgaagtgcaccgtctgcagggtcaggatgtacttctcgctctcctccgagggggccagcaccagctccacttcttcctccaggacgctgtcctggaaggccccagaggtacgctcggcctccaactcactagggctccgatggtctttctctctgcacactccgtctttttcctcctccttcaggcctttttccggcatcaactcgagttctttgatcttggtgaattgctcagaaaggacagagatctcagtggctgccataatgacttggcctgtttgaaaaataagcaagcggtttccataggggggagaagggggtggtatgaggagggatgcggggggtgctggaacctagcaggctttggagttgaaacaaggtctggcctcaaaaggttttggacttagtagggtcagaacaatgctgatctggcttgggtctaggagggggtcaaggctaagcaggatttaggctaaagcaggattttgtacaaaaccctagaacgaacaggtttgggcctcagcaggcttagggccagcacacatcctgcgcctggcaaggttccgcctgagcacactctggcccagtgcatatcctgggcctagcaaggttaggcctgagccggttcagtcagtgaacatcctgggcctagtaaggtttgggcccagcaggctctcggccagtgcatatcctgggcctagcaagtttcaggtccaagcaggccccgggccagtgcacacccggcgcccagcgaggttcgggcccgagcaggcattcccctcgtgcacggttctagacctagcaccctcagagccaggcaggctttgggcctagtggcctcgagcccacccagacttggccaagcagccctcggccagaccaagcacactccctcggaggcctggcagggcccctgctttaccctgccccccacgccccgccccgacccgaccctcccaggcagcccctcagcgtctgccgcccgcccttgggcctttccggccagcccctccctccgcccacgcccagaacagcccatgctcttggaggagagcaggtgggcttgaccgggactggcccctcaccgcggaaggcgtggccggaatgctcggcccactccgtctttggcttgtgggctctgcctcgtgcaccgcgtgctgcagcccacagccggccgccgccgggctggcgcgagagtggagggtggcagtgcgcaggcgcggagcggaaaagagggggcgtgaagggggcggagccaggcagggttgggggagggggtgatgtactgtgggggcaggggggaaggggagtagggagggggagggggagcacggatgaggaggaccccagagggggcactggtggacctgggggggtggatgaggaggggaggagggtcccatacagggcactgggagacctggggtgggggtggataaggagaggaggagagcctgcagggcactggaagactgggtagtgggggagcgcctaaggaggggaggagggtcctgcaggggcacggaaataccttggggttgaagtggatgaggaagggaggagggccccgcagggggcgctgggagacccgggggggaagtaaggagggcacgagggcctgcagggggcctgggagatctgagggggaatggataaggaggggaggagggcccacaggaggcactgagatactggggggaggggtggaatgagggggggaggggtggaatgaggcggggaggatagccctgcaggggggctgggagacctgaggggggtggtgggtaatggataaggaggggaggggggcctgcagggggcctgtgacacctaggggaggggaatggataaggagggtaggagggccaacaggaggcactgagataccagggggaggggtggaatgaggaggggagagccctgcaggggggcggggagacctgaggtgagggtaatggataaggaggggaggagggtctgcaggggttcttgggagacctgggggatgaataggagaggacaaggggaggagggtctgcagggggccctgggagccctgcggggggcgaggggtgggggaatggataaggaggggaggagggcctgcaaggggtgctgggagacttgggggaggggaatggataaggaggggaggagggcctgcaaggggtgctgggagacctgggggaggggaatggataaggagaggaggagggcccgcaggaggcactgagagactggggggaggggtggaatgaggaggggaggagagccctgcagggggcgctgggataccttgtgggggaatggataaggaggggagggggtcctgcagggggcgctgggagacctaggggaggggaatggataagggtgggaggagggcccgcaggaggcactgagatactggggggaggggtggaatgaggaggggaggagagccctgtagggggcgctgggagaccttggggggaatggataaggaggggaagagggccctcagggggcgctgggagacctgggggggaaatggataaggaggggaggatggccgcaaggggcactgggagacgctggcggggaatggataaggagtggaggggggcctgcaaggggcgctgggagacctggaggggaaaggataaggagggaggagggcctggagagggcgctgggagacttgggcgggggtggagggaatggataaggaggggagaagggcctgcagggggcactgagacctggtggggaatggataaggagggaggagggcctgcagggggcgctggggaacctggggggcttggataagaaggggaggagggcctgcagggggcgctgggagacctaggcggggcaggggtggggaatgggtaaggagggaagaagggccttgcagggggcgctgggagacctggggtcggggggaggataaggaggggcaatgggagaggatggggaatggggtgcttagagacttgggtgggaaatggacgcagcagggactgggcggggagagaccttacaagggttccaggagatgggttggggtgggctggacagggcagagtggagggtgaggagggccctctgtgagccacagagacctgagcaggagctaggtgggggctgggaatgtgcaggaaaggagacgtggaaggagggggagatagggcggcaggggtgatggagattgacagggaccccagacatgggggtagggaaatggggatggaaataaatggaaaaaaagaggcttcgtggtgggaaagaggaggaactccgagggctccggggcactgaggtgtgcagagttgccgggtcctgagtaccctcgagggagcagagggagctcgaggaacgaggaagagaggggacgacgagggcaaagaagggagaacgtaggcgggtgtggaggaggatgagcgtccgagggagaagacggaggagttgagcagagaaagggcaggaatgtgggggctggaaagggtgaggaggcagccgatggagcaggggtgcatcggagttcatgggtacttcccaggagctcatttaaggcaggtgggagggcgggggacgtggaggggcggccacactgtgaacggactgaagcccacttaactgttcactctaaagtggttcagttcgttacgtgtgttttcacttcaatcaattgcttttaatggaaattaatcatattgatggtctcca

SEQ ID NO: 1561746 - DNA, 4001 bp, Homo sapiens
ttcaaaacgtttgtgtgtaaagtgcaaaacccttctggatttgattcacaatacagaacattagtttaaaatttctcccatttcctgacattttgaaagtaaaagtcaaccacttaaaacttcaattaccatcacctgcccataaagaaaaacagcagcccagttttagggagtgtattctatgagatgaactggcctaccctttgtctttctttgattttttgtagatttggccttttcagcatctgcttgaccagctgtaggttgatcctcttgttcttccacatttgaatttgaaactgtgagaacaatttcgtcacttctttcatctcctgacattgtttccacaaaaaagagctgctcctttgttctttcagccaataactggttcttctcctgctcttcctcgagctaataaacaacaaatattcaaatatgatactattgatttcagtataattagacttttgcctggatgaagcacagaatacaaaaagaaaagccaaagtggaagattatgcatcacaatgttaattatttcgcatcagggttgtggcagtgaaacttaacacttttttttaaaacataatgcgccttacactattccaattagcaccacttttaaaactcttttttaaaaaagaacctaagaactctcaagattttcctgggaagtatttgtactgtctttaatttgcaactgcaaaataccttgtccagacataatattgcataaaagccgacttgaattttttctttttcatgtaaggggttgtttattaaaaccagctgtaccttgatcagtccagtagtttcagccaggctcaccgctaacttactgtcttcactggccaccatcacattctcctctagagcgtggaactgcaacacctccatctcttgcggggagtacagctcttgctggatactaatggccacacactgctgcaggctctgccggggcccttcctcaagccacagcaacccagggccaggctgttgcaccaccacctgcaccccttcttgctgctgtatgctcagcaagctcatatcctgcaactccacagcttcagaagtgaagtgcaccgtctgcagggtcaggatgtacttctcgctctcctccgagggggccagcaccagctccacttcttcctccaggacgctgtcctggaaggccccagaggtacgctcggcctccaactcactagggctccgatggtctttctctctgcacactccgtctttttcctcctccttcaggcctttttccggcatcaactcgagttctttgatcttggtgaattgctcagaaaggacagagatctcagtggctgccataatgacttggcctgtttgaaaaataagcaagcggtttccataggggggagaagggggtggtatgaggagggatgcggggggtgctggaacctagcaggctttggagttgaaacaaggtctggcctcaaaaggttttggacttagtagggtcagaacaatgctgatctggcttgggtctaggagggggtcaaggctaagcaggatttaggctaaagcaggattttgtacaaaaccctagaacgaacaggtttgggcctcagcaggcttagggccagcacacatcctgcgcctggcaaggttccgcctgagcacactctggcccagtgcatatcctgggcctagcaaggttaggcctgagccggttcagtcagtgaacatcctgggcctagtaaggtttgggcccagcaggctctcggccagtgcatatcctgggcctagcaagtttcaggtccaagcaggccccgggccagtgcacacccggcgcccagcgaggttcgggcccgagcaggcattcccctcgtgcacggttctagacctagcaccctcagagccaggcaggctttgggcctagtggcctcgagcccacccagacttggccaagcagccctcggccagaccaagcacactccctcggaggcctggcagggcccctgctttaccctgccccccacgccccgccccgacccgaccctcccaggcagcccctcagcgtctgccgcccgcccttgggcctttccggccagcccctccctccgcccacgcccagaacagcccatgctcttggaggagagcaggtgggcttgaccgggactggcccctcaccgcggaaggcgtggccggaatgctcggcccactccgtctttggcttgtgggctctgcctcgtgcaccgcgtgctgcagcccacagccggccgccgccgggctggcgcgagagtggagggtggcagtgcgcaggcgcggagcggaaaagagggggcgtgaagggggcggagccaggcagggttgggggagggggtgatgtactgtgggggcaggggggaaggggagtagggagggggagggggagcacggatgaggaggaccccagagggggcactggtggacctgggggggtggatgaggaggggaggagggtcccatacagggcactgggagacctggggtgggggtggataaggagaggaggagagcctgcagggcactggaagactgggtagtgggggagcgcctaaggaggggaggagggtcctgcaggggcacggaaataccttggggttgaagtggatgaggaagggaggagggccccgcagggggcgctgggagacccgggggggaagtaaggagggcacgagggcctgcagggggcctgggagatctgagggggaatggataaggaggggaggagggcccacaggaggcactgagatactggggggaggggtggaatgagggggggaggggtggaatgaggcggggaggatagccctgcaggggggctgggagacctgaggggggtggtgggtaatggataaggaggggaggggggcctgcagggggcctgtgacacctaggggaggggaatggataaggagggtaggagggccaacaggaggcactgagataccagggggaggggtggaatgaggaggggagagccctgcaggggggcggggagacctgaggtgagggtaatggataaggaggggaggagggtctgcaggggttcttgggagacctgggggatgaataggagaggacaaggggaggagggtctgcagggggccctgggagccctgcggggggcgaggggtgggggaatggataaggaggggaggagggcctgcaaggggtgctgggagacttgggggaggggaatggataaggaggggaggagggcctgcaaggggtgctgggagacctgggggaggggaatggataaggagaggaggagggcccgcaggaggcactgagagactggggggaggggtggaatgaggaggggaggagagccctgcagggggcgctgggataccttgtgggggaatggataaggaggggagggggtcctgcagggggcgctgggagacctaggggaggggaatggataagggtgggaggagggcccgcaggaggcactgagatactggggggaggggtggaatgaggaggggaggagagccctgtagggggcgctgggagaccttggggggaatggataaggaggggaagagggccctcagggggcgctgggagacctgggggggaaatggataaggaggggaggatggccgcaaggggcactgggagacgctggcggggaatggataaggagtggaggggggcctgcaaggggcgctgggagacctggaggggaaaggataaggagggaggagggcctggagagggcgctgggagacttgggcgggggtggagggaatggataaggaggggagaagggcctgcagggggcactgagacctggtggggaatggataaggagggaggagggcctgcagggggcgctggggaacctggggggcttggataagaaggggaggagggcctgcagggggcgctgggagacctaggcggggcaggggtggggaatgggtaaggagggaagaagggccttgcagggggcgctgggagacctggggtcgggg

SEQ ID NO: 1561747 - DNA, 4001 bp, Homo sapiens
taggttgatcctcttgttcttccacatttgaatttgaaactgtgagaacaatttcgtcacttctttcatctcctgacattgtttccacaaaaaagagctgctcctttgttctttcagccaataactggttcttctcctgctcttcctcgagctaataaacaacaaatattcaaatatgatactattgatttcagtataattagacttttgcctggatgaagcacagaatacaaaaagaaaagccaaagtggaagattatgcatcacaatgttaattatttcgcatcagggttgtggcagtgaaacttaacacttttttttaaaacataatgcgccttacactattccaattagcaccacttttaaaactcttttttaaaaaagaacctaagaactctcaagattttcctgggaagtatttgtactgtctttaatttgcaactgcaaaataccttgtccagacataatattgcataaaagccgacttgaattttttctttttcatgtaaggggttgtttattaaaaccagctgtaccttgatcagtccagtagtttcagccaggctcaccgctaacttactgtcttcactggccaccatcacattctcctctagagcgtggaactgcaacacctccatctcttgcggggagtacagctcttgctggatactaatggccacacactgctgcaggctctgccggggcccttcctcaagccacagcaacccagggccaggctgttgcaccaccacctgcaccccttcttgctgctgtatgctcagcaagctcatatcctgcaactccacagcttcagaagtgaagtgcaccgtctgcagggtcaggatgtacttctcgctctcctccgagggggccagcaccagctccacttcttcctccaggacgctgtcctggaaggccccagaggtacgctcggcctccaactcactagggctccgatggtctttctctctgcacactccgtctttttcctcctccttcaggcctttttccggcatcaactcgagttctttgatcttggtgaattgctcagaaaggacagagatctcagtggctgccataatgacttggcctgtttgaaaaataagcaagcggtttccataggggggagaagggggtggtatgaggagggatgcggggggtgctggaacctagcaggctttggagttgaaacaaggtctggcctcaaaaggttttggacttagtagggtcagaacaatgctgatctggcttgggtctaggagggggtcaaggctaagcaggatttaggctaaagcaggattttgtacaaaaccctagaacgaacaggtttgggcctcagcaggcttagggccagcacacatcctgcgcctggcaaggttccgcctgagcacactctggcccagtgcatatcctgggcctagcaaggttaggcctgagccggttcagtcagtgaacatcctgggcctagtaaggtttgggcccagcaggctctcggccagtgcatatcctgggcctagcaagtttcaggtccaagcaggccccgggccagtgcacacccggcgcccagcgaggttcgggcccgagcaggcattcccctcgtgcacggttctagacctagcaccctcagagccaggcaggctttgggcctagtggcctcgagcccacccagacttggccaagcagccctcggccagaccaagcacactccctcggaggcctggcagggcccctgctttaccctgccccccacgccccgccccgacccgaccctcccaggcagcccctcagcgtctgccgcccgcccttgggcctttccggccagcccctccctccgcccacgcccagaacagcccatgctcttggaggagagcaggtgggcttgaccgggactggcccctcaccgcggaaggcgtggccggaatgctcggcccactccgtctttggcttgtgggctctgcctcgtgcaccgcgtgctgcagcccacagccggccgccgccgggctggcgcgagagtggagggtggcagtgcgcaggcgcggagcggaaaagagggggcgtgaagggggcggagccaggcagggttgggggagggggtgatgtactgtgggggcaggggggaaggggagtagggagggggagggggagcacggatgaggaggaccccagagggggcactggtggacctgggggggtggatgaggaggggaggagggtcccatacagggcactgggagacctggggtgggggtggataaggagaggaggagagcctgcagggcactggaagactgggtagtgggggagcgcctaaggaggggaggagggtcctgcaggggcacggaaataccttggggttgaagtggatgaggaagggaggagggccccgcagggggcgctgggagacccgggggggaagtaaggagggcacgagggcctgcagggggcctgggagatctgagggggaatggataaggaggggaggagggcccacaggaggcactgagatactggggggaggggtggaatgagggggggaggggtggaatgaggcggggaggatagccctgcaggggggctgggagacctgaggggggtggtgggtaatggataaggaggggaggggggcctgcagggggcctgtgacacctaggggaggggaatggataaggagggtaggagggccaacaggaggcactgagataccagggggaggggtggaatgaggaggggagagccctgcaggggggcggggagacctgaggtgagggtaatggataaggaggggaggagggtctgcaggggttcttgggagacctgggggatgaataggagaggacaaggggaggagggtctgcagggggccctgggagccctgcggggggcgaggggtgggggaatggataaggaggggaggagggcctgcaaggggtgctgggagacttgggggaggggaatggataaggaggggaggagggcctgcaaggggtgctgggagacctgggggaggggaatggataaggagaggaggagggcccgcaggaggcactgagagactggggggaggggtggaatgaggaggggaggagagccctgcagggggcgctgggataccttgtgggggaatggataaggaggggagggggtcctgcagggggcgctgggagacctaggggaggggaatggataagggtgggaggagggcccgcaggaggcactgagatactggggggaggggtggaatgaggaggggaggagagccctgtagggggcgctgggagaccttggggggaatggataaggaggggaagagggccctcagggggcgctgggagacctgggggggaaatggataaggaggggaggatggccgcaaggggcactgggagacgctggcggggaatggataaggagtggaggggggcctgcaaggggcgctgggagacctggaggggaaaggataaggagggaggagggcctggagagggcgctgggagacttgggcgggggtggagggaatggataaggaggggagaagggcctgcagggggcactgagacctggtggggaatggataaggagggaggagggcctgcagggggcgctggggaacctggggggcttggataagaaggggaggagggcctgcagggggcgctgggagacctaggcggggcaggggtggggaatgggtaaggagggaagaagggccttgcagggggcgctgggagacctggggtcggggggaggataaggaggggcaatgggagaggatggggaatggggtgcttagagacttgggtgggaaatggacgcagcagggactgggcggggagagaccttacaagggttccaggagatgggttggggtgggctggacagggcagagtggagggtgaggagggccctctgtgagccacagagacctgagcaggagctaggtgggggctgggaatgtgcaggaaaggagacgtggaaggagggggagatagggcggcaggggtg

SEQ ID NO: 1561748 - DNA, 4001 bp, Homo sapiens
agcatctgcttgaccagctgtaggttgatcctcttgttcttccacatttgaatttgaaactgtgagaacaatttcgtcacttctttcatctcctgacattgtttccacaaaaaagagctgctcctttgttctttcagccaataactggttcttctcctgctcttcctcgagctaataaacaacaaatattcaaatatgatactattgatttcagtataattagacttttgcctggatgaagcacagaatacaaaaagaaaagccaaagtggaagattatgcatcacaatgttaattatttcgcatcagggttgtggcagtgaaacttaacacttttttttaaaacataatgcgccttacactattccaattagcaccacttttaaaactcttttttaaaaaagaacctaagaactctcaagattttcctgggaagtatttgtactgtctttaatttgcaactgcaaaataccttgtccagacataatattgcataaaagccgacttgaattttttctttttcatgtaaggggttgtttattaaaaccagctgtaccttgatcagtccagtagtttcagccaggctcaccgctaacttactgtcttcactggccaccatcacattctcctctagagcgtggaactgcaacacctccatctcttgcggggagtacagctcttgctggatactaatggccacacactgctgcaggctctgccggggcccttcctcaagccacagcaacccagggccaggctgttgcaccaccacctgcaccccttcttgctgctgtatgctcagcaagctcatatcctgcaactccacagcttcagaagtgaagtgcaccgtctgcagggtcaggatgtacttctcgctctcctccgagggggccagcaccagctccacttcttcctccaggacgctgtcctggaaggccccagaggtacgctcggcctccaactcactagggctccgatggtctttctctctgcacactccgtctttttcctcctccttcaggcctttttccggcatcaactcgagttctttgatcttggtgaattgctcagaaaggacagagatctcagtggctgccataatgacttggcctgtttgaaaaataagcaagcggtttccataggggggagaagggggtggtatgaggagggatgcggggggtgctggaacctagcaggctttggagttgaaacaaggtctggcctcaaaaggttttggacttagtagggtcagaacaatgctgatctggcttgggtctaggagggggtcaaggctaagcaggatttaggctaaagcaggattttgtacaaaaccctagaacgaacaggtttgggcctcagcaggcttagggccagcacacatcctgcgcctggcaaggttccgcctgagcacactctggcccagtgcatatcctgggcctagcaaggttaggcctgagccggttcagtcagtgaacatcctgggcctagtaaggtttgggcccagcaggctctcggccagtgcatatcctgggcctagcaagtttcaggtccaagcaggccccgggccagtgcacacccggcgcccagcgaggttcgggcccgagcaggcattcccctcgtgcacggttctagacctagcaccctcagagccaggcaggctttgggcctagtggcctcgagcccacccagacttggccaagcagccctcggccagaccaagcacactccctcggaggcctggcagggcccctgctttaccctgccccccacgccccgccccgacccgaccctcccaggcagcccctcagcgtctgccgcccgcccttgggcctttccggccagcccctccctccgcccacgcccagaacagcccatgctcttggaggagagcaggtgggcttgaccgggactggcccctcaccgcggaaggcgtggccggaatgctcggcccactccgtctttggcttgtgggctctgcctcgtgcaccgcgtgctgcagcccacagccggccgccgccgggctggcgcgagagtggagggtggcagtgcgcaggcgcggagcggaaaagagggggcgtgaagggggcggagccaggcagggttgggggagggggtgatgtactgtgggggcaggggggaaggggagtagggagggggagggggagcacggatgaggaggaccccagagggggcactggtggacctgggggggtggatgaggaggggaggagggtcccatacagggcactgggagacctggggtgggggtggataaggagaggaggagagcctgcagggcactggaagactgggtagtgggggagcgcctaaggaggggaggagggtcctgcaggggcacggaaataccttggggttgaagtggatgaggaagggaggagggccccgcagggggcgctgggagacccgggggggaagtaaggagggcacgagggcctgcagggggcctgggagatctgagggggaatggataaggaggggaggagggcccacaggaggcactgagatactggggggaggggtggaatgagggggggaggggtggaatgaggcggggaggatagccctgcaggggggctgggagacctgaggggggtggtgggtaatggataaggaggggaggggggcctgcagggggcctgtgacacctaggggaggggaatggataaggagggtaggagggccaacaggaggcactgagataccagggggaggggtggaatgaggaggggagagccctgcaggggggcggggagacctgaggtgagggtaatggataaggaggggaggagggtctgcaggggttcttgggagacctgggggatgaataggagaggacaaggggaggagggtctgcagggggccctgggagccctgcggggggcgaggggtgggggaatggataaggaggggaggagggcctgcaaggggtgctgggagacttgggggaggggaatggataaggaggggaggagggcctgcaaggggtgctgggagacctgggggaggggaatggataaggagaggaggagggcccgcaggaggcactgagagactggggggaggggtggaatgaggaggggaggagagccctgcagggggcgctgggataccttgtgggggaatggataaggaggggagggggtcctgcagggggcgctgggagacctaggggaggggaatggataagggtgggaggagggcccgcaggaggcactgagatactggggggaggggtggaatgaggaggggaggagagccctgtagggggcgctgggagaccttggggggaatggataaggaggggaagagggccctcagggggcgctgggagacctgggggggaaatggataaggaggggaggatggccgcaaggggcactgggagacgctggcggggaatggataaggagtggaggggggcctgcaaggggcgctgggagacctggaggggaaaggataaggagggaggagggcctggagagggcgctgggagacttgggcgggggtggagggaatggataaggaggggagaagggcctgcagggggcactgagacctggtggggaatggataaggagggaggagggcctgcagggggcgctggggaacctggggggcttggataagaaggggaggagggcctgcagggggcgctgggagacctaggcggggcaggggtggggaatgggtaaggagggaagaagggccttgcagggggcgctgggagacctggggtcggggggaggataaggaggggcaatgggagaggatggggaatggggtgcttagagacttgggtgggaaatggacgcagcagggactgggcggggagagaccttacaagggttccaggagatgggttggggtgggctggacagggcagagtggagggtgaggagggccctctgtgagccacagagacctgagcaggagctaggtgggggctgggaatgtgcaggaaaggagacgtggaaggagggg

SEQ ID NO: 1561749 - DNA, 4001 bp, Homo sapiens
tagctccccattgctgaactgttctttcccatgatgtcttaagcgtccagggtcaatttcttgtactttggctgagggagtggtatgaaaataactgctaatatttactgaatgtttactctttggcaagcattgtctaaggactttccatttctcaacagcttcacaacagccctgtgaggcagctaccgtcactgtcccccatttacagatgaagaaaccaaggcagagagaaattaagtattttgttcaaggttacagcagccagttagtagcaaaacagagactgccagcaacctaggggtccagactcatggctcttaatcacctattcttgactgcagggctgtctaacaaaaatataagctgaactatatatgttgttttaaattttctagtaaacacattaaaatgtcaagaggggcagttaaaattggttttaaacatattttattggctgagtgtggtgtgtggtggctcatacctgtaatcccagcactttgggaggccaagtgggaagactgcttgaggctaggagtttgagaccatcttgggcaacatagcaagaccctgtctctacaaaaaatttaaaaatcagccaagcatagtgatgcctgcctgcagtcctagctacttgggaggataccttagacctaggagtttaaggctactgtgagcaatgattgtgccactgcactccagcatgggcgacagagcaagatcctgtctctaaataacaataaaataaaattttaaaaattaattaagtatattttatttcacccattatccaaaatatgatcatttaatcaatatgaccaataaccaatgtaattgatataatcagtacgatcatgtaatcaatataaaaatttcactttttccatactagtctccaacccaaatgtgtctttatacttacagtatttctcaattcagactagtcacatttcaagcaatcaacagcctatgtggctagtggctacgacattcggcagtgcagctctactgctcctcgcaatgaccctcctatggaatcaaagtgggggaaaaactttggggtggaagtcagtacgcctgagctcaaattccagctccttgtttctgagtgactttggacaagccctttctgctctctaggtcccatacagtttccccacaagtttcctaggcaagggggaccctgagcaagattcctagaaactcattccatgctagaattcccaacatctcctgcaaatcgcagtaaacacaagcacagctttccacactttaaaaccagctttcatacatatcagttggtacagtcctcaaacaaccctactaaggcagttattagtgtctccactatatagatacaaaaacttggttcaaagagggggggaatgacttgtccaaaagccacatagccagtcagtggagaagctggagatcaaatccaagtgagaccagtgcactcccaccgccgccaccaccatcacctcaatgactggggggacatgagagctgagaggacatggttgtgaaaaaaaggatagtctggggtttcagaggagtttcagggaaccaggccccagggtgaggaagaggaggtgaagggctcaggtcttgagaagggatgaatcgaaagggcccaggagggcttcggagagcaaagtaaaacgaggggctgagaccccgggtggcatgagaagttagagggcccgggagtgaggcgagaggaggtgagatgaaagggctctggctcctgcgacccctgcccaggtgagaacgcggtcgctcggccctccctgcccctcatacctggtagctcagaagttcgcccacgtccatggtacccggcccagcaaatactccacttccctgcactcacgcccagaccgcgggcccgtcagccgcggctccagccacactgccgtaaagtgcggcgagcggagccgcagagccaatagggcaaaagtgcgagcgacaagcgagccggccacaccgcggtaaaaggacgcgccgccgtaaagcgcgctgcatttggaacagggttgcttccgcctggagcctgagggggcggggaaagggggcggagacttagaggaggggcgggaggggagagcagggaccagaagaaaccaaacttgattgcgcgtccctagtgtccagggcggagtgccgggtgtttcgtgtgcgctctcacgagcttccagtgatttatcctcatttcacagaaaaggaaactgacgctcccaactgcaccatccaatactttactcactagccacatatggctaccgagcgcttgagatatggctactccgaagtgagatgtgccataagtgtaaataaaatacacaccagatttctaagacttacattgattacaggttgaaatgatattttggatatactgggtcaaattcatatattataaaatgaattttacctgtttctctttacttcttaaatgtggttagtagaaagttttaaattacacatgtggctctcatttgtggttcccattaatttctatcagatagtgctggctcaaaaagtgacttgttccaaggctgtacaactattactggctgagaaactattggtgatcacatgtccctctctaggcttgtgtctgctcatctatgcgaagtctaacggtcactagatgatccccttgctacccaggtgatataaaaaggtttctggaggagaaagttgcccataattggaagagaatcattcagagtgcatctgatcttaaacaagatcagaatgcacctgggacttaaggctccatcttcaaaggaaattaaacctccttccataagcccctgtcctttatatttataattatatttatgtattatattatatttatatgcccttcatatttataattttggtccccatcccatctgcactggctccaattatacagaaattattcttattcctcagaatgacaaatcctctccccttctgcctggccatcagcaccatacctcatccaattctctcatctttcgggtctcaaatgtcactttcttacaagggcttcttcaactcaccctggtccaggtaatcaacctctctcctcattattctttttccaagtacctgctccactacgtatatatctcattctgtaattttgtgcttaatggttgactatttgtttcttgacagcctcatttactggattgcaagctctatgcaagcaggacatgtgtgtgtcatgttcaccactgtatcccccaagcctagtacagtgcctggtagagggagaggtttcataatgggccttgtgtgccatggtaaagagattagattttggctaggcgtggccgggcgtggtggctcacgcctgtaagctcagcactttaggaggccaaggcgggcagatcacttgaagtcaggagtttgagaccagcctgaccaccatggtgaaacctcgtctctactaaaaattacaaaaattagctgggcatggtggcacatgcctctacttgggaggctgaagcaggagaatcgcttgaacccaggaggcagaggctgtagtgagctgagattccaccactgcactccagcctgggtgacagagcaagactctgtctcaaaaaaaaaaaaaaaaaaaagagagagagattggattttatgctaacggcataaggaaagttttaagcaaggtagttttgtgactgggcttatgtttttaaaggatcacctatgcaatctgcattgaattcagtctatttgggtgtctttccccctcctacttatataagaatatggactgtgcccggccgggtgtggtagctcacgcctgtaatcccagcactttgggaggccgaggagggcagatcacgaggtcaggagattgagatcttcctggcccacatggtgaaaacccatctctactaaaatacaaaaaattagccaggtgtggtggcacgtgcctgtagtcccagctacttgggaggctgaggcaggggaatcgcttgaaccagggaggt

SEQ ID NO: 1561750 - DNA, 4001 bp, Homo sapiens
tcagtctgaccttgctaactgtaaggccacagcctcaagctacctcccttccctcctgcagctaccctgcacctgaaggttcatgctgggatcctgcatgaccagcacggccagggtggggatgtagatgccagcatagctctccccggtcaggaaaagtttgttgttcttgtactccggaaagaggcggaagaaatcttgaagggcctcaaaattgctctgggcgacctggggatggcagagcaagacagagggaatcaggaagctttggtatttgaactggaaagaacttcagagataatgacattaacccaccctatttgtgcaagaggaagtgactggccaccataccacaatagcatatgacagagcgaaaagtagactccaaggccatgctctctctcccagcatcatgccatggatggaggaccggggagcctggggcagatgggcaggcaccagactcacctcagtgtcattagttgcataaaacttgtcatcggagtaggagaagcccaccccagctggggactccaggtataacacattggcaatctagaggggagggaaaaattagctaaatgccaccccatccaagtgcccagacacacccacagctccagctataccagattccaagaataggggttgtactccagggtgacaccatctggctggacctgaggaggaaagagatggctgagtaagtcccaagggccagctgggtggagggaaagggccaccatgagaggcactttacatgtgggtaaaacctctgagaggtacaggcagcaaagccaatggcatagaggaaaatcccgaggcttagaaggaaggaaactttttggaaaatcacaaagcccctctctcgctttccccagccttttactttgggaactgtgctttccccctgctgtccactcaccaggaaggggccatgctctgtgaggagcccatctagtgagctgcagccgggacccccattgagccaaagcaccacagggctgttctcgggatccttctgggactccacaaacctgggaggggggtcagggcagggttggcgcagttggaggggccctttccagccctcccggctcccaggcatcctcaggggtctgcagaactaccccccatccctcatccgtcatctcttctcccaatcccgcccagaaggcagggcggcagaccagtagtggaggtgcttggagccggagcctttgaggtagccggagtactggcggaaagacggctgcttggccagcccggggaggcgctggatctcgtcctggtcgggggctgcctcgcctcgggacgcccaggacactagcagcagcagcagcagcagcagcaggaacagcggcggcggcgcggctcggatcatctacgggaggcagcagaggggctgttgactcgctcctcagcgcttccgtgcagcagcccccggggagttgctggcggcgcctccgcgagggaagccccggccccagcgccagctcccacccgcgagcctcctctgccgcgcaccgatcccgggctcggggatcccctccagcctccggtgccagctcacctctgctcccccgcgtccttgctctccaggaggcgcccggggactggaagtcatgtgtacgagtcacgtgaactccggcgccacgtgacagtcttcctcccgccccttctttggtccctacggacctggggggcggtggcggtcaatgccgggtcaaggtccgcgggcctcgcagatcgtagcccgggcgcacgcgatcagatgatcctgttgtggacggctaagttgtaggcgggatggctgagaaagcggcgctaggacccccgggcagaggctcggggaagggagtcaggggggaaatgccttacaaggtcgccttgcggtcaccatcattgcccgccgcccaaaatagcccccggcgccagctggcctgccctatggccgagagatggctgctgcctccgagcccgtggattcgggtgcactctggggactcgagcgcccggagccccctcccacccgcttccatcgggtgcacggtgccaacatccgcgtggacccctctgggacgcgggccacacgcgtggagagcttcgcccacggcgtgtgcttcagccgcgagccgctggccccgggccaggtcttcctggtcgagatcgaggagaaagagctgggctggtgcggacatctgcgtctcggtctgaccgcgctggaccccgccagtctggcccccgttcccgagttttctctgcccgatctggtcaacctgggccacacctgggtcttcgccatcacgcgccaccacaaccgcgtgccccgggagggccgcccggaggcggaggcagcggcccccagccgacctccaaccctcctcgtggaaccatatctgcgcattgagcagtttcgcattccccgggaccgcctggtgggccgcagccggccagggctctacagccatctcttggaccagctctatgagctgaacgtgctgcctccgaccgcgcgccgtagccgcctgggtgtcctcttttgcccgcgccccgatggcacggccgacatgcacatcatcatcaacggcgaggacatgggcccgagcgcccggggactgccagctgcgcagcccctctacgcggtggtggacgtgtttgcttccacaaagagcgtgcgccttgtccagctcgagtatggctgtaggtatccctgggcagcgacccctcctggctcagtgtggggactggaatctactagggctccgtagcccatgtgctaggccttcgtctgtccggcactagtttaagagtgggagaatctagcttcaaattgcacctctgcttgtgatcttgcacaagcctctacatggttttgggccttggtacctatcttggttgattgattaagatgccctacaagttcccttttagttttgatagtgtttcctgtattcacctagggcagggattctaaaccaattttagatattaggggcctctttgagaattgtttgcccttttcttagaaacatgcttggccgggcacagtggctcacacctgtaatcccagcactttgggagggggaggcaggcagatcacttgaggccaggagttcgagaccagcctggccaacatggtgaaagcctgtctctactaaaaatacaaaaagtagctgggtgtggtggcatgtgccaataatcccagctattcagaaggctgaggcaggagagtcacttgaacccgagaggtggaggttgcaatgagccgagatctcaccagtgcactccagcctaggcaacagagcaagactctgaaaaaaaaaagaaagagagagagagaggaagagagagaaagcaagcaagcaagcaagctagctagctcaagcctgggcaacaaagtgagaccccatctgtacaaaaaattaaataattatctgggcatggtggtgcatgcctgtagtcccagctatttgggaggctaaggcaggaggatcgcttgagcccaagaattgaaggctgcagttcactgagcactgcacttcagcctgggtgacagagcaagaccctctctctttaaataaaaaaaaaaaaagaaagaaaagaaagaaacatgctcatagacttgggcatattggctattggcttcgaggcataacaaaccccagactgagagcttcttaatgctgagtatgattcattatagccctggtaagcattgcagttatacctctcatcacatttcatgaactcaatgcaccagaaccctctttgtgccaggcctgtgctggaggcttcagttgcacaggcaaatcagacactacccctgcccccagaagctgctaagtgaatggggaagggattgtgctaagtgttatgatataaacagggctgcagctttgtggcagctctcaggaagaggtgcttctctcagccccatgaagcaggctgggcccagagagcagtaaggacttgcccacatttaatgacaaagtggggac

SEQ ID NO: 1561751 - DNA, 4001 bp, Homo sapiens
tctggggtccagaccctacccccagagcaagaacccctcattcacaagactgagcccatcagacatcctggcacaaagcccaggcttccgggctcaaatctcagctgtcactcacactatgctcaagcctccccatctctctgcaaaaagcctgcttcctcatctgcaaactggaagcaatcatggcattgaggaggcgtcagtgagatggagcacacgcaaacgcatgtcccccagccttggcccacagcggcagccacactgtagtctatccttttcacatgggtgtacagcaggcctgacccatgaggaccaaggccagggaagaggcaacagcaccacagtgctcatgggccaaactcccaggccacgcaagtcccatctccaggggaaatccaggctcctggaccctgtgctgtgactggagaggggatagcagagtcccttccaaatgctgtggggtgggcctggggctggtttgcagctgtcccttctcccgccttctctcccaaagcagggtgcagcagcctcgttgatagggagggccttagtttccccttcctctttgctaagagcctccctaccctactcctgccaaaagcctaagatagaaacccaccaggctggaggtagtgaccaggttaggccatgggctgtagccaactagcctcacccaatattccaagcccaggacaggctttcatctgtgctgagaagcagtttacttctgtatcctcaaatacagcctggggactcagtgattttgcatttctgtttctatcccaatggctgaggtcacaagctttgggggagagagggcacctggcagccacttgtcactgggattcagtcctagtcctgcctgtcacccaaaagccccagaatgacccagcttgggtcacctcagcagagggcaaaggcccgcgctcctcggccttagcaccccagcccaggctgacctggccttgaatcacaggcccctggaaccgcgggctgagctgcctgggcctataaacaggcagccgggatgggctttcctggcccacagtcaaagggcggccactcacccgccatagcgctggtgctggcgtgggcccagcaggagccgcagtattgggggatgtgctggttccgggtgatgctggcatagttgacaccatccacattgcgccagtcccagctcttgggcagatccgctggggacaggtactcatgaggccgggggtatgtgctgagaagagatcatccccacccagatcggtgctggggctcccgggggccgtgggcccaggaagccctcggtagggccctcccgcctttcccaacacctgagggcatgggagtggggccacaatcaccagaggtgagccaggtgtgggcccacctcacactaggaggctccagcgctctcagaatgtgaaggaggcagggcacccccgaaaggagggaaccgggttgctcccccagccatgccgcgccgtaagggccacccccagaggccgaggaggtggggctggcctggctttctggccaggtggggcttgtccaaccccacaaacatcagggctcaccctggatgtggaagagaaggagcgacccccaaaacgaagcggctggatctgaccttccaaggcctgttggcgacgcagggcccccaggaggcagagcgcgcgcctggcccgggcgatgggcctcccgtccccccagggctgcctccccgccggtgcccacctgcgccccagcggagccagcccgtccccccgcagaggccggtagcaggtctgtccccggcggaagtagaggccgccctgcgccgcgcccgccagcagcacgagcagcagaagcggccgccaccctggcccgcgcctcgccatggccccgcgccggctcctgggtcccgctccggatcccgctccgagtcccagatcccgcgccggctcccgctctggatcccgccccggcctcggcctcggcccagcacccggccgaccccgcactttgggcccctgccccgcccggcccttaaggctgcggcggccaggccgggacactcccccggggcggggctgtcccatcgctgctcctgccccgcccggtgacccctgccctccccgcccggctccgcgccccgctccctccctggctccggggcacctgaactcgcgggccaggcgcgaggtcgccgggcagaccccagcctgaccccgccgccggccgccgccctgagcgcgggactgtccggctggactcatttgccggggttcctggcttcggggtggggggccgcaggctcatgggcccccttggccctgcattcctggggccctgagccctggggagaggcccccagcctcacatctgggcccaggcctcccctaggaagggatcctgggatgcggccaccgcccccaaagaagggtccccgcgcctggctttctaaaccccttttcccaaaggcccaggccctttcggggggacggttcccttttgcagagaaggaaggagggatccttctagaaaatgccccaaaggaagattccacttggcgcaggcatcaggagttatccaatgtgacttccaaagacgccttgaaaaggttttctgctaacgaaactcttcttagtcaaatgaggaaccaaaagcagaagtggccccccaggacgtggttttgtaactgggggagggcttctcgctccctgcggcccctctgtttgtcatggcccttgggcccacaccatggccttcttctctggtaagaacagggcccggcattctgggctgcgacctgacaggcccctgctgggggcccttggcacagggcccacagatgagcttgcctgactctctccatactcagtggcactcaccacattccaagcgtgccacgtgggcaaggggaagtcacagtggctgcctcctgacttccagaagcttccatgaccattcccggaagcgctgaggtggccatggaatccccgcatgactgtccgagtggagagcaaggctggagagctgcttcgtcagcccagaagtttcagtccttgttccccaaaaagtggtcactgaggcaaagtgtggccccggggctctacctactgatgtgtctcttatttgtttggcaagtcgctcatggaaaccattagtgtccatcagtcatcagaaggcggggtggggtggccatcctgggagaagtccccaagcttgagctggcggtgggggtgggagcgaggcctcccaacctctgggcataaaaggagtggaaagagaattgccaagagggggcctttcttcctcccatgtcaaccctctggcctccctgactataggagctgggtccttgtgaggaagaaacccagacacagctgcccttgccaggtcatcaggtggcatctaccaaagcggccggtttttggcttcttctaaagaaaaagctaagaactcacaaaattgtgtggtaagagatatcgtgcccctccctccaggtacccatagttatgatccaggtactgtgaagtccaacagcacattctacagcatgagaaacaagcctggagaggggagggccccttgtgcttggcctctgatgcctgagctgtgatgtcctgggccctggtccctgaatctgggtgaaaaggcacccaaggtgtaagcttttctttcctgtagcatggggagagctggggtgctctgaagatgccccgagactctccgagcaggtccagcgcatgtagaaggtatgacaggcatggtcagcaaggcaggcacacgacccctgcagtcacatgaggccctaagtccagaagtgtaatgcagagctgaacgaggggctctccaggttcactgtgccctgggccctgcaaattatgtagctgggtctgatgacagcaaccacacctgctccatcacaagtcctgtacatcacccgctttcagcccagagcctctggcaaatcaaactcacaaacaggggtcaggaggaggggtgagatggtcaggaagggg

SEQ ID NO: 1561752 - DNA, 4001 bp, Homo sapiens
ctggggacaattcctagcggtaaaagggggcatgtgaacaccccatcaccagcaactcagatctgtttgagggaagaatcttgtcttctttcaactcattggtgtgggcttcatatttacaaaatatctcagatttagaattttgccatcgcctccaaataataacatacagtcagagagtcactggagtaataaaaagccttttgcgatcgtgcacttgtaggcacctgccccatagcagaccatacagcctgtgaagcaccgtgaattaatagggtttttaattccagtcattatatcctggaaaatataacgattaggcattacagtttgggggtaaataaaggtgctaacttgttaaatgctaacaactaaaaagcagaagaatcacatcccatagtagcatttgtcgacctaaaacacaactttgatatccctccttattccacctttacaagtagaaataaggcatgtcccccaatcctctgcagaaaatgtcactgtaaaaagccaaagaggctaactcctcgcttttgagcttacaaggtgtttcagggagttttaagggataattttgtttgtataagatgtttgcctggtacgctgacttcagaacctcatcctgcccaagagtctgaacaccacagttggtacaaccctgttttggcgtttctttgatgggagggtgtggccctgccctgttgccagagagaacgcaggtgctgggtgcacagcacggcttttccgtggaccgactctaatctgtacaagagctcagggttgcgatggcacgggagaggggctttggtatccgccctacgtaagaagcttccaaccccagggaactctaactccgcctcttcacaatttccaggcgccgtcaggctcatcaggtctggccgcatgcccaggtccctcggattggactcacaggatcagcagcccgtagccttctttgcggtagtcgcgataggccttccacggtttgatctccagccgctgcgggtacgcgctctcggtgcggtacagcgcttccagcaggcatggcgagcccaggtgcaccgactcaaaggaacccaacttcatgcggaaaatcttgccatacttcttgtggtactccacctgcagccggccgggcacagcgcggtgtcagcgcgcatcctccgccgtgcccgaagcgctttccctcctcccgcctccttcctcctaggggaccggggaccctccctgcccagacgccgaagcgcaccatgcgcccgaggcgcgcatgtcggggagggtttggagcgccactgggagggcggaagagggaggagagagtcaggggcgcgaaaaggggtttaccagggtgtcgtgctgtttcttgagaccccctttccagagaatctgcagcaggctgcccagcagtggccagctggtggggcccggcagggcggccgcgttctgagtctcgccaccagctgtcagcgggcagactggcacctctcgcggctgaggggacgtgtacgccgtagatgtcaccagtctcgggggctgcctcggactgcgcagctgctgcaggaaggcggcaagcgagcggctcttgctgatgggggagctcatggcagcgggggacaccggagcgcgggaaggcaggaggatggggtggggcgaggttggtacgaggtgctagtgggagtcggggcttaacgattctgggaaaaggaagcaaagagggccagctggtgtgatggagcggggtgaggcgggacaggcagcagaaaggacctcggcgaggatgctcgacgctgcaccacgcgacagcctcagagcattggtgcctccttgcactggccgcaggggctggaagagggtggccggtgtctggggacctcttgaaaagggaaagctgggagtcctcctgttggtccgcaaggctgacctctagggtctggctggagccacggggaggtgtcaaggagggtagatgagatgctgctggcgctgcgtttcctcctgtccctctccatgttcctatgcccagggaccatgcatttatggagacagagcatgccctgggtggccaatgagcacgcagaggagggcggagtggcccccggctggccagactccgagggacgcgggacccaggggagggggggtggaaggaggatggagtcagcgaggtgagcgagggcgtccgggcctggggtgaccggggctatgttcgctgggcgcgggaggtggggtgggggcggcagactccaccccggagataacccccaggaagtcatgcgaagcccggagttcaccgggtgtgcttcgaacgcgcctccccgccctcccccggcgggcaggagccggcagcggcggccgtggttgccgcccggcgcttgcacaatcgcgatgccgggcgggcgaggtccccgagtgcgggcccagaaaagctgccggcgtctgccagggccccggggagcccgggcgcctcccggggagccagatacccccagcctggactgaagtgattttttttttttttttgcctttttttttttggaggaagtttggctttctgcgcctcccagggtggggaggatttgagtcttactgaaatgcaccagaagaggagactttcttaacttgagcaagaaggggagtttgtagaatttccttcctgctgtttcatgtttggttgttttgcagattaaatgaattaatgcacgtaaagcggcaacaacgaagccttgtctatagtcaacagtcaataaaagttagttgctgttgttacttctttaggaagttaggaaatgcgccttgagagcgtggcttgcaccaacgatgcttgaattcaggctgggccacctcccctatgtccactgcccgcctctgttcttctacaccgactaccttgtgcaaaggaggggcacacagagcttgaaaccaccgcccccagtactccccctctcccccaaggtgcgtcctaggcaggtccagtgacaaacatacacaatttctagagttaccgcggctggcaagagtagaactcgctttgctaattcaggaacggaagttggagatttttgttgattgttttaaagtggctcgaatcctttcaacctgatccaatacaaaactaccaccagccagggaggaggggagggacattctgtttcctcgccctgcttttcaattacgtgtctcagtcatttttgccccaagtgttggcaaatccttccctggtaaattcttttgtaagcctctagtttgtttcttaaaaatcttttgcagtccaacttaagctttaacaccatcatttctgatttgtctggaggggctaatgactgtttatgttaataaaaataatagctattgatatatactaaactttatgaatcttgtacatatttatatatacattgtatggtatatatgttacagcatacactatagattatgttatatgcaatacacactaaatatacataatatagtatagattgcatacagtatgtagattccatatgttatataatattctcatgaaagctttctagggcttatgataagtcaggcactgagctagacattttacatcattttttccgtttagttctcatctcagcccaatgtcaataaaatgaaataaaataaaaaacaaaaaaaaatcaaagacaaacaaaaaaacccttgactcttacagagctaagtaatttgcccaatgtcacagacgttaccattggctcaggtgggattcagacccaatattttctgattctaggctgggccctaaatagtacacccatatacatcatgctatgttatgtcactttttcttaaaccagagtgtctcagaatattggaagtatttcttaaatgagaattatcaccaagaggaaagtgggggggatcagaatgcctaccatgtcagtatgtgtggggcagtgtgaggcaaacgttttatgtgctgacggtggtgaaaaagaatagctctggctgagtgtagtggctcacgcctgtaatcc

SEQ ID NO: 1561753 - DNA, 4001 bp, Homo sapiens
tccagtgctgcagcccaccccttcccatccttcaaaacccagacaaaggctaaagcaactcctcccgcgcccctccttttctctccacccacacaaacacgtacacacgcatgtgccatctaccccaaacccttgctctgaagtcacaggcctgacttccagactaggctctgcccctaaggaaatcacctttctggtcttagtctccccatctgaaaatggcataaccaacctacctgcctcaaatacaagaccctgcttgtgaaggtgagctatttaggagactaccatctttcctttgaactccaacagctctttatgcgtccccctcctgggacacatctcactgacttatctccccattagtcagtgaggagcaattggaaaggcgggttctgggtccagttcagagcaggcctcctgacccctagggctgagaagctgagaccctgccagagcactgaggctatgggccagcccaggtcggtgcattcattcccattcgctcatctccttcccggcgttctgctctgagcccatcaccagaggcaagggagtttctagcttgaggatcagacgtcatcctccgcagactgccttccccacctcatctgcacccagcgtatcccagaccctggccagctccacgggcgccacagaggtggagagggacccaaccccgactggccaaggcagggccacggaagtctggggagaccgtgcggccgcgggctggcggcggaggagcgaggcgctgacgccgattcccgggaaaggctcttagagctgccgcccaggtcacaacgctaaaaatacccagggcccctggagcctgtgctccagcagcgaggagggggagggagaggccaaggtgggggagctgacgggggccaggggctctgggacaccccctctcttttcccctccccctaaccccaccgatctcacgagactgaaggagctgtcccccggggggccgcggagcccagagctggagaaagggagttgtttacgcgacctataggtactggaaagggggtgaagagatttgggggcaggaggctgccaggggccgggcaggagccagcgaaatggagaactccctctcggtctcagccccacccgcactggagccagcaagagggaaaaaattccctaaaaagggacacgaggcgtcggcggaggacggggggagggcgctcccccaaggccgttcccctcgtgctccggtcccctccgcggtccaccgcggcacctgcgcccaccgccgccggagcccctacctgcagcgctggcgccccctctgactcagtccgtccgctccagcgaggccgcggcgggggcgtgggagcgagccgcgccggccggggtggggctgcgcctccagggctcccgggggaccgacgggccctgggagccgggaacgaggaagaggcgggaggcggaagtgggggaggggcggtggcgggctcactcgctcgcagctcgcccggcggtcggaggcagcccctgcgagcgcggctactggtacttccaaggcggtcaaaaagttacccgcacccatccttcctccctccgcccagccggactcctctgcaccaccctcgccaccgacgccggtgcgctagtctccgctcgctcggatgcacttgctgcgcccccgccccgcgcagacccgcggcgggcgcccgcgccggttctgcccacgcacacttgatgctctgcgccttttgggcagcgcccacgcaacgactacgcacccgaaccctgcctccggcacccttggccacactcgccacacttacacgcgcgcacttctccagaggacgcacgatgggaaagagagagttgggacccgcaggagggggcagggcactgacccggtgccgcccagcagggcaggtgcaaggcggcggaggacccctgccctgggactcgcccggctgcccctgattcctggctctgggactagacagagccgccgcccaacctaccaagcacactgggcggggtgggcgccgggccggccgggcgggtcagagctggaagggtgggccgctacgccgcgccccccgacgccggcaaggagccagcacctccacggtgctaagaggggcgctgcgctgctggccaggcgggggtggaggggcgaggcggcaactgcgagaggagaaacgtttgccctcttttcgcagcgtctcctggctcagaccagtgctagaagtgtccagtctagcagctcctggaccaagactccgtggccattcccttcctcctgccttccatccacccccttacggtcagagctccgaaggcagcgtggtgacgggtgcggggaggggagtggggggatctctctgagatacttctgccttggggtcactggatcattcattcgacaaacatccgcgagcaagtcaggaactaggagtcatccttgccacctccctctccctcgctgcctatattaaaatacacctccatttcctgtcgattctctttcctaaatatctttccagtccaccattccttccgtttgccccaccacctcccgcctgggctcctaatgcagtaaccttctatctggttttcttttctttttttttttttttttgagacggagtctcgctctgttgcccaggccggactgcggactgcaatggcgcaatctcggctcactgcaagctccgcttcctgggttcacgccattctcctgcctcagcctcccgagtagctgggactacaggcgcccgccaccgcacccggctaattttttgtatttttagtagagacggggtttcaccttgttagccaggatggtctcgatctcctgacctcgtgatccacccgcctcggcctcccaaagtgctgggattacaggcgtgagccaccgcgcccggccctatctggttttcttgtactcattctggcccggctacactccattccctgcattacaagtcagctgtcatttcagaacacaagtctggtgtgcccccctcgacccccccgccacgcggcgttgcctaaattcctccactgttagaataaaatctggacgctgatatctgagctaagtcttgaagacatgagttcaacaagcagaaaagagggagaagggcatgtgcagagggagggaagtgtgaacaaatcattgacacattcaggtttccctgtcaggggaccagcactctgtacactaaagcactgcctcttaacattattgggatctcaaaacaaccctgtgagataaatacagcatgcaattttcccactagtttacaagcatggaaactagtttgtgggaggcaacaaatgcaatggttaagagcacaggcaatacagtcagaccctcttgggttgtaaacctattgattcctctagccagctgggtaaacacttctctgatccttgatctcttacctactaaagaggaataattaatccctccctcttataagataatttatataaaatggttagttacaggacttgggcactttggaaatgctcagtaatcgttagctgttttgatggtaatgggttctgagaaagggagggaactgctgtcttccacaaatttctgaaattataggaagtaagccctaattgttaacacttccacagagcttattatgtgccagtcactattataagtgctttacaaaaattaacccttttaatcctcttgctgtttccactttacagatacagaagttgagatacagagaggtgaaggaacttgtcccaggccctacagctagtaagtgatggacctggaatttaagcccaggtagactgcctctagagactgtgcttacaacccttttatcctgtgcctgttccccttttatcctgttgtagttttcatcttctaagaactatttcattgggttggtttgattcttatttctcattaatggatagagtagatacttcatctaattttctagcacagaaaatgagggccaagtcaggagtacagtggataagagcttagc

SEQ ID NO: 1561754 - DNA, 4001 bp, Homo sapiens
gcagatgggacagaggaaagacaaactctgtctctggctgtaaaatgtcctcgaagaatttttgccgctcccgaaggcggagctgctggcgctccagggcggcccgaggatttgggtccatgtcagctcctgcgggtagaggagcaaaacaagtacagctgcaaagtcgaaagagaagacagaggggacctgggcttggggcgccccactgcagccagcatcccaacagtggggcccctggctccggcctggacacctctgcccttggtgacctctttccccttccctgaaaccaagtgtgtcccacaaaccaagtctcatgcagaggcggggcttgccctaagctccacaaaggggatgccagttccaggcaccacaagagagatactctgtattcagggaacacagccaatgcccaactctccatatcatgccctcctgagaggggttggagggattggttcagcacaaatggaggaggtacgttttccccttaattggccccgcttgcctcagaaggccagggacaggataggatagagacagagatctcagggtggagggttcccttcctccagtgctgcagcccaccccttcccatccttcaaaacccagacaaaggctaaagcaactcctcccgcgcccctccttttctctccacccacacaaacacgtacacacgcatgtgccatctaccccaaacccttgctctgaagtcacaggcctgacttccagactaggctctgcccctaaggaaatcacctttctggtcttagtctccccatctgaaaatggcataaccaacctacctgcctcaaatacaagaccctgcttgtgaaggtgagctatttaggagactaccatctttcctttgaactccaacagctctttatgcgtccccctcctgggacacatctcactgacttatctccccattagtcagtgaggagcaattggaaaggcgggttctgggtccagttcagagcaggcctcctgacccctagggctgagaagctgagaccctgccagagcactgaggctatgggccagcccaggtcggtgcattcattcccattcgctcatctccttcccggcgttctgctctgagcccatcaccagaggcaagggagtttctagcttgaggatcagacgtcatcctccgcagactgccttccccacctcatctgcacccagcgtatcccagaccctggccagctccacgggcgccacagaggtggagagggacccaaccccgactggccaaggcagggccacggaagtctggggagaccgtgcggccgcgggctggcggcggaggagcgaggcgctgacgccgattcccgggaaaggctcttagagctgccgcccaggtcacaacgctaaaaatacccagggcccctggagcctgtgctccagcagcgaggagggggagggagaggccaaggtgggggagctgacgggggccaggggctctgggacaccccctctcttttcccctccccctaaccccaccgatctcacgagactgaaggagctgtcccccggggggccgcggagcccagagctggagaaagggagttgtttacgcgacctataggtactggaaagggggtgaagagatttgggggcaggaggctgccaggggccgggcaggagccagcgaaatggagaactccctctcggtctcagccccacccgcactggagccagcaagagggaaaaaattccctaaaaagggacacgaggcgtcggcggaggacggggggagggcgctcccccaaggccgttcccctcgtgctccggtcccctccgcggtccaccgcggcacctgcgcccaccgccgccggagcccctacctgcagcgctggcgccccctctgactcagtccgtccgctccagcgaggccgcggcgggggcgtgggagcgagccgcgccggccggggtggggctgcgcctccagggctcccgggggaccgacgggccctgggagccgggaacgaggaagaggcgggaggcggaagtgggggaggggcggtggcgggctcactcgctcgcagctcgcccggcggtcggaggcagcccctgcgagcgcggctactggtacttccaaggcggtcaaaaagttacccgcacccatccttcctccctccgcccagccggactcctctgcaccaccctcgccaccgacgccggtgcgctagtctccgctcgctcggatgcacttgctgcgcccccgccccgcgcagacccgcggcgggcgcccgcgccggttctgcccacgcacacttgatgctctgcgccttttgggcagcgcccacgcaacgactacgcacccgaaccctgcctccggcacccttggccacactcgccacacttacacgcgcgcacttctccagaggacgcacgatgggaaagagagagttgggacccgcaggagggggcagggcactgacccggtgccgcccagcagggcaggtgcaaggcggcggaggacccctgccctgggactcgcccggctgcccctgattcctggctctgggactagacagagccgccgcccaacctaccaagcacactgggcggggtgggcgccgggccggccgggcgggtcagagctggaagggtgggccgctacgccgcgccccccgacgccggcaaggagccagcacctccacggtgctaagaggggcgctgcgctgctggccaggcgggggtggaggggcgaggcggcaactgcgagaggagaaacgtttgccctcttttcgcagcgtctcctggctcagaccagtgctagaagtgtccagtctagcagctcctggaccaagactccgtggccattcccttcctcctgccttccatccacccccttacggtcagagctccgaaggcagcgtggtgacgggtgcggggaggggagtggggggatctctctgagatacttctgccttggggtcactggatcattcattcgacaaacatccgcgagcaagtcaggaactaggagtcatccttgccacctccctctccctcgctgcctatattaaaatacacctccatttcctgtcgattctctttcctaaatatctttccagtccaccattccttccgtttgccccaccacctcccgcctgggctcctaatgcagtaaccttctatctggttttcttttctttttttttttttttttgagacggagtctcgctctgttgcccaggccggactgcggactgcaatggcgcaatctcggctcactgcaagctccgcttcctgggttcacgccattctcctgcctcagcctcccgagtagctgggactacaggcgcccgccaccgcacccggctaattttttgtatttttagtagagacggggtttcaccttgttagccaggatggtctcgatctcctgacctcgtgatccacccgcctcggcctcccaaagtgctgggattacaggcgtgagccaccgcgcccggccctatctggttttcttgtactcattctggcccggctacactccattccctgcattacaagtcagctgtcatttcagaacacaagtctggtgtgcccccctcgacccccccgccacgcggcgttgcctaaattcctccactgttagaataaaatctggacgctgatatctgagctaagtcttgaagacatgagttcaacaagcagaaaagagggagaagggcatgtgcagagggagggaagtgtgaacaaatcattgacacattcaggtttccctgtcaggggaccagcactctgtacactaaagcactgcctcttaacattattgggatctcaaaacaaccctgtgagataaatacagcatgcaattttcccactagtttacaagcatggaaactagtttgtgggaggcaacaaatgcaatggttaagagcacaggcaatacagtcagaccctcttgggttgtaaacctattgattcctctagccagctgggtaaacacttctctgatccttgatctcttacctact

SEQ ID NO: 1561755 - DNA, 4001 bp, Homo sapiens
gtggtcctgtctgatgtaggcaccggcaggctcagctcctccaaatggttgtccatccctgcccagagagaaaagctggtcaggccacaaacagggcttcagagaactcttaaagattatctggccaggagtaactaaagtccacagtggggcagagacttgtccaaagtgactttgccaatccagcaaagagccaggattaagatcaccatctcctgactgccagctccttccacgtcattacaccatgtctgggatctacagtcaggtcaatgaatggcaagagttcaagttccacctacatcacttattgctgctgagtggctttgagcaagtcactttccctttcaaggactctgttcctcctctgcaaaataaaagggatacctacatccccaaagggttttgggaataaaacctaagaatgcttataaaatgtctggcatagtaagccatcaataaatagtagcagttttaattaaaagaatatctatcttacaagttaagcatatgggctttggagtcagacagacatgaattccagtttatctaccttctggctacaatgtgacttaacttctctgagcctaatttcctgcttataaaatagagattatatcacctaccctgacaggacgttgtaaggattgagataatatatgtaaagtactttagtacagtattggaacctactaaagtactcaatacatattaatatcattataatgactaaaactacttaagttgccaaatataaaaattacaattttacattattttaattatagtgactaattatattaatataacaaatgtaaaattaaagaagagattgaccgttcccagaattttggattagagatgtgtaacccagttctccctcagggtcaacttccctaaaatcagaacaggcagctgtttcattggtagaaacacccacttccagcccttacttgtgtacttccccagcccagccttgtagcctcgtttcagagcctgacatccggctctggctgactggcactgaagtccccaaagcagaggggcataccagacgactggggggttggtggaggatcttcgcaaggcaagaacacatctgctgcatccgggtccccaaggtcaataagttctacttgctccagtgtgtccacattcacttccatggatgagatactacctatgggggctgcggatcaagaagtgggcaagtcaggaggacccaagctgcacaccaggacagtgagagttacatgtcaggtcccaagttagaagcatagagggccaagaaaaccagaggggagagagtgccacaagattcaggacccacaggacatcctccctaccctaccccagtccctcttctcaggacttgggacttacgtctctgcgactcgagatgcagatgggacagaggaaagacaaactctgtctctggctgtaaaatgtcctcgaagaatttttgccgctcccgaaggcggagctgctggcgctccagggcggcccgaggatttgggtccatgtcagctcctgcgggtagaggagcaaaacaagtacagctgcaaagtcgaaagagaagacagaggggacctgggcttggggcgccccactgcagccagcatcccaacagtggggcccctggctccggcctggacacctctgcccttggtgacctctttccccttccctgaaaccaagtgtgtcccacaaaccaagtctcatgcagaggcggggcttgccctaagctccacaaaggggatgccagttccaggcaccacaagagagatactctgtattcagggaacacagccaatgcccaactctccatatcatgccctcctgagaggggttggagggattggttcagcacaaatggaggaggtacgttttccccttaattggccccgcttgcctcagaaggccagggacaggataggatagagacagagatctcagggtggagggttcccttcctccagtgctgcagcccaccccttcccatccttcaaaacccagacaaaggctaaagcaactcctcccgcgcccctccttttctctccacccacacaaacacgtacacacgcatgtgccatctaccccaaacccttgctctgaagtcacaggcctgacttccagactaggctctgcccctaaggaaatcacctttctggtcttagtctccccatctgaaaatggcataaccaacctacctgcctcaaatacaagaccctgcttgtgaaggtgagctatttaggagactaccatctttcctttgaactccaacagctctttatgcgtccccctcctgggacacatctcactgacttatctccccattagtcagtgaggagcaattggaaaggcgggttctgggtccagttcagagcaggcctcctgacccctagggctgagaagctgagaccctgccagagcactgaggctatgggccagcccaggtcggtgcattcattcccattcgctcatctccttcccggcgttctgctctgagcccatcaccagaggcaagggagtttctagcttgaggatcagacgtcatcctccgcagactgccttccccacctcatctgcacccagcgtatcccagaccctggccagctccacgggcgccacagaggtggagagggacccaaccccgactggccaaggcagggccacggaagtctggggagaccgtgcggccgcgggctggcggcggaggagcgaggcgctgacgccgattcccgggaaaggctcttagagctgccgcccaggtcacaacgctaaaaatacccagggcccctggagcctgtgctccagcagcgaggagggggagggagaggccaaggtgggggagctgacgggggccaggggctctgggacaccccctctcttttcccctccccctaaccccaccgatctcacgagactgaaggagctgtcccccggggggccgcggagcccagagctggagaaagggagttgtttacgcgacctataggtactggaaagggggtgaagagatttgggggcaggaggctgccaggggccgggcaggagccagcgaaatggagaactccctctcggtctcagccccacccgcactggagccagcaagagggaaaaaattccctaaaaagggacacgaggcgtcggcggaggacggggggagggcgctcccccaaggccgttcccctcgtgctccggtcccctccgcggtccaccgcggcacctgcgcccaccgccgccggagcccctacctgcagcgctggcgccccctctgactcagtccgtccgctccagcgaggccgcggcgggggcgtgggagcgagccgcgccggccggggtggggctgcgcctccagggctcccgggggaccgacgggccctgggagccgggaacgaggaagaggcgggaggcggaagtgggggaggggcggtggcgggctcactcgctcgcagctcgcccggcggtcggaggcagcccctgcgagcgcggctactggtacttccaaggcggtcaaaaagttacccgcacccatccttcctccctccgcccagccggactcctctgcaccaccctcgccaccgacgccggtgcgctagtctccgctcgctcggatgcacttgctgcgcccccgccccgcgcagacccgcggcgggcgcccgcgccggttctgcccacgcacacttgatgctctgcgccttttgggcagcgcccacgcaacgactacgcacccgaaccctgcctccggcacccttggccacactcgccacacttacacgcgcgcacttctccagaggacgcacgatgggaaagagagagttgggacccgcaggagggggcagggcactgacccggtgccgcccagcagggcaggtgcaaggcggcggaggacccctgccctgggactcgcccggctgcccctgattcctggctctgggactagacagagccgccgcccaacctaccaagcacactgggcggggtgggcgccgggccgg

SEQ ID NO: 1561756 - DNA, 4001 bp, Homo sapiens
tcccatccttcaaaacccagacaaaggctaaagcaactcctcccgcgcccctccttttctctccacccacacaaacacgtacacacgcatgtgccatctaccccaaacccttgctctgaagtcacaggcctgacttccagactaggctctgcccctaaggaaatcacctttctggtcttagtctccccatctgaaaatggcataaccaacctacctgcctcaaatacaagaccctgcttgtgaaggtgagctatttaggagactaccatctttcctttgaactccaacagctctttatgcgtccccctcctgggacacatctcactgacttatctccccattagtcagtgaggagcaattggaaaggcgggttctgggtccagttcagagcaggcctcctgacccctagggctgagaagctgagaccctgccagagcactgaggctatgggccagcccaggtcggtgcattcattcccattcgctcatctccttcccggcgttctgctctgagcccatcaccagaggcaagggagtttctagcttgaggatcagacgtcatcctccgcagactgccttccccacctcatctgcacccagcgtatcccagaccctggccagctccacgggcgccacagaggtggagagggacccaaccccgactggccaaggcagggccacggaagtctggggagaccgtgcggccgcgggctggcggcggaggagcgaggcgctgacgccgattcccgggaaaggctcttagagctgccgcccaggtcacaacgctaaaaatacccagggcccctggagcctgtgctccagcagcgaggagggggagggagaggccaaggtgggggagctgacgggggccaggggctctgggacaccccctctcttttcccctccccctaaccccaccgatctcacgagactgaaggagctgtcccccggggggccgcggagcccagagctggagaaagggagttgtttacgcgacctataggtactggaaagggggtgaagagatttgggggcaggaggctgccaggggccgggcaggagccagcgaaatggagaactccctctcggtctcagccccacccgcactggagccagcaagagggaaaaaattccctaaaaagggacacgaggcgtcggcggaggacggggggagggcgctcccccaaggccgttcccctcgtgctccggtcccctccgcggtccaccgcggcacctgcgcccaccgccgccggagcccctacctgcagcgctggcgccccctctgactcagtccgtccgctccagcgaggccgcggcgggggcgtgggagcgagccgcgccggccggggtggggctgcgcctccagggctcccgggggaccgacgggccctgggagccgggaacgaggaagaggcgggaggcggaagtgggggaggggcggtggcgggctcactcgctcgcagctcgcccggcggtcggaggcagcccctgcgagcgcggctactggtacttccaaggcggtcaaaaagttacccgcacccatccttcctccctccgcccagccggactcctctgcaccaccctcgccaccgacgccggtgcgctagtctccgctcgctcggatgcacttgctgcgcccccgccccgcgcagacccgcggcgggcgcccgcgccggttctgcccacgcacacttgatgctctgcgccttttgggcagcgcccacgcaacgactacgcacccgaaccctgcctccggcacccttggccacactcgccacacttacacgcgcgcacttctccagaggacgcacgatgggaaagagagagttgggacccgcaggagggggcagggcactgacccggtgccgcccagcagggcaggtgcaaggcggcggaggacccctgccctgggactcgcccggctgcccctgattcctggctctgggactagacagagccgccgcccaacctaccaagcacactgggcggggtgggcgccgggccggccgggcgggtcagagctggaagggtgggccgctacgccgcgccccccgacgccggcaaggagccagcacctccacggtgctaagaggggcgctgcgctgctggccaggcgggggtggaggggcgaggcggcaactgcgagaggagaaacgtttgccctcttttcgcagcgtctcctggctcagaccagtgctagaagtgtccagtctagcagctcctggaccaagactccgtggccattcccttcctcctgccttccatccacccccttacggtcagagctccgaaggcagcgtggtgacgggtgcggggaggggagtggggggatctctctgagatacttctgccttggggtcactggatcattcattcgacaaacatccgcgagcaagtcaggaactaggagtcatccttgccacctccctctccctcgctgcctatattaaaatacacctccatttcctgtcgattctctttcctaaatatctttccagtccaccattccttccgtttgccccaccacctcccgcctgggctcctaatgcagtaaccttctatctggttttcttttctttttttttttttttttgagacggagtctcgctctgttgcccaggccggactgcggactgcaatggcgcaatctcggctcactgcaagctccgcttcctgggttcacgccattctcctgcctcagcctcccgagtagctgggactacaggcgcccgccaccgcacccggctaattttttgtatttttagtagagacggggtttcaccttgttagccaggatggtctcgatctcctgacctcgtgatccacccgcctcggcctcccaaagtgctgggattacaggcgtgagccaccgcgcccggccctatctggttttcttgtactcattctggcccggctacactccattccctgcattacaagtcagctgtcatttcagaacacaagtctggtgtgcccccctcgacccccccgccacgcggcgttgcctaaattcctccactgttagaataaaatctggacgctgatatctgagctaagtcttgaagacatgagttcaacaagcagaaaagagggagaagggcatgtgcagagggagggaagtgtgaacaaatcattgacacattcaggtttccctgtcaggggaccagcactctgtacactaaagcactgcctcttaacattattgggatctcaaaacaaccctgtgagataaatacagcatgcaattttcccactagtttacaagcatggaaactagtttgtgggaggcaacaaatgcaatggttaagagcacaggcaatacagtcagaccctcttgggttgtaaacctattgattcctctagccagctgggtaaacacttctctgatccttgatctcttacctactaaagaggaataattaatccctccctcttataagataatttatataaaatggttagttacaggacttgggcactttggaaatgctcagtaatcgttagctgttttgatggtaatgggttctgagaaagggagggaactgctgtcttccacaaatttctgaaattataggaagtaagccctaattgttaacacttccacagagcttattatgtgccagtcactattataagtgctttacaaaaattaacccttttaatcctcttgctgtttccactttacagatacagaagttgagatacagagaggtgaaggaacttgtcccaggccctacagctagtaagtgatggacctggaatttaagcccaggtagactgcctctagagactgtgcttacaacccttttatcctgtgcctgttccccttttatcctgttgtagttttcatcttctaagaactatttcattgggttggtttgattcttatttctcattaatggatagagtagatacttcatctaattttctagcacagaaaatgagggccaagtcaggagtacagtggataagagcttagctcactcccagtcatgtccccat

SEQ ID NO: 1561757 - DNA, 4001 bp, Homo sapiens
gccaatgcccaactctccatatcatgccctcctgagaggggttggagggattggttcagcacaaatggaggaggtacgttttccccttaattggccccgcttgcctcagaaggccagggacaggataggatagagacagagatctcagggtggagggttcccttcctccagtgctgcagcccaccccttcccatccttcaaaacccagacaaaggctaaagcaactcctcccgcgcccctccttttctctccacccacacaaacacgtacacacgcatgtgccatctaccccaaacccttgctctgaagtcacaggcctgacttccagactaggctctgcccctaaggaaatcacctttctggtcttagtctccccatctgaaaatggcataaccaacctacctgcctcaaatacaagaccctgcttgtgaaggtgagctatttaggagactaccatctttcctttgaactccaacagctctttatgcgtccccctcctgggacacatctcactgacttatctccccattagtcagtgaggagcaattggaaaggcgggttctgggtccagttcagagcaggcctcctgacccctagggctgagaagctgagaccctgccagagcactgaggctatgggccagcccaggtcggtgcattcattcccattcgctcatctccttcccggcgttctgctctgagcccatcaccagaggcaagggagtttctagcttgaggatcagacgtcatcctccgcagactgccttccccacctcatctgcacccagcgtatcccagaccctggccagctccacgggcgccacagaggtggagagggacccaaccccgactggccaaggcagggccacggaagtctggggagaccgtgcggccgcgggctggcggcggaggagcgaggcgctgacgccgattcccgggaaaggctcttagagctgccgcccaggtcacaacgctaaaaatacccagggcccctggagcctgtgctccagcagcgaggagggggagggagaggccaaggtgggggagctgacgggggccaggggctctgggacaccccctctcttttcccctccccctaaccccaccgatctcacgagactgaaggagctgtcccccggggggccgcggagcccagagctggagaaagggagttgtttacgcgacctataggtactggaaagggggtgaagagatttgggggcaggaggctgccaggggccgggcaggagccagcgaaatggagaactccctctcggtctcagccccacccgcactggagccagcaagagggaaaaaattccctaaaaagggacacgaggcgtcggcggaggacggggggagggcgctcccccaaggccgttcccctcgtgctccggtcccctccgcggtccaccgcggcacctgcgcccaccgccgccggagcccctacctgcagcgctggcgccccctctgactcagtccgtccgctccagcgaggccgcggcgggggcgtgggagcgagccgcgccggccggggtggggctgcgcctccagggctcccgggggaccgacgggccctgggagccgggaacgaggaagaggcgggaggcggaagtgggggaggggcggtggcgggctcactcgctcgcagctcgcccggcggtcggaggcagcccctgcgagcgcggctactggtacttccaaggcggtcaaaaagttacccgcacccatccttcctccctccgcccagccggactcctctgcaccaccctcgccaccgacgccggtgcgctagtctccgctcgctcggatgcacttgctgcgcccccgccccgcgcagacccgcggcgggcgcccgcgccggttctgcccacgcacacttgatgctctgcgccttttgggcagcgcccacgcaacgactacgcacccgaaccctgcctccggcacccttggccacactcgccacacttacacgcgcgcacttctccagaggacgcacgatgggaaagagagagttgggacccgcaggagggggcagggcactgacccggtgccgcccagcagggcaggtgcaaggcggcggaggacccctgccctgggactcgcccggctgcccctgattcctggctctgggactagacagagccgccgcccaacctaccaagcacactgggcggggtgggcgccgggccggccgggcgggtcagagctggaagggtgggccgctacgccgcgccccccgacgccggcaaggagccagcacctccacggtgctaagaggggcgctgcgctgctggccaggcgggggtggaggggcgaggcggcaactgcgagaggagaaacgtttgccctcttttcgcagcgtctcctggctcagaccagtgctagaagtgtccagtctagcagctcctggaccaagactccgtggccattcccttcctcctgccttccatccacccccttacggtcagagctccgaaggcagcgtggtgacgggtgcggggaggggagtggggggatctctctgagatacttctgccttggggtcactggatcattcattcgacaaacatccgcgagcaagtcaggaactaggagtcatccttgccacctccctctccctcgctgcctatattaaaatacacctccatttcctgtcgattctctttcctaaatatctttccagtccaccattccttccgtttgccccaccacctcccgcctgggctcctaatgcagtaaccttctatctggttttcttttctttttttttttttttttgagacggagtctcgctctgttgcccaggccggactgcggactgcaatggcgcaatctcggctcactgcaagctccgcttcctgggttcacgccattctcctgcctcagcctcccgagtagctgggactacaggcgcccgccaccgcacccggctaattttttgtatttttagtagagacggggtttcaccttgttagccaggatggtctcgatctcctgacctcgtgatccacccgcctcggcctcccaaagtgctgggattacaggcgtgagccaccgcgcccggccctatctggttttcttgtactcattctggcccggctacactccattccctgcattacaagtcagctgtcatttcagaacacaagtctggtgtgcccccctcgacccccccgccacgcggcgttgcctaaattcctccactgttagaataaaatctggacgctgatatctgagctaagtcttgaagacatgagttcaacaagcagaaaagagggagaagggcatgtgcagagggagggaagtgtgaacaaatcattgacacattcaggtttccctgtcaggggaccagcactctgtacactaaagcactgcctcttaacattattgggatctcaaaacaaccctgtgagataaatacagcatgcaattttcccactagtttacaagcatggaaactagtttgtgggaggcaacaaatgcaatggttaagagcacaggcaatacagtcagaccctcttgggttgtaaacctattgattcctctagccagctgggtaaacacttctctgatccttgatctcttacctactaaagaggaataattaatccctccctcttataagataatttatataaaatggttagttacaggacttgggcactttggaaatgctcagtaatcgttagctgttttgatggtaatgggttctgagaaagggagggaactgctgtcttccacaaatttctgaaattataggaagtaagccctaattgttaacacttccacagagcttattatgtgccagtcactattataagtgctttacaaaaattaacccttttaatcctcttgctgtttccactttacagatacagaagttgagatacagagaggtgaaggaacttgtcccaggccctacagctagtaagtgatggacctggaatttaagcccaggtagactgcctctagagactgtgcttacaacccttttatcct

SEQ ID NO: 1561758 - DNA, 4001 bp, Homo sapiens
caggcaccacaagagagatactctgtattcagggaacacagccaatgcccaactctccatatcatgccctcctgagaggggttggagggattggttcagcacaaatggaggaggtacgttttccccttaattggccccgcttgcctcagaaggccagggacaggataggatagagacagagatctcagggtggagggttcccttcctccagtgctgcagcccaccccttcccatccttcaaaacccagacaaaggctaaagcaactcctcccgcgcccctccttttctctccacccacacaaacacgtacacacgcatgtgccatctaccccaaacccttgctctgaagtcacaggcctgacttccagactaggctctgcccctaaggaaatcacctttctggtcttagtctccccatctgaaaatggcataaccaacctacctgcctcaaatacaagaccctgcttgtgaaggtgagctatttaggagactaccatctttcctttgaactccaacagctctttatgcgtccccctcctgggacacatctcactgacttatctccccattagtcagtgaggagcaattggaaaggcgggttctgggtccagttcagagcaggcctcctgacccctagggctgagaagctgagaccctgccagagcactgaggctatgggccagcccaggtcggtgcattcattcccattcgctcatctccttcccggcgttctgctctgagcccatcaccagaggcaagggagtttctagcttgaggatcagacgtcatcctccgcagactgccttccccacctcatctgcacccagcgtatcccagaccctggccagctccacgggcgccacagaggtggagagggacccaaccccgactggccaaggcagggccacggaagtctggggagaccgtgcggccgcgggctggcggcggaggagcgaggcgctgacgccgattcccgggaaaggctcttagagctgccgcccaggtcacaacgctaaaaatacccagggcccctggagcctgtgctccagcagcgaggagggggagggagaggccaaggtgggggagctgacgggggccaggggctctgggacaccccctctcttttcccctccccctaaccccaccgatctcacgagactgaaggagctgtcccccggggggccgcggagcccagagctggagaaagggagttgtttacgcgacctataggtactggaaagggggtgaagagatttgggggcaggaggctgccaggggccgggcaggagccagcgaaatggagaactccctctcggtctcagccccacccgcactggagccagcaagagggaaaaaattccctaaaaagggacacgaggcgtcggcggaggacggggggagggcgctcccccaaggccgttcccctcgtgctccggtcccctccgcggtccaccgcggcacctgcgcccaccgccgccggagcccctacctgcagcgctggcgccccctctgactcagtccgtccgctccagcgaggccgcggcgggggcgtgggagcgagccgcgccggccggggtggggctgcgcctccagggctcccgggggaccgacgggccctgggagccgggaacgaggaagaggcgggaggcggaagtgggggaggggcggtggcgggctcactcgctcgcagctcgcccggcggtcggaggcagcccctgcgagcgcggctactggtacttccaaggcggtcaaaaagttacccgcacccatccttcctccctccgcccagccggactcctctgcaccaccctcgccaccgacgccggtgcgctagtctccgctcgctcggatgcacttgctgcgcccccgccccgcgcagacccgcggcgggcgcccgcgccggttctgcccacgcacacttgatgctctgcgccttttgggcagcgcccacgcaacgactacgcacccgaaccctgcctccggcacccttggccacactcgccacacttacacgcgcgcacttctccagaggacgcacgatgggaaagagagagttgggacccgcaggagggggcagggcactgacccggtgccgcccagcagggcaggtgcaaggcggcggaggacccctgccctgggactcgcccggctgcccctgattcctggctctgggactagacagagccgccgcccaacctaccaagcacactgggcggggtgggcgccgggccggccgggcgggtcagagctggaagggtgggccgctacgccgcgccccccgacgccggcaaggagccagcacctccacggtgctaagaggggcgctgcgctgctggccaggcgggggtggaggggcgaggcggcaactgcgagaggagaaacgtttgccctcttttcgcagcgtctcctggctcagaccagtgctagaagtgtccagtctagcagctcctggaccaagactccgtggccattcccttcctcctgccttccatccacccccttacggtcagagctccgaaggcagcgtggtgacgggtgcggggaggggagtggggggatctctctgagatacttctgccttggggtcactggatcattcattcgacaaacatccgcgagcaagtcaggaactaggagtcatccttgccacctccctctccctcgctgcctatattaaaatacacctccatttcctgtcgattctctttcctaaatatctttccagtccaccattccttccgtttgccccaccacctcccgcctgggctcctaatgcagtaaccttctatctggttttcttttctttttttttttttttttgagacggagtctcgctctgttgcccaggccggactgcggactgcaatggcgcaatctcggctcactgcaagctccgcttcctgggttcacgccattctcctgcctcagcctcccgagtagctgggactacaggcgcccgccaccgcacccggctaattttttgtatttttagtagagacggggtttcaccttgttagccaggatggtctcgatctcctgacctcgtgatccacccgcctcggcctcccaaagtgctgggattacaggcgtgagccaccgcgcccggccctatctggttttcttgtactcattctggcccggctacactccattccctgcattacaagtcagctgtcatttcagaacacaagtctggtgtgcccccctcgacccccccgccacgcggcgttgcctaaattcctccactgttagaataaaatctggacgctgatatctgagctaagtcttgaagacatgagttcaacaagcagaaaagagggagaagggcatgtgcagagggagggaagtgtgaacaaatcattgacacattcaggtttccctgtcaggggaccagcactctgtacactaaagcactgcctcttaacattattgggatctcaaaacaaccctgtgagataaatacagcatgcaattttcccactagtttacaagcatggaaactagtttgtgggaggcaacaaatgcaatggttaagagcacaggcaatacagtcagaccctcttgggttgtaaacctattgattcctctagccagctgggtaaacacttctctgatccttgatctcttacctactaaagaggaataattaatccctccctcttataagataatttatataaaatggttagttacaggacttgggcactttggaaatgctcagtaatcgttagctgttttgatggtaatgggttctgagaaagggagggaactgctgtcttccacaaatttctgaaattataggaagtaagccctaattgttaacacttccacagagcttattatgtgccagtcactattataagtgctttacaaaaattaacccttttaatcctcttgctgtttccactttacagatacagaagttgagatacagagaggtgaaggaacttgtcccaggccctacagctagtaagtgatggacctggaatttaagcccaggt

SEQ ID NO: 1561759 - DNA, 4001 bp, Homo sapiens
aggtacaaggcaaaagcctcaaatgcccccagtttctgagaaacgcccagacgccccctcctcaggctcaagccagctgccaagtactggagaagacaatcctgagggctctcctggtctcctggaagcagggatatggaggcctctgtgtcaacagaatgtctctatctttaaactgttttcctggggttgtgggtgaccccactccaggaactgcagaaactcttggccaggcactctgcctctagggtgaaatcctcagggaataagtgtgcccataacaggaagggtgcgaggatagaaggggtgaattgaggaacattctgaatcaaactgaagacccttgccctctgcttggacactgagagccaagatgaaggtagggggggttgacccagtggaacaaatgccaggtcccaagtccccccctactctaccgtgtggctcccagacgtccctcctaccctgaggcttcataccctactcccccacttagctttgggggcccttttatccccccctccaacccaaaccctctccccaccaggctgggcccctctcacctaggatgacagcttcctcctcgttctcatctgcttctgcccaggccacccgctgggctcgacgctgggcctgtaggcggctgcccaggtccctccggcgccgaggcctgcctccagctctcggctcctcaggctccaggggcccaggctgggccacccggcctgctcctgccagctcctcattgtgcagtggctcttggccggctgtagggaagacagaaatgacaatgctgcctataagcccagcccggcccatggcaggaggagcggcagcccggaagcctcacctcctctgcttagcggcctgctgcccacagcacaaggccccgacttctcagtctgactggcaaggccttttccaccaggcccacagcttggtcccaggcgggggctcagcccttccctcgggcctgtgtgaatactcctctcccctcccggctccacctttccagctggcctgtcaggaggcccctatcctgatgtccccagctctcatcgagtaccccctgcaggaatccactgatttctcgcctaacaccacctgtggttttatctggctccccagccagagagtacacttcccggcggtggccgagcctcccccgggaagacctgctggatctccgccttccctcagcgtgtcccttccgctcctgggagcgcgcaggtgctcagaggtagcttgtgggcccagggagcaggaaaacacatatacaaacccgcccgctgaccagaaatggggggaaagagggaggatgggtgtatctgttctgtgccctggccaatgacatggccttctgatcggggagcggattggggagggagagtgggccctctccttggcgggaagggagagagcttcaggaatttcctggagccgcctcgcgcttctccagctcgtgggggacaggcagaaaatattcagatgcccccttcctggcacctgctctggagccaggctgggaggaatggaaaacccctgcggcctccctaacaggtgcagagggaaagggccccgacggtgacggatgggagtgtgcgccggccagggcctcaggcctttggaggtatggagttcccgggggtgaagagagggatgaggccagactctggcttggagtcgagagaaaggggtagcggcgcggccaccgattccaggtagggcactgcggaagccccacccggcacacgactagcgcacggacgcgcatgcgtcccgcccgcccaggtgcgcacgcgcaggagccgcggcgcgacggtccacaaaggctcagaaggccagaaaacccggtaccaccaaccctggtgcagcggcatctcctacctgatgccgcccggccccggctgcgagtcaggaagaggataaagccgactagcagagccgccgctaccaagtaccacacaggcgccaccatgacgagggcctcagtgcagaaccactgcgtccaccctgaggccgggatctcataggccccgcccctatttcccaatctagactccgcccactactcggagccccgcccagcggcacatcacagagaggctttaatgtcagacattaaaatgagtttggggggtgtaaagaaacccacaatgttaagaggaaattatagcagacggtatgtccagtagaaaacatctatgtatgttttttttttttgagacggagtctctgtcgcacaggctggagtgcggtggtgcgatctcggctcactgcaacctccacctcccaggttcaagcgattctcctgcctcagactcccgagtagctgggattacaggcgcccgccaccacgcccggctaatttttgtatttttagtagagatgggggtttcaccgtgttggccaggctggtctcgaactcctgaccttgtgatccacccaccttggcctcccaaagtgctgggattacaggcgtgagccaccgcgcccggactatatatgttttaaaaatcactaaacaatcccacatagtgtttatggaaacaaccgtggaaaaagtacgaaaagaggcttgggactgatgcacaccaacttcaggatagcgattacctctaggaggagggaagcgggttggggttttgctgtatctgtgacactgaatttctttctttctttctttcttttgaggggaaggggaggggaggggagggcagtactggaatttattaagctttttgtatacatgataacagaagtaaagatttatttcaggagccaggcacagaggctcgtctgttaacccaatactttgggaagtctaggtagaggtgagcctaggagttcaagaccagcctgggcaacatgatgaaaccctgtctctacaaaatacaaaaattagccaggtgtggtggcatgcacctgtgattccaggtacttgggaagatgaggtgggaagatcacctgagcccagggaggtcgaggctgcagtgagccatgatcatgccagtgcactccagcctgggtgatagagtgagaccctgtctcagaaaataaaaataaataaaaataaattcaggaccaatgaacaatggtgagaaagggatttgaaaaaatacgggccagatgaggtggctctcccctgtaatcctagcactttgggaggccgaggtgggcggatcacttcaggtcaagtgttcaaaaccagcctagctgacgtgatgaaatcctgtctctactaaaaatacaaacaatgagtggggcgtggtggcacatgcctgtaatcccagctactcgggaggctgaggcaggagaatcacttgaacccagggggcggacgttgcagtgagccaagattgcaccactgcacaccagcctgagcgacagagcaagactctgtctcaaaaaaaaaaaaaaaagaaagaaagaaagaaaaagaaaaagaaaaaatatgggctgggcgaggtggctcacacctgtaatcccagcactttgggaggctgaggtgggtggatcacctgaactcaggagtttgagaccagcctgacaaacacagtgaaaccctgtctctactaaaaatacaaaattagcttggcgtggtggtgggtgcctgtaatcccagctacttgggaggctgaggcaggagaatctctcgaagccgggaggcagaggttgcagtgagccgagatcacactattgcactccagcctgggcaacagagtgagactcagtctcaaaaaaaaaaaaaaaaaaaaaaaagctgggcaccgtggctcacgcctacaatcccaaccaacactttgggaggtcgaggtgggtggatcacctgaggtcgggaatttgagaccagcctgaccaacatggagaaaccccatctctactaaaaatacaaaattagccgggtgtggtggctcatgcccataatcccagcacttcgggaggctgaggcaggcggatcacgaggtcaggagatcaaaaccatcctggctaacacggtg

SEQ ID NO: 1561760 - DNA, 4001 bp, Homo sapiens
catgatgaaacgcagtctctactaaaaatacaaaaaagacgggtgtggtggctcacgcctgtaatcccagcactttgggaggccgaggtgggtggatcacaaggtcaggagttcaagaccagcctggccaatatggtgaaaccctgtctctactaaaaatacaaaaattagccgggcgtggtggcgcatgcctgtagtcccagctactagggaggctgaggcaggaggattgcctgaacccgggagggggaggctgcggtgagccgagatcgcgccactgcactccaccctgggcgaccgagcaagactctgtcttaaaaaaaaatgaagtgaatgagactggagtgttggtcatgaagaggagagctgtgagagatgaaagtcaaggtggaaaggacaagatcgtgaggaccttgaaagccacgtgaaagcaggctggagagttttttttgttttgttttgttttgtttttagcaatttgaatcatttcttgaaaaacaaacacaaacaattccccccgcatcatgggtgtgacaaacacaccccgcatcatgggtgtgaccgggcactgtacaggggcctggctcctcggggactggcccatgacctcccacgcagcgggctgagccaaggcctgtccgagagggggccgcagccagcaggcctgggtggccgcccgcgcccacaggggacatcggggaaatggcgacagtgtacgggacccagacgctgcctgaggagtctttgcaaggtggacaggcccgggggtctctaccagcaggctggagagttttaagcaagggaggtctctaacgtgactgtatcgcagagatccctctgctgctaagcgaagaatacactggaagtgctcaagataaagagatgaagatgaagtatgtttggactgcaggtgtgctggtgtgcaagcatgagacagcagtagccggagctagggtgggtacagtgtgaatggagagaggcgggagaagcttaagagagattcatgagctagcttgcagagcactggcggcggtgaggaagaaaaaactgtcaagaataactctaaggtttctggcttgagaagggaacaggatgagagtgaacacaagttcatctttggaggagttgaatttgtagaggccatgggacatctggataaacctatcaggcggacagatgagagtgcagaggggacaacatctgggctgaatgtttgaagggcaagcatccttttcagaacaccaatacctctttaattgccatactgcttaatgtctgcaagcccccacaccaccatacgcttcaggagagtggcactcaccttgttcattgctacgcccccaacgcttaacactaagtctagcaggcgttaagtattcaataaacactggctcgatgaacatacgaaaggacagctaaccatggctccttgagcaggaaccatggctgacttcacctcttacaaggtgtaagaaacctgccgtctcttacacagggcgtggttaaatatcagttcagtgaatagatactgagttcagcaaggagacagggaacgacatggccaaagaagcaggcggacgtagagataacctagtggcggggaaactgaggaagatcttggggtcccggtgagatccttttcgggaaacttccggggctggcaggggatgatgaggattcggggacagggacctgaggaatcgcgaggaagggaagcagtcaaggaaacccaaagaccagaaccgtgctcatacctcctcttcctcgtccccggagtcagactcgggctccaccggcacctcgtcatcctcgcctatggttccgattaagccgaggtccgcaagcatgttgtcgcagaagccacttccggaagcgagcacagcctgcggtccggcccttaacttttcgcagcctcctcgtcgtctttgcgcaagtaccatgcgtcacttccgttccagagcccctgccgccctccccgttcgacctcttaagagtgcgcatgcggcaatatggggcgtggttggtttcgtgtgacgccatcaaggggcggagctttttaggtaagcaaattccattgtctccggcctcaaaacggtggcagtatttgaggagggtggaagggtgagagagtctaaagagttgcatttataaactctagatgtgtatatttagatacaaaaaaaagctgtggaagaaaatacaataagcagttagctgtgattgcttctgggtggtaaaattctaagtaattttttgtcttttttttttttttttttttttttgaggcagggtttggctctgtcgcccaggctggggtgcagtggagatcatggatcactgcaaccccgacttcccgggctcaagcgatcctcccgcctcagccttctgagtaactggaggtacaggcgccaccaccacgcccggcggagtttcaccatgttgcccaggctggtgtcgaactcctgggctcaagcaatcctcctgcctcggcctcccaaactgctgggattacaggtgtgagccactgcgcacagccccgaaactttttaattaaaattaatgtttattgtaggggaaaaaaaatctcagaagaaaataaaaatcaagaccaggcaaggtggttcacacctttagtcacggcactttgggaagccaggtgggtgcatcgcttgtgctcaggagttccagacaaccctgggcaacatgacaagaccccatcatgttttttttgtttgtttgtttgtttgtttgtttttaattaaaaacgtgttggctgggcgtggtggctcacgcctgtaatcccaacacttcgggaggccgaggcgggcggatcacgaggtcaggagatcgagaccatcctggctaacacggtgaaaccccgtctctactaaaaatacaaaaaaattagccgggcgtggtggcgggcgcctgtagtcccagctactcgggaggctgaggcaggagaatggtgtgaacccaggaggcagagcttgcagtgagccgagatcgtgccactgcactccagcctgggcgacagagcaagactccatctcaaaaaaaaaaaaagattgggctttgtagggagtgatggaaaatgtgaattaaaaaaatatatattgctagctgggcgcggtgactcgcgcctgtaatcccagcactttgggaggccgaggcaggtggatcacctgaggtcaggagtttaaaaccagcctgaccaacatggtgaaactccgtctgcactaaaaatacaaaaaattagccgggcatggtggtgtgtgcctgtaatcccagctactcgggaggctgaagcaggagaatcgcttgaacccaggaggcggaagttgcggtgagctgagatcacaccattgcactccagcctgggcaacaagagggaaactccgtctcaaaaaaaaattattttattttattttatttttatttttatttttgagacagggtctcactctgtcgcccaggtgagagtgtagtggcgcgatctcggcttactgcagcctccacctcctgggttcaagcgactctcctgcctcagcctcccgagtagctgggattacaggcatgagccactgcgcctggcctaaaaatatatatatatatatattttaaaaggaaaaaaaaaacaggatgggctttggagccacacagccttgattcaaatcctgcttctgctccttactgtgtggtcttgggtaacttcctagttatttataaaataaagacactgttaggaaggatatacaacagctaaagaaaaactccggatacaaaggatgcaaaatggtactggggaacacaagtttttgttcttggttctttgtgtagtttcatctaatagttttcaaattaataagctgtgcccgttattacggtactgtcagcttcaaactaacccttctatacctgactcatgtacctggggtgggactccaggaaccatgtttgtactttgccatcaagttccttgttaggatctgccagcaggg

SEQ ID NO: 1561761 - DNA, 4001 bp, Homo sapiens
aatgacttaaaattctgaattaggagtcgcaactagatatatagctcacttgtctctttttggtcgtgaatgtgtgatagtttatccttttctttagggacacagcaaatatgtttttccccacatttttctttcttcctctcaatttctttgcatgatttcctgcatctgccagttccataatagcaccttctgatccatccatctatcaaaataagcaaacacatgaatatataaatacatttgaaaaataaatacaattaaagaaaggatgttggtaatagtaataatggttagagtgaaacattgattttgacacttaaaggcattcatgggaatgttataaatttgtgcatgtttaatgactaggagtagttatcttcctctaatcagctctaattgaattttattcctatgcttatgatactttcttctctgtcatttttcacagtctcactaaatctggttctacttcctctctaaatctagatgcttgccagggagtgggactaagccttcaattatcttttttatcctctctccattcattattcatctaaccacaatttgttgagcatctactatgtgccaggcattgtttgttctaggggtgcttgccccaggggttgtttaaagcaagaccctgaacaatggatgaccaatttacatttctgagctgcaggctgaagttgtgtttgtgtgtgtgtgtgttggggggtgggtgcagggagggtttaacactgtgcccttctctgatttattttctgtgactctaagtcaacgcagactgcaaacccagttttctcagcacattggattcatttgagggatcattatatcttaatctaaactacagattctttccacttgtcttttccccaaactcttcttctgggagataattcctaattctctgtcttttaccagaatgttcaggctgaaaaaaatcagtcacattgactctcacttttctcttccagtatttcataagtcaatatgtagattctttctccaaaatgtctcttgcatctgcaactccctctattctacttgccctcgctggaacataaggcatgctcaagccaactcagggttagcccagaataaccttcttttgcttctagaacaactgagtgattggcaaaggctttcagcttgaatagctgctccaagagaggatgtgacttccaacagcaacgacccaaaggaaatcacagaattaaaaatcatcaactttagagcccctgggaagcctaaggggaaaacatttccattagaaagttattcaccacctggccatgatgcctgtttatactgttagagagctttgagcgtgttcaacttgaaagccaaaatcttctgctgtaaccccagctccatactgtgagcctgtttttataaacctgtagatatcaaacatcaacttacaactttttcaccatatattccaagacaagagcaagttgcctcttctgcctgctttaaaggagcactcaaagcccaacaacagtggagaagtgaagtaatgagactgattattagaagaggtagtatcaactgaaagtggggttgaagtgagagactcacaggatgagactgttgacatatgggccagaggcattcaggatactagagatgttggggttgcttctgcatatggaagggacttcatataaaacaccttggcctctgcagatattctccaggttccctaatgagaaccaccaccatggtcaggcctgacaggctgcccttcttatgggagcatattcattataagcctttcatcagatctcagccatccctgtgggctctccttgcttctacacatgttcaattttccagtgattctgtggttaggaccccatccttactcccttttcccttctctccatggttctgtttacctggggcagtctgagccaggaccacaaggacaactaaggccaggacagagagtttaatgtctcctgagaggggtgagaaatgatctggcagcattctgagtgtgctggggaagctgggtgtgcactcagcattttattgacctaggcaaggctgactcacagacaaaaaattagagaagggcagaatgttacaccacccagaacatcagcctgccactcagcagtataaactgattatccggtgttcagggtcctgctctagatatccttggggatggtgaaaggcacgagcagaggaggtacaagtcctctccaaggctgttgcactggccagagaacagatcccttctccaagaagcctttcctgtccctctccttcagaatttatccccctcccctacattctcacagctgctgttttctttttctctgtgtgtttatcatgacacactggaactaagtgtttttctagttcctcctcccattcagaatgataccctaagggaaacttttaatagacagtgagacccctgaggttaggaacaggctgtcattttggtacacccagagcatacagtgaacatgtgttgaaaagcactgagtgagtgaacgcacatgtggcatataattgtatcccagtagctcttagaattggcatttcccagctaagaaaatgcaggctgagagtggaaaagaattgtctagggtcctaccatgagcaagaaagaaacggactggggtggaagccctcataacccaactcgttgtccagctcttaactctgaatttgtatcctattttcctgctccaaatccttcatatcaaccatttctgggtctttcttggactccagcctcaaacaacaaagcaaaaaatatttcatgctgtttttccaacaaaaagaagagggcactgcccaggctccattaggagggctgcctgtgggcccactggatcttcctttttgggttccttgtccttttccgcctttgggtgagtccagtgtgcatcggttttactctcctctttctacatgcaggcagcggacctgatggggttcaggaaatttgttttgcttttaggatttggacagaactttcttcaggaaagcaatgaacatcaatgtcatccactgaactttcactgtcaggcagcaactatgctaagcactttatatatatgaccccctggaatcctcacaggagccctgttaggcaggtgtgatgtgctcagggttacacagtgactatgagtgaggtctggattcagatctgggttacctgtccccagataacatgttctttctgtcatcccagaggattatgcctgagcaatgatggaaggagaggtctgtttaacttgaaaagcagtaaacagctggagagagtcataattgctgtcttcaagtatctgaaaggcatgttctctgtaggcccacagggcagaactaataggcctgagtggaaactgcaagggcacaagttttgaaactcatcagaaagacctctgaagatgggaaccatctggaaaatggttagactgcctggaggagctagctggtggctcctgctgttttaaagctgcaaactgagacgacatgaccactcccctcagattctgcagggaggatggctgaattggctgcatgtgggtctgtgcactggcacaattctaggcactgagcttaagagaagaaagcaaagtccggccattctaattagggagagggacaacatatagtgtcagttggtgataagtgctataaagaaaaatagggaaaggagaatagagaataatatacttgtgtgtgtgtgtatgataatatgtgtgtgcgggtgtgcgtgtgaaaggcacacaggattgagtgtagagtaagaggaatagagaatattgatatacatctgtgggtgtgtgtgtgtgtgtaaggcacataggattgagtgcagtataaggggaatagagaataatatgatatacgtgtatgtgtgggtgtgtgtgtgtaaggcacataggattgagtgcagtataaggggaatagagaataatatgatatacgtgtatgtgtgagtgtgtgtgtgacacacaggtttgagt

SEQ ID NO: 1561762 - DNA, 4001 bp, Homo sapiens
gagaacaaatgtctcttgagcaaaggaataaaagaagctgagaaataaggaggcatgagaatgtgaaatagaaggaatatgagaaaagagaggaggaaaagaagaagaaaaacagagaagaaagaggaagaggaggagaaacctctagatcagatgaatctgaactcactatcgaggaaggaagaacaatcttggttttctatagggtgggctgagactgctcccatatctctctgtacatgccaagatttgacaggagacaattccaaacattccagtctcctgacttcctctatctcagccatctacagtcacatctattgttcttcagtgcccttgaaaatcacacttaagaaactttcttcagaatttgaaaataatactggatatttttcatccagtgtttattctccccatttccttatttaaatcactttgttgaagtacaattggcacacaaaaagctatacatatttaatttatacattttgatgagtttggagataagcatacattacacccatgaaaccatcatcacaatctatgccataaacctatccacgcctaaaagttttctcccaccatcttatttattatttttggtacatcaaatcttattttaagaacacttaacataaaatccactcccttggtaatttttgaaatatccaacacagtaccgttaactataggaactgtgttgtacagtagatttctaggacatattcatgacagtatagtctcttcaataaatgtattgggaaaactaggtatctagatgcaaaataataaaattggatatttatcttacaccatacacaaaaacaaattcaaaatggattaaagacttaaatctaagacctgaaactataaaactcctaggagaaaacatagagaaaaagcttcttgacgttggccttgggaaggattttctggatatgacaccaaagcacaggcaacaaaagcaaaaataaacaaggggattgcagcaatctagaaagtttctgcacagcaaaggaaacagtctacaaaatgaagaaacaacctatggaatgggagaaaatatttgcaaatcatatatctgagaaggagtcaatattctccttatttcaatagccacaaccctgctgtgatgaattcaactgtcttactcaagcttaatcacccccaaacccaggctaagtcaatccctgcccagataaacctcacatacccatgactgaataagatacccactttaggcaaacactaactacaactcaagccctacctcttctaataaccaccaaaagcccaactgcaaaacatacaaacataacactatccaagccacccaaccccattcacagcatcaatctaaaacacaacccagctacaaacctctctataccccaactcccagttgcaccaactctaccccagctccattcaagaaaaaataccatttcctctctagaatgcaccaaaacatctattcagcccaacctataaatacaattattcaccccatgctcatccccactcactttttggatattaccctatctctaaggtcttacaacctccccacctcaactccctacccaactccaaactgctatacccctcctatagctcctcaacttgcacacagtctctcacacctaactcatgaattaagcccccatcccaatgacagcactacctaaaatgttccatgcttagactgtccactatgccaggatcaacaacctcttcaatttgtcttggcagagcagaaccaggggagatctttacatgaaattaaccttgggaataacatctgtgacccacctgagaccagaaaaggctttaggtgttgcccactatatgtgagtaggagtcactgcagaggtcaccaagataccagtaccacatgcaagacgccagaacctttgagagaggcctgagttacctggagtcttttgagccaggatcataaggatggcaatggtcattaaacagggcttcatgactgacatgttccaccagaatgaagggctgtgttgcaggtgaccaaacagagatcactgtagcagagcagtagcccgcctttattagttttggaaatgcgtcagggttctgtgcagtgaactaaaagggatgggagatacctgatgtcaggcaggaagaaggacaacatgtatcacttatctgagctggatactctgtgtaagcgtgggagacttgccagcagtgctcatgtctgtgtgggcctttcttcccattaagaaataaagacaaattagagccagttggcattttgtgtgaaacgaatttgaatgaatgaatcaaccaagcaagcaagcaaacttgaaaaaacttataaacaattagataagaaataagcacgtgtatacctatgtgaggcacgtgtatacctatgtaacaaacctgcacgttctgcacatgtaccccagcacttaaagtataattgtaaaaaaagaaataaataattatttttaactgtagtcaccatgctgtgcccacagaacaccagaacttattcctcctatctaaccgaaagtttgtacccattgaccaatgtctcccctttccccatccaccctccctcgaggctctggtaacaaccatgctaatctctacgtctatgagttcaatttttttagattccacatctaagtgagatcatatggtatgtgtctctctgtgcctgctttatttcacttcacatagtgtcttctaggttcattcatatgattgcaaataacagaattttctgttttttaaaggctgaatagtactccagtatctatagttaataataatgtaaagagctaaaagaaagatttttaaatgacctcatcacaaataaataataaatatttgaggtgatggacatgctgatctctcaattaattgatccctttattattatataatgaccttctttgtctcactttgtggttttttacctaaagtctattttttctgttgtaagaaaagctgttcctgctcttttctggtttctttttccatggaacatctttttccatcacttaactttcagcctatgtgtttccttaaaactgaaatgagtctcttgtaagcaaaatacagttgagtcatttaaaaaaatcaattcagccactccttcaattggcaaactgaatccatttacattcaaagtaagtattgataggtaaggatttacttttgccattttgttcattcttttctggttattttatacatcctttgttcctttcttcctcttttgctatcttcctttgtgattagattattttctatattagaatgctttgattcctttcttcttatcctttgtgtatctactgtcagtttttgctttgtgattactataagggttacacaaaacatatgttgttataaccggctgtttaaagctgataaccacttaactttggttgcaaaatatgattctacatttttattgtatctctcctgataatttatgtttctgatgtcacaatttactgtttatattgtgtgtatcccttatcagattattgtaacttattattaatagttttgtattttgttttatactcaatatattagtgacttatcatctttacagtattagagtattctgaatttaactgtgtacttacttttaccagtgagtttcatacttgcacctgttttcattttagttattaacatcctttcctttcagcttgaaatattttctttagcattccttgatagactggcctggtagaaatgaactctctcagattttgtttgtctgtgaaagtctttatcttttcttcatttcagaagcaaggacttgctcagtaaaatacttttgtttggaagcttttttccttcagcattttgaatatatcatctcactctcctgacctgtgaggcttcagtggagaaattgactgacagctgtattgagtctttcttgtatgcgatatgcttcttttctcttgcttttttcagaatttttttctccctgatttttgata

SEQ ID NO: 1561763 - DNA, 4001 bp, Homo sapiens
ctgatttctattcttcttccccaaatgtaggggctttttaagataaagcatcaagactttatgcttctttcattatcttaactctttgctccaagaggatggctccaatttatcactcttaacactcagacttgaaaccccagatcatgtaatatttccttcacttcccatatgctgagtttttataacttgtggatttcatgtacaaaatctttcacatctgtctctttcctagtctcaatatctccactagcactcaaagcagacacaattgctttcaaagtgatcacacagaattattcctgtttgtgtctggaattgtaactgaagaattactaaaaacccccagagttggcaatttctgctggcagtgtcctttaagatacacaacttctgattactgacttctggttacccagaatcccttggggtaggaacacaagcataggaagagccagcagcaggagtttcatggtccctgggaaacaggagaggtttccctgtttccctaccctgaacgccagggtagacccaggcgttcagaacgctgtgtgcagtgggagtctgaacaagagttattggcctctctgcaatgagggcagaggaatagaggaattaatggaacaaatatatatttttaattttcttgcccacccccaccagacttacatttaacttggttatttgccctctaggaatctatcctatttaagcccatatccatatatgtaaatatattaatgtttgtacaagcatattcattgatgtcttgttcgaaaattaagaaatgtctcaaatggctatatatgactttatatggcttatcctacagcagaactatacaactttacaaacaataaggcagatctttagatggtgacatggaaagatggccacaaaataataagtgaaagaagagtgctgcatagggccgggtgcggtggctcatgcctgtaatcccagcactttgggagaccgaggcggatggatcacccgaggtcaagagtttgagaccagccttgccaacatggtgaaaccccatctctactaaaaatacaaaaattagtcggacatgatggtgcatgcctgtaatcccagctgcttgggaggctgaggcaggagaattgcttgaacccaggaggcagaggttgcagtgagctgagattgcgccactgcactccagcctgggtgacagattgagattccatcttcaaaaaaaaaaaaaaaaaaaaacacaagagtgctgcatagccatgcagggagtgtgcttacttcgttataaaacagaaatatttagattcatttttatgtaagttcgatcatacattgaaatgcaccttgaaaaacataaaggagaaacaggctctcttcaccagtgatttcaaagttctggtcatgcctttagatatacttaagaaagcagtgattatgaaaagcttagattttcactgtagaaggaagaagaaaagccagttctgtcttccgtgtaacagctctaccagtgttttctgacttgttcaccaaattctagaatattagaaaacaaaaagaacctcattatagctatagcaggacttttagggccaagaaaacatagcaaagtgggctgcaggaatcattttcaaaagctggcacaatctggaaagagaacagatgtgagccgagctttcccctagtttcttaggcggcaacttggaatatagaaccaaggacaactctggatggtgggactgcccctgtctattgaggataacttgctctactcccaggttttaccccagccaggagcatagtcccagtgtgggaactgtggagctgcccatgttggggagtaccgtgacacattggaattttcatgagccagaacccactatacctctatttttgtatcttccctgacctctgattacctgggatcacttggggtaggagcacaagcataggaagagccagcagcaggagtttcatggtccttgggaagcaggaggtggtagatccaggagttcagaatactgtgtgcagtgtgagtctgaacaagagttttattggcctctctgcagtgggggcagagggatgggcacagaaccagccggatatctaagagcttatccatgcataacatcagtctagtgtgtggcacataagctgagcatttgatccaggcactgggagggcatgcagagggttacaagtcacaggttttgaggaggtgtttggagcaatggagagggaagattcacactgggacatcttccctagctttccccgatctctcattagggctcagcccttcttcacagcccctctcactctagcataaacctacttttgaatggtctacttatctgtgtgtctccccgcaccagcctgtgaaattcctgagagtagggaacgtgtctttcatttttgagcccccaaggcacgaagcatgctctcagtgaaggtttgtggaaataaacgataatgaacacatgtcaatctataagccaaatccctctcttacatatgtgcccaacagggaaaatgacttgcccaagaagtcacttgctgcagaagtttgagggagatcatttataagactcaaagggggatgctacccaatgtcattaaaaaaaaaattccctagctgggtgtggtggtgggtgcctgtaatccaagctactcaggaggctgagtcaggagaatcgcttaaacccaggaggtggaagttgcagtgagctgagatcgcaccactgcactccagcctgggcaacagagtgagactctgtctcaaaaaaaaaaaaaaaaatccctgctgaagacagatctacaataatttgggatgttacctttgacaacggcaccatgagggtcatcagaggtctgggagctgtccatgaagaccccaacatttagacttgcctttgggatgtggaacctcgatgtcacccccagagtcagcctaggtcctgcattgctttagttgcattttcatcgtgtttcaacttttgctccctcttgtttactcggctctaaaagtctctgtaaagcttttacagaggaggttgctgatttttctcttctggaattgataactttcactgtgagaataattgatgggaattagcagggttgccatgtgattgaggagacttctcttctggatggaaccatgtggaaagcgtagcatggtggtgggctattttcaaattaattttgttttatgtttttatttttttgagacaggatctcgctctgtagcccaggctagggtgcagtggtgcgatcacagctcattgcagcctcaagctcctgagctcaagcaatcctcccacctcagcctcctgagtagctgggactgcccaggtattcaccaccatgcccgaatatttaaaaaaatttttttgggagagacaggtcttactatgttgcccaggctagtctcaaactcctgggttcaagtggtcctccctccttggcctcccaaagtgctggaattacaggcatgggccactgcacctggcctccaaattaattttagattagtatgttctaacaggcagaactctcttactatggaattgtttcccagagagggagggggtactctataactcatttttcaagcagggtctaagtgattaaataggatggatttctatatagaataaagaatgtcttttctagttccttctaagcatacaaatctatgttcttaattttatgaatggtttctctacatgtcctgataagtgcagagatccctgaccctttctaaactgaagaacttgagaaacaccttttttcgctcttgctacagaaaagcaggaaaatctggattacccctaacccaattcacagagcctgatctcatatctgagacggtagtggtggtggtgggaatggagaagggctgtaaaaaaaaaaaaaaaaaaaaggcctgaagcggaaggactcatcacaggggagaagctaggtgggtgtagtccatgtagtccatggtgtcccgcgagtccctggtc

SEQ ID NO: 1561764 - DNA, 4001 bp, Homo sapiens
ttcagccccatccactctcagcccattcactctcaagatggaccaactctcccagcctaaggattctcccactctttaggcatctgctatgcctttaaatctctcagctcccaccatgttctccccagtccactcctgactcaatagcctctcctgcagctggtagatggggaatcatcttcaagactgtaatgatcacaccatcgctatgacccagccctagtgacttctctcgactagctcttcacctccccctgccatccccccaccctcaatccatttgaagtatcattccttatgattgacagacaccagaaacaaatttgtgagttttaatgaaatgtggaccctaagcaacctgaaacaaagtcatttctatctattagttatatttgtcttcatttttggagctgttgtggacatctgaggagtggtccagccaaggattccatgaattgttactggttggattgttaaataacgactaggaacacagcaccgtttacgatttcggcagcgtatgatgctgtcttcaccatctttgcacaacaaccggcagtgtccatccatccaacactctactttggggcatatgaacaacaattaagcagatgttagtatccctcaagcggagagaaaagacaaggcagaggaggaacaggaggacagggaagaagagaagaaagccagctgagtgagtaatgccagacccagtcccaggaaaagagagaagagaccttgagagggaagagaactgagacaatggttccaactgagagctccgaagtttttgggagagccttttttggacttctcacccttctgtcttcctagcccccaacttcctactccttactttggaatcaactgaagctaattaatgtcccacctagcagagctagggatgaagggaaaaggacatgatcacctgtaatattagggaacgaagaggattcactcacattacacagaccctgtttcttatcaataacctgaccctatttcacataagcccaacaagcctcagctccagccgcatcccaatctgcaatcttccttgaccctatattaacccaattcaaactcaaactcattcaggcctgccttaattagaactcccagccttactcaactcaatgcccccaagccccaactccaagccaaaccctaatctaatctaatctaaccctaatctaatcaagtcactaacctcaattcccagcagtatgccatgaccaagctgaacccaatcaccctgcagcatccagcaccgactcccagcctcagcccaagccccagcctaatcctcaacaccagctccactcaaccccaaatcccatcctgtctccaactctgccctaaaccatcagggaagcccagctcctcacctccagctcatcctaatattccttctatcactccaatcccaaggtttttcctccacatcacaactcaccccagcttccactctagtctcccgaagtcctcaacaagtccccaacctgcacccacgctttgcccctcaaacctctcccaagctcccaccaggataccaccctggccctcaagcaccagatgctccaaacatctatcatcccaccactctggcaaaaaagaatcagagagagatattaacttgagatgatcctgggcaaacctcccgaagctgcaggagagaaggaaaggcttcagatgatgcccacagtgagagggaagggaaagacgggaagcccatgaccaggaacccagacccccgagagaggttcacgttacctgatatcactggttcttctatggccagaaggatggcaagaaacaggtaaagaagtttcatggctggcagacctgagaggaggaggtggctgagctgcaggggaaggaaatagggttccctgcagcacggcagagatgagctttgcttttatcagcagggctgtgggcagtgaattagaacaggaggggatttatatgaggtcatccaggccaaaggacagtgtgtagcagatgtctcagcaaagcacaagatgagagtgtgggaaactggccagtaccaatgccagtaaagggacaggtcaattaaagccatttggcctgtgagacccacaaaggaattaattaatgcataataaatacatatcaagaaatatttaacttaaaaattactttgcacttctctgataaatagtaagaacatttattcaacacatgtatttgtctctttgtttcttccttttgaattatttagtcagatatctggacaattctattggggtgttgttgggtacttgctgatttgcaagagctcttcagtgctgttattatattaactgtcttgtcatgtttggtgacaatattgttctccatgattatgttctgttttaaaatatattttttcctataaatgtttaaaagatatttaaatcttaaaaactaaattaaacaggccaggtgtggtggctcacacctgtaatcccagcactttgggaggcgaagacagggagatcacaaggtcaggagttcgagaccagcctggccaacatggtgaaaccccgtctctactaaaaatacaaaaattagccaggtgcctgtaatcccagctactagggaggttgaggcaggagaattgcttgaacctgggaggcagaggttgcagtgagctgagatcacgctattgcactccagcctaggtgacagagcaaaactccatctcgaaaataaaaataaaaaaattttaaaaaataaattaaacgagaattacttattctcagctttctaacagaaggatacacatgtgtctcagctttctaacagaaggatacacatgtgtaatgtctttcagaactttgaacttgccaatcttgtttccagttcagggccttagcagttgtcatctgttctccctgtaaagctctttctccaaatcttcccatgaaaatctcctgctcatcattccatatcatcccaaatgtcacctccttggagagactttccctggccaccttagataacggtaactccaacccacagtcactctggactgtaataacttggtttatgatcttcatatatgtatctattcttttaaattttattttacatgtttgatttttgtctctccacttagaatgtcagaaacctggcttataaccccagtacccataacatcacctggtgtattaagatacttattcaactgttttaactgatattccccccaaataagaatgattccaaaagacagacatggatttcttttttatgtaaaagtctgggtatgcagttaagtgtgacagcttcaccattcagcagggatctaggttccttttggcttgatgctctgccatcctcaagaggctgcatcatgtgatgaccctgagctgctccagttcccaccgtcaagttcccatccagccatcaggaaaggaggagtgatggaagtgaaatgcaacacctttccctttaaggacaccactcagaagtttcacccctcggcttggcacagtggctcacacctgtgatcccagcacattgggaggccaaggtcggtggatcatttgaggtaggagttcaagaccagcctggccaaactgatgaaacctcgtctctactaaaaatacaaaaaaaaaaaaaaaaattagccagacgtggtggtgagcaccgtaatcccagctactcaggagcctgaggcaggagaatggcttgaacccaggaggtggaagttgcagtgagctgagatcgtaccactgcactccagcctaggcaacagggtgagacaccgtccctccaaaaaataagaataataagttgcaccctttgcttccaatcctgtccacctcccagagctcatttagaccatcatgcgcagctgcaagggaggctggaaatattttccttattctaggcaaccatttctagctaaaatataggggttgtcttattaagaagggaaagagatacatggggggtggagttctagcaatctctaacatacctgacattaa

SEQ ID NO: 1561765 - DNA, 4001 bp, Homo sapiens
gtagaaagaggccatgggccaagaatgggttcttgtgttcatcatacttgcctcctggactcccctaaaatactcatagattgagacccacagcatgcctcagcctagactctaaagccattgctatacaatacaatcaccactagccacatttagctatataaatttaaagctcgattgaatcaaattaaaacttcgggtccgcattcacactgggcacatttcaagtgctcagtagccacatgtggctagtagctaccatattgaacaacatagacaggaaatatttccatcatggcagaatgttctattggcagtgctggtctagaagaaaacaggaatcaagtagatataatgaatattctttaattcatgccctcttggaccagctatgggtcagcaggctaggagctatttgcaaggtttagattgttaccacctactggtccatcctgttcttcctaacatgcacaccggacacacacacacacacacacacacacacgcacacaacctttcttctttatttacttgtttctaaatgtaactaggtggaactatcagacagaaacagggtgttgccaagaatgatttaatagaactgcaggatcccatgatgttgagactcaaggttggaagagaggtgtcagactgcagaagttgattccaggcttgtatttgtgtctgttaattttggttttacaggtacatacttgggatccacacagcacttagcctcagttttgcataatatatagtatacttcactttctttacatgttgttctgcacctgcctgacttgccccaacatttcatgactgaaaacaaaagggaagaagagaatagagtcagttttgaaagaaagcagaaaggtgtgaaaggaagaggctaaagcccagtagaggagtaggagggaaatgaggaggtctgtggggaagaagctcttacacaggatcccctaagtttaagggagattatagaccactacgctttcttccttcacttgtgccccctgttagaacccccagagtccccccaactcagtggcataggacctactggatagcttcccctccttggccagctccttgggagggggaagaggacccctctcccaagggttttatctcccccatattataatgtacccaggtgcccagtagcaattagccaccttttctcattgttctttggtaccccctctgaccatatcaatgaaaggtgacaggaatattaaataaactcatttaacatctgtaagtcttctagggcacctttaaaactcccaagaatatcatactgccttcttcacaacatcctgggacttttctctggccccaaccagtcaagggaattaggaacagctattccagggaacctacaacctaaggtaacccagatgatttgaggttgcattaaaaagtggaatcagaatcctcaaacaatcagaaatttgagaaccattttcctagaggcaacaatgcatcaaaattcaaatcctttcaatgaatgtttttgaaaaagtccccattttctctatactccatacccaagtctctctctttacaccctatcccatcctcaggtcatcacgttcagcttttccagagctaaccagagataaggttggaatggtcaagtactgggcactgggaagaccatttggtaccagagaactcaaacttccccataactagagagactacctaaaggcctcaatgagctctaccaggccattctcccagcccaacctgtcagagtccccagagttctctgaacatgcatcaggtttcctgactcccatccccttctggagatcctgtttacctggggtgacctgggccaggagcagagtaacagtcaaaagcagaagaaggagcttcatgaatgatgaatgatcagggagggataggaggcttctcaactggtaaaacagacagaggactccattctgggcagtccagactggtatttattgccttgaggagcatggcagagccaagatcagtgaaccagaacgggaacagtcatttgagatcagacaggcaggcaaggaaggtatcaaccacactgcctgaggaggctgggagagggggaagggacgttaacaaagagaagatacggccttgcctctgaagaattttataatacagctggagaaccaagaaggggaaaaatattttcatctctaatttgtttttcattaatgagaaaaaaagagagagaaaaagagataagacagaaaaggagtgatacttctctgcgccttgggttcttcccagcaacaaggacatcttaggatgtcccatatgttgatgattcattataataccaaatgaagggcagagcaggggaaaataccttaatagctccatggccatcaccactggaaaccagaatgtcagtattcatggagtggaatgagcaggaaagccatagcccttacttttaacagtacatatttaataggaacaagtagcaccctcataggtagcaaaagaaaagccatttattattgttgtggtcttttttttattattacttatttttttgagacagtcttgttctgtcacccaggctggagtgcagtggcacaatcatagctcactggaacctcgaattcctggtctcaagcaattctcctgctttggcctcccaaagtgctaggattaaaggcatgagccatcatgcccagcttggtctttcttataagaaatggtagattgccccagcaacttgggaggccgaggcaggcggatcacaagttcaggagatcgagaccatcctggctaactcagtgaaaccccgtctctacaaaaaaaaatacaaaaaattagccgggcgtggtggctggccactgtagtcccagctattcaggaggctgaagcaggagactagcttgaatccgggaggcggaggttgcagtgagccgagattgtgccactgcactccagcctgggcaacagagcgagactctgtctcaaaaaagaaagaaagaaatggtagattgtaatcttggccctacttcttcatccctacttgaattcacacatttgccaaggtctcatcctaggagaactctatttcattttcccttcactttggccttggcatgtgatttgctttggctagtgatatgtgggcagaagtgacggtgtgccggttgtaagcctaggttttaagagatgatgaatattttcatttgcccttctgtgtctctgccatcactatgagaagaacatgccccagtggtccaaggaggatgagagatacgtggggcacagctactccaggcgactcacagatctacagtgagaaacagagctgccccaggcattccagcctcaagcagggcaatctagccaaatataaaggattgatgttttaagccactgagttttggagtggaacattacatagtaatggctaacttatacacaaggccagcagatagatcaggaaagagccaagtgctttttaggacaataatggtaaggtctatctttcttttctttttcttttttctttaagacagagtcttgctctgttgcccaggctggagtgccgtggcaccatctcagctcattgcaacctctgccccccgggttcaagcagttctcctgccttagccccccgagtagctaggactacaggcacgcgccaccacacccagctaatttttgtatttttggtagagacgaggtttcaccatgttggccatggcttgtctcaaactcctgacctcaggtgatccacccgcctcagcctcccaaagtgctgggattacaggcgtgagccactgcacctggcctaggtctatcatttcaaaatggacagaaataaagacatactaataagaggaatatcttctttctaacatggaagaaaacaacaagccaggagcagaggctcctgcctgtaatccccacaattcgggaggctaaggcaggaggattgcttgaagccaagagtttgaaaccagcctcagcaacataacgag

SEQ ID NO: 1561766 - DNA, 4001 bp, Homo sapiens
agagagagagagagagaaagagagcaactcatgggagcaccatccttgcagaagtcttagtctagaaggtactttctttatgcatccaaggaacccccagtggcacagagtttcatctacactgaatggttttgagatctacttcccttctttaaagaactccatcatagccctgcaagtttgctcttgtgaacactgataagcagaataaggctgcctaataaagggatgacctgaatccattatgtgcatgatttatcggaattaatagtagttttcagcagtagagaagactctcataaaagacccttttcctatctgtcacaaaaaactgtgaaacaaaatgccttgattgcttcgtgagctaaaaaggacttcccacagctgaactatatacatctacagttctggagtgtccaccattcttagattctgcttaagattccacatcttaacttctactgatatccaaccatgttgccaagactcccatttcaagctctccaaggaaataatctgattggctgaacataatcttattcattatctaatagagataaaccattttaaaaggatagaaaactgtggaacaacctcccttactgatatctgcacatttcagcttttctttgttgccacacatgaagtcatatcatatgctctcaatagatggggtgaatgcctttcagtgaaaaaagaaaagtaaaaaagaatgtatgaacgcagagcaaaaaaaaaaaagaaagcgataaagatctgaggagcgaatatgtgttttccaaagattacagaactacaaatgaatctgcaaatggtacattaggaaaattatctgaggatgaagaaaggtaggaggcactcagtagagaaaggttggtactgatgagtggacggtgctgtgaagtgtccaggagcctggagtccacatattaaaggtgtacgcagttacctggacctaagtccaattcagtgtactcaacccctttaagtaggtttctgcagtgctgtggtccttaattcaacatcattcccctcttcttgagcctcaagtgggtaccactgccatctctggcttagtagaagatagggtggtatctgaaattcagaaaactcagaacctgttccctgcctggccattgactcttgctttggcccataagtcataagtgaccctaactgaagagtttgcccagcatccttctactcccttctcagatttcttccacccacttctggttagttccttgctctcagcactgcagcagggaaaggaaatatatctacatatcacttctttgtaatctttggggataggaagcattggagggtagtgggcaaagaagatgaaacttcaggcccaaataaggcttggaaattttctggagttctattatattccaactctctggttcctggtgctatgtgtaactagtaatggtaatggatatgttgggcttttttctttgatttatttgaagtgacgtttgacaatctatcactaggggtaatgtggggaaatggaaagaatacaagatttggagccagacaaatctgggttcaaatcctcactttgccacatattagccatgtgactttgaacaagttagttaatctctctgaacttcagtttaattatctctaatatggagatgatactactgacagcagaggtttgctgtgaagattaaattaggtgatgcttgtaaagctcagggaatagtgcctggcatagaggaaagcctctgacaactggtagttactgttatttactatgaatcctcaccttccttgacttcttgaaacatttggctattgacctctttcctccttgaggctcttctggcttttcattgtcaacacagtcaacgctcaatacaagggacattaggattggcagtagctcagagatctctctgctcaccgtgatcttcaagtttgaaaattgcatctcaaatctaagacccagagggctcacccagagtcgaggctcaaggacagctctcctttgtgtccagagtgtatacgatgtaactctgttcgggcactggtgaaagataacagaggaaatgcctggctttttatcagaacatgtttccaagcttatcccttttcccagctctccttgtccctcccaagatctcttcactggcctcttatctttactgttaccaaatctttccagaagctgctctttccctcaattgttcatttgtcttcttgtccaggaatgaaccactgctctcttcttgtcagatcagcttctcatccctcctcaagggcctttaactactccacatccaaagctacccaggccattttaagtttcctgtggactaaggacaaaggtgcggggagatgaggccagaaatgttcaagagggtttctgtccctaacatgcttaccgcttattgaggaaaatgggaaacaagtatttttaaatgagcttcatatccctcaaaagcacacacaagaaatgttttctaaataaatcaaatcttgattaagtaccttttacatacagagcactctcctgagcaccaggaattcagagcagtaaggatactgtcctctaacagccagctctgttaggataaaccagggtatgccacagtaaccaaaaaaagaagaatcttggtggcttctaagaacagaggtctgtttgtctatttcccatacatgctgcatatccactgaaggctggctggggacactgccccatatctcagtgtggaacccaagctgactgagtagccactcatttggtgctgatcaccatggcagaggaaaagagagctctagagagtcttcaactagccattatatgccctggccttggaagtaaaatgtaaccacctcataactccactggctacgacagtgacatggctccatccaaccacaagagggccaaaagtacaatcctacaatgggcttagaatgcagaaagccagaattatccaaacaacaaaagacaattgtgggcaaggctgtggagaaaatggaacccttgcacacgctgggtgggaatgtaaaatggtgtggccactatggaaaacggtatggaggttcttcaaaaaatgaaagataggcggggtaaggtggctcacgcctgtaattccagcactttgggaggctgaggcaggcagattacctgaggtcaggagttcgagaccagcctgaccaatatggagaaaccctgcctcaactaaaaatacaaaattaactggccgtggtggcacatgcctgtaatcccagctactcaggaggctgaggcaggagaattgcttgaacctgggaggcagaggttgcagtgagctgagatcatgccattgccctccagcctgggcaataagagtgaaactccatcaaaaggaagaaagaaagaaagaaggaaagagagaaaggaaggaagaaaggaaggaaggggaaggggaggaaaggaaggaaaggaaggcaaaggaaggaaaggaaggaaagaaagagattatatgacccagccattccatttctggatatatatccaaataaactgaatcagtatcttgaagagatatctgcacacccacgttcattggcattattgaccatagccaagatatggaaacaagctaaatgtccatcaacaaatgaatggataaagaaaatgtggtgtatacacacagcagaatactagtcagcctttaaaaataagggaattctgcaacatgtgatgacgtgaatgagccttgagggcgttatgctaagtgaaataaaccagtcacggaaagacaaatgctgaattattccagttatacgaagtgtctaaaacagtcaaacttatatcaacaaagagtggcatgatgattgtcaggagctggggagtgagggaaattaggaattactaatcaatgagcagaaagtttctgttaagcaagatgaataaattatagaggccaggcgcagtagctcacgcctgtagtcccagcactttgggaggctgaggcaggaggatcccttgagcc

SEQ ID NO: 1561767 - DNA, 4001 bp, Homo sapiens
ataccatatgtttcatttatttttcaaattctttgggtcctccagtagaaggtaagctccaagaggacagagattttgcttatcttgttttgttcccagttctacctctagcacccatcacagtgcttggaacaagaaatccattcaactgtatttactgaatgaagcaattaattatttgatgacatatcaagttacttttccctgtaaccagatactatcccaggaaagagaaagggtgatggaagaaagagacatgctgaaagactcaacacttattcaaaagagattgaattagcttagaaatcattttaaaacagaaaagacaaatattgaactgctgagttcaggcccagcccctatgtgccttgtcaccctgggttgtaagtgctatttaactgtctcccctagtttgctcccctggtgccatgtcatttatctctgtagtcctgctcctcccaccactaactcccacagtcaggatggaagttcctgggaaagtttggtgagttagagaaaatagagaagccatatttcttttgcagaccaaaatttcagtgtgttcaatgttgttccctcaacctgatattattacacacttgatgttattgcagtttgagaaatgaggaaattgatactctgagcagctgagcttcttgttggggctcacagagtcagaaaatgatggggcaggttttaacccggggtctgggctttcctccctactccaggtgagtggtgttttagggcctcaggaagacacaaggacggaggtcagcttgtttaggaaattcacacgtttctgactctgtagaaaggttagccgacagccttagggtgggtggaaacttctgccagatgagcaggaagggataggtggctcatgctggaattggtgggtggtaggtctgaccagggtctttctctgtttaaaccttcccatgggtccctcacctggcatttgaggcccactgagacctggagcttgaatgcttcctcagctttacccccgcctctctcctaacccacccctccatgttatgcaggtccccgacactcccatgctctctcccgcatccaacctttgcataggctgacctctctgcctgggacacccttctgctttcccctctccttccttttctattttcgactcactttttaggactcaggatatccctccaggaggactctcctttccctcagcctgggctggaccatgtgtacccagccccctggtttcccactgccacagccgtgtcaccctgggttataaatgctatttaactgtctcctccagttagttcccctggcaccatgtcatttatctccgtggtcctagcttccagcgcagagtctggcacagagacagctaagtacaaatgagctttctctcccattaaggtagctgtgatcttcacaaagcttcgttcattctggggactattttgcaaaagggccatacctgcctctcctctttcctgcttctcttgctcacccctcccactcctcctcacacactaggccacccccacatgctccctggagctgggcaggaagaggagggatggagccgctgagagagcagctctggatgttgtagttgtcatctatcagctggcacctgctgctggtgaggcgcctcctgcctcctatacgtggtgctagatgacaacctgcagcccatccttctagcccttgggattctctgaccaggccttagtctctaagccctgccccttccttaaggaggttcaggttacctggagtcagctgggataagagcagcagcacagtcaaagtcagcaaaaggagcttcatggctaaggcagcccaaaatgaagctgcaagtccgatgccacggctgagctaatgggagaaggagagtgcctggcctgtggctcgcactccctcagctgcccacgggtacagccctcacactctgactggacacccctccctttgtcatttaggtcagcagggagaggacagccaacaaggtccagggcccaagacttaatatactacccgttccttccacccagctccaaactgcctgaacccagtgaccagcaggaggcgccacaaacaccggctccggaaggtcagggaagacggcagagttttgaagaataaatacaaagcaacaggtagatgagctgaaatggggttccaggtggaggaatgtctgtacaaaggctcatgttggtgttgaaaatgagaaatatgacataaccagagcaaaaactgagaggaaaacggcagaaagagatgaagctccgagcaccagcctgtctgtcacagccccctgctgggttctaacatgcggtggccctccccctagggtcatccttccgcttcctcagagatctgagaaccaaccactcagaatccttcttctgaactcgggttttgaaaactcattcttggccgggcacggtggctcacgcctgtaatcccagcagtttgggaggccaaggtgggtggatcacttgaggtcaggagttcgagaccagcctggccaacatggtgaaaccccatctctactacaaatacaaaaagtagccaggtgtggtggtgcatgcctataatcccagctacttgggaggctgaggcaagataatcgcttgaacctggggaggctgtggtgagccgagatcgcgccactgcactcccgactgggcgacagagcaagactctgtctcagaaaagaaaagaaaaggcatctctttcctttagttccctcagccctcgggtggtagctgcatcctgtagttactgtttctctgactggaccctgcttgaaacagatgtcaagggtataatagcatacagagggattacaagggaaaaacaacaacaacaacaacaacagtgaaagccatttctgtaggggcagaaaacagtcaatggggttgaaaactgaaaggtaagtgaaacagtgaggtcagcaagtgtaaataattctttctaaaacccttacaatgaagagaagaagagacactggctaggaagggactcagtggaaagcctggaagtccacctttcctgtgctgttcatttttggtaaggaggctcatttcatttctttttttttcttaattttaaaaactattttttatctttttgtttttgttgttgttttggatacagggtcttgctctgttgcccaggcctggagaaataatgtatctgttggattcttttctccctaaaagaagagattttcccactgcctgaaatgccaggatatatggaggatttttgtattgagagtgacagcagagttgaaaatattgggtaactagtcctgacactgctactagctttctatgtgaccttggaagaattactttttttttttttctgggtctcaatctcttcaattaaggatttggggcagatgtgcagtagggatcaatatatccatcatattatatggttttctatataaaagacacagaaagtaaaagaatgcagcaatccaggttttcaacaccaaaacagggcaaggtaattgggttttcagataaggattctctagcctgcccttatcagcccccaagtctctgaaccacttatatcacaggtcttttctcttgaccccaactcccaagtacactgtgtgggtcttgcaaaatcattgtccatctctgggcctgctccttgcatagtcaatgtagcaattttgctcttgttttgaagcctttgtagtcctcctgaggactctggagtagctgtgtatccacaatgggcaggggataagggagatgtcaagggagcagagggagacttatatgtgcacctccaggcacacctcagacatcagacaccaggcacacctcagacatcatggcctgttcatggtgagtcagaagggcctacttctcaacctcaccaggaatcaaggacaaacaaattcagatgacagtgaggtatcatttctccaatcaaattgccaagaaaaaaaaatatatatatatatatatatagagagagag

SEQ ID NO: 1561768 - DNA, 4001 bp, Homo sapiens
tcacctccctcccggacggggcggctggccgggcggggggctgaccccccccacctccctcccggacgtggggctgacccccccacctccctcctggacagggcggctggccgggcggggggttgacccccccacctccctcccggacgaggcggctggctgggcggggggctgactcccccacctccctcccggacggggtggctagccaggcagaggggctcctcgcttcccagtaggggcggctgggcagaggcgcccctcacctcccggacggggcggctggccgggcggggggctgaccccccccacctccctcccggacggggcggctggccgggcgggggctgacccccccacctccctcccggacggggcggctggccgggcggggggctgacccccccacctccctcccggacggggcggctggccgggcgggggactgaccccccccacctccctcccggacggggggctgacccccccacctccctcccggacggggcggctggccgggcaggaggctgatccccccacctccctcccggacggggcggctgccgggcggagacgctcctcacttcccagacggggtggctgccgggcagaggggctcctcacttctcagacggggcagctgccgggcggaggggctcctcacttctcagacggggcggctgggcagagacgctcctcacctcccagacggggtcgcagcctggcagaggcgctcctcacatcccagacggggcggcggggcagaggcgctccccacatctcagacgatgggcggccgggcagagacgctcctcacttcccagatgggatggctgccgggaagaggcgctcctcacttcctagacgggatggcggcggggcagagacgctcctcactttccagactgggcagccaggcagaggggctcctcacgtcccagacgatgggcggccaggcagagacgctcctcacttcccagacggggtggcggccgggcagaggctgcaatctcggcactttgggaggccaaggcaggcggctgggagatggaggttgtagcgagctgagatcacgccactgcactccagcctgggcaccattgagcactgagtgaaccagactccgtctgcaatcccggcacctcgggaggccgaggctggcggatcactcgcggttaggagctggagaccagcccggccaacacagcgaaaccccatctccaccaaaaaagtacgaaaaccagtcaggcgtggtggcgcgcgcctgcaatcgcaggcactgggcaggctgaggcaggagaatcaggcggggaggttgcagtgagccgagatggcagcagtacagtccagcttcggctcggcatcagagggagacagtggaaagagagggagagggagaccgagagggagaggggagaggggagaagggagaggggagaggggagaggggagaggggagaggcaaaagaaacaaatcttatcagagaccttctctgtccatcctcatcagccttcccatccccaccccctccatgcacacaccactctaaccccttcccttgcctttcctcttctcagcacttatcaccacccaacatatgtttatccacttattttctatctccaccaactaaagtgtcagctgcatgaaagcaaggaccttcttttctttcactgctacatgtctttcactgttattatttcacaaccatcataacataaatgaatatttattgagagaatcccattttatagattaggaaactgaggtacaggctgatttagcaacttgctctaagttgcccaccaagtcagtggtggggccagaacttaaatgctgatagaggcccctctgtcctccaggacctgagagtctagtcctcatttttacaagcacacatgtgcacacacacacacacacacatgcacacgatgttgttacctgatggcacatgacccagaaccaggagagccacaaggaacagaagcagctgtgtcatggccacggggctcctggggaggctgctggagagagcacaagaggaaagacccgagcaggctgagcctcgctgcttccagcccaggctttattgagctgcagatgaaggcagtgctgtgggcagcaggcctaagtgggagtatgaggccatgtggtccccaggctgcttgggatttcagccagctacgtgggaactggtcagccacaccctccggagcctgttgagctcggaaggggaggtagaattttctgaggcagtgtctagggtcagaaactagacatcttccccacctaagagagtggaaaaaatcttggcttaagagagacctagttcaatcccccgcatctccccctaactgctgtgagacatcagacaagtcacttaacctctctgagcctcaggctgttgtctatgaaatgatgacaagcatcccttacaaggccaagtgaacagcatgtatgcaggcctactctaaaatgggaagagtaatagtacccatgtcatagagagtaatagctacccatctcatttaggggactaaatgaagtaatacagtggctcctatactatggttcccccagcaagcagcagcaacacctgggacttgttagaaacaccagttctttagccctaccccaaacctactgaattcacctcttcctaagcagaagaaggccacaggtcacagagcagcccatgggtcacaggttaaaccactggttacaagttagaccacagattcactaacactggtcacaagttagctctctggtcatttgttagatcactagtcatagatgagagtatgggtgggtcccggcaaaatgtggcttaacaagccctccaagtgattctaacacaccgccaaagtttgagaacccctgagataatatccgtgcagagcttagaacagtgtctggtacacaggaatctaagttgcatcatgaaagatgagtaggggaaaaggtatcccgggcagaaagaatagaatgtgcctagaagagtagggcatgagccaagcaagggttttcctgggaggagaggttgaaatgattctgcagagaataggttggggcttgaatgccaagttcagacttttgtattatagacaaccaaaagttttttagcaagagtgtaagctgttcatattatagttttaaataaagaaactgaaacccaaagagggaagttgacttgcctaaggtcacacagcaattgtgctgcagagatggaaaagccaagtcacctcactcccagacaatgaagggtgctgcaccactcatggcccatcttgcaagttagaaaggtaagcttagagggccaagccacggaaggaagccaggcacgagggggttctgtatcagctccaagacctgtgggggctgagccagtctgttcagctgctgtgggagttattccaagctgaacacctgaatcccctcagccatgacaatgagccccacccacaggtgcagcctggtctccatgggctccacacacagacacaccccaatttctcaagacctaaagggaggcagcccagtcaaagagtctggatcctggccccttggatggccgacgtcaccagcaatctctttcctcctcctccatacctgggagcattttttttttcagccatcagtaatagaaacagtagacagagtggcagagacctcaggcccaggcccagctaagcctcagttggtgaatgaatgaatgatgccaaaataagattttcataattcttcagtgcagacttcctgagctctctcttcctccaagccacctcccaaaattaattcttcatccagagcagagtttcttaaagtgaggtcagtgaaccgcctgcatcaggatcacttggggcacttgtttaaaacgcagattcccgaacccctcccccagcaccgtggaatccgcctctcttggaaggcgggacctgaaaatttagcaagttccccaagtggtttttctgggggctaatatgttagtgcatcccct

SEQ ID NO: 1561769 - DNA, 4001 bp, Homo sapiens
agtacatctccaggaattttatgctgaatgatttatgtataagaaaggttatactagccatccttgtctataaaatgtaaatgcacttatttatgcaaaaacaatttggctaagtaatttaaacagtatccattctataaaatttatacagtcattggaaatacagtttttgaaaatagtaaatgggaaaatactaatagtataatagaaaatttataagtatgctatacatttttattcaaataagaaaactgaggaagaacaatagatcaaaaatattttgtctcttttaacttctttacaatttttttacttctttacaatttcaaaatttccaaattttcaacaaatacagcagtttataatcagaaatgaatgtagatattaattctgtaactcacattacatcaacatgtgaatcaagacataacagatcataggcacagttataaccatttaatagacatgaatagcatctttctaggcaacatataacacctccaaatttaacaaaagccaaatttcttagtatataaagataattaagaaagtttagaaatctaatggactggatgttcaaactcatttataactaaagtgtcatgaattcaaacatcaggacatcattttcacatattagactgtaaaactgaatgtagtagaaaactgaatgtagtagaaaaaacaaaaaggactgatgagggtgtgggaagctgacactcttgcaactggtgataggagagaagaatagttcagcttttctggtaggtggtttgactgtgtgtgtgtgtgtgtgtgtgtgtgtgtccacgtgtccagtcataaatgaaaagacatacatttgtttacaaatttttcttgctgaattgtttttgataattaaagacctatttttcatcagtagcggagtaattaatgtgaggcaattcatctgctcctcctcaaagttttacttatcgattaaaaataatgaactaggtttatgtatggataagatgtctctaatatattgctagtacattgcagaacaattcacatggtgcatttgcaattgcattttttaaaaatctaaaaggtatacacatgcaaatataaatatatttgtatttgctaggatatataagaaattggtaacattgattgattctgaaggggaagactgaagaactggtattcttggacagacaaacatttttcttttccttaaaccctataaatccatcgattgcttgatacataagtcaattgcaagtattattttttaataaaaagttaacaattttcaaaagtagcattattaaatagtggaaacagactgttcctattcatctaaaattagaagctccccattggtcactagtctgtctatcctgtcttcactccacttatttccacttctaccccaaacatatatattgtctcttccatatgatagtgctacagaatctacaaactgtcaatggacttgttcaccatatctaagaacatgaaagtgagggcctccctctgaaggtaccctccgggcaaagaagaattcaagatggtaggagaactaataggacacaacaatgaaatagatacaacagaataatcgaaatggaagtgaagtgaggctgaactaacattggatagttatgtagagagacagatagggtggctcagagcattaaggaaattcttgtctttggagaaatgcctcagaggacatcccagcttgctagatgcccctaacagaaagattctcagagactaggggcatggagctgccaaaataagagcattctgctgctctttgttggcccagatttttcctgcagattccctctcttcccatcatgataccaggggagcccaagggcaacaactcatcctagtcatcatctctgctttatagggttccattacctttggtcacccgagttagcaacccacagataatgaaggtcagcatcaggatattcatggctcctgggagagaggaagctctgtgtcctgaggaatacagaacactgcacagcaaggaatttaagtggtcacctttactggtctatcatgggtgatgaaccagagaaggggaaaatgccatgccacccagatcaccagaccattaatttgcaacactgagtgtgcatgacacaataacgtctgcttctagaaattattaaagaaagctgaggccttatgagataagctattatcccgtagaactgtaaggtctgatggaaagaaacagccccaagaggaagtttttgttaactttagatgggctcaattgtccttctcctctgtctgtatgcagcactttgtacatacccaatgacagcagaatggtgtgtaaagatatcacttgtggcagttcaatagcttacaacatccggtattcaccttttcttctgagtgatcaccccgatatgaattcctgtgaaacaagaaagacactttttaactaataagttcataagattccatcaattatgagacagaaggaatttggaatgaaaatagtgaaaacaggaaaacaggttttattggtgctcttctttttcccgttccgctgtcccatcaactcttttccctcattcagaaatacaaataagaaatgaaatattgagagagaggaaacattttaaaaggagagggagagagaaagagagagaggagagaggcccaatgtaacattatgccccccatccccactaccaaaggagaaaaatataggagacatttgtgaaattgcccagtaggagtgatcagcattttatctcctggaagagtttgctgagctgtatttctcccacatatgtttaataccaaggaaatcaggaaaattttaaaaaaattttctaaacagctgcactgtttagaaaaaaaactgcagctcactgcccatgttcatttaattttacattaacatgctctggaggctgactgatgttcagtgtgaaaataaaatatacaaactgttcttggaattatttttaaacagaactaacatcagaatcatctgaataatcagaatcatctattttggaaaaaaccggattcattaaatgactctttggcccaaaactgtttgagaacaatgttaacatgggaatgctatgctttctagaatttgacattttcagcgatcaagaatttctatattttgtaaatggaaataccactgctaacaacaagatgctataaatagaatgatgatttgtgttttcaaagtcgatatattagaacgatgtgaaaataataataaaggcgagatattttgtggcaaagttatctcagggtaaaccctgcagctgcaagtgccaccagcgagtattctgggtgaaaatgggaaaagggttaaaaatgcaggatggccaaagccatcctaagcaaaaagaacaaaactagaggaatcacattacctcacttcaaattatactacaaagctatagtaaccaaaacagcatggtactagtataaaaacagacacatagagcaatggaaaagaatagagaacacagaaacaagtccacacatctacagtaaactcatttttgacaaagttgccaagaacatactttgggggaaaaacagtctctttaaaaaatggtgctgggaaaactggatatccatatgcagaataatgaaactagacccctgtctttcaccatatacaaaacattaagtcaaatggattaaagacttaaagctaagatctcaaactatgaaactactataagaaactggggaatctctccaggatgtttggacaaaaatttcttgagtagcaacccacaaacaaaggcaatcgaagcaaaaatggacaaatgggatcacatcaagttaaaaagcttctgcacagcaaagcacacaatcaacaaagtgaaaagacaacccacagaatgggagaaaatatttgcaaacgacccttctgacaagggattaataacaggaaatacaaagagctcaaacaattctataggaaaaaaatctaatgatccaacttaaaaatgggc

SEQ ID NO: 1561770 - DNA, 4001 bp, Homo sapiens
agaattctgcaagatgcagggaataaaacaatgaacagaaagacatgatttgaggaccttacattggagagggggagaaagaaaataaacaagtaaatgaataaacaaaataactacagattgtgataagtacaataaatgaaagaaatatgaggtaattgacagtaagtgaacagagcaaacgtttttgaatgctattaccactactattatcccttatcagctgtttaatcctcctctgatgattgagtttttaacattatatatatgtatatgttagaatatatatacacacacacaaagtgtagaaaaaggacaacatacaagtatgtgatgtatgtcgatgtatgtcactaatgttccagagacagagggagaaatcaggcaatttaaactcatagaatttcaaggatgcaataggcctgaaacatcttttgagacaaccatgagagcattataatttcctcttatccactatcaatttgaacatttctgcaaattagggaatataaactactatctctagaggcgggctatggagttattatataacccattaggaaattatactaaagaatattagtttatttcattgtgccttatgtaaaaaggtgggattgagtccggtgtaaaaaacaaaatcataggtgaataactgttctcaacacggagaaggacttactaagttagtggaagaatgcaaagaaaacaccaatagatttgacatgaaaatgaaaattatgtgtctcaaataaataatgcattttagaagcaaccaatatgtttgaaaatatttgcaagaaatatgaaatacaaatgttaaaaatacaaatactccaatagtaaccattggcaatatgtgccagttaacttagaagaaataatacccttgtaccaagcaatggaacttctaaaatttacctatacaaacagagaatctcacaatgatatattaataaggttgtacaatgttatttacagtactcacacattagaaaaaataatccaaatgacacacaattaaggactttccaagttaatattggtacaaaaatatgacagaattataagcatctactgcaaattgtattttcaaggaatattcaagacctgtgaaaattttcctgatagaatcgtaggtaaaaaaataaagcaggttataagctcatatatcagttggttacaagtgaaaaaatgcaagcagtgatgaaatgtggccaatttatttctaaataactttcagtgttcttgtcttggttttgtaaatataagctacagaataaattaaaaataagaaatgcttacacaaacagagctgaaatctgatatagacttccaatagttcccacacagaattttttttttcattttccattttacagtcctatacatatatagaaacagcctttcctgttctgttaaccacatccaagaacaaacaaacaaacaaaaaatcagagacctctctgtaagaccaagaaaactgggggaagtaatattatataattgttacctcaggagggaatatcggcagcaaaaaaaacaaaagtgaaatgaggcagggcttgactggactgacccgaagtgacaggatagaagtttgggatttcaagatcatttctacctttggaggcaactgtatgggatttgccttaccctcctccccagctccgatcacagatcctgctctatcctgagagccttcaagtttcttagaacagaggtggtctgaagaagtaggacaaatctcagccctgctcccagtgagaagccagaccccatttccacagaccacttagaaacagggactccatgtgcaggaccctgttccaggccagtgtttcttcttccccaagattctgtttacctgagaccaattgggccaggagcataaaaactgcaagggtgaacagtagggacttcatcaggaggcagtgggttctatagagtccagaagtctctattcagtatgactctgaacacagatctttattgtccttcttaggtggggttgggctcagccagtagatcgggaggatgtaggatattgtgccaacatagcttcaatctattggctagcaactctaattgaggcatcactgttcaagagtcctgtgctaggcatgccttgggggaaggataaagacttagaagagaagttgcaaactctgctgaagtgtatggcaatttggagagaaagaattacaggaagaaattatgctgctctaccaaggctgggtgctcctagcagttttttcacagcctccagtgttagttctatcagggttcatcttactgcatgtagcagtctggtcacctgcctgtctctccacctaaaatacaatgtctttctgaacacttatgatgtattattcatatatatatataattcttttctgtacatcattcttttcagagaaggatataagcaattgttttttaactgaccaaattaatgctttgttgatgatctggaaatttagaaagccttttacaaagaaataaataagtgctcaaagataaatgcacaaagaagtcttgtcactctgtagagtagcataaaacgaagtgcatccatatgatttaattctgtgcttctgttaaaaagagtgcagcagattttatcttactaaacattttttgagtgaaaaagcaacattttagaacaacatgcatagcaatgattctaatttatgtgaaaaagctatatttatgtgtatataagtaaatgcatgaactaaaaatgcaaatcacatgtcattctaataaaagttgttttctctggatgggattgagtttaaggtggcattcaaagagaattttattgtgttaaagtttttttttgagtgcctgactatattgtgactgaaagctatcaggtcctagaggttttgttctttgtgaggagtttttttttttcattccaaattattgagatataattgatgtacattaaactgcattatttagagtgtataatttgatgaacttggcaaaagatgcactggtgaaaccattaccttaatcaacataatgtatatatccttcactctcaaaatgtttctcattcctctttggcatccactctttcctcttcccttccctccctctacctccatgatacccaggcaacgactgacctgctatttgttcttgtagctttcttggcattctcttgaatattacataaatgaagtaatatagcatgtatacttttccgcttgtctttttccatccaaggcaattattttgaatcatatatgtttcgtgtaccaatagttcattcctttttattgcttgtattactttttatgcatatatgatcatttatccatttaccccctaatgaacattatgattgttttcagatgttagctattacaaataaaactgccattgaaaatttgtgtgcaactctttgtgtagccatatgctgtcatttctcttggataaacagctagatgtacaatggctgagtcacagggtatgtgtatgttttacttattaaatatgcatatactatgcttttttcctttgaaaattgccctttctctctgtcctaagaggtctcagtgttgtccttgtcaaactgataagtaaatgttccatgttaattatggatgtaataaacctttgtgttccatagttactgtaaatatttttttctggcatgcaaaaaaaaaaaaaaaaaaaagagaaaagaaaaaaaaaaaaacgaaattaccaaattgttttccaaagtggaaaacaatttatactcccactagcaatatttgagagtttacttttttccccacatctttaccaatacttagcatagtttttgtttttgcttttttagttttagctatgtgttttatttacttttgttaaattttaatttttttatagatttagaagtacaagcgcagatttgttacatggatatattgagtagcagtaaagtatgggcttttagtgtaaccatcatcagaatattgtacattgtaccaattaggtaa

SEQ ID NO: 1561771 - DNA, 4001 bp, Homo sapiens
ccaaacctcatccatggaaatcctacttatttactgctttactatttacttatttactacaagacactgctttattcctaaacttactcatgaatttcccctgaatatttgcttcacctttccctctcctaaattacatgtcagtgtttctgagtttcttattccagacttccacactataggactttttttttttagtgtacttgtcatatccccttttcaaggagaggttctgagttcttatcaattcattacctagtatataatgagtgttcaacccctggttaaagaacaaaatgagacagaaaactggcaatgcactttattagaatatgctcgaaggtcattttaaggatcaagaaaccaaaaggaagaagatgtatatctcatcaccttagtttattagactaggttgagaagcaagtgaaaacgaaattgtatttgatttatgtagactgtgtcttcaggcttgggaaattttctattattgtaacatagtcttgaagagtcagtgcaagtgttgctggctttggacgaggtggctttgtaatttttttacatgcttccagttccttgatattgaggcaacagtatctcccattttcacatagtgcctcaggcacttcatttactctgcagattttcctgcaatgtccttgtacatagttattccagcacttcttaagttgttcggttactatacacagaaaggagcaatagaacaatatcagtgtttgagactgaaggcacgttggttttggggaagacagaggaggcttgtaggaattaggggtatggggtatccacaaggcagaccctcatatattctgaagaggattttccgacaaggtcaacctcagtgtttgtatttaactggatcacttatatttaggtcctgtgaggttttaggcctcccttaacatctgatagactctgccaagaacataagatcttatctgagaaaataaaggagctgaacccttgattctaggctatggaactatgctctacataggaacctcagcaaatctgcctgcatcctgaatgctcccagagcactaccttctactgcacctcctctgatgcccagagaacaatgtattgttactatgtgtttatgtctgaatcaaactgttctcctgagttcaaacccactatcagggtcaagaatgactttcatgttatccagtaaggtagtagtctattgggtcttaggaatgtagagggtcaggaataggccattactattcttataataagggacacatgtaagaaatctggttttgaaagaggaaaggaaactctaatttttgagttctcagtatgtgccaagcttcacataggttatatcatttaataaaacccctgttaaccaggtgtcattatctccatagatgaggaaactgaggctcctagagtcttcactacttaaagttgacaaactagtagatattgaaggcatgtttcttaaacctaactccaaaatttgcttcttcctctattcatgcacacacacacacacacacacacacacacacatatatatatttgagtaaaaggaaatatagctgagcatcagagtaaaaaccatatccaaagacataaaggtatccctagatattggcatcattcctttctataacaacacatctttcccagaagaaattatgacctctttttagctcagtgagtactcctctttaaggatagtaacatggaataaggctccagaaagaggaaatttctgatgatgttggataaactttagccatctttgggggctctatttccctttagtgtggattatgaagttccctttggctcctgaaaatgctccatcccactgttgatttgagtgagcttctggtttggtttacctgtgggtttctggaacagcagaattgcaatgatcatgaagagccccatggccaggctttccagaagaggtgcagccaaagcttttggtccagtgaactgcacactatgctaccttcctcagagacttagattcttatgcactgaaccagaacagatgggatgatatgaagtgtgtccttaagcttctgaactgtgagctttgcatcatgcaggcagacacaggaaatttcaggccacccactttacccccacatggaatagagatacagcatgttccatcccatcgcaccaaatgccgctgtgtaggctgtagactgctgggaagaatctgtgattttcctgctttgactctctgcgcagccggaccaagatcgaaatgtactcacctccaagaatgaatgtggcagtataaaccaggacataaatctgaaactctaacaataagaatttctagtaggtttcttgcacatttcgaaagaaggtatgatgtagttgggtctgatctgaggtcacctgattttttataaaagcaccaagaacatacactggggaaaggataccctcttcaataaatcatgctggagaaactggatttccatgtgcagaagaatatatattatgtatatatatatgtacacacatatatacatatatatgcacacaatggaatactatacatacataacacacaatggaatatatatatatatatatacacacacacacacaatggaatactattcacccataaaaataatgaaattctgtcctttgcaacaacatggatagcctggaggacattatgttatgtgaaatgtcaggcacagaaagattaccacatgttcctatttatatatgggagctaaaaaagttgagcacatggaagtagagagtagtgttgcagatattaatattagaggctggtaatgattagggagaggggaggatggagagagattggctaatggatgcaaaattatagataggaggaatgacttctggtgttgtagcactgtaaggtgaatatggttaactacaatttattgtatacttttaaaaggctagaagagaggattttgaatgttcccaatacaaatgataaatgtttgaggtgacggatatgctaattaccctggtttgatcattacacattatatgcatgtattgaaatatcactttgtatcctataaataagtacaattatgtgtcaactaaaaataaaaggaaaaatggctaaaatggccaatgttatgtcatatattttaccacaattagaagaaaaagatgcatgagggtattttttttctaccagttgtaccttgtctttgaaaatattaaaatgttgccacaaggaatcgatgtttacctagatcattctttgatcattgattgcagttttcaaaaaatttcaaccctgttaaccactgagatgcattaaataaataagccagttggcttagagatgagccctatggccattattcaggtcacgtagtggttttacacaagaatatgtttaaacagagagatgttgacatataagaaatcctttttagaggcaaatgtaaatttaagagcagttacctcagaggtctcaagggtcacctccctttacttttgccaccagcttttacatggtttaagtcctagtcaagggattggttttattatttatagtcttcctgtgaatgcaaactttccttataggtgacttggtggtggagcatcaaataaagaccctaagtctgagcagtcaggagaaatacaaaaagccttcctattaaagttgtatttctgaagctggatgttaaattagtaataataaatataaggataggaatgggtcctaagagcaaggacaaatttttaataaaacaaataaaaataaaattataatattcatattagcagaagaacatatgatccatccaacagaaactaaaaaaaatgaggaatagataagtcacaactggagggcagaaaaaagtcctaatagatcagtagttataatacattcacatggcttaaactcactgattagatgacagagattcattattggattaaaaaaagatttcagcaatattagacaataagacacatatatagtagactgttattaa

SEQ ID NO: 1561772 - DNA, 4001 bp, Homo sapiens
caaccattcatttatgtttgaagtgttcaaaaaatgagtgactacatcaataaatgtactcagaggaaagcacaggactttattatgtggggaatcaagttcacagaaggaagcagatgaatcttttgctgcaggctgctggattaggcagcactttttatttaggaagagtggagaccagcgagacaagggctagatttaggattagactgtgaaaatggtgatggtgggtaagatgatgtaatcctgcagcacactcagcttctcaccagaatgttgatgtggcttcttaaatgacacatgttttttctcttcttcatcattagcacaacataatttcccacttagacatcctatttcatatctttctcctaccttgcatttcttcctgcaatagcctgttactttattgaagcattttttgagtcttgccccgtctgtgcataggaaacaacattgaaccaaggttagtgcgtaaggaagagcagaagaggtaggtatgtggttccccacaagtcatggcctcctatggtcccaagtgaacattatgctgataaaaggaaactcagaggcccctccttgaaaaatatcccaaattaaggacattcaaaagcccaggctctcagccaatgtccagttgcctctgagaacattagaactgatatgacaaaagagaagagagaactcaattcctggttatcaaccagagccaagtcccacccctaggaccatggcaaagctgactctctccaccaagctccaaagtcagcactctctcagctccatctcagtctcatgtccccagagacggctaacatgtcaccatgtgcacaagacatgtcaccattggcacaactcagccaaagcaacttttgaaagaacatcacaaacaagactttttaacttaattcggtttcacactcactgatatgggcaacagaaatctccctttgacaagatctcatgggtctcagcaacaggtgctattgagaactccttcccttaacctggctcctcctgtctgtcactcatcacactccccttgatctcagataaatgtgttgcccagggatcaaattcaattccatgaatttggctctagagagctacattgtcaccttctcagagtaatgcactgaaattctaagtctcttgtttctaatccttatttgcccctctacccaaaatttgaacaagcccaaagaataaggttggagaagagagacatactctccctatcctaaacttcagaatcagggaacatctttgagggttagaggagtatattttggggccataaaaatacaatatgccttcttcctagcaagagagaaggtaactctcactgacagggcttctacgatgaactttgtgcttcgtgcttgtaagttcatgtaacctgtacatcaaatagaatcatgaaatatagtaattatactccttcacagatgagaaaattgagattaaaaggaaataatgtgcttaattcatacaacccgtcaatgatgaagacatattttaacctcacattgacatgactccaaaatgtgtgctattttaattactgttgtagtacaggctgaaaatgaatttgaatggaaaagggaatggccaggctctcaggtgaaaactgtgtccagcattataaagataattctagatgatgagttcatggatacttttgaaaaggactcctgagagtccactatagccctgacctcctcttacctccttgggtgcctctcttctaaggcatagactcaagtcaggcaaccaggagaatgggtacttttttatgattttggccaaatataaataatcttgaaagtcctgttcccactcttacaaatagtaatatctcttaggatgttatagtacatttggacaagttacctgtgagtacctcaaacagcagaataatgagaaccagaaacagcttcatatttacagacttcccaagagaaagaggcagcagaactttgtccagtggtctgtgtgccacaggtctttaaagatgatccagagttttgagagctatcagcgctcggagctctcattttaacccacacagacagagaggaattccaagtccacccccgtaacacacacacctacatccccaaatatggagctcacagtcccagaatgttccaccatatcatccctcctcccccttcctcaggatatgcgcccctagagagcaggaactatgactttccgtctgagcttccaacccatttgggtcaaggttggttggtcgtgggccttgggttgtgtgggataatcctgtcttattcctattgttccaatgttccatccggctactgctgcctctaacaaaactaacccagtttggaagataaattaagtcattagtcgacacagaagcatattcaacaataatttttttaatgtataaagcttccagatagtcattctaggagtaagattgcttttaggtttggctagataaattgatattatttgagagtttcccataaagacttgtccatctagtagagcaaaattcaacaactgaaagttttcaaaagatcaaatctccttagcacagcactcaacttattataaactggtctctgctctcctctcttgggacattttatggaaccatctatgtttctcccaaactagtgggtacaccttcctgaacttttacttccttaatctgtttcttttcacatttaaatccctccttacagattatattacactccccatcccctccatataattggtgctagtgaactcctggttttccttcaaaaccaagttcaatcatctctatataagtgaaagtttccctgacccaactaaacagagctgcaaactctcttcttcgcaccatcactgtatttgtacatatttttgttgatggtcacactatgtcatgttccaattatttgtttatctgcaatagtctgcagacccataaagggcaggtctctggtcttattagacttggagttctttttctttttttttttttttttgcagttgcaagatttaatagagtgaaaatggagctcccatacaaagggaggggacccaaagaggttagccgttgccggctcgaatgcctgggtttatatcccaatcattgtccctcctgctgtgctctcaggcaatagatgattggctatttctttacctcctgtttttgcctaattaccattttagtgagctctctttcctacctgattggtcacatgtgagctaagttgcaagccccgtgtttaaaggtggatgcggtcaccttcccagctaggcttagggattcttagtcggcctaggaaatccagctagccctgtctctcagtaccccctctcaacaggaaaacccaagtgctgttggggaggttggccgacgaccgctctaactgcttcctcctgaattggggcatagtaggggttgtgcagttgagatttcctcaggaggggtgccttcgatgtcattaacattggagcatgggctagcaggccggtccaatggtccacggtagctcttagtcatggacggcatctgtggctccatttgaagaatgatttgtagttttacagctttgattctggaaaagacaaacttaacaaggaggttaaagatacagggattgaaatgtatggcctgcagtgcaggggattatttctttggcacactttacaggccctgactatctatttgatagttttgaaaaggcctggtccagtaaataataatttagccatctgatagttgctatcaatgcctaagtgaaaggtttggtaaagggttttaagtaatttcaattggttagctgcaggcaaaagtattttttcttctttggtggctagccatcctgaggggaggaaagtatgtcctcttgaggttctccattctatttcttctgctgagtactggggcttggtttcctggagggggttaccccacactaggggtccttctataagcatttctaatggagggtcctgtcttgtggctcttt

SEQ ID NO: 1561773 - DNA, 4001 bp, Homo sapiens
gccattgagccaaggttaataactagagatgatgttaaaactgctagtgggagatggatagactaagagagagtttactcatactacattttaagcccagtgtttaggaatgttgatgaaggcaaatgggcaggctgagagcgtctctatgcccctcttgaatccaaagtaaatttcctgtttagtctgccttccttgagtaactttaagaagcaaagggcacgtagatgatagagtaattatttgcttttaggatggaattttagaccttcaacttagcatcttaggtacttgtcagacatcactatcccatctccataatcttgggaaataccaatgagagccaagtccatcataaaactaatttaagaaagaagttcaaaagagaatcaatagaattttcaggagtcttatcttttcaccaaactcagtagcccatgacttctctcttctcaacaatcactagatctgtgattcctgaagcatggtgttctatctcttctagcctctttggacactctatctctcagaagtctcattcattatcctagccttaacctcatatccaccaaggtaacttctgtattgttatctataattctaaatttcctgctcggcttagtaccttatctttatctgctgaatgacttttccatcctaatgtctcgtgtttcttttttctgaatcaagaaagcttttctcccttgttcatcttaataacccaatgattttccctaaattacaagagatttatgtagcatctgctaattttcaaagcatatttgcatacatttccacattgttttctcatcaaacgggaaacagaaaaattcttatattggaatcagctgcattgattaaccccattatactcatgtgaaattgaagttcaaagtggttaagtgactttacccaagatgacacagccatacttgcttatggtactacccttttcctagggtcccaagataaaaacattagaagataaaaacattagaagcatctttgacacttccactttccctgccccgaaaccctttgctaattttttcaaatagctggatgattcttgtattctgaaacaaatctcagtgcttctcctttcttttccaaaaacaatggttaatcccctggcttagccttttgctataatgcattcctagatgcccttatggtagtttgggggttttcaggaagacaaagtctgagagaagcgataaaggctctggaaaacctgaaagaattcaagatggagaacacaggcctgtttacttgatcttgaaagggtttttttttgagcatgagggaagaacttcctcctttctacaccaagcacaaactgataggaaactttgcttcaagaggtggtttcacaggaaggggaacaacacacactggggcctgttgggtggagggagagcatcaggaaaaatagctaatgcatcctgggcttaatacctgggcgatgggttggtaggtgcagcaaataaccatgacacacatttacctatgtaacaaaccgcacatcctgcacaagtaccccaggactttttttaaaaaaaaagggcttttaagatagaaatagagctaaaaggaggtagacctgggcttagtcttagcatgatagacatatacagggcaggaaggcagcattatattttggatagtttctgaatagacaaaaaataccctgctttctctgtagcttcctgggtgtttccactggacacaatctggcagttggggcctatgagaatgtatcagtgcatgactgatacaataggtaagctctttagccatctttttgaacagctaatctttcagtctcctctctttgggtttccattgtcatgggcagccaaatccttggttcctctcatctacccatcttaaacttgggaatccacattacctgtgttcacctggtactgtagcatgaggctggcaaagataggaaaaaggagcttcatggttgggtgccagagaggaagccttgaatctgggttgatgctcctgagctccagcctttattggcctcttcgtggccttatgccatgagcagtgaagtgcagccaaagcaggtttgtatgctgctcgcagtatagttgtgttttttctgactctgtttgaaaacaccctttcttgaacacctctatgcaacaaattccttgctcttgatcctggaggaaaacataagataggtaagatgagaaagaaagagcaagccctttgcatgtgtctctcttttgcttttttgagatggagtctcactctgttgcccaggctggagtgcagtggcgtgatctcgactcactgcaacctccgcctcccaggttcaggcaatcctcctgcctcagcctcccaagtagagtatctgggactacaggcatgcaccaccatgcccagctaacttttgtattttcagtagagacggggtttcaccatgttggccaggctggtctcaaactcctgacctcaagtgatccgcccaccttggcctcccaaagtgctggggttccaggcatgagccaccgcacccagtcgcatgtctctttcttaacgttggagtaggataagagttagatatttgattcactgattgtcagcccagttatgctaaggttggcacttagtgcatgagaattagaagagctagaggagagtgaagattctgccttgtttgtactggtatgtccagtggccagcatgggtattggatcaacatacaaagtcagtacgtttgttaaacaagttcgtgggagacagctcttggcacatctttaacttttgagtttacaatgattcccacatccttttaaagtagcaactaaaaaaaaacttttttaacttcgcgggtatatgtgcaggatgtgctggtttgttacataggtaatgtgtgtcatgggggttggttgtatagattatttcatcacccagctattaagcctagtgtccattagttatttttcctcatcctctccctcctcccaccttccactctccagtaagctccagtgtgtgttgttcccctctgtgtgtccatgtgttctcatcattttgctcccacctataagtgagaacatgcagtatttggttttctgtttctgccttcatttgctaaggataatggcctccagctccatccatgtccctgcaaaggacacgatctcattcttttttatggctgcatagtattccgtggtatatatgtaccacattttctttatccattctttatccaaatggccaaatgatgggcatttgggttgattctatgtctttgttattgtgaatagcgctgcagtgaacatatgcatgcatgtgtctttataatagaaccatttatattcctttgggcatatacccagtaataggattgctaggtcaaatggtatttctgactttaggtttttgagggattgccacactatcttccacaatggttgaaataattaaaagcagcaatttttatagtgtactgctcagattccttggtcgtagctgattgatccaggtgtaacaatagaaccaagcctaccaatcagatgctttcccctgctaatttgggacatttcctaagaaactcagatattgaagctcattggctctgaatattattaattgttcaagtttcaagagtttccctggttcctcgccttcctgaaattcatgtcttcttaggatttcattagctactatagtatccaatgactcctcagttttgtttaaattaactgttattttttaaaacaataaaagcaaatcttatgaactttcactttatgaaatgtatattttacttctatgaacaaaaataatcaagcttaggcatatttacttactacttgtcaatatcaagagatggaattaacagccctttggaatcagttaatcctgaatatcgcatattaattggtttctggtgttttaagatgcattgaaataacattattcacctcattgtgtcttgctagtcccaaagcaataagaatatggaaagt

SEQ ID NO: 1561774 - DNA, 4001 bp, Homo sapiens
ctgcagtcttagtctccttctattcaatcctcctctatccctctctcctttgacacgtatcaggccagcgttgcagtctgaaggctctccctgcctgtggctgctctgtctcacctttgtccatcagaggtgtgttctcccagtcaatcttttgcatgtccaattctgtcttgacatttttcatttggaggacccaaactgacagatcccctgtggacgaatctgcatgatgattgttctcgtaagatagatacaaactccaaattagttactagatgaatgacagaatgatagaagacagaagttttggggttggctatagatatctgccccataaagaggagccttggctagtactcagcaatgtaggaggaattggaactgtggaaatgatatttctctgagttggtggaggcgatagcagtggttattatgatgttacggtcgtttgttgcttcttgtctttcctttgtgtgtttcttctccttgattgccagtggttaccgatgagctgtggtaggtcaggcttcggcaggaaggagtagctgatgcagcattttctggaagcgttgcacatgaacaatgctgtctccccccagtggcaacatgtcctgcagtatcctggggtgttactcacacattttgacccacctgcactggctgtatgggagaggacaagacagagaagtcatggttagaagcagcacagggctactaaagcgtcagcgccagatgggagtgtttggctttttgttctgaggtgtatccttaggatgttgtgcaaatgagacttgggaaagccagtgatgaggagacaaaaatcttcctggattgatggccttggggaactctgtctgacgagctcttcttctttgccagtatctgcatctttgaagctttttgctaaatttgatactacagaataggatgtatgggtaaaaacaggggtggggagcctggtcttcacggtcagggaggagcttggatactcaaaagggagaaatggggctagtctcactcaccccacaggctcccttttaaggtgtttctaccttacttgttttcatagactctaaaactgtaaatatgagtcaacctggggcaaagtgggaggagtcaaatctttctccaaaatcattaaaaagaaaataacggttgccagtgacagggcatttttgcattcacccagtgctgtgcaccatttcaccatctgctgaaatctgtttgcctcagtgctctgtgtctgccattggctcacagcaggggcctcttcggagcaccctcaagcctctttggctttcttcacatccgttgcctggccctcctctgatctctctctctccctgctctctgtgtgtctgtctctctctctttctgaccctgcattatctcctagccccagggtttgagctgaacccattgcttaccatcctgtgggaactagccctctaagaggtctgcttccatcccccacctgccagctgtctgttgagcatagggatgggaacctcaatctcttccttctaggctcaaaatctcctttgagctccaacccgggctgatctcaatggatgcacatggtgatgacagaagccttcagtgtgtcttaggaggttagatataaggagctcacataaagtgaaagaagatattttggtttaggttgagggtgactatcattttagaatagaaaacaaatttttgtaaaggttatatagggtggtgtttgggtgtgggatatcaaggctagtggtggttgttaggagatctctaccttagactggaactcagtggggtgagccctgcctccacccaacctggctcatctatcaccagagcaaccagatatgctagtgttcctcgttcccagttttcctttcctcctatttatccagtttacctgggatcacctgggtcaggaatccgagggctgccaagaccaggagcaggaacttcatggctgaaggggtggcttggggagctggtggtggtttaatggagttgggtccctctgtaatgtgcttggagctactgcctttataggatccacatgatgccaggatactgggcagtgaaccaagggagacttttctgttacccagagcagtcagattagatcagaatgtctactggactggagcctggattgatttattgagcgcctgtgttctagactgttaggagggggagaggtagagcaaacagtgcgtcggttcccagcgttcatctctaaaactatgcgttctagacagtgttggtgagatgtggggaaactagcattctcttggcgttgttgctgggagtgttaattggtacagtttttcttttgtagcacaatttggcaatatatatcagaagccttaaaatgtgcctatttttttactcagaaactttgtaccttgggcttttgtttaatgggaataattgaacaagtacataaagacgtttatctcaacattacagtaacagaaaaccaaaagctacctaaatggtgataaaacatggatctaatctaatatagaaaatacagaatataatagagcagtatgcagttattaaaatgatgaaaatgtataaaaatgtaggctacaagatatgcatctagaataacttaatctgtggtaaaggaacatctatgtgccaacatatgtaggtatatatgtatgtagtatgtatgcatgtgtatctatctatctatctatctatctatctatctatctatctatctgtcatctatctatctatctgtctaaaatgtctgagtttggagagaatgattatgtgtactttcatgattagaaaaaaagagagtttatagaaaaactacttattgtttgaattttaatatgaacactcttacctctaaatttttgctttctttccctagagtttaaggtttctggaggctagagactttgccatttccacattcttctcaagaaatattttgtgttttcctccccccaatagcgtcctttggagtctgtttcccattgagacagttcttttctgttccagctcacttttccagaatcctttctctaatgtggtgcctgctgtataagggaataatctccggagtcctggtttgggccaactgagtagagcagctctagcttctcacgttttcctggtctaaaaaacctggtttgatttcaggcacaaaacaaaacaaaacaaaagatctgggacttggtaagaatatgtcccaagactttagcagtctttacagtcactcagatttgtaaaaatatcttaaaatctgtaatttttccaactaagtgatgtaaattataatcctaaaataaatacaaatccctttgtgcctttggtaaacctataaccacagaagcaaaggcttttgtgtttctgtgcgtagtcttcagtgagttaattgtctttttacccttcacttgttaagcaatgatgacatttattttctccttgtttccatacagcatgcacagtccattggatgtcataaatataagtcactccaatttcctcaacccattaaaaaatcttttcatttaaaaataatttaaaacataccggctgcaaaatacaaattgtacgataccttttccccagctcccctgagatttgcctattgttgacattttatctttcttgctttagcatttgccccacctctctctatctatggatatatatatatctatattagtctctctatatttgtatattttcttctttgaatctattgagcataagttatatgttcatggccttatattatcgtggccttttactcccaaataattcagtgtgtatttcctaagaatagggatattctcctgtatgacagtatagttactaactccataaatttaaatggacaccacttttatctagtctatcatctatccatatatatatatatatatatatatatatctgtattccaatttgccaattgacctaataatgccttttacagcattcatttcctccttgagttgagattgcagtgtcaggtc

SEQ ID NO: 1561775 - DNA, 4001 bp, Homo sapiens
tcataccccaaaatataccctagcacttaacactatcacactgctctgttattttggctttctggacattctaaaggcacaaatcccattctgcctttgttcatgctgcaccctttgcttcgagttccatttctctatgaaacaaaaccttattcatcctttaatgttcactccaaaaataccaccttaatgaagtatttcttatccatacattcaactttccctccctcttccatacttccatataattataatagtaacctatctagtgccaagatcctgttgtgtgttattctcatttaaacctcacaacactactttgggtagggtaggtattatacccaatttacagatggagtaactgagactttgagaatttaagtgactatcaagtcatcaacttagtaagtggtagacatgatgggcactgcagtctgactctagagctcatcttctttaccaccaccttactctgtctcattgtaaaatctcttctagaggacatctaactttatattcaattaagagagagacagtaacttgagagcagagccctgagcatctgtatttgtctcctgaacacaggattaggttttcaataagtgtaccctcaatggatgaactaaataatgaaatagaactcttaagagtaattccacgttctttaaccaaaatagtaccctggtctgatttcaaacaattaattcagctctttattatacctaacactttcacctgttactaaaagcgtgaataaattaaaagtattcattacttagtaagttcctagttttggatgcaaataaaactcaggatggataattggctgatgacttgaaatgctgaaccataaaactgtcaagtgacagactacaaatttttaaaaagcattaaacatatctcttgcttgggtttatctctcacatcacttatatgcatggtcagaatttcagagaaccactgaaaaattaaaagctttgcttatattacattcttggtgtcatttcatttttgctgcaatatactttgcacatccagacctgcaggggtgcaggtggtagaaaaaaatcaagctggtagctgtaatttaaaaacttttgttttttacaagaaactgtttgcagagaggaagtaatgcatctagtacggtctggcatatgcacattcagtaaaaacctgattaatgagtaaatatcaagacaaaacaagtaaagcattttgtgattgtgattcgtgttagtctgtaagagaggaagtggctggcagccaatatgaaggactgttcccttttctagtagacattcggagtggacaacaattatcctaaaagaaaataacacactttccctttttttgagcatttattctaagtctgacaacgcgttctgcttgtcatttaagcccacagcatagaagctattgttctgcccactttacaggtaaagaagtcatggctcagaggcattaagtgactcgcccaaggtcaccctactacaaggcagagacgaaaattcgaacccggacagtctgactccataacttgggcttgcaagcctccagcagcgagcagcattgtctgtcgggccacagcgcaaccccagggcgctaacgagacacgagagggagctttaggattccccatctcgcggggtgggcaggacaagcatcagtaacgaggaagacgaggcctgaggaggctggaccactttaacaaggtcacaaagagtttctgctcacgctaggggagcacccccaaatccctcgggaccactggggagcctgagccagagctccccccgcacagaggcggcagcgcccagctcgccgaggtcaggcctgcgagcaggtctgctggccccagggcgccggccgcggcgccaagaccgaagtcaggccgccgcatctgcccagcgttccaccaagggccttaccgggtcgccagaacttcaccggtcccacgggcgcagccatgttggggtaaaaggtcacgaggctagctccaccccaccgtcgcgcgctaggcccccagggcccggagggcgtggcccccgaagagccgctgcccagacggatcgcgccgtgtgacggccacgcccccacagctaccgcccccgtctgagccacgtgacccacttccaggctccggcgagcgcaccggccccgcccccgagcccacgtgaccctgctcagccattttggagaaaagggcgcgctcctccgcctacctcttgagcgtggagggtagatgcttcaggtgaccttttacgagcgtggcgtgtcctggatggcggccgcacacttaggaagaacgggctttgggagaggaccgctggcccgagagtggaaccttgcacgcactgggcgttgaagcagtgctttctggattaaatacgaaatactgatgtcacaagctacctcaacttgtcgacttctgttttattctcaatttcaaattgaagggtaataataggaactacctcgtgggttgtatttgtcagtaaatattgcgcgcctgctgtgggcccaggtagtgcggcacagtgccccaaataaaacaatgcgaaatgatatggaagtcttcagggaccttgagggcaaaacggaaaaacggactgggggtggggtggagcgaatgggttggcagaagagactgaaaatgggtagatcaattaaggtagtccaccaactcagtgcttcctccaatttgatacccttgagtcaaatgcttgttaaaaacacagattctaggccttgatccaattctgaatcgatgtcctggagcatggcttgggaacctgcattttgagaagctcctgaattcttcagattaacaaatttgggaaagattacactaatccatcagacgaaaggtgaggtcaaagaaaaagaaattacagtaatccaaaggagcgctaagaaggggtgatgagctcaagtggaggaaataactttctaggtaggcaactaattggaaggaagtgagaggcttcagaatctatgcatttttaaagctgtgaagaaaattctgaattctttgaaagaagtggcatcattatggcaagagcaggggcttttgtggacaaccagtccagacttggaatcgtaactttgccatttcctagctcctagctgtcatttaattttagttgtaaaatgaggtttaaagaggtattacatgagataacatgtaaagtacctaacagtgcaaaacatagcaggcactgaatcaatgttagctctcattacctcaactcagagcaaatccaccagggggaaaaaaatctgaatttacctgcataggttcatgtaagaatcttctttgatttatttttatagtaattaatgtagggactcaatatctgttagtccctcggcctagaattctccatccatcctttaaattatctttatcccttaaagggctagctctaaattatctatccaacttaaacattcccccttgtagtctaggaactgtattctcacttttgtgagaaaagtgacctgtagtttagttgcctgtagtttacctgccgccactattacacagggaacttactgaggacgaggaccatgtcacattcacattcgtggcccagtaacaagtgcctattgagtgtagataaacatcatgctttaggcttagttttagttgatctgtagtttacctgccgccactattacacagggaacttactgaggacgaggaccatgtcacattcacattcgtagcccagtaacaagtgcctattgagtgtagataaacatcatgctttaggcttagttttagttgatctgtagtttacctgccgccactattacacagggaacttactgaagacaaggaccatgtcagcattcacattcacattcacattcgtagcccaataacagtgcctattgagtaatgtatagataaacatcatgctttaggcttagttttagttgatctgtggtttacctgccgccactattacacagggaacttactgaggacgagg

SEQ ID NO: 1561776 - DNA, 4001 bp, Homo sapiens
aactcacagtatcaacagcagaacctgccaacttcaccgcgaacaaaacgggagccaatgcccattccaatcatttcctccttacatgaagaaaccccagcaccctccaaggcccaaccgatgatccgcacgtcctagacaagcctttgcgaggctcacatatgcacatgcaacatgggctgggctgtctggtaaccatgggtacggctgggcagtcaatcacaaattatcttatttgtgccctgtcttctcaccacagcacaatgagctctgcttgacatagtctgaattcaatcaactactaataagggacagcctctggtggaaagcctgaaaaaattcaagatacgcgcttttccaaaacaagaggtatcttatgaaacttgctgaaacaagtctacaagaacagacatctcctccccatgtacacagcaagtaggaaaacaagtgtgcattaagcagggagtttcacaacagggctgtgtctgtcttcctgggtgacacttctgagatgtctatgccgtatttaaaatagtgaaatagtcacagacacacatacactaacagcaacccaaagggccactaaagagccctaggctccaggtaaacgagttggcaacacctgatttaaaggaaggagctggaataatctctcaagttccccagtgaacttgtctccaggactgggacaggggccaccttggtcactgctgtatccctcgtgctaacagtaagcaatgaatgctcatttaaaaaaagactgtatttactccttaaaaggcactgctaaggacctttctcagaactgtatttcaaccaagtcatatgtggccctacggaaaccatggaacacggggtatatagcaaagttatgtgaatataccgaaaagacgttcccatctgcctttccctcctctaagtccctgagtacactaggctcaaatctcattccatcagcagacagatgacacggatatcgaaggcccaggcacaagttaaagagtattttcaataactggtaacgcagtaagctactgctacctgtggcccaaactctaaacttatatattaaagtcctttatttagagcagaaaagccggccttgacctccactgtctcagaaccgcgagaaggagccccggacgccgcagcggaggcagcacgagcacccctcccgccgagcgcaagagcgggccctttcggcttccggggtcactggaaggcaaaatgtgtcacaaatacggccagtacaaaccaacgcaacaaactattccacaaaaaaactgaaaaccagcgcggggaggtaaggacacactcttcagaaaagcgaatccgggctcttcgcgcttcctgcagcgccagccgcccctgcagtgccggaatcccccgaaggcacgccagaagctaagccggccaccccgaccgcacccaaggcccgggaggaagcgccgaggtccccgagaatgcctagggaaaccagctgcgcttacaagccagctacgcagcccccgagccccgggccgcactcgcccaggccagccctgcgctcttccccgcgagcggccgccccgactcccaccctcggaaccgttccagccgcgaccaccgagtgctcgccagtcccctcgacctcacgcagcccaccagggccggcgtctgaggcccgcgccccaggccgcggcggctctgaccggccccgcccgctcgcccgcccgcccgcccgctccttcccttccgcggccgccatcttctcggcgggagcggcctgtgcgggatccgcggctctcgccagccgggctccgatgccggccccgccccgctcccgagggcggcccaagcggcggccggctcttctacccggcgcccgggacgccacttaccgcaggccgcaggcctctagggtctcgcagccatttccccgaacgccgcggagtgggcggacggccaccgagatggcgcggggctagagcggcgcccccgcgcggcgggcggaggacgagaccggccaccgagacgctgcggggctagagcggagcccgggctgcgaagcccggccccggactgcgcgcatgcgcccgtctttcatacctgcactccggacgcgcccttcgggtctgcactgacaatgacttgcttgcatcctttgtggacaccttatttccccgactccaagagtgaaagctggggcagtgcccttgcggggatccctcggaacagcccgggcagggcgcaggcggaacgtggatgctagccccgagggactgcactccgccaggatttcgctcttaagaccgataaacccttcaagtcggtggggatagaaagctcctgggctaaatttgtaagaggtgtaggggggcggggacaggggataaaagaagaaaaggcccaggttttctcttccagattgtgtttctcaaaacgcaggcccctgacggcctcggctgggaatggcagcgaggggcgaggtccaggtgtgggcggggtttctctccaacttgaagaccctacctgctgcctccccaccccaagctcggctccagaaaccaggagcgtgggggtgggggggagagaaaggagcacagcgaggaagggaggcgggcacgctggacctctaggccccagggaccttggcggtgtggtcccaaagctctgcctcctcccaccatgtcaatcctacactcagaactactgaccagtagctagaactcaaagaacgcatggacatgtttgcccacaggggttggagggaaagattagacacttactatcaagagaggggaaagtgaggtatggtagatgtcaaccttccatgtggattttcttcagttcgctcaatagtaactagagtgacactctatcacctgtctgtccccagatactgcaggaaagagactgggagggggcaggaggggcagctgttgcctcgaggcaccatgggcactggccacttgctccgagggcagggacctggggggggtggaggtggccccattacttgtttctgcttctgtgaacagtgatacgctacctggaagcatggaccatctagcctttggcgttggccctggccaagagtaaaaggggcccagagtgccgtaaagctgcccctaatacagaggcttctgcgatgcttccatggatgaaccaggggctttgaggcaggtgtgctttttaataataccgctgaagattacagggtctgctagtttctgaggcagacttagttttcttcaaaggaatacaacgcagcttgtttttgctggtgtggcccattaggaccacattaatagaatctggcagggatgggcttgacagtcttccatcttgagtgtgatctcaggttgcaaagagggctttttgctctcagacatggggtagtgggaagcttagaagacagacggggttgagaccacctttaacaagcagtgagatcttgggcaagctctctgttaaaggagggctcacatgctgaggcccaggtgaagaccacatgaggcctccctacaagaggctctctctaaatccaactggtatgggggaacctcagcccagtctctttagctgaggatctttaaaccagccacaatttgtttctgcaagacggtgagatttttaagagattttaactcttgggtacagtttcacgctgggcactcaggagagatagatggaaaggcactaagggaatagaaagagtggacaaggcggctcagggacaagagaaccaagaggaagaaaaaggcaggaaaacatgaggaaagggaaccctcactcagctcaccgcagtgctcagcgatacgcagaatgccttccttcctgcaagtccagaggatactggaacctgcctctcgttctcatctcccccgccccccagcagaagctggctcggctgtggaggcctggccagactatccactctggccttccccacctacaaggtgacgaagtcagctttatcccagcttacctgccgtcactattcctgggagctgccctcc

SEQ ID NO: 1561777 - DNA, 4001 bp, Homo sapiens
gctcgagcaggacttggtaaccggttggctgttgggaggaggagcattaacctgtgacccacaggcaggcactgagacagcctctttggactggaatgttaaggaatgtcgccttaaggcgctagcactcaagctttctgctcgtgcatccccttgcacactttctccttgacgttcaggctgggcatggtggctgacgcctgtaaacccagcactcccagaggccgaggcgggaggatggcttgagcccaggagatcgagaccagcctgggcaagaaggcaagaccccgtctctaaaaaactttaaaaaataaaaataggccggatgcggtggctcatgactgtaatccgagcaccttgggaggccgaggtgggtgatcatttgaggtcaggagttcgagaccagcctagccaacatggtgaaaccccacccgtactaaaaatacaaaataagtagccgggcgtggtggcgggtgcctgtagttccagctactcgggaggctgaggcaggagaatcacttgaacccaggaggcggaggttgcagtgagtcgagatcatgacagtgcactccagcctgggcaacaaagtgagactccttctcaaaaaatagaataaaataaaatcaaaataggccgggagcggtggctcacgcctgtaatcccagcactttgggagtccgaggcgggcggatcacgaggtcaagacactgagaccagcctgaccaacaaggggaaaccccgtctctactaaaaatacaaaaattagctgggcgtggtggtgcgcccctgtggtcccagctactcgggaggctgaggcaggagaatcgcttgaacccgggaggcggaggttgcagtgagccgagatggcgccactgcgctccagcctgggcgagagtgagacttcgtctcaaaataaataactaaataaagaccaataactgtttcccatagggttatgtagttgcaaatgaaaaaattactggcatgtactgcctctgcatatgaagcataattttgtcaagaccttatacctgcagatttagctctttcgattaacggaaaatgtccaaaatcagtctcctccaacctatttgccgaactggacttactgtcgctgagtagaccgaccgacatagcttacacgttgttcagctcgcttgtaagcaaacacacgaaaccacctcacccctgacttcagaaagaagccgtcccgtgaattcctcacagatgaaatcaggagctgcccctcaaggactctatttcttccttcggctctatcaaatattttaaggtacttcccagcaacggaaacatgggaccctgcaatgacagacttcgcattcctcctgagcggacaggcaataagcaagtaaacgcgcaaatacccaagtgcggcctcaacccgcgctcctgccgggagggtctccagtcaccgagtaaccccggccctgccccgcgccgccgccgggactccgccccgcaagcaagtggggtctcctttgtcccgcgcgccctggccgcgtcccgcccttcggcgtagcccatgggaggcgccctgagggcagggcccttctgattccccacctggcctcgagtgaggacgcgctcaacaacatctcgagtaaagcgggggaactcgcttcaacgcgcagacagcacagctctcgcccagcccggtctcgggtcagccgtctctccctggacctcagggacactagccctggaaggccgccggtcgggaggggactccctccccgtctgaggggcggccgcggacacccggcgcctttcccccgccccaccccgtgcggcctcacgcaaacgacaggaaaaaagctgggaccttcgcctccgactcagtgtagacgtcgccatcccggttccagatttccgcgctccaacgcctccgcagcagccatcttgccagagggccgacgccttttgactctggcgccaacccgtagtgcgtggtcgccgcgaggggagttctgcgcaagtacggaagctgaggttccgcgcttccgggaggccgtccgccccgccccctcgcgggggcgcttcattggtcatcggctcgcgctctcgcgctctcttgctgtcgcgagaggtgctgaggggcggcctccggtgcgcctgccctcccgctccccgcccccgcccccgcccccgcctccgccgcggcccccacctctgcctccttctactcgggcgccccggcggccgccacctctccccagcccaggagaggctgcggagccgcagccgcccagaccgcgcagcgcgggaggcaggttccgcacggtaagatggcggcggcgggcccgggcggccgggccgagcgtctcccggggccgggccgggcgggcaggcgggatgtggccggggtgcgcgccgcccccgctctgggggccttggaagcgccggcgctggcaggtgcggaattggggcgcgcagtgagtccaggcccggacggccgccccgcgccggtgcccagggggcagtcagggctcagcctccaggcgcgcggcctcaggcgctggtgttctggggcggtcccggccagcctgaggggcggcggtagctgtctctgtggaggagcgacgtccgtaacgaagtctttttaataaaatctgctgctttaaagcagaaaccgagcgggtgaggatgtaaagtgtggcatggaaagtaggagtcttcagcacacgggtgttttcttctgctgaatctttttatgctggagtttgagactaccgagttcttcctgctaacaggactggccagttctacaaagttgttgcttttcatgggcgcacgtaactgcccggagtggaagcgctgtgagtgccgatcaccgaatgggccgagagaaaaggtgccttttcctagggagctcttaacgttggtcctagggccgggcgcggtggcggaggtcgaagtgggcggatcacttgagcccgcgagttcgagaccagccgtggcaacagcgagactcccttctctgctaaaaataaaaaaattagccaggcagagtggtgcgctcctgttgtcccagttactctggaggctgaggtgggaggatcgcttgagcccaggaggtcgaggctgcggtgagccatgatcgcgccactgccctccagcctgggcgacagagcgaggctctgtctcaaaaaaaaaagaaaaagaaaatgagtccttaagttaccattaattgtcgtgaataaaaagttggtctcagtgagttttgcagttgacaacgaaagatgggtgttcgtgtgtgacagcgactcctggtttctcctccactttacctgccgctccacatcaagttttcttctgctggtgccactttctctgctttaccttcaaggttggcatcctccaagtaatggcgattctcattccctatctacgctcttcctatggtctttgctgaattcttggctttaaatatccctgtgccccagcaccgccccccccgccccttatttcactaattcatgttttcagctctgagctcaggatctgtaattcagacacctgcttgatttctccagacgcatgtctaatagtcacgtcaaacttgccctgcttctcaaacctgttcttcttccagtccttcctccttatttgtggccccatcttgcagggcctctcatgcttgaaacctgtgaccatcttctattcttccctctcttttgtccggtaatctgtctagcagcagccattgactctggccaaagcatcttgatctcaccttgctctccatctcttctgccgatgttctctctcgcttgggtgtctccctaagggactggctgctcagatctcaccaccctgcattcatcccattttcagccaagagaccaaagttttttaatttattgaaacactttagcagtacttcgtataaagtagtatgtgtaacgtatgtatcagtggcaaaagagaaagacagagtggacggtggcgtgcccctgcctgtctcaggtatccacccattc

SEQ ID NO: 1561778 - DNA, 4001 bp, Homo sapiens
ctgtttacccttgggcaagctcctctccctcgatggggctgtttaaagacaggctgacagttcacaaagcgtgtctacagatgtttcatttgatcatcatgacaacagtgtgaggccagcacaattatccactttttacagatagggaaactgacagagaggacaagggtctcgctcaaggttacaacaccttgaagctggcagaaccaaggccccagaggttagactaccaaagtcaatcctcagggtggtcagattaagaagtcctctccctgctcatcctgaatcgaatctcagcaagatccaggcagcacagacctttgttcacttgcccactctggtgttctgcaaagttctggccatgaaccccacagcctagctgcctaggaggctgaccccacccccacccccctgcaaaatttcattactcaagctggcaagaacgcagcccccacacccagccggggctaaataaacgtccaaatgatatcacatcctgccggctccaaaatagcccggcctgcccacaagcgatcacaaagtgccaggccatgcggggccaagtgggcagggatgcccagcccgtggtgccctccacacactcaagcaactaaagcagaagcctcagagcaggaaggccccccactccctcctccgccagacagcctggcccctccctcctttccccctttgtgggaggcctcagagcccccttgccctagcgccagcccttgccccagcgccaaccccatggagcctcggccgcggccagcctgcgggccaactccggcccgacccggacaccccaccactcacattgcttcaagagctccagacacaaagccatgagggccggatgggggtcagagacccagagacccggcaaagacagaaaaagggagagggagacaaggagcagagagaaggggagacagggggctagggctgaaaaagcaagggggggccaagggccccaggcaaagaagcaggctcaaaggggggccttcagcgcaagaggcacagagtggcgagaccaccgagacagatgtgggggcacagaggggcagggagagcaaagcaggggaccccgatcccgagaagtgggggtgctcggagacctgagagagaacaaggagagacagcgacaggggacaaaccaggggaaagcagagaggagctcctgaagtcagggagctgaggacatattggggggtcccaaggagaaagaccccaacttgggacctaggagctcccagtggatatggggaacacccagaagagggaaagcccaggggcaatgggggttcagaggaggcgagaccccagcgacttggggtgcagaacccccaaaggatgtgcaagaaactcacggggagcccttggggagagtggaaggtgttctcaaggggaaccccaaaagatctgggggcgctctgagggggagtcccgaagagtggggtcgcccagaaagggcggctctgagggctgaagagcgctctgagaaggggacccgagatggggagcgagggaggggctgcggaggagcgcgagggcagagacaaagagacagcgagccggggagagacaaagcgggcggagcggggacacgggctggaggactggcggctggacaggacggaagcgcgggcgggcgggcgggcgggcggacggacggacggacggacagacggggaggaggaggaggaggaggagggcgagggcgggggcggggcagggccgggccgggccgggcggggcggcccccgtctcctcgcggggccgcggctgctccgggcggcgctgggcgggccccgggcgtccgggctgaggaggcggcagcgacgacgtggaccggacagacggacggactggcggcggcggcggcggccagcggcgggcactcaccctcctccctcacgcagcccggcccgaggctccggttttgtacgcccgaggggcggggctccgggttaaagtcccgcacctgccccgcccctccccgccccccgcgtcagccgcgcgcgcgtcgtcagggactcccgggccgggcaggggcgcgcgcagcccgcttggcatgtggcccggcgcgcgcagccgggctggtcggcaggcgcgcgggccgccgcgtccggcccacgcccagccggccggcccaggaaaggagcgcgcgcccacgtcggcacgcgcatgcccgagcatgggggggtgggggtggggtcgccgcccctcgaaccgcctcgccaaaccggttccagctggaacgcgacgcatgctctgtgcgggaggtggaccgaggcgggagttcccaccagttcaccccagcgacacctcgctgtaaggggggaaccgaggctccgaggaagctgcccgaggtggccctctcacccctgcatagtcagattggccctctggtcctggctgctctgcgccctaggtgtatctagctgtcctcgccactgcatcctccctttgctttgctaacccagagtcctagagattgggttccaatcccggctccgcctctggaggcctgtgtgatcttgaacaacatccgcattcaacttccctgagccttccattcctcccccgtaaaataaaacaacaagcacacctacgatctcatggagggcaaagtgaccagctcgagccgggttggcagtaggtggtgccttcacgcctcctcgccttcccagttcctggcttctaccccgcgagtcccctctcctcactgaatccaggtcctgtcgctgccttgtgggcctcatctctccaggccgcacctgtggtaggtctgccagacgcagacccaactcttgttcatgacctgccttgctgggtgacctaggcaagtcctttcctttctcgcatctgttttccaaaaaatggagaaaagaatttttgacatatcaaaatattttgagcactggcgaagatgatagtgtttccaataccactgtcatggtttttgcattaaggtgtaaaaataataaacggaattgagggttagccaaccgttttgaatccaggcactgtgctaagcactttgaaggtcatcctatctcagtcacttatgctacgcctgtactattcactttaagttggttatttttattttttgtagcgacaaggtctctgttgctcaggctggtcttgaactcctgggctcaagcgatcctcccacctcggcctcccaaagtgttgagattacaggcgtgagccaaggttgatttacttaggaaaaaaacaaggtacatttgttatgggccctgacaacccaaggcagcacacacagcataagatgaaatatcattattccacttccaccctcccaaatttaataacacactccctgtgtgaccttgaacaagtccctttccctctctgggactcaccagccctatctgtttcctggagagaaactggaccaaggcaagatttttcaaactgtggaccgtgattgacaccctgaagagagatcactgggggcaccaactgaaaagcagattctgggccgagtgtggtggctcacgcctgtaatcccagcactttgggaggccaaggcgggaggatcacctgaggtcaggagttcaagaccagcctgaccaatatggagaaatcccgtctctactaaaaatacaaaattagccgggcatggaggcacatgtctgtaatctcagctacttgagaggctgaggcaggtgaatcgcttgaacctgggaagcggaggttgcggtgagccaagattgcgccattgcactccagcctgggcaacaagagcgaaactccgtttcaaaaaaaattaattaattaattaaaaaaagaccagcctgggcaacatagggagaccctgcctccacaaaaattaaaaaattagctgggtgtggtggcatgtgcctgtggctcctcagctactcaggaagctgagatgggaggattgcttgggcccaggaggtcaaagctgtagtgagctgtgatcctgccacggcactccaatttgggtg

SEQ ID NO: 1561779 - DNA, 4001 bp, Homo sapiens
gtggggaccctgtcagccattgcactccccagcgcccagcacaggcctcaccaggcctctggcaggtgagtacggggtcgccatggacaccacacacgggcacactcccagaagttgagttgcgctgtcccagctcctggaggacacaggatccctggcctacccctgccacagcgggagacaggcactctagccagccccacgtgcacagccagcgtctccggagctgctgggaacacactcggagtctgctgctgactggccccgacagccggctctagggcctggtggtggctccaacactccagccacccatcggccaggccagggcaccagctctgcagccccaccctgggaccaggcagcccagtgccctctggcagagaaggcaagagagaggtggccaccaaggagggacagaaacagggctcttccaacaggcattctaggagatggtcctgtacaactgattcccaccacttccagctggcggaaaacagccccctcccacaagtgagggctcagaggcagagagagccaggactcccccctccctactggggactaggcttggagaggaggtgcagtggaggtagaggcagggcaggccagtcccccgggggctggaactgcagccccctcccgctatgtcatttccacttccaggcaggtgggggtgccaggaaccctctccccatcagcgctgccctccaagcttagggcttcccattctcagggcacctcctctacccaccgctcccggcacaactggcctttgccaatcacaacccctcccccatttcattttttcccacatcaacagtctctgacagcccctctctgcaacacaggcagcggaggaagaaggggagaagggccggagggatggagggatggagggatggagggatgaagggatggagggggatcggagcggcaggttcggccaaaagagaccaagggccattacacgtccaggtagcacctgtccccttccagcaggcccagcacatctggacccagctggtccccgcggccacctggtccatccgccaccagctctgaacgcgaacccctgtctccgcggggcgccgcacgtgggggcctccggtagccatgtgagtgcccccccagcccaggtgcccgggtcagcccagcccctcccagggacgcaaacagggagggggcgctatgcagcgcgggaggggggtgctgcccccgccccctccccagatgccaggtcagggaaagagctcgggaaggggggagccggcggctcccgggtctaccgagacgggatccgaggcagctgggttgaatggaggaatgcccgggccggcatagccctgctctcccaagcgccaaggttggccgggcacgggaggggtccgcctgacccccaggccgccctgcggattagggggcgggcctgaggagggggcttccaggctttggcagccgcttgatatggggtacgggggagtccgcgggaaaaagagccggaatggggatccggtcccggacaggggttccgggccccggtgccgccgcccccgatttgagggtccggggagacatggatggggcgatcccaaccggagaaggcgcttcccagccgcacagccggcccctcggacccgggatcggaagacagaactggcaggggagggggcttttctgcgccagcgccgtcccccggttcagggaggtctgtcggggaggagaccagatcggggggtctagccgagggacggagcgcgccggcccgggaagggggtaggagccgccgcgcgccacccccgcgccctcacctgcgccgggcgcctcggccgcctccggcccgctctgccgttccgctgcgccgccgccgcctctcgggtccgctcgcaggtccgcgcgcctaggccccggcccccgccccggctccggcccgcgggcgccccatgcctctcctccggccggcgcggcgccccagatgcggctgcgggaggaggagccgtgcggccccggctccccgagagcggcggggagggggcggggagaggggagaggagcgcgggggagggggccgtgcggctgcgcccaaaaccaggcgcggatcgggccgcgggcgcggggctgggggggccttgggggggcccgcgccgttcctggcgccccacccccacccacgcccccgcaacccgggggaagggggagggtctccgcagcgggcgaccgctctgtcgcgatccggaagagcgcttggaaatccggggccgccagtccagagagggcaggctactggaacaaggtcacacagcgcgggccgcggtggcacgggagcctggaaccccaggctacggggcgggccggcaggaacctgtgttgaccatcgccgccccgtggaggagggaaactgaggcccagagagaacgagactggcccgggtcacaccgcgccagtcaggaaccaccccacccccgagaacttggggctcctgcctctaggaatgggtgccccctcccggtgacctgcttccgcagaaccctctcccaggtgtcttctagcctctggctgaacgggggttaaatgcagtctctggagtgggatgaacctgaactgcgtaccagccctgcctctcctggctctgtggttacagacaaaagactgtccctctctgagccccattcctccacctgtaaaatggggacaccacgagtctctatccccaacttgggtgagaaaccaaagagatcatgggtatgagctctttaccggtgcctggcattcagtaggtgtcaaatgaatgtgcctgccttctctggctcccacacacagccatctccagagaatgcctctgaatgcagaagggtcagaatggcgtgaaagggtggcctgcaaggctcctcacagccctgttccagtctcctccaccacccacccaccctgctcacatccccaacccagtgatgactgtttcagtgcccagcctctgcctttccctgtgcctgccatgccctcccacctctctacctgacaaactcctactcatccatcaaggcccagagcaatctgtttcgtaccccagcttctcacactccctactagtctacccatatttcctttctccagaacacattcccctttccccagtgtctggtctgggtttgtctctatcttctctggctctaacaactggggtgagaggaggtcactcagaggagatgacaccctgaggcccagcgctgcccaagagggcttcctggaagaggcagggcttcagtaaagcctggatggaaaggtgagtttaacacctgcatgcagcaggcaaagaggtggcatgtttgggcagggtgtcagcaaggaggagagtgggctccctggagcagtgggaagatcttggcgaatgagctgggagccagcgagagccaggggctggacagcgacctggcggtatatatatgatcaggttgaagatgagcaggctttgccctcgagaacacctcacatgggggcccgggaggcttgcacaaggatgctcatagcagcatcgtttgtaatagtgaaaagctggacacagcctaaatgtccatcatttggaaactggataaatagcaacacattcagacaatggaaaactgtctgtgatccacaatcctcaaaataggtgattgcaagcttatgcattgtgaggctgaatctcaaaaacacactgttgattcagtttgtgaaaatccagggttgtacacttacaatttgtgtgctctttgtatgaatgctatacttcaatacaatttttaaaataaaaatatatattgttggatggaaaaagcaagttgcagatggaaaacataatttcatgccagatacataaagtttgaaaacacacaacacaataccatatattgtttagcgacacatacatatgtaatacaagtgtaaaagcatgcatgggagtgatagacagcaaattcaagagagtagtgaccgtgagggagagagggaagggaatgttgtag

SEQ ID NO: 1561780 - DNA, 4001 bp, Homo sapiens
ggtctttgttcccctactctacaggggaagcaggaaaagcagccaaggctcacaactacaaagtgactttattccaagtgccactgtccaagcagggcccacccttaaacaacaatgggatggaacatggaaaatccaactgtccccctgcacagacatcccgatgggcacgcccatctatctttacaaacggactaacaaagaacaagcaggattggggcctgaattaagaaacagccgtctccctgctctattggaagggcaggtgcattctcgaataaccaggtagtggggaggaggttaaagagccctggactgtaatgtcctagtcctggatccctgtcccagctctggcaggagccagccagctgtttacccttgggcaagctcctctccctcgatggggctgtttaaagacaggctgacagttcacaaagcgtgtctacagatgtttcatttgatcatcatgacaacagtgtgaggccagcacaattatccactttttacagatagggaaactgacagagaggacaagggtctcgctcaaggttacaacaccttgaagctggcagaaccaaggccccagaggttagactaccaaagtcaatcctcagggtggtcagattaagaagtcctctccctgctcatcctgaatcgaatctcagcaagatccaggcagcacagacctttgttcacttgcccactctggtgttctgcaaagttctggccatgaaccccacagcctagctgcctaggaggctgaccccacccccacccccctgcaaaatttcattactcaagctggcaagaacgcagcccccacacccagccggggctaaataaacgtccaaatgatatcacatcctgccggctccaaaatagcccggcctgcccacaagcgatcacaaagtgccaggccatgcggggccaagtgggcagggatgcccagcccgtggtgccctccacacactcaagcaactaaagcagaagcctcagagcaggaaggccccccactccctcctccgccagacagcctggcccctccctcctttccccctttgtgggaggcctcagagcccccttgccctagcgccagcccttgccccagcgccaaccccatggagcctcggccgcggccagcctgcgggccaactccggcccgacccggacaccccaccactcacattgcttcaagagctccagacacaaagccatgagggccggatgggggtcagagacccagagacccggcaaagacagaaaaagggagagggagacaaggagcagagagaaggggagacagggggctagggctgaaaaagcaagggggggccaagggccccaggcaaagaagcaggctcaaaggggggccttcagcgcaagaggcacagagtggcgagaccaccgagacagatgtgggggcacagaggggcagggagagcaaagcaggggaccccgatcccgagaagtgggggtgctcggagacctgagagagaacaaggagagacagcgacaggggacaaaccaggggaaagcagagaggagctcctgaagtcagggagctgaggacatattggggggtcccaaggagaaagaccccaacttgggacctaggagctcccagtggatatggggaacacccagaagagggaaagcccaggggcaatgggggttcagaggaggcgagaccccagcgacttggggtgcagaacccccaaaggatgtgcaagaaactcacggggagcccttggggagagtggaaggtgttctcaaggggaaccccaaaagatctgggggcgctctgagggggagtcccgaagagtggggtcgcccagaaagggcggctctgagggctgaagagcgctctgagaaggggacccgagatggggagcgagggaggggctgcggaggagcgcgagggcagagacaaagagacagcgagccggggagagacaaagcgggcggagcggggacacgggctggaggactggcggctggacaggacggaagcgcgggcgggcgggcgggcgggcggacggacggacggacggacagacggggaggaggaggaggaggaggagggcgagggcgggggcggggcagggccgggccgggccgggcggggcggcccccgtctcctcgcggggccgcggctgctccgggcggcgctgggcgggccccgggcgtccgggctgaggaggcggcagcgacgacgtggaccggacagacggacggactggcggcggcggcggcggccagcggcgggcactcaccctcctccctcacgcagcccggcccgaggctccggttttgtacgcccgaggggcggggctccgggttaaagtcccgcacctgccccgcccctccccgccccccgcgtcagccgcgcgcgcgtcgtcagggactcccgggccgggcaggggcgcgcgcagcccgcttggcatgtggcccggcgcgcgcagccgggctggtcggcaggcgcgcgggccgccgcgtccggcccacgcccagccggccggcccaggaaaggagcgcgcgcccacgtcggcacgcgcatgcccgagcatgggggggtgggggtggggtcgccgcccctcgaaccgcctcgccaaaccggttccagctggaacgcgacgcatgctctgtgcgggaggtggaccgaggcgggagttcccaccagttcaccccagcgacacctcgctgtaaggggggaaccgaggctccgaggaagctgcccgaggtggccctctcacccctgcatagtcagattggccctctggtcctggctgctctgcgccctaggtgtatctagctgtcctcgccactgcatcctccctttgctttgctaacccagagtcctagagattgggttccaatcccggctccgcctctggaggcctgtgtgatcttgaacaacatccgcattcaacttccctgagccttccattcctcccccgtaaaataaaacaacaagcacacctacgatctcatggagggcaaagtgaccagctcgagccgggttggcagtaggtggtgccttcacgcctcctcgccttcccagttcctggcttctaccccgcgagtcccctctcctcactgaatccaggtcctgtcgctgccttgtgggcctcatctctccaggccgcacctgtggtaggtctgccagacgcagacccaactcttgttcatgacctgccttgctgggtgacctaggcaagtcctttcctttctcgcatctgttttccaaaaaatggagaaaagaatttttgacatatcaaaatattttgagcactggcgaagatgatagtgtttccaataccactgtcatggtttttgcattaaggtgtaaaaataataaacggaattgagggttagccaaccgttttgaatccaggcactgtgctaagcactttgaaggtcatcctatctcagtcacttatgctacgcctgtactattcactttaagttggttatttttattttttgtagcgacaaggtctctgttgctcaggctggtcttgaactcctgggctcaagcgatcctcccacctcggcctcccaaagtgttgagattacaggcgtgagccaaggttgatttacttaggaaaaaaacaaggtacatttgttatgggccctgacaacccaaggcagcacacacagcataagatgaaatatcattattccacttccaccctcccaaatttaataacacactccctgtgtgaccttgaacaagtccctttccctctctgggactcaccagccctatctgtttcctggagagaaactggaccaaggcaagatttttcaaactgtggaccgtgattgacaccctgaagagagatcactgggggcaccaactgaaaagcagattctgggccgagtgtggtggctcacgcctgtaatcccagcactttgggaggccaaggcgggaggatcacctgaggtcaggagttcaagaccagcctgaccaatatggagaaatcccgtctctactaaaa

SEQ ID NO: 1561781 - DNA, 4001 bp, Homo sapiens
tttttagaaacgttttaacttcaaaataattatagattcaaagttgcgaaaagatttacaagggtcccatgcacccttccaagccaccccttacctggctgtctttcctcattgggcaggtgagagatggtggctctctgtcctgagggccaacactccaggaacccttacctctacatgctcagtcctcaccgacaaggacttccgggtgacaaggccagcaccacgcacagctgctgctaagctcctcacgttcattcactgaacaaatatttactgggccccgatcatgtgccagcaactgtttttttcacaaaacattctctccacggaccttactaactcacagtaaaatattaagtatgataaatgcattaagcaggacactaggaggattcagcgctgtgggaaaattaagcgaggaagggaactgggtggcaaggcaggcaggcagtcgccaggctagggggttaaggaaccaggcattccaggaagatccaaggacagagcatgtggctctgttcagaactagcaaggaggctgatatggcaggtgcagagtgagtcaggggccagtctgagggtgggtggactcagacgctgcaggctcattaacaccctcgccaggggtgtccctcagagtccacacagccagcaaccagagcgggcccctacagctctctgctgggccagacgccagctggagccaccccgagtcctacagcaccgacacaagtgaaaggggaactcaaccgaaacttccccaaagcccttagatccaggcttctaatttcatctcttgtttgacagactactcattcctgaaactcagctgacatttttttaaaaagagaagcaaataaacgaacataaaatctcagaagctttgagtaaacttttgccttcaggtaaccatgacaatagtgggagcaatgtaactgtttttgtcattagaataggtttttctaaacaggcaaataagggcagacgtgtctaaccaccatcaaatcttcccaaccaagcctaagccggaaaacaaaaataaagctgaaatttttgcttccttttcctgtatgacacaactgaatgaatttgagaaatcatggcttcggcacacgaaaaagagagtctttaatccagacacttaacaccaacaagttagaacctgaacggacgagttcctaatactctccttaagagttcaatataaagcatggcttcaaatgtttttataaagcggagaaaacaggttttttctaacaaaccaaatgctttttggaatttacaacgtcggaaagattaatttacgatgcgttacagaacaattttcaattccccgagctataaacacaacgacccagggactaaattatctgcctccctaagaccagcgatggcccagcttctccagtccccccgcaggagaggagaccccggggggttgggggcggccgcggggacctgggggagcggagggggcgtccgggcccgaagagacccgcggagagcgccgccccagcccccaccacggtgctcagacccccggcccggcccggcccggctcccgcaggccccggcgccgaccttcccgcgcccccgccccggcccaggccgcggcgtcgcagcagctccggccccgagcgcccgcgcagccccggcccgggggtcgccgccatttccggctctggagtgccgcccccgccccccacccgcgcccgcccgcccgcctgcccgggcctgacgtgggccgatccgcccgcccgacccgcagcgagctcacctgcccgtccgcccgcccgcccgccctcccgccggctccgcggctccgctccccgattcgcggcgctgctgggcagcggccgacgcactcctcagcctggagaccccgggcggcggcggcggcggcggcagagggcgcgggtgcggcaccggcagcggcagcggcagcggcagcggagacgagcacgctcacgcacgcacccgcaccggcgcgcgcgctcccggaaggacgtgggctccggcgtgtcggagccgcgggtgggaccggctgcgcatgcgctcagagagccgagcggaggctccgtccatgaaggggcggagtcccgagtgacagcccggggccgaggcgccctgtggaggctccgcccatgagtgggcggggacgaagcgcgggggcggagccagtcctcccagtcttcaggtggccgcaggtgggtcccgggtggacacgccatgtgctgcggggaaccgcgcagaaagagaagcgcagggcttgctggtcttgcaggtgagtttactcagcgctttaagtaagactgagaaaacgtaatcgttctcatcaaagaactgaacagggagctggtgggagacggctgcggaccgtcgcccccgcccccacccggagccaccgtcctgggactgacatttgctcaaccctggagcgccgagatgggacgtccttccttccttcctgtccaaccactgaaatgccgtcgccagcgccctcccaccctcccggaatcatctccaaacagcagcgtggagaggcaggaccacgaacgtccactccacctccctctgcccttgcccatcccgtcggccacccttccctgtccctgtaactgcaggcgctccgccactcactgacggcctgccccgcgtaggctgcctgggccacttcccatcctagaagctcccagacctctgcggccggtgctcctgcctcctcgcttccacccttgcccgtttacctgagttcagtgcggtcatctttttaaaacaaacccagtagcatccaaggcttcccgtgacacactgcgtgaaacccaaattctctctcaacacgctctggcctccttcctctgccctcataactcactgccataatgccggtcttgaattgccaagcttgttccagtctcacagcctggaagtgtcagagcttgggaagcctcctagcagtcattaagctgcgcaacatcaagcaggcagcaagaaaaggcctatggaacccaagaagcagaaaggccaggttcatatctacaactatagattccaagagaatgaaatatttcaggccagaattggagggatgagagaatgaaatgggcctggtaccgatctcagattgaagctatattccacttgtgctgggagctgcaagaatgaatgaaccagccttaagtgagtccctctgagacctagcagttccactttagggacattcttccaaagaaaatattcctaaatacagaaaaaggtatatgcactgaaatattcatgaaggcactatttttaatagcgagaatggaaacctgcccaactgcacaagtgagcactcaaatggaataatatagttactgaaatgtatacaacgggacccatggctcacgcctggaatctcagcactttggtagaccaaggcaggaagatcactggagcccaggagtttgagacctgcctggacaacatagtgagaccaccatctctataaaaaaaaatttttttaattggcccggccacagtggcatgcatgcccctgtagtcccagctactcaggaggctggatcgggtgggaagtcaaggctgtagtgagccatgattgtgccactgcattcctgcctgggtgacagagcaagaccccatctcttatttaaaaagaagaaaaaaagaaagataatgtgtagaaaggctacacaggagcaaagaactcctgaaactaaaatgagcacgatgcatgatatgtaaaaagtatattatcacacatatatctatccatgaacattccagcctgcttggagaaaataagacaggaaggtacgcccgggcacagtggctcacacctgtaatcccagcactttgggaggccggggtgggcggatcacctgaggtcaggcgttcaagaccagcctggccaacatggcaaaaccctgtctctactaaaaatacaaaaattagctgggcgtggtggcatgcccctgtaaatcccatctgctcgcgagg

SEQ ID NO: 1561782 - DNA, 4001 bp, Homo sapiens
accctacacaggcactatcccactgcctctttacccaggcccaatgtggtagaggctattatgcctaaacatctgaggaagatcaagggctgaagaggttaattcacgcataagactggtttcatccttacacaaccctattagtaggactattgctaattcacagatgtaataattaaggcacggagagcaatgaacttggcgagacagggtttaaacacatgatgaactaagaactatgcttccttaaggaaggaagcttgcttagcccgtgtgctagctagtgattccaacaatggcaaacatgtattgagtgcttactgtataccaaccctataaactaagtaccatcatctcaactctggaaaaatcaagtccgcacctggcgtttccaaggtgggtgaacaagaagccccagcaggcctggtagaggagataacagctgtttcccaaaaactgccacccgtctgccacaacccaccgcatccagaactcaggaggcaactcaaagttcatactctgcccttaattccctttaattcaaacacttcccagcttcgggggagggtggaaacacggaggcccagcgagcctctctcctagaccaggggaggaaaagggagcagggaaagctggaggcgcgggcaagacctgggctcggaactccatccacaggtgagatcctccagcgggaagcctgggcccaagggcagcgcagtcttacaacttgttaggtctttctccgcttccactttctccccgataaagtggagctcaatacaccctccccatgcaaccacgagccgggaagcttatcttccaggagctggtgctagaggttttgaggccttagtgtgcgagtctgggaagtggggccagccgcacacgggagttaggctaagaatggaaggtaagaccccagggtaggcggcgtggccgggacagggaggcgccgcccctccggccggctcctcccgggccaggtgtgcacaggcagagggcagccccgctgctccccgcgcttgatggctcagctcaggagcaccccgggaggtcgccctctgcctcacgccctccacggcgcacaccccagcccgcgcgagtctaagcccacactcacgagctctttcctaaagctgggattgggggaagggacagcgcctcgcctgaagaccccacatcccagttgcaaggggcggacgcccacctgcatggcagaaacccctcctcacctcctctgccccttaacttttcccaaggcagaggccaggtaattacaccccctgcccatgagcaaagcccctgttcatgctctcgacgggcacctcctcctcctcgagtctggaccccgggaagccagcgcgtccccctccctgcgagcaagcttctctcctcttcgggctcctggaggcagcagacgcgtcccttcctctagtatctccggtccccgtcagacgtatgtcccccgcgtcccacccgctgtccccgttccaccccaagcagggtccgtggacgtttcctcaccccgcaaacccagccgggtctccaacccggcgagagcccctcctcgggaggtccctggagagggtctctccccggcagcttcgggagcccccgccgtcccctcccctagcagccctcgaagcagctggcggccgagcctccccggggccccggggcgctcacctgccgcagggctggctggggcgcggctgggcggcggagccgcgggtcggggctggctggcgggaggccggctggcggccgtgcagggcgctgggctcgcgaatctccggcgccgatcgccgagctaggtttacttgggccacttaaccccagcgctgccggccgggcagcgttgccgcccgctcgcccgaccgccagggagccggtcccgtccgtcggggggcgctcggagcgtccacgcgggctgcggccgcggagccgggagcagctgctgcgaggaagcggcgcgggccggacggggcagcgggagtgggtggggagggggcggtgccgactccccttgtagccccggcccggctcttgccccgcccccgcccgggggtgcccccgccgcagccactcagatccccgcccgggcgcggggggaacgggggggcggggacgagggaaatttgaaatcgctcggagcctcccctccgcccctctccgcgggctccgccccctggccccctgccctcccaaccccgggccagtgaaatcaccctgggggatcagaagccctaagcgggaggggtggggtcagacgtccaaaaccagactccttctggggcctttttcccgggctcctttcaacccgaacggagacacacacacaggcctggaggcgggggctcagagagggcagggcccccactgtagtcacacagcaccagagtctccgctttaacccccacctccagccgcagtgccaccggggcgccgcggtgcccctgcctgtcatcctgctttggaccctctgcctcgcccttcctcccttccttccacccagcccggcctttgtcagccatcttgaagggaggggagggcaggggaggggaaagaagaccagcgggtctctggctacctgggttccagaccctgcaggcatggactgactgagggagaagccgccctcagcaggtctccccacctctgccctgggatgaccattgaaccactggaaaacagcacttcctaaaatttatctgacctgggacttacatatttgcttgtttacctgcttgtggtctgtctccacgcagtaaactaaggacaggatctcagtagatgctcaataaatatgtgttgaatgaatgaatgatttatatcgcctgtaagcccctataggagcctcccctttcaaggtatatgctaccttaacccctctctgccttcactccaacttctctgctgctcctcaatacaccaagcgtttccttgtgatggtgactttgacctcgctgttccctacacctggacatttcttgcccagatctttgcaggaccagattcttacccctcggttttctcccagaaggtcactttatggagaggcttttcccgatgactccacctgaagtctcccctgtccatcactcctatcctatttcattctgttcctagcacttaccgcgatctgaaattgttttgcatatctgttttcctgtttacattcccctacacacacacacacacacacacacacacacacacacacacacacacacactatgggagcagaaaccacatctgtgtgggtctccaagtgcttatagtggatgggggatgcatcaaaaaggagctcaatacaagtttgttgaatgaatgggcatgggtttcctgccttatgggctccagctccctgagttactccacagctttctccctgtatctcttaccaggtgagtaaatgagtgaagggttaattctttggatgccgcaaaagtgtctatacttactggatcttattctacctaagagcttggggagaggctagggagataccagagagaaatgggctcagctcagcgccctgcctggcgcccagcagggcctcttgtgaatgaacagcaggactccttggctttctggcacaaacatacaaattggtgtccagtccattggtgcaggaagaagggggtctctctggagagggcctgtagcttgtctccaccatctggggcacatcttttgttttgttttgttttgttttgttttgttttgttttgagacagagtctcaatctgtcacccaggctgagtgcaatggcgcgatctcggctcactgcaacctctgcctcctgggttcagtctcctgcctcagcctcccaagtagctcggattacaagcgcctgccaccatgcccggctaattttttgtatttttagtagagacggggtttcgccatgttggccaggctggtgtggaactcctgacctcaggtgatctacccacctcagcctcccaaagtgctgggattacaagcatgagccacca

SEQ ID NO: 1561783 - DNA, 4001 bp, Homo sapiens
gactaacaggcaggtagcacctaagcatagagatgttggacaaagacaggactgatcctgggcaggacggagcaggacagtgcaagattccatcatgctaccagaatggcactcaatttaaaatgtataaattgtttatttctgggatttaccatttaatattttccatttaatactttcagacggcagttgactgcaagcaactgaaatcgtggaaagcaaaatgacagataagaggggactaccatattagagatttagcaatgtaactgatcgtccagattgaaaaaataatgccaaatatatgcagaaagcatctagctcggcaaccctccatacatttgcagatgccagtttttatgggcctcaggcagcccacgtgatgaaagccaaagacaaagtccctgagccctgaaaaagggagagcagagaccatacctgtgtgtagcttagcagactggacacctccctcttggagagtcgcgagcttgatcttcggcctgtagaggaaacagccaggagtctgttttgtgggggcaggcaccagtctggggaacggccttgctaataggggcttttctccgtggcgtggcctgggatctcccctacactattgtcagccacagggatttgctctcagtccgtcagtatcgttcatcttctccactgattttattcctaagacaacagagccctgggccaggcacgtgacaggacccaaaccaacactgaagttaccaaggggagccctccgattccttccagcagggtgctgcccatccagggaccactaactacatttccaggaacaattcactgcctgctgtgtcagccgcttctcaagtgctcccatgtagagtgtggctattgtggggaacaatgcagaaatagaaccctttcacgctcgcaggaagttccatgggatggcacagctgagaggacaatgcagggctttccaacccagctggggcgggatcccaagtgagctggctggagctgctcagggcagggtggaaaggaagcacactccagacctccccctcccaaccccagcccagctctgagtggggagagggtcccactgcagaagggctctccaagggcccatgctgagaccacccctgtcatgactggcagaggacagggaaccatcacccttgtgtcacgctcagagtcccagctgagatgagagtcccaaaggggaggccaagggctgcgggcaggtgtgaagggctcgaccctgcatccctccttgctagagctctcttccctcccggggaattgtggtggaggttgtcagagactctccccaaagcctccagttgtctgcagtgaccgctcactatgtcagcgcctgacaccaccccagtccccactgcccagccacctctgatctccggggtgcggatagcctccaggattgggggcgagtcggaggactggtcgctgcaggccccgttgacgaggatcgagtcttccctcccgccggcgtcctcctctccattgagatgcctggtgtctcccttcatgctttcctgtgggagaagccagaatgggtggggtgaaagggaagcagggacatgagagggacagtgttcccccgccatgggctctgtgttctcaggccaaggccccaggatgcattcttagggtgatgctcttgcccaagtaccccacccaggctgccccccatagcctccccctcaccaagcttggaggctcaggacttggttccatgtggacaggctgtcccgaaggctcagacgccagcacccaggacagagtggggaggccagggctggggtctcaggctcagactgctctgtgcaattagccggccccttcaaacaatgccatttaggacctgcctgtcccggcccgtctgccgccagcctctgtcccctctggccctggccccctctccctgctcagcctctgcaggggctcaggaagccagtgcattattttccctcctgacccctttgtttgctctctcccttcccctcaatctccaggtcctcttcccacccaccccctcctcccccacagaaccgcttctctcctctccatggcagcacaagccccgcctcaccccatcctccagggcccattggtctgctggcctgtcgctcactcccctcctccctcaccagctggggctcagagtcccaagttcccaaggagggaaggatggaggcacaggcagaaagcctgggggcagttaccaggagggggactccccagatccattgtagcctcaccctcacctctgggacttggcctccccactgctgcccctcctggtcaggtaaatcagctaacacacagggccagggccatacggatgggttggcaggctataacctctgggctggcccattgcctgcaacattatgggcacacagattttgttggatgcaacaacctgtatctccccctagggagactggggagctcaccttctagaaaaagaaaactgacatccagactaggttattctccaaggtcatatagcccatctaagaggtagggccaggattagatagagaacgagtaaaaaacttcagggcataaatccccgctgaaaccgagttttccaagtcacttgcctttgctttttgttccacctttggttggcaaaaatattataaaagcctaggcataatgagacctccaggcccccatccctgaaccacaaacagctccaggtcactcacaccacacccttgtgtcctggaaccgtgcctgggaaaagcttccccaataagctgctgccatatgcaccgggcctccctgcctcgggctccatcgtggagacataccagcccctgccagacaacccgtgctagcctcgcagtttatcttctatctgtccatccatccatccatccatccatccatccatccatctatcttagagacagggtctcacttggtcacccaggctggagtgcagtggcgtgatcacggctccctgtaggcttcaactcccagggcttcagtgatcctccagctgggcccacaggtgtgtgccaccaggtgtggctaattttttgtagaaacagagtctggctatgttgcccaggctggcctcaaactcctggcctcaagggatcctcccacctcagcatctcaaaccagggtaccttctagaagccacaccttgtattgcgggctccaagctgcactggcgccactggcatcgcccaccagggggcaccgtgagctcagtctgatgagcccagtggcgcccccaggcagaggtgcaatctgtggtgagagctcccaattccagaccctgcacctgcccatggcatggggcaactggacctctgctgctactccctgtgtggcccaggagccacgcaggctacagtaccatgaactgagagctgcttggaagaactgttggaagtgggagctggctggagaaatctccaccactaagctagatgtcctgaagcagggttttcattttttttttttttgagacagagtctccctctgtcgccaggctgcagtgcagtggtgcgacctccgccaggctggaatgcaatggcacgatctcagctcaccgcaacctctgcctcccaggttcaagcgattctcctgcctcagcctcctgagtagctgggattacaggcatgcgccaccacgcccagctgatttttgtatttttagtagagacaggtttcaccatgttggccaggatggtctcgatgtcttgtcctcgtgatctgcccacctcagcctaccaaagtgctgggattacaggcgtgagccaccacacccggcctgaagcgggattttcacaagacattttaacacacacaagtcatgcctaggtgattaatatgcatgttaaagcagcattgttcagattataaacatgtgcgctgatacataacacataggctttctgtgcttcacatgatccagagtgtgtatcagcacctgttaaggaatttcccctaccaaggacaagggacgtgcctgaatca

SEQ ID NO: 1561784 - DNA, 4001 bp, Homo sapiens
tggcaggatctgtgaaactgcattcaggagggagacagggtgagggggcatgtcccaaacatattctttcccagcctccccagttaattatggacatagaattccttaacaatactagacagcttttattgaaaactagctacatgctcagattttgtgcaaatcacagaggcatgactttatttctttctcataataactctatgaagtgcatattattttcaaagtttttttttttgagacggagtctcactctgttgcccaggctggagtgcagtggcgtggttttggctcactgcaacctctgcctcctgggttcaagcaattctcctgcctcagcctccttagtagctgggattacaggtgtgcaccaccacgcccggctaatttttgtatttttagtagagaccgggtttctccattttggtcaggctggtctcgaactcccaacctcaggtgatctgcccgcctcagactcccaaagtgctgggattacaggcgtgagccaccgcgcccggccaattttttgttatttttagtagagacggggtttctccatgttggtcaggctgttctggaagtcccgacctcaggtgatccacccacctcagcctcccaaagtgctgggattacaggcgtgagccaccgcgcccggcccaaagtgtttttatgaaatataatacttatacagaaaagtctatacactttaatgagtaattatagtgaacatccatttcaccactatcagcatcccaaaggcccaccttgtgctctctcccttccctgacatgcatactattaatccctctttatagttgagaaaacgggctcatcagagtctgttgatgagaacacagttgtctgactccagagcctgttctcttaaactccatgctaactgacctctttagagccctcaaccacagagccagtgaatgtgagggatcttaggtattgtttattccacaacccatctcctgtgcccttccccattttgtacgtgagttcagagaaggaagtgacttgactagttcaagatcacacagagttacagaatcggagtctcctcttcctcagtcctgtgctctttctaccggctgtagatctccatagccttgtgcactggggatcccaaatctgccatgcaagccagtggctgggatataagccccatgcagggccagccttaccttgttgtcatctgtgagcggcggcccctccgctgcacctgccggtgctttatcattatgttccaagggttctgtggggaccaacggaacaaatgtcactgcggcctgtgacactggggtggggtggaggtggagggtgggtatgaagttaaacctggacatccctgcttctcagatccgtcaccatctctcccgccttggggtgggacgatagttgtaaggcctcctccacaaaagaggaactgaggaagtttcctgccttaaaagtcccgaccctgccttctggcacggcaggaggaagggaagcagtatttaccgagggtcaactctgtgtcaggtgatgtccggggcgttgtacccgcctttatcttcccatcccacaacaagttttatgagacaggtactaatcatttccattttatagaagaggatcctgggactcagggggttgacagagatggcccacgtcacctagctaggagggcggcaccagaatttaaatccaggtcgtcgggctgcgaaaacgccaaccccctctgcagctccagcctccgcgttctctcgcccgcgggccagggtcccaggagccccgaggccgtgcccggcctgagcccagacctcaccgggggcgccctcaccgtaagaaccagctgccccgctgcgcccgcatcccccagctccaagccgcccctctcggccccgctaggtccccgcggctgctcggcgtcgccagtggctcccatggcgcccccggcccccacaactccgctggactctgtcaccggccggaaagtggcgccgtgacgtcactggagcgcgctgctcgtccgcccggaagcgcgacgctggagctgcggggttaccatgggaaccgaaccgccgcgcctcgcccaggacagttacacttagaggccttgtaggtggaggtcgttggggcttcctctcgggagggctgcgcctcgattgtgcagtgtgggtgttcagtggcggttcagtcaagggatgtttcccgctgggccaaggcctggggatgactgcggggtaggaggaagggaccagttttctgtaggctggggttggggagcagagggaagcgtttggtacagcggcgcctgcagttcagtttttgaaaactagattttaatatgctcggccaggggcggtggctcacgcctgtaatcccagcactttgggaggccgaggcgggaggatcacttgccatcaggagttcgagaccagcctggccaacatggcgaaaccccgtctctactaaaaatataaaaattagccgggcgtggtggtgggcacctgtaatcccagctactcgggaggctgaggcaggagagtctcttgaacccaggaggcggaggttgcagtgagccgagatcacgccactgcactccagcctgggcgacagagggagactgtctcaaaaaaaaaaaaaaaaaaagcacattaggcacatgttaggtcatcatcaaatgttaattatgccgagatcgcgccactgcattccagcctgggggacagagggagactctgtctcaaaaaaaaaaaaaaaaaaaaaaaaaaaagcatattaggcacatatgaggtcatcatcaaatgttaattatctccatgagccaacatcagccttctaaccataagggcgacttcctggctccaaactttttgatcctattaaggaggttttaccttgtacctgcccataggactaagcagtgccagtggacaccattaggtatcacagctaaccaaaggcatgaccaggacagataaagaaaaaaagaaatggagaaaaaagaaataaaggaggtatatgtgggcagactatttgagtcatacatagcaacttctcttgggttctgccagctagacttcatacagtccaagaatggcctgtgtgggttagagggacaaagatgtaggtgtttggtgcttttcattagttcttaacaaactcaactactgcttttctgtaggtttttgatagtttcttttctctcttttttttttttttgagacagagtctcactctgttacccaagctggagtgcagtggcatgatctccactcactgcaacctctgcctcctgggttcaagctattctcctgcctcagcctcccacgtagctgggattacaggcatgcaccagcatgcccagctgatttttgtatttttagtagagacagggtttcgccatgttggccaggctggtctcaaactcctgacctcaggtgatctgcccgccttggcctatttgatagtttctgagtggtctgttccattctgtattttcttggttgctaggatgaacaggagccacaattttattatgcttggttatgttattagctttggccattaagtagtgtcgtgaatccctccctctgttatttgggctaaagccatgtccttccaatgccctttagggctctctttgattctttttccaatggccacccctccatttttccagccacccactaggtttctcatcatccaggaatattgtgtatattgcttacagaatttgatcctcccatcacaggtcccctttggtagtgccaggaattttcccacactccagcagccaatccctcttcttcttgtcaggagaagatattcttggggagtattgtgaaagggaaggttttgggactgggtttggggccatccctagtcctgctcatacctcagctgatactctgggcaaggtgtacacctctagcctgaactgagctcttgtcccaactctcagcatcatcatgatgttaagctgcctctttcttctgaaggcacttctt

SEQ ID NO: 1561785 - DNA, 4001 bp, Homo sapiens
tggcagagctgatggaaatggtgaattctgttacatttctccctaattacatatgtatatattcacaataacacaggacataatcgctaaaacatggtcaccagcaggggagaaaaagaaaagaaaaagaccaaaacgaattaggcaagagttttataataattgcggatgttcctccccacagggcttccctccctagctgagtttactactgtgaaatttcttttcagttttcagtaaaagtatctggcacattaaaacagtccaaagaccaagtaagagaaagatgccaaatgacacatatttctaaagaaagctattcaatttaccactcattatcaatggcggcattccacacgattactgacattatacttatttcaggcattacaccaaaggatattttctccccccgcccccgccacctctccacccccacttttcaccccttatgtccaaacgcacaggatcaactaaaacagcgacaacacttgataggaggcaaagagaaatgagggacctagtttgaaatttttaggaaataaaaaaatcgttccagtatcttccctctccctcaagaattcttccaccatcattcagtcccaaggagaggaagggtaggttctcttttgaagcctcctccagcgaagagccaagagagaaaggggcgaaagagagggagttttaaggaaggagctagcctgtgtcaacatctgtcccaagtgccctaagattcattcattcttcctttcaggacatatgtagggagcacttgcgctatgccaggtatcaggttccacgtaaataacccttccgtggacctccagggtgtattccagcaacagaaatccaccaccccggcttcgaaccacggaaaatccagattcaagtatctacccaagttggccccgaccagaggccagcccgcaccgcctttgacacgacacctgggacagaggtggggggatccaaagacaccttacgcttggcagaaatctctccctggggtcagagggttcgtgacctcgttcacaccgagtatgcgtgtcctctttctcaaccagccgatccatcccccggaaaagttaagttggcggcgagtgggaaaagaggggaaccgggggcatccggcaggcacccccgcccgggcttctcagctccaacttccatggctaccgagaaatatttatttcgagtagatgggctccaggggctactgaagcccaacacgcggccaccatcagaaagccaagtcatccaagagataaagatagatccattacatacctagacgctggccttacagtgacagccccggagacgcgggtttcggctgagaaagccaccgcgcaattctccggcgcgcggccggggactctccgtccaccctccagggatgctggctcaagagagagacaatcgaaccggcgaacagcaacacggagaggatcgatactcaccccgaggcgtctgctccggatcctcacgtacccttgcttcactatgtcattaaaattggaagccatcccagacagccggtgaccccccctttacccaagagcgcgcacccgaagtggctctggggagggtggagggcagggtcaagacaagcagtcggtgggagaaagttggagaggtgaagctgcttcggcggcgctgggcgaggctttagaaggcgcacatcactttctctgtccccccaaccctgacagtgggcggccggcttgcagccactttcggggagcgcagagcgcggcgcggggaggcgaggctggagcgccggcgtcagctgactccgcggccggcctgccaggaggaggagcggcggcggctgagggatccagccctgcctcctcccggccgagaaggaggagaagaaggaggaggaggaggaggaaggaggaggaggaaagaggaggaaggggtggggggctaagaggaggagccgcgcgagtcccagcactgggctgcggccacccgtgagcagccgccctggaacgctccccgcgcctcccacccacctttccctccccgcttccccttccgatccctcccctcctggcggacccggagcgtgcccccgccacccccgcacctcgcccacagcctactgagatagcgctcgctctcctcgctccaatgacttattttaggaggagaggaaatttcacttttttccagccgccgcccaccccgcctcccccttcagcccctgccctttccccgagaagggccgattttgcgtgtgtgtctggggagatggtgttgccgcggctcgccttgaccttggcatctgaggagagggatattgtcaccgcttaagccaaatgcttccttgggtttccttgtgtcagggacctagccctcgctggtatcatttgccacagtttccctgtttcagcctctttcccgccggaatgtgtttcccagggggctgagacttggcctcatcactgtctgtccccaaagcctgaccccagagcaagtgctcagtaaatccttgtggttatcaagatggccacctaggtgccaggcactctccaagccttttgcatggattgactcattcaaactcccctgcactttttgaggtaggtgccctgttaatgtatacaccaggcccatatttaattaagcctccttagcctggcaatagagctctcattgccattatgagatactgcctatacaataagatgaagaaggggactgaatttcacactcacctgcccctgactgcattacctccctaaagcatacttgattgataattgctaacacacattgagcaccagtgtgctgggcattgtgctaatcttgttaagggaataatgaattaggcaccagcatccacattttacagacttgctaaggtctcacagctggccactatcagagctaggattgaagggaggtgtgtgtagtgcccagctctgctcctaaacattctcctattcctcttctgaagagaggatctcacagaaagagaggttactagttgatttccaaggaagatctttctaatcatttgcactattcacaaaggcaaagataatcatcagaaattagacaaaaattcttactcactgggaagcgacaaagctaaagctagagatcactgctcagagccattgagaagaggattcagttagtagtggattgtttgacctgatgacatccacaggtctttcaactctaagacgatatgaatcttcccattctcactgggaacattagcttttagtcaccttggcttgatgagtttcagttaaagaacagaaacctccaagaatgtgtcataggagaaccgagactaaatggggacaatcaaaaaggagatattctggcagggagaactatttttgctacatagtaaaccatctgtcttcatgttgccattctatggaaaatgatgttttaattttaaatctctcaccaaaagagatgaaatggtaaaatcatttggagagctccttttgaaggattggaacttaaaaaaaaaaatgctgcccatggttgctgtaaaatagaggtgttcatggaaggcatttatctaacacatcatttatagaccaagtccacagtattatagaaacaaaaaatgaagaaattaaggcataaggagcttgaaatgaagggcccacaataacggaaataattactgacaaaaactgaaggcgagaaatccatcccttgatagttaatgctgactataatcaacatccatagataatttaactggagctgaggaaactagaatcaaaccagaaaatatcaaactagacgtgaaggaacaaatgatttcttttttaaattgcaagactgaatccaatatatggttttgtttggtgaaatccaattgacatacatgcaaaacgtacagactgtgatatactattcataggacatttacacttgtccaaattgtgcaatacaagccctggcagcaagagcaaagagactgggcacagtggcttacgcctgtaatccctgtaattttt

SEQ ID NO: 1561786 - DNA, 4001 bp, Homo sapiens
tctcataccaattccttccattgacatgatggagtaaagctaaattagaatgctgggttttttttttttttaacttaactccccttaaaattgtaacacttggccagcctataagcataccaaaaatagaaagttcccattattgtttgccccttacatgggagtcactcagtaaagtacccccaacaatgggtgctcttgaagatgagaatatttgcatagcagaaaagaaaaccaaggaaactttggcagagctgatggaaatggtgaattctgttacatttctccctaattacatatgtatatattcacaataacacaggacataatcgctaaaacatggtcaccagcaggggagaaaaagaaaagaaaaagaccaaaacgaattaggcaagagttttataataattgcggatgttcctccccacagggcttccctccctagctgagtttactactgtgaaatttcttttcagttttcagtaaaagtatctggcacattaaaacagtccaaagaccaagtaagagaaagatgccaaatgacacatatttctaaagaaagctattcaatttaccactcattatcaatggcggcattccacacgattactgacattatacttatttcaggcattacaccaaaggatattttctccccccgcccccgccacctctccacccccacttttcaccccttatgtccaaacgcacaggatcaactaaaacagcgacaacacttgataggaggcaaagagaaatgagggacctagtttgaaatttttaggaaataaaaaaatcgttccagtatcttccctctccctcaagaattcttccaccatcattcagtcccaaggagaggaagggtaggttctcttttgaagcctcctccagcgaagagccaagagagaaaggggcgaaagagagggagttttaaggaaggagctagcctgtgtcaacatctgtcccaagtgccctaagattcattcattcttcctttcaggacatatgtagggagcacttgcgctatgccaggtatcaggttccacgtaaataacccttccgtggacctccagggtgtattccagcaacagaaatccaccaccccggcttcgaaccacggaaaatccagattcaagtatctacccaagttggccccgaccagaggccagcccgcaccgcctttgacacgacacctgggacagaggtggggggatccaaagacaccttacgcttggcagaaatctctccctggggtcagagggttcgtgacctcgttcacaccgagtatgcgtgtcctctttctcaaccagccgatccatcccccggaaaagttaagttggcggcgagtgggaaaagaggggaaccgggggcatccggcaggcacccccgcccgggcttctcagctccaacttccatggctaccgagaaatatttatttcgagtagatgggctccaggggctactgaagcccaacacgcggccaccatcagaaagccaagtcatccaagagataaagatagatccattacatacctagacgctggccttacagtgacagccccggagacgcgggtttcggctgagaaagccaccgcgcaattctccggcgcgcggccggggactctccgtccaccctccagggatgctggctcaagagagagacaatcgaaccggcgaacagcaacacggagaggatcgatactcaccccgaggcgtctgctccggatcctcacgtacccttgcttcactatgtcattaaaattggaagccatcccagacagccggtgaccccccctttacccaagagcgcgcacccgaagtggctctggggagggtggagggcagggtcaagacaagcagtcggtgggagaaagttggagaggtgaagctgcttcggcggcgctgggcgaggctttagaaggcgcacatcactttctctgtccccccaaccctgacagtgggcggccggcttgcagccactttcggggagcgcagagcgcggcgcggggaggcgaggctggagcgccggcgtcagctgactccgcggccggcctgccaggaggaggagcggcggcggctgagggatccagccctgcctcctcccggccgagaaggaggagaagaaggaggaggaggaggaggaaggaggaggaggaaagaggaggaaggggtggggggctaagaggaggagccgcgcgagtcccagcactgggctgcggccacccgtgagcagccgccctggaacgctccccgcgcctcccacccacctttccctccccgcttccccttccgatccctcccctcctggcggacccggagcgtgcccccgccacccccgcacctcgcccacagcctactgagatagcgctcgctctcctcgctccaatgacttattttaggaggagaggaaatttcacttttttccagccgccgcccaccccgcctcccccttcagcccctgccctttccccgagaagggccgattttgcgtgtgtgtctggggagatggtgttgccgcggctcgccttgaccttggcatctgaggagagggatattgtcaccgcttaagccaaatgcttccttgggtttccttgtgtcagggacctagccctcgctggtatcatttgccacagtttccctgtttcagcctctttcccgccggaatgtgtttcccagggggctgagacttggcctcatcactgtctgtccccaaagcctgaccccagagcaagtgctcagtaaatccttgtggttatcaagatggccacctaggtgccaggcactctccaagccttttgcatggattgactcattcaaactcccctgcactttttgaggtaggtgccctgttaatgtatacaccaggcccatatttaattaagcctccttagcctggcaatagagctctcattgccattatgagatactgcctatacaataagatgaagaaggggactgaatttcacactcacctgcccctgactgcattacctccctaaagcatacttgattgataattgctaacacacattgagcaccagtgtgctgggcattgtgctaatcttgttaagggaataatgaattaggcaccagcatccacattttacagacttgctaaggtctcacagctggccactatcagagctaggattgaagggaggtgtgtgtagtgcccagctctgctcctaaacattctcctattcctcttctgaagagaggatctcacagaaagagaggttactagttgatttccaaggaagatctttctaatcatttgcactattcacaaaggcaaagataatcatcagaaattagacaaaaattcttactcactgggaagcgacaaagctaaagctagagatcactgctcagagccattgagaagaggattcagttagtagtggattgtttgacctgatgacatccacaggtctttcaactctaagacgatatgaatcttcccattctcactgggaacattagcttttagtcaccttggcttgatgagtttcagttaaagaacagaaacctccaagaatgtgtcataggagaaccgagactaaatggggacaatcaaaaaggagatattctggcagggagaactatttttgctacatagtaaaccatctgtcttcatgttgccattctatggaaaatgatgttttaattttaaatctctcaccaaaagagatgaaatggtaaaatcatttggagagctccttttgaaggattggaacttaaaaaaaaaaatgctgcccatggttgctgtaaaatagaggtgttcatggaaggcatttatctaacacatcatttatagaccaagtccacagtattatagaaacaaaaaatgaagaaattaaggcataaggagcttgaaatgaagggcccacaataacggaaataattactgacaaaaactgaaggcgagaaatccatcccttgatagttaatgctgactataatcaacatccatagataatttaactggagctgaggaaact

SEQ ID NO: 1561787 - DNA, 4001 bp, Homo sapiens
ggacgttgtcatctcaatgttttgatgttataaaaattcctttaaaactcaacgatttcacatatgttctgttgcaaatagatgcatttggattgaggtgcagattgagagtgcgatgacatcagtaccacgtctttggcctgggctcagctgaggaggactaaggggatctgctcctctctttcacagctgccccagctcccaggagacgggtcgtgggcgggccctgcaagggtccagatggaaccacaactcaaccctgcctctgcccaactgttcatagtgaaggcagacgccgggactagcctcatcactgtgtgaaaatagttcagaagatcttgcgagcgcctagttatgtctgaggatgattattttcttccttccttctttttttttaaattatcgtcttttaaatttagatggataattaagaatgcttccaatttaaggttctaagcacaaactccagatacgtcatgttatggacttgcttcctgaagatgaaatcagcagttgatggaaagaatccacaacacgcctacagaacagcaaatcacaaatggctgtgtctccacgaagccaggagctttgcatttgaagtttctatctgggctcatttccagctgttcagggttcggattcctgaaggcttccttagcatttaactcattctttgttgactgaaggcactggcactgtttctccacacgcaaactgatctttgtcataaatcacttttataatgagagagcagcctggacacattgccacaccttccccattctccagctcttccttggtgatggagaagttatctccgcatgggcagggacagaaatatgtctccgagtcctcgtcatattggaagtcctcgatttccacctcgtcatgaaatactgccatggtcagcgggggttgctgaaggggtgacgccccagcagtccgagaccagctccgagggtctaacttctccggagccggcccaggctctgactttcatttaattgtcctgaaaggtgaattctatcttgccaaataggcaagtgttttttatatgtaggctttaggtgtcagaatataggaaattatcaaaatgtggggtcattttaaattgcatcctaaaaccttttaaaatttgggaagaagctgggcgtcgtagctcacgcctgtaatcccagcactttgggaagctgaggtgggcagattacctgaggtcaggagttcgagaccagcctggccaatacggtgtgacccccgtctctactaaaaatacaaaaattagccgggcgtggtggtacatgcctgtaatcccagctactcaggaggctgaggtgggagaatcagttgaacccaggaggcaaaggttgcagtgagctgagatcgtgccattgcaccccagtctgggcgacaagagtgaaactccatatccaaaaaaaaaaaaaattgggaagaaaatgagtatatttatatgcaggtgtagattctgagtgcacacagtagttggaaatggcagcttgcttggttggaaagttgcttaaaagtggatgggtggaatgttccagtcactccaggtggttcagaagttaaatccatggcagcatggcgcttgtgtcctcctggacttgaattaagtagaaagttactacaactcagcaacaaaaagactacacagactgggaaccgtggctcccgcctgtaatcccagcactctgggaggccgaggtgggtggatcacctgaggtcaggagtttgagaccagcctggccaacatggtgaaaccctgtctctactaaaaaaacaaaaattagccgggtgtggtggcaggtgcctgtaatcccagctattcaggaggctgaggcaggaaaattgcttgaaccccaggaggcagaggttgcagggaggtggaggttgcagtgagctgagatcacgctgttgcactccagcctgggtgacagagtgagactcggtctcaaaaaaaaaaaaacaaaaaacaaacaaaaaaaaacagaaaaaaaatgttgaaagccaggcgtgatggtgtgcacctgtagtcccagctactcgggaggctgagcctgcagtgagccgtggatgtgccactgcattccagcctgagagagcaagaccctgtccaaaaaaaagacagcacaactgaaaaatgggcaaagaacttgaatagacatttctccagagaagatacacagatggccaataagcccatgaaagatgcgccaagccgttagtcattagggaaatacgaatcaagacccaatgagatactacttttacacatactaggatggctattcaaaaacaaaaacaaaagcaaaatagcaagtgttggcaaggatgtggagacatcagaatccctgtgctttgccgctgggggtgtgaaatggtgcagccactgtggaagacagtatgacagctcctcagaaggttcaacatagaatcaccagagaagcataaaccccaaagaggtgaaacagggacccaaatggatgcttttctatgaatattcatggcagcacctttcacagtggccaaaaggtggaaatgactcaagtgtgctccagcagaggaatgagtaaacaaatgtgttacaagcacacaacagaatcttactcagccatgaaaaggaatgaaattctgacacaggctacagcatggatggcccgaggtcattatgctgagtgaaataagccagtcacaacagggcacaccctgcgggattccgtaaacaaggcacctagagccgtcagattcagagagacagaaagtggactggtacgtgccaggggctgggggccggagcggtgtggagttagtgtttaatgggtacggagtttctgtttagggtgatgaaaaggtggtggcggctgcacagcactgtgagtggacttcacgctgctccactgtacacttacacatgcttaaaaggcaaattttatgctatattttaataccacaataaaaactgtataaacctggatttaatcgtgtagaatgctatgttttaaaaccaacttatggaaattttcaaatctgcacagaaatagaaagtgaactcccaggtccctctaactcagtttcaggcatcagcttgtttcacctatcccctcgccctcccacccccgctgaattattttaaaacaattccagacatcatttcattcataaatatatcttccgaaagaaaaggcctgtttaaaaacacaaccgcattatcagtctccttcctgaaagccttcactccttattacccacctgagtctccttcccgaatctgagcagaatctcccgtgagcccacaggtgtctctacggtcagctcatttgaatcaggatccaaacatcacatttggttgatagtttttaaatatatcttaacccgtaatagttcccccttcctttcttcctcaccgttcatttgttgaaaagggaatgatttgtcccgtagacgtttccacattctgcccgtggtggttggcgcctgtcatcgggccgtcgcctgtgcccctctcttcctctcagtctccttcgggaggttgagactgaccccaccattataattgaggccttttgtaaaagacaggtggtgtgacaggagcaagctcagcccacccccaccctgctggcagggtctccccaaggacagagccatctcagcgagcagcacctccaccttgctggccttggaaccctgagtgtgtggcagtgcagagggcaaggcagtcgccctggggtgggggtagatgcccctgacttgttaattgttgaaactttttaaaaatttatttttttgagacggagtttcactcttgttgcccagactggagtgcaatggcatgatctcggctcactgcaacctccacctcccaggctcaagagattgtcctgcctcagcctcccaagtagctggggtcacaagatgcttgccaccacgcccagctaatttttgtatttttagtagagatggggtttcaccatgttaatcaggct

SEQ ID NO: 1561788 - DNA, 4001 bp, Homo sapiens
tccaaaagaaaaaaaaaaaaaagaaaaagaaaaaagaaacaaatacaagaaaatcaaccagaaaacatattccactgttaaaggctttaacaagtcagccccagcaaactttgaagacaagaaagcaaacccctgtgttatctattctccaagagtagaacaatgactttggcttcccactgtgccttaaatctgggcactggtgcctttacatgccaaaatatgtaaggtgattttaatagacgtgctgaaagagaaattccataaacaaaatggggtcgttaaaagcaaattactgtcccctaccacttcaaagcagctacaccacctgagggtgaggcagctcaaaggtaccaagctgggctgacttcaagtaatttgattgcatctgaaaagttttgtttcctttatcaaacttcattttgatcttaaaagattgattcacaaaccattaaaaggaaacataaattgtactacataaaaaaattaaaacagcaaaaaaaaaaattgcaaaattagaatacaagccctgaacgagatcggttgtatgatagttactttctttaatttagagcttatagaaatcaaaattaaaagattaaacaggaaaaataaaaattttaaaactctgaggggcaaggcatatgaaggcagttattcaaggaaatacaatcaaaacagcaatggttttcacaaatgagtacttccaacaatgttaagtctaatgctcaggcgggctggttgatagggaaacaggcactctgaagaatggagagtccaaacttgtacaaccttttttttctttagagcaatttggcagtaactgtccattttaagcacatttctgtcgacccagcaatcctacctcgaagaatttatccctagtacacaagtaaaagtatgaacgcgtctgctgccaacactgatgcaataaaggagcaccgctatgtgtcaagcacttttctaaatttagctggaaaatatggtgtgaacaaagtccttgttctcatcgacaaagcaaaagccaaaaaacagaaacaaccaaaaggcgctggaaataatccagttcattgccatgacctgattaaataaataacacagccatatggaatgttacctaacttccaaagtaatttgctatgtttgtacatgttaatatgagaaaaagtcttcaaagatttcacagcatgatcccatttgtgcaatcgtaaaacaagttacttcgtactgactccaggattttttgcagtttttaaaaacactgcattaacacttccaaattcgaactccacccaccccccatcccggttctaacaatcacaccaaacatccaccagtgatcagcgaagatgctcttctgctttctcctttccagaaaggttatcgtgcccagcaatagctccctaacccacacacaccaaacctcatgcttatgtaagcactcggcaccggagcggagagtgagagctctcgcttggactcccggctcttgccgcagatcctgaccgcctagagggaggagtgggatcacgctttcagcctcgcttccaagtaaaagagtggccaacctttctacggaaaggcgggggacgggagtactacataataaagataaatgagagtctcacaaaacccaagggcaggaatgagaacccaggacacgaagaaaacccaacaagcatccgcctctgcttccctcgcagggtggccctctccccgggccttcctgtgtgaggcaaagaaggctggacagggccgcttcgcgcagccagctgccgacacccgggccggggaagccagctcatctcattcttcggggagggagacctggtgcgctacctctcggagaagcttttcaccagcagccacacgatgagcggcaggttctcgcgctcgttgtaggtaggtaaaagcaccgaatatttgttctgtcgtggactgcgcacttccagctcccgccgagacctgcgaggactacgactgacttccaaggaggccatggcggaactgagccagatgccggaagcggaattacgtaatgtggcgcggaaaaggacgggtcggaccgtaccaaattcggaagcgggggatgacctgtgtgattgatcgctagttcttctagggccattgcgtggttcaattagaaatattctggatttatacatctttgaagtttaatctgaaggtttcttcaggaagtaaatatctattcatcaccttttcccaagctccataaagttttttagtttatcccagtcgctaggagacagaagacggaagcggaaatgcctttcacgacaacttccggaagaggtcgccatggcttcccgggaggaggtactcgccttacaagctgaagttgcccaacgtgaggaggaattgaattcgctgaagcagaagctggcgtcggctcttttggctgagcaggaaccgcagccagaacggctggttccggtgtcgccgctgccgccgaaggccgctctgtcccgagatgagattctgcgctatagccggcagctagtgctgcccgagctgggcgtgcacggacagctgcgcctggggaccgcgtgcgtgctaatcgtgggctgcggtgggctcggctgtccactagcgcagtacttggcagcggccggcgtgggccgccttggccttgtggactatgacgtggtagagatgagcaacctggcccgccaagtgctgcatggcgaggcactggctggccaggccaaggccttttcggccgccgcctcgctgcgccgcctcaattcggcagtggaatgcgtgccgtacactcaggcccttacgccagccactgccctagacctggtccgccgatatgatgtggtggctgactgctcggacaacgtgcccactcgctacctggttaatgacgcatgtgtgctggcgggtcggcccctcgtgtctgccagtgccttgcgcttcgagggccaaatcacagtctaccattatgacggtggcccttgctatcgctgcatattcccccaaccacccccagcggagacagtgaccaactgcgcggacggcggggtgctcggtgtcgttaccggggtcctgggctgcctgcaggccttggaagtgctgaaaatcgctgcgggtctgggcccctcttacagtggcagcttgttgctctttgatgccctgagagggcatttccgctctattcggctgcggagccgcaggctcgactgtgcagcttgcggggaacggcccactgtgactgatctgctggactatgaagccttctgtggctcctcagccactgataaatgccgctccctgcaactactgagcccagaggagcgtgtttctgtcaccgactataagcgactgctggattctggggcattccacctgttgctggacgtcaggcctcaggtggaggtggacatttgtcgtttgcctcatgccctacacatccctctgaaacatttggaacgcagggatgcggagagcctgaaactcttaaaagaagcaatctgggaagagaagcagggcacacaagaaggggctgctgtccccatttatgtgatttgcaaactgggaaatgactcacagaaagccgtgaagatcctccagtccttatcagcagctcaagagttagaccctttaacagttcgggatgttgtggggggcctcatggcctgggctgccaaaatcgatggaacatttccacagtactgaggtgactggtatagtctgatgagaaagatgtggattgccataatacctcaaagatacacttgtttgcatttttcggtaatatacataggagctggggattctacagtatctgtgaatacgtggactcctttttataaggagttttaaaaattgttatgtattggatgaatgacttattaatggattataccgtttctgagaaccatcattttttttttcagcacacggaggatgtcttggacatgtgagatgtaacgtgacaggattttgcattttaaactgcagatcatttacatgtc

SEQ ID NO: 1561789 - DNA, 4001 bp, Homo sapiens
tcctaactgttttataaacagtctctaaatcttttctccattctcactgttactagtttatttattattttgagacagggtcttgctctgttgcccaggctggagtacagtagcacaatcttggctcactgcaacctcctcctccccagttcaggtgattctcctgcctcagcctcctgagtagctgggattacaggaatgcaccaccatacctggctaatttttgcatttttagtagagatggggtttccccatgttggccaggctggtctcaaactcctggcctcaagtgatccaccagcctaggcctcccaaagtctgggattacaggcgtgagccaccacgcccagcctcactgttactagtttagttcaggtctcataatttctggtccctcccactatcttaatagtctctccactagtttttctacctccaacggcccgtctccagtctattctttgtttttgtttttttttgaggtggaatctcactctgtcgccaaggctggagtgcagtggcgcagtctcggctcactgcaactttcacctcccaggttcaagcaattctcctgcctcagcttcctgagtagctgggattacaggtgcctgccaccacacctggctaatttttgtatttttagtagcgatggggtttccccatattggccaggctggtctcgaactcttgacctcaggtgatccgcccggcctcagcctcccaaagtgctgggattacaggcctgagccaccacacccggcccagtctattcttcagacagttgccgggacttttccaaagtgtagtcaacacctcaggtaaactagtcccaatttacccattcctgctctctcctcccagtcctattccctgtactacttctgaatctttgcacatatctgtccttctacctgttaaacttattcatccttcccaacctggctcaaatatgaagctttcacatcacttatctttggcagagttggtggttatgccccttggccttcgtagcattggctataaaatctgtttacatgtctgtctccccagccaggctgtatttgtattcctagtgactgtcaggaacaactgcctggaaggcagggatgtcacctaggcatctcttcatcgtcccctccctcccagcagaaatctgtctgtggggggtgctaagtaaaaagatatgaatatatgcagagggacaaaaaggaaaagataacaaggagggctcggtcaaggatctgaatcccccacggtccttatgacaatatcacacaaatccaggcttggataataacgactgtatcacacagatccaggcttagaaaagcaacaactgtcaactgttaaacgcttattctgtgctaggacctgtgctatgtaagcgctttacttgcatcgttattccacttaatcccttccacaactccgtaagcaccattaactccactttgcagacaggggaactgaggttcagaggggcaaaaagcctggcccaagcttgtgacacagccagcctgggggcacaggggcaattcgaaccccagccctctacccagtcctcacccctgtttctggagcctagacccctggcacggcagatacgtctctaatggggtcggtaagggggactgccctcgggtttcatttcacccgggaggaggtcgcagcgccctcggggacccccagtgtccacggtcggggccggggctgcggcgggtcgagctgggccgacgggtacgacgccgaagagattagtgcggcggcgggcggggccacatcagaggacaagtctgtgacttcctgacgcccgtccagtccggaacctccgtacctgaaacacaaggccacgggtcgctctccacagccccaggtcactcctggacgccttgcgcacccgcagccgatactccctgatcagggtgaagcggtctccaccttctacgtcacggtcaccgcctccgaaactcccgccaaccaagggcgcatgcgcggccgtcagtttctcgggcacgcgcgcgcagaacgcctgcctccggcgatgcacatgcgtacaccgccgcccgacgcgcatgcgtacaccgccgtccaacgctcctgccagctccgctcctctagtccaagtcctttaggtcctgtctggccacgtcaccacctccccgcaacaccccgcccgggagtccctttccgggacccgccacactatcgtgtccttttgcgcccgacggccccagagcccatctaagatgggggaaacagaggcccggagagattcttgccggaggaatacagcgcctcaaagggcatctgatgccctgtccccgtcgctaggctctggttcccactccctttatctccttaactcccaaaatgtggaccgtgactctccccagggtggactggagctctgagctcagtttgcctcacagtctatcccactcctgctctaggactttttctctctcatttccaggccactccctcaaacggcttgctttacttgcttggtgggtgggggcctgccctcgggtttcatttcacccgggaggaggtcgcagcgcccccaagtggtcgcagtgtccttagtcggggtcggggggtgcggcaggtcgggctggtccttaggggtaggacggggacagggcatcagatgccctttgaggcgctatattcccaggcgctgttccctctgcctgggaaggctttccctgcttttcctagctacatcctccaatttttttgtattttgagacggagtctcgctctgtcgcccaggctagagtgcagtggcgcgatctcggctcccggcaacctccgcctcccgggttcgggttcaagcgattctcctgcctcagcctcccgagtagctgggattacaggcgcccaccaccacgcctggctaatttttgtatttttagtagagacggccactaaaaatgttggccaggctggtcgcgaactcctgacctcaagtgatccacccacttcggcctcccaaagagctgggattacaggcatgagccactgcgcccggccacatcctcgaattttaagcctcagctaaggaatgattgatttctctccaagcattctctctggccttaggctgaaaaccaactgtcctttctgtgctcccaggagcccaatctgttcctgctccactatcccatgctggtctaggaggctccagagagcgggctgcttcctcagcacccagcacgacgccaccaaaatgtccccttggatgtgcacagtcctttctttcacagaaaaacttccaaatattgaattataagcagcccacagtccaaaagaggggttggagagaggcagctggagctgaccgtggtcatccttccatagcagttgtggtccttggaaaagttttctggtgggagacaaaaatctgccttcctgaaatttccaccctgtggttccagcctgctggctgcagcagccattctgaaagcagagatttgcccttggctccctgaatatcactttctggggttgagaggtacccagttccttttatgcttgcctgcctcttaaactcctctctgtcaacgtgccaggaagagaactcagtgttccttcccagctagggctggccatcctggggcacaatgagaaaatgatttcatggaatacagacccaatacatcttctacatcgtttccctgctttgaattgttgcatggctccctcctgtccacaggaggcacacatttttttcccctataaggcactgtgtcattaggctgggtgtggtggctcacgcctctaatcccagcagtttgggaggctgaggcctgcggatcagttgaggtcaggagtttgagaccagcctggccaacatagcaaaaccctgtctctactaaaaatacaaaaattagccaggtgtggtggtatgcacctataatccctgttacttgagaggctgaagcaggagaatcacttgaacctgggaggccaggagaatcacttgaacctgggaggcc

SEQ ID NO: 1561790 - DNA, 4001 bp, Homo sapiens
atggtctacctggtcttccaaactagaaaaaccacatcatccattacttcttattcttagttctccagatccaaagtcctaactgttttataaacagtctctaaatcttttctccattctcactgttactagtttatttattattttgagacagggtcttgctctgttgcccaggctggagtacagtagcacaatcttggctcactgcaacctcctcctccccagttcaggtgattctcctgcctcagcctcctgagtagctgggattacaggaatgcaccaccatacctggctaatttttgcatttttagtagagatggggtttccccatgttggccaggctggtctcaaactcctggcctcaagtgatccaccagcctaggcctcccaaagtctgggattacaggcgtgagccaccacgcccagcctcactgttactagtttagttcaggtctcataatttctggtccctcccactatcttaatagtctctccactagtttttctacctccaacggcccgtctccagtctattctttgtttttgtttttttttgaggtggaatctcactctgtcgccaaggctggagtgcagtggcgcagtctcggctcactgcaactttcacctcccaggttcaagcaattctcctgcctcagcttcctgagtagctgggattacaggtgcctgccaccacacctggctaatttttgtatttttagtagcgatggggtttccccatattggccaggctggtctcgaactcttgacctcaggtgatccgcccggcctcagcctcccaaagtgctgggattacaggcctgagccaccacacccggcccagtctattcttcagacagttgccgggacttttccaaagtgtagtcaacacctcaggtaaactagtcccaatttacccattcctgctctctcctcccagtcctattccctgtactacttctgaatctttgcacatatctgtccttctacctgttaaacttattcatccttcccaacctggctcaaatatgaagctttcacatcacttatctttggcagagttggtggttatgccccttggccttcgtagcattggctataaaatctgtttacatgtctgtctccccagccaggctgtatttgtattcctagtgactgtcaggaacaactgcctggaaggcagggatgtcacctaggcatctcttcatcgtcccctccctcccagcagaaatctgtctgtggggggtgctaagtaaaaagatatgaatatatgcagagggacaaaaaggaaaagataacaaggagggctcggtcaaggatctgaatcccccacggtccttatgacaatatcacacaaatccaggcttggataataacgactgtatcacacagatccaggcttagaaaagcaacaactgtcaactgttaaacgcttattctgtgctaggacctgtgctatgtaagcgctttacttgcatcgttattccacttaatcccttccacaactccgtaagcaccattaactccactttgcagacaggggaactgaggttcagaggggcaaaaagcctggcccaagcttgtgacacagccagcctgggggcacaggggcaattcgaaccccagccctctacccagtcctcacccctgtttctggagcctagacccctggcacggcagatacgtctctaatggggtcggtaagggggactgccctcgggtttcatttcacccgggaggaggtcgcagcgccctcggggacccccagtgtccacggtcggggccggggctgcggcgggtcgagctgggccgacgggtacgacgccgaagagattagtgcggcggcgggcggggccacatcagaggacaagtctgtgacttcctgacgcccgtccagtccggaacctccgtacctgaaacacaaggccacgggtcgctctccacagccccaggtcactcctggacgccttgcgcacccgcagccgatactccctgatcagggtgaagcggtctccaccttctacgtcacggtcaccgcctccgaaactcccgccaaccaagggcgcatgcgcggccgtcagtttctcgggcacgcgcgcgcagaacgcctgcctccggcgatgcacatgcgtacaccgccgcccgacgcgcatgcgtacaccgccgtccaacgctcctgccagctccgctcctctagtccaagtcctttaggtcctgtctggccacgtcaccacctccccgcaacaccccgcccgggagtccctttccgggacccgccacactatcgtgtccttttgcgcccgacggccccagagcccatctaagatgggggaaacagaggcccggagagattcttgccggaggaatacagcgcctcaaagggcatctgatgccctgtccccgtcgctaggctctggttcccactccctttatctccttaactcccaaaatgtggaccgtgactctccccagggtggactggagctctgagctcagtttgcctcacagtctatcccactcctgctctaggactttttctctctcatttccaggccactccctcaaacggcttgctttacttgcttggtgggtgggggcctgccctcgggtttcatttcacccgggaggaggtcgcagcgcccccaagtggtcgcagtgtccttagtcggggtcggggggtgcggcaggtcgggctggtccttaggggtaggacggggacagggcatcagatgccctttgaggcgctatattcccaggcgctgttccctctgcctgggaaggctttccctgcttttcctagctacatcctccaatttttttgtattttgagacggagtctcgctctgtcgcccaggctagagtgcagtggcgcgatctcggctcccggcaacctccgcctcccgggttcgggttcaagcgattctcctgcctcagcctcccgagtagctgggattacaggcgcccaccaccacgcctggctaatttttgtatttttagtagagacggccactaaaaatgttggccaggctggtcgcgaactcctgacctcaagtgatccacccacttcggcctcccaaagagctgggattacaggcatgagccactgcgcccggccacatcctcgaattttaagcctcagctaaggaatgattgatttctctccaagcattctctctggccttaggctgaaaaccaactgtcctttctgtgctcccaggagcccaatctgttcctgctccactatcccatgctggtctaggaggctccagagagcgggctgcttcctcagcacccagcacgacgccaccaaaatgtccccttggatgtgcacagtcctttctttcacagaaaaacttccaaatattgaattataagcagcccacagtccaaaagaggggttggagagaggcagctggagctgaccgtggtcatccttccatagcagttgtggtccttggaaaagttttctggtgggagacaaaaatctgccttcctgaaatttccaccctgtggttccagcctgctggctgcagcagccattctgaaagcagagatttgcccttggctccctgaatatcactttctggggttgagaggtacccagttccttttatgcttgcctgcctcttaaactcctctctgtcaacgtgccaggaagagaactcagtgttccttcccagctagggctggccatcctggggcacaatgagaaaatgatttcatggaatacagacccaatacatcttctacatcgtttccctgctttgaattgttgcatggctccctcctgtccacaggaggcacacatttttttcccctataaggcactgtgtcattaggctgggtgtggtggctcacgcctctaatcccagcagtttgggaggctgaggcctgcggatcagttgaggtcaggagtttgagaccagcctggccaacatagcaaaaccctgtctctactaaaaatacaaaaattagccaggtgtggtggtatgcacctataatcc

SEQ ID NO: 1561791 - DNA, 4001 bp, Homo sapiens
ctctaagagtaacttgtaaggtcttcttgatctccctaaagccaacaattttgaagcgtatttggaaatcgctcatttctaatttttatttctcccactcctcacaagaaccaggaaatataacagacccttccttccttgaatttagttaagctttaactaaaactaagcatttaactaaaggtaaaatgtttggtctcttattttcaaacagaaaaataaagtctgtattagccactcaataaaaaagcataatgtcaaatcagaagtctctagagcagaccctagtcagcttcaaagcactttcacagagtgaatggtcttaagcgtaccataactcaaagcccctagattaagtctttcagtataaagtagcatatacatttaaaatgttattaaatttctaataattagatattaaaaagactcaagatgctgatactttgtagcttacagcattaaaccaaagaagaaccaaaaactgaacagtatcaaatccctattacatacatatctacagtcatcaagaaactaccggtttatcttttctttcactaaggggccgcctgcatgttcacggaagttgtagtaacttaagaaaaccaaaactgttatacagtgaaaacagtttgtatgcagataagctggtaccaactgcttctagacagatgcaattacagtgtaatatttctagcaaagtctggtaaggctacgcctgcaaatcactgaccaaaaatggtaacagtgtgtgcacactaacgaaaacgacaaaatgttccaactgatagttcagttgagaatacgtttttaaatagctaattagagtgacagtgtaaagggggaaaatatgtaaattaagcaaaatgtccatcatatagaatatactaatgagcacctgtttactttctggtgactccagtattttaatggtttttaaagctcttaaatttggttgtatcagcatcccagcatcatgcccacaccttgcgcaccaagttctggcagagtccaactgtctacaggtcagaaaaaaaattctaaccatacacggacagatcgggcagggaagggttaaaacagacactgccaagcttgacaagcacgacgagagtgctgctggaagccgattgccagataaaaagaaaaaaacaaaggagctgcaaggccaccccgttctaaatcatgccaggatcctgctcgttagcgatcattccgtgctctaggactgttccataaaggctttatcttccttattgagatggacagacctcaagggctggaacgcgcacaagtcaccaagcgcctcagcgccagctctggggaaacccacgccaacaaggacggtggccggattccgacgccccccgccccccactccccggcctcggtgtgcagacccccggatggatttcacagagcgggtgggggcgctcgaccccagccagttgttgcaaggccgggtctggagacacccgcagaggccacgctcagggcggcggcctcgccccagctgggagctgcgcaacagccgcggatccaccccggggcgcgggggcccagccaggacggcgggagacggaggcccagagaccccccctcacccgcagcccggacactgcagccggaccgggtccctccccgggctgaggcacggctcacccccttagccccgactccgcggcgccccagagacacactgctcccggccgcctcggcccacgcctcggcctccctcctactcaccatcttcgccgcggcggtcgcagggacgcgggggagggagccggcgggcagcgagtatgcagaccgtcctcctcacggctgcgggaccgagagacccagcgctgagctgacgcggcggcgcgagcttaccccggggcgggcgcgcctcaggacggaacgcggctgcgcacgtcacgcaccgcctgccgttgctacgcaaccagccggccaggcaacgcccccccggcggctatccagagtctcggaggggagcttccctcatctgctgaaggctgcggggcagggtccgcctcaccagaaagtgtttaggggtgggggtgcgtcctctctggtctgcaggaggctagaaggcggactgggctggctcctgctggcgaggggcgggcaaaagatgatgggggaggggtggccttccttcgcctcctcggcggggccacctgacgccccacccactgtgcaggcatggcccgcgcggggaggcagccacctggccaggtgtgcctgccgctggggcggggcgaggccgtggaggggaaaaggaggggagagccgggggagaggggtacagagtgtgggaaggagggggatttggaggggagaggcgaggggcacatagttgggggaggaggaggatggagaggggagggaagaggtgagggagaggggacagtgtggggagaggagggggatgtggggggaggggcgagggggcacttagtgggggaggtgggggcaaggggagaggtgagggagagggacacagtggtggaaggagagagatgttgggggttgggagggcagggcccgaggagggggaacgcactgggggaggacccacgggagcggagtcgcgggccgcggcagcggggacgcctcccgcattttttacctactttggtgcgattcccgccgccctcccctgattggcccagtctggcttgtcctgccctcgcgtgaggggaaaaaagtctgcacatttttcctccttcccgaggcgaccgtggccatgcagagtgctctgtgagtcaccgttaatttcaggtctggaaaaacaaggagcatttatttatctttgggaactgccggggaaggaggccggcggcgcgcaggggtgtggctgggaaaggccgcgctgtcccgggacggtggcgccagccccgccgctcagttctccgggtttttaatttggaattgtgtttttctaatgggcggttgcgtcggaaacacggttttcagagggcccagatgaatcccagcgtttttgctgcgggtgtttttgtgggaaataaagggaacaaagaattttataaattaatttaggttaccgagaacatcatggcctcgaccaaaactattttaattctccaaatatgagacttttggacaagatggtcagtatttttttttccggcactacgtaaaatctaggttgtatgtggcttttgttctgccccactcaacataggaacccatttctcattaccctcgttctttttaaaaaagacagtaagttgtgcagttctaagcctttaccacctgagacatgatttttggcgggctagagcagtggttctttagcatgcatcagaatcacctggaaaagttgttcaaagctagatttgtgtgccccatccccaaggttccctcactgcttctaagatgatgcttgagaatgggcatttctaacaactcctaggtgatgctgaagatgccagtccgagaccacactcctgaactgagaaggaacccccctgtatcctcctgcagctggaaccctttgcttttctgcctgcctaggaccctgtggcccttacacttcttaatattcagacttcctttctagtccaaaagtgaatggtgctcatttaaggatacatgcctgcctgcttgctccagcctctcctgcatttcgtcctccactctgccaccagagttaggtccaaacataagactggtcttgttacattcttgcttaaaatttgctgtggcttcctccataaccctcagcaggtcagtctggcccgtctgcctctggcctcagcctactttttctgccctatctcccatatcttcctaagtgcccactgcccctcccagacgaaacttctcattccagaacacctcttactagttctaactaccttgatcatgggcctgcttattttttcagcctgggatgttcctatcacccttcgcatctgaagacttctcttaccacttcccaaggatcaatagtagttccttcttttttttttttt

SEQ ID NO: 1561792 - DNA, 4001 bp, Homo sapiens
caacccagaattcccgaattatttacactttcccataattaacacccttatcttttttaatatgcaggtttggttgttttaactgaaagcatataacttaaatagtgaaccaaaataacccaaactcttattcagcacatctcacagaatacacattttcaatattccagattagcaggatggagagttcaggagagagatcaaaatttaaatctgtcagtgacgaccacacacagcagcagactgcaaggttcttctcaataatgcaaaacatctttcatctatgaattttcccagttttcatgaatttaaatatctacagaaatgttataaaagctttaaaattcctaaatcccagtgctactctattccctattattccaggaccatttccaaaaccaaagctaccagaacagcttagaaatcattaggcggggttgaaaaatagactcttagatttaaatatacggttttggtgggtttggttgtttctttagggttttttgttgtttttgttttgttttgttttttgttttggggttttgtttgtttgttgttttttgagacagagtctcgctctgtcgcccaggctggaggttactggcacaatctcggctcactgcaacctctgcctcccgggttcaagcgattctcctacctcagcctcccgagtagctgggattataggcaccaaccaccgctcccggctaatttttgtatttgtagtagagatagggtttctctatgttggccaggctggtctcgaactcctggcctcaggtgatctgcccgccttggcctcccaaagagctgggattacaggtgtgagccacagcccccggcctgttttgtttttaattcatacttttgtggacacaagaacgcatatttggtgcagactggctccaaggacaggatatctgaaattatttgaactgaaacaatatagttgtgccaataaagacagaaaagactaaagacaatataaagcttgtcatttaaatgttttttaaaaaatatctttcgtaccgtggttttcttaaaacgactactttatctacactaatcatctggacctctgatgcccaaccgagacgaaagtgctgagtgatgaccaggggtcgggtagcttggtccacaagaaaaagagaaatgttttcatcttgaattctttagatcccgacccctccgcgcagagttcagcgggcgagggcgaggggcgtcctgggcagggggcgcccctcatccagcctaggctccagtcacgtacgtgcacgcaactgtcaaagctcagcccaaggagcaactctccgcatctgtgcatttcatcctgagtcaagccccataaaaattggaatacgtaaaaatgggcaaaaattgaacatttaaaatacagcagtgaaaagggaggagtgcctgctccggaaatgctctaagcgtggttcatcaacactccctgaagagcggaccacggagatgctccgaggctccgccatcccgcacgcaggacaaaggtgctgagaatgaggcgcgctggtcctgcaccctctgccgagagccggaagccaggggcgcgccggggccggtcgggcacgtgcagggggctctccggccgccgcgctgccccgaagccggccctggggactcgcggctgcgcggaccgagctcgcgaaggggaccaggctcgcggaggggccgcagcggccccaaggatggcgcaggaagaccccccacgcaagacagccggtcgcgggggtcaggggcggctcctcccgggcccggccccgcccgactgacctgtgacgctggcccgggtgacgcgctgcaccacggccttcatggcggcggctggggcgagtggggcggcgccgcgctgcgtccggcctcgcgactctgagggcggctccgcagccggcgccctctggaggtgacacccggaagcgcgcccaactggccggtccgactcggtcggctgctacccaccccacgtcggccacgcccactctcggcctggcgataggcccacccactcatagattgactccgcctatgcctgccacgcccacctgctgcccaaccgtaaccccgcccgtcattgaaaagcccagtccccacgctcggccctgccccatccacatctgggtcccgccagagccctttgatccccccatcccgggcccagcccctacccagtgcccagaacccactctgccccgaaggtagtctctatgctggtttttttctcccacatacccgaacctaagaacccgtcatcactaagcctttaaattcagcctgaatcctatttctaattgtattcctctttcctcttccactcctctgcacgcagatcctcccaaattcttcttccttgtcttcctgcctcagtggcttttcagataccacatacaaaaggatctgctgcctaaaatagccatttacctatctcactattaattcgacttagccatgtcatgataataaataggtatgtgattctagaattctaatttctcatgtaatataaatgctactaattggccccctcactgggttgttagatttaaatgaaccaaaccacgtaaaagtgcttagatggcagcaaagggctgtacaactattaccccaacaaattattatcattgctaaaaataattccatctcagcagtcttcaccttaaaggtgactaatagcattggtgggcgtagaaaaggcactgaaattgagaagaaaccctcacttgcccagaaaagactacaaactagtgtgcttgtttgttaaatactgaatactaaattgccttaataacgttgtcaaagttaacataaccagtaacaagacatcatgtgcctcctgatattgcactgggaaggacacaacatcaatcttgtggtatttctgccaaataatgtataacctgaatccaatcatgatgaaacataggacaaaaataaattgaggaacattctacaaaataaccaggtaggattccgagaattaaggaggattttttttttttttttttttgagatgcagttttgctcttgtggcccaggctgaagtgcaatggtgtgatcttggctatccacaacttctgcctcctgggttcaagcaattcttctgcctcaacctcctgagtagctgggattacaagcatgcgccgccacgcccggctaattttgtatttttattaaagatgagatttctccatgttggtcaggctggtctcgaactcccgacctcaggtgatctgcccgctttggcctcccaaagtgctgggattacaggcatgagccactgcgcccagccgtggactttttaaaagacaggaaaactacctgtaatcccagcactttgggaggtcaaggtgggcggatcattggaggtcaggagttcgaggcctgcctggccaacatggtgaaaccccgtctctactaaaaatacaaaaattagccaggcatggcagcgcatgcctgtaatcccagctactcgggaggctgaggcaagaaaattgcttgaacccgggaggcggaggttacggtgagccgatatcgtgccactgcactccagcctgggtgacaaagcaagactctgtctcaaaaaaaaaaaaaaaaaaaaaaaagacaggaaaactaaattaacctgggtggtatcctggccagaaaaatcaagaaaaggaaaagcttattattggaacaactggtaaaatttgagtttttgaaaaatcagcaggtctcaatattttgatcacaggatccctttacattcttaaaaattattgggcacaaagtatagcttttgtttaggtggattatatctaaaaatgtttactgtttttaactaagagaaatagttaacatggatttatcaatgcatttaaaaatagcaataataaatcccctacatatgaatatcagagcaatgaagtcactatatgtcacggagcccctggaaaactccattgtgcactcctgaaagaataagactaaaaaagggaaaa

SEQ ID NO: 1561793 - DNA, 4001 bp, Homo sapiens
atactatgtccttatctacaaagatatatgaacaaggatgtacccaacagtggccctctctaggggctgcatacccagcatatgcagatcttttatattcagaatgaataacacatgtcccctctatctccacttcctcattcgatgagcatttaccgagtgctaaccatgtgtatactttggctgggcactggaggtctggggccagcttcgtggctcctgcccttatggggcctgcacacttacagagggttcagaccttacttggccaaatactcacagaaatcaaggtggcatgagcggctgagggagctcccaggaaggaagggaccaggatttacaagggtgaagcacctgagcccctccctctctaaagctttttctgactctgcagatggaaatgattttcccactttgagtcacccaagccctggatcagtctgccccttagcatgttttcttttcttttttctttctctttttttttttttttttttttgagacagagtctcgctctgttgcccagactggagtgcagtggcacgatctcggctgactgcaacccccgcctcccgggttcaagtgattctcctgcctcagcctcccaagtagctgggattacaggcgcctgccatcgtgcctggctgatttttgtatttttagtagagacggggtttcactatgttggccaggctggtctcgaactcctgacctcaggtggtctgcccgcctccgcctcccaaagtgctgggattaaaggcgtgagccactgcgcccagcccccttagcatggtttctacccagcatgttttctacccaaggtctatgttcagctctgcctgcctgccaccagcctggaagcccctgaagaacaaggtatctatacatgggtgtcccctcctcctgactgaagattgtggaaggaatggatgagagagtggggaatgcaaagcttgccggctcaccgcccccccaacttccagctctaggctgcccagctgctccagggctctggggtgcgacagtgttggtgctcatgaccctgctcacaagaaggcccagcccatctccagggacctctcctctgacaaggaggaagttatggggggaagagttcccagcttccccgctagaagcagcacccgcaaacagacctcaacccagaacctcagggccagaagagtgctcagcagctggtggaccttttgtgctgaggaggaggctgaggcttagcgcaggtgtagacttgctcaggtccacagcccaggccccgagccctttgctctggccctttggtctggtggtagaacactggggaaggctgaatggcggggagggatgtcagtgtcaggcccccatgctccctccatgtcccttcaagcctggggacactcgcctgcatgtgcaccccttgtcctccatcagccttttccccctcccagcctggggccgcttccctgcccccaaccccattcctgagatgcatgggccagggcatgaatggtggacacaggcctgagacaggcagagtgccatggcctcgggacagagtgggcagtgctcaccaatgaagtttccgaggtagagtccaggaagtacctagaggaaggacaggcaagggtcagtggggcaggggctgcacccccttccacccccagggcagctggggggcccacagcccctctctgtcccatgaagggtatggacctcagggctcagggagcactctcttcccttttgtgggccctgagtcctctgtgagaggggtctggggctctggggagggtaggctagggggccagttaaccaaccgagggaaccaagggaggccagcttgggtatgagaggggagaggaggaaggcaggtcttaggaggagaggagaggagagaggtagacttgcagggtgcagggatggaaattctggggctggggaggcagaaaggcaatgacaggcagaggcgggacaggatggagaaacagccccggagagagccgaggagtcagcgacaagggagagggacacatgcagacggagagcaggactcactgggagacagcctgggagtgacagccacagcaagacagcgagagacacacagagtcacggagagagggcggacacagcggggacagagacgcagggtcagagagggggagacccgacagccgcggtctcgagtcacagggacacggagatgccgccgcacggagaccggcgagaacagaaggtcagaggcgggcggaccgagctggtcagcgccgggccgcggcggccggggcggggaccggggaggctgcgcggggcccgccccctaccttggtcatgccattgcccatgatcccgggggcggcggtccgggtgcacccccagctcgccgcccgggaagcgatccggtcacagctgccctgacggcccaggcccgacgcctgcagcctggcggggaacggggggcctggcgtccgcggccctgcccagccctgcccagccaccgccaccgcccgccgacccccggcccgggagggaaatggtggtggagccgccgctgccaccgccgccgccgcaggctcctcctaccccttcggtcatgtggggcccccgcctcgggtcgcggcggggggccggacaaagccccagtgtgccgggcccacggcccgcgggacaacggcagtttgttggggccgcgtggggccgccacctccggaggtgggggcgggggccttaccccaccctggcaccggcaggcgcgggcggatggggggatgtcgcctagagccccccggccggcccacaaactcccgtcccccttccggctctgcctggacgtccctgcgggccccgggggaaagcacccaacttctcccgcctcggcttctagcagaaacgtgacggggctggactttgatcgccgagggctctctgctcttcagagtctgcttggaacgggataagtgggtaattccttccgatacatcctctccacccgtgcagagacaccctaccaaccagccttcctcctttcccatccattctcccaccctcctgttcactcattcactcgtccatcttcccatccattcatccatcctctcactccttccttccatccatttcggcccctaggagggatggtgccatccagggaagctctgctgggaccaggcacaactgccattaggtgccccaagaaattacaggtgaatgttgggagaggggtttgagggagggttccagtctgaaggagactacatcaggatgtattaatagctagaggtcagggtcctggaaggggtctggagaccaaggtttgaggccctgttcacctctgacctgctagatgaccctgggaaagtccccgtgacccccagctaaccctatctgtgtttctgaggatgttgaggtgagcccttcctggcttctaggaccaaagctggagaatgtaaaataatcaagacacttcctataggactgaaatagaagcagctgcaccagctttgttccttcagccatcacccccacccctcaatctatagtagtaggtgactggggattgtggatagagagcaggacagagagaatccacagagccctttgaaatacagtgattggagaaaaataaaactgtttcttcctccctcaagttcatagcatacatggggctgcccgtctcagctctcataaaagcccagagttctcataaataccaaattattcagtaaatacttactgagcatctagtatatgatagagactagggacacagcagtgggtagagattgttcctaccttcattagctaatggtatagaccagcattgtccaaatgaaatataatgccagccacatgtgcagccacatttaaaaagtagaaacaagttaattgttgataatatttttatttaactcaatatatccaaaatatcatttcaacatatagtcagtattttaaaactataaatgagatattttatatcctttttaaattgtattaactattcaaaa

SEQ ID NO: 1561794 - DNA, 4001 bp, Homo sapiens
actatgttggccaggctggtctcgaactcctgacctcaggtggtctgcccgcctccgcctcccaaagtgctgggattaaaggcgtgagccactgcgcccagcccccttagcatggtttctacccagcatgttttctacccaaggtctatgttcagctctgcctgcctgccaccagcctggaagcccctgaagaacaaggtatctatacatgggtgtcccctcctcctgactgaagattgtggaaggaatggatgagagagtggggaatgcaaagcttgccggctcaccgcccccccaacttccagctctaggctgcccagctgctccagggctctggggtgcgacagtgttggtgctcatgaccctgctcacaagaaggcccagcccatctccagggacctctcctctgacaaggaggaagttatggggggaagagttcccagcttccccgctagaagcagcacccgcaaacagacctcaacccagaacctcagggccagaagagtgctcagcagctggtggaccttttgtgctgaggaggaggctgaggcttagcgcaggtgtagacttgctcaggtccacagcccaggccccgagccctttgctctggccctttggtctggtggtagaacactggggaaggctgaatggcggggagggatgtcagtgtcaggcccccatgctccctccatgtcccttcaagcctggggacactcgcctgcatgtgcaccccttgtcctccatcagccttttccccctcccagcctggggccgcttccctgcccccaaccccattcctgagatgcatgggccagggcatgaatggtggacacaggcctgagacaggcagagtgccatggcctcgggacagagtgggcagtgctcaccaatgaagtttccgaggtagagtccaggaagtacctagaggaaggacaggcaagggtcagtggggcaggggctgcacccccttccacccccagggcagctggggggcccacagcccctctctgtcccatgaagggtatggacctcagggctcagggagcactctcttcccttttgtgggccctgagtcctctgtgagaggggtctggggctctggggagggtaggctagggggccagttaaccaaccgagggaaccaagggaggccagcttgggtatgagaggggagaggaggaaggcaggtcttaggaggagaggagaggagagaggtagacttgcagggtgcagggatggaaattctggggctggggaggcagaaaggcaatgacaggcagaggcgggacaggatggagaaacagccccggagagagccgaggagtcagcgacaagggagagggacacatgcagacggagagcaggactcactgggagacagcctgggagtgacagccacagcaagacagcgagagacacacagagtcacggagagagggcggacacagcggggacagagacgcagggtcagagagggggagacccgacagccgcggtctcgagtcacagggacacggagatgccgccgcacggagaccggcgagaacagaaggtcagaggcgggcggaccgagctggtcagcgccgggccgcggcggccggggcggggaccggggaggctgcgcggggcccgccccctaccttggtcatgccattgcccatgatcccgggggcggcggtccgggtgcacccccagctcgccgcccgggaagcgatccggtcacagctgccctgacggcccaggcccgacgcctgcagcctggcggggaacggggggcctggcgtccgcggccctgcccagccctgcccagccaccgccaccgcccgccgacccccggcccgggagggaaatggtggtggagccgccgctgccaccgccgccgccgcaggctcctcctaccccttcggtcatgtggggcccccgcctcgggtcgcggcggggggccggacaaagccccagtgtgccgggcccacggcccgcgggacaacggcagtttgttggggccgcgtggggccgccacctccggaggtgggggcgggggccttaccccaccctggcaccggcaggcgcgggcggatggggggatgtcgcctagagccccccggccggcccacaaactcccgtcccccttccggctctgcctggacgtccctgcgggccccgggggaaagcacccaacttctcccgcctcggcttctagcagaaacgtgacggggctggactttgatcgccgagggctctctgctcttcagagtctgcttggaacgggataagtgggtaattccttccgatacatcctctccacccgtgcagagacaccctaccaaccagccttcctcctttcccatccattctcccaccctcctgttcactcattcactcgtccatcttcccatccattcatccatcctctcactccttccttccatccatttcggcccctaggagggatggtgccatccagggaagctctgctgggaccaggcacaactgccattaggtgccccaagaaattacaggtgaatgttgggagaggggtttgagggagggttccagtctgaaggagactacatcaggatgtattaatagctagaggtcagggtcctggaaggggtctggagaccaaggtttgaggccctgttcacctctgacctgctagatgaccctgggaaagtccccgtgacccccagctaaccctatctgtgtttctgaggatgttgaggtgagcccttcctggcttctaggaccaaagctggagaatgtaaaataatcaagacacttcctataggactgaaatagaagcagctgcaccagctttgttccttcagccatcacccccacccctcaatctatagtagtaggtgactggggattgtggatagagagcaggacagagagaatccacagagccctttgaaatacagtgattggagaaaaataaaactgtttcttcctccctcaagttcatagcatacatggggctgcccgtctcagctctcataaaagcccagagttctcataaataccaaattattcagtaaatacttactgagcatctagtatatgatagagactagggacacagcagtgggtagagattgttcctaccttcattagctaatggtatagaccagcattgtccaaatgaaatataatgccagccacatgtgcagccacatttaaaaagtagaaacaagttaattgttgataatatttttatttaactcaatatatccaaaatatcatttcaacatatagtcagtattttaaaactataaatgagatattttatatcctttttaaattgtattaactattcaaaatctggtgtcttttacatttacagcacatctcaattcagacaagtcacattccaaatgcttactagccatatgcagctagtagctacatattagacatctcagatctaggagggaaggcaaacaagataggcaaacaaataaattatttacaaatggtcccagttttctatgaaggaaacaaagcagacagggagaacctctctgaataagtggcatttgagctgagaggtgatatataagaaggacccagctgtttaaagagtggaaagccaggcgcagtggctcatgcctgtaatcccaacacatggggatgctgaggtgggaggatcaattgagcccaggagtttgagaccagcttaagcaatatactaaaaccccatctctaaaataaatttggctgggtatgatggctcaggtctgtaatcccagaactttgggaggccaaggcaggaggactgtgtgagcccaggagtttgagaccagcctgggaaacatagggagaccctgcttttacaaaaaaaaaaaaaaaattagccgggacctgtagtccaagctactcaggaagctgaagtgggaggaccacttgagcccaggcggaggaggatcacttgagcccaggcggtggaggctgcagtgagccatgagcgcaccactgcactcaagcctgggtgacagagc

SEQ ID NO: 1561795 - DNA, 4001 bp, Homo sapiens
tcgtggctcctgcccttatggggcctgcacacttacagagggttcagaccttacttggccaaatactcacagaaatcaaggtggcatgagcggctgagggagctcccaggaaggaagggaccaggatttacaagggtgaagcacctgagcccctccctctctaaagctttttctgactctgcagatggaaatgattttcccactttgagtcacccaagccctggatcagtctgccccttagcatgttttcttttcttttttctttctctttttttttttttttttttttgagacagagtctcgctctgttgcccagactggagtgcagtggcacgatctcggctgactgcaacccccgcctcccgggttcaagtgattctcctgcctcagcctcccaagtagctgggattacaggcgcctgccatcgtgcctggctgatttttgtatttttagtagagacggggtttcactatgttggccaggctggtctcgaactcctgacctcaggtggtctgcccgcctccgcctcccaaagtgctgggattaaaggcgtgagccactgcgcccagcccccttagcatggtttctacccagcatgttttctacccaaggtctatgttcagctctgcctgcctgccaccagcctggaagcccctgaagaacaaggtatctatacatgggtgtcccctcctcctgactgaagattgtggaaggaatggatgagagagtggggaatgcaaagcttgccggctcaccgcccccccaacttccagctctaggctgcccagctgctccagggctctggggtgcgacagtgttggtgctcatgaccctgctcacaagaaggcccagcccatctccagggacctctcctctgacaaggaggaagttatggggggaagagttcccagcttccccgctagaagcagcacccgcaaacagacctcaacccagaacctcagggccagaagagtgctcagcagctggtggaccttttgtgctgaggaggaggctgaggcttagcgcaggtgtagacttgctcaggtccacagcccaggccccgagccctttgctctggccctttggtctggtggtagaacactggggaaggctgaatggcggggagggatgtcagtgtcaggcccccatgctccctccatgtcccttcaagcctggggacactcgcctgcatgtgcaccccttgtcctccatcagccttttccccctcccagcctggggccgcttccctgcccccaaccccattcctgagatgcatgggccagggcatgaatggtggacacaggcctgagacaggcagagtgccatggcctcgggacagagtgggcagtgctcaccaatgaagtttccgaggtagagtccaggaagtacctagaggaaggacaggcaagggtcagtggggcaggggctgcacccccttccacccccagggcagctggggggcccacagcccctctctgtcccatgaagggtatggacctcagggctcagggagcactctcttcccttttgtgggccctgagtcctctgtgagaggggtctggggctctggggagggtaggctagggggccagttaaccaaccgagggaaccaagggaggccagcttgggtatgagaggggagaggaggaaggcaggtcttaggaggagaggagaggagagaggtagacttgcagggtgcagggatggaaattctggggctggggaggcagaaaggcaatgacaggcagaggcgggacaggatggagaaacagccccggagagagccgaggagtcagcgacaagggagagggacacatgcagacggagagcaggactcactgggagacagcctgggagtgacagccacagcaagacagcgagagacacacagagtcacggagagagggcggacacagcggggacagagacgcagggtcagagagggggagacccgacagccgcggtctcgagtcacagggacacggagatgccgccgcacggagaccggcgagaacagaaggtcagaggcgggcggaccgagctggtcagcgccgggccgcggcggccggggcggggaccggggaggctgcgcggggcccgccccctaccttggtcatgccattgcccatgatcccgggggcggcggtccgggtgcacccccagctcgccgcccgggaagcgatccggtcacagctgccctgacggcccaggcccgacgcctgcagcctggcggggaacggggggcctggcgtccgcggccctgcccagccctgcccagccaccgccaccgcccgccgacccccggcccgggagggaaatggtggtggagccgccgctgccaccgccgccgccgcaggctcctcctaccccttcggtcatgtggggcccccgcctcgggtcgcggcggggggccggacaaagccccagtgtgccgggcccacggcccgcgggacaacggcagtttgttggggccgcgtggggccgccacctccggaggtgggggcgggggccttaccccaccctggcaccggcaggcgcgggcggatggggggatgtcgcctagagccccccggccggcccacaaactcccgtcccccttccggctctgcctggacgtccctgcgggccccgggggaaagcacccaacttctcccgcctcggcttctagcagaaacgtgacggggctggactttgatcgccgagggctctctgctcttcagagtctgcttggaacgggataagtgggtaattccttccgatacatcctctccacccgtgcagagacaccctaccaaccagccttcctcctttcccatccattctcccaccctcctgttcactcattcactcgtccatcttcccatccattcatccatcctctcactccttccttccatccatttcggcccctaggagggatggtgccatccagggaagctctgctgggaccaggcacaactgccattaggtgccccaagaaattacaggtgaatgttgggagaggggtttgagggagggttccagtctgaaggagactacatcaggatgtattaatagctagaggtcagggtcctggaaggggtctggagaccaaggtttgaggccctgttcacctctgacctgctagatgaccctgggaaagtccccgtgacccccagctaaccctatctgtgtttctgaggatgttgaggtgagcccttcctggcttctaggaccaaagctggagaatgtaaaataatcaagacacttcctataggactgaaatagaagcagctgcaccagctttgttccttcagccatcacccccacccctcaatctatagtagtaggtgactggggattgtggatagagagcaggacagagagaatccacagagccctttgaaatacagtgattggagaaaaataaaactgtttcttcctccctcaagttcatagcatacatggggctgcccgtctcagctctcataaaagcccagagttctcataaataccaaattattcagtaaatacttactgagcatctagtatatgatagagactagggacacagcagtgggtagagattgttcctaccttcattagctaatggtatagaccagcattgtccaaatgaaatataatgccagccacatgtgcagccacatttaaaaagtagaaacaagttaattgttgataatatttttatttaactcaatatatccaaaatatcatttcaacatatagtcagtattttaaaactataaatgagatattttatatcctttttaaattgtattaactattcaaaatctggtgtcttttacatttacagcacatctcaattcagacaagtcacattccaaatgcttactagccatatgcagctagtagctacatattagacatctcagatctaggagggaaggcaaacaagataggcaaacaaataaattatttacaaatggtcccagttttctatgaaggaaacaaagcagacagggagaacctctctgaataag

SEQ ID NO: 1561796 - DNA, 4001 bp, Homo sapiens
ctgtaaacaatcctaaaattcgtatggaaccacaaaagactcagaaaagccaaaagaagcctggacgaaaagaacaaagcttgaggtatcacactacctgatttcaaaatataccagaaaggtatagtaaccaaaagagcatggtattggtataaaacacagaccaatggaatagaatagaggacccagaaataaatccacttatttacggccaactgattttcgacaaaggcatcgaaaaaacaaaacaaaacaaaaacaacaacaaaaacgaaaaaaaaaacctaccataaatcagcaataccactactgggtatttattcaaaggaacggaaattagtacatcaaaggcatccctacatcctcatgttcatattgcagcactattcataatagctaaattatggaattagcgtccatcaataggtaaatggataaagaaaatgtgggccaggcgtggtggctcacgcctgtaatcccagcactttgggaggctgaggcgagcagatcacgaggtcaggagatcgagaccaccgtgttgaggcggactaacacggtgaaaccccgtctctactaaaaatacaaaaaattagctgggcgtggtggtgggcgcctgtagtcccagctactcgggaggctgaggcgggagaatcacttgaacctgggaggcggaggtggcagtgaactaagatggtgccactgcactccagcctgagcgacagagacacactccatctcaaaaaaaaaaaaaaaaaaagaaataatgaatgtttaaggtgatggatattctataataaatatagcctgatttgatcattacacatcatatgcatgtatcaaaatattacatgtatatctacaacataaatgtgtacaactattatatatcaattttttttacagcttaagaagtgatgtgaaaaatgaagttatacatatttgaagcattattacatgtttgtaatgatgtggagatattgtggtgtaataatgaaaaacacagaacccacaattgcacattcaataggggctaaactgtataaaccaaaaacaagcaaaaaagactagaagtcatatgactactgtaagtggttgcctctaggtgatgacacggtttcttttttcaatttttttattacaagctctagatttctaaataagatttttgaaaaagtaatatattcacatggcttaaaatttgaaactttttcaaattttgcccaagctgtgaggattacaaacacaaaacctgtaacggcgttgagaacccacagctgcagcaagcaaggtagaaagcaagctttgggatccccaagagcagaccccgcccgttcctgactctggcacccagtcccagcggctagaaagaaccacgccgacagagtggcggccgtcaagcttctagggttcaaatccatctccactatttcctggggcaaagcacttggcttctcggggcgctgaataacagatatgtataacaaaatgggactaaagattgtatctacctcacagagctgggaggaggcggaggaaatacaagatacataaagtgcttggcagagcctgccacaaactgagctcccgggaaacgttgccagggttgccatcgcgcaccaaggccccaaaactctaggctgcagggccgccgcccacccctcgcccatcatctcttcctggccgaggctgggctcccgcttccggtcaaggggcagcgggatccggcggccccgcctcggtcaggctttagaggcctccgccgccgggttccaccctcaagtcggctggggcccgggcccggccacgcccagccaccaccgattccctgtccggagctctgagatcccctcatcctcggaagactgaaggcctggcgtggggtggtgggcggccgccagccacaagaccccggcgcacgctcaccatttccgaccgatccggtagccccgcgtagcgaacacttagcgagtcctgtgcctttctgcgcctgcgcaaaggtttctgtcaaaacggacagctctagctgcctatcaggagccagcgtgaggcgggggcgggcgagccgatcttggctccgccaggattcttggaaaatctgctttccactgtggcaaagcgaaaagctaaggagcagtgcgctaagctgtggaaaattcccaactccagccgtgcagaaaagatgctggttctggctggacgcggtggcttacgcctgtaattccagcactttgggaggccgagtcggaaggattgcttgagcccaagagttcgagaccagcctgggcaacatggagagaccccttctctactaaaaaataaacaaaattagccgggcgtggtggcgcgctcgtgtagttccagttactccagaggctgaggtaggaggatcgcctgaccaggagttcgaggctgcagtgagccgagattgcgccactgcaccccagcctgggcgacagagcaagagaccctgactaaaacaaaacaaaacaaaaaccatgctggttctcggtatcggaagaggctttcagtgctggttctcggtatcggaagaggctttcagctctcaatggaggtctaagctggttctggagtccctgagtggagcgtggtgggagggtatgaaggcaagtgggacggttgctgagacccgctttgcgcccagactgagccagagagaggcccagggccaaaatgcgcttcgggatcgggcaggcctggggtggggctggagtcaggtacctcgagtctccgggtaagatgccgtgcaagctcggagatgaattggttagggctggcctgggagtctttagaatccgagctcagccccgcctcgcgttacctagcagaaggcacttcacatctgtgtgttctgtcttgttctcacctctgaaagggggactcttcccagagccctatgttgtcctgttccggcaggccgcaaacgtttctgggtcctctaggagtaaataacttctgttaaaacatgctgccgtttagtgaaccctgtgccacattactgtgctgaacacgcacataacgttatctccggtagcttcagggaagtatcggtaacctcgatactttataaatgctgtttctcccaggcactgtagcttgctggattcaacgatgatctaactccaaagtttcattccacagtagctgctcttcagtgaggaaggatttggttctccttccaggagtgtctgcatgttaagaggattgactttactgcgaagaaacctagcagacaccaccgtaaccagatcaaagttagtattactggcaaggggagatattgatgccgtgtgccccgataaaaatgcgttaagggcacatcacctccgagtcattttccacaaaaactcccagccttaaaccatgagaaaatttcactaaatccagtgtgagggatgttctacaagatacctgtaccccgcccccgccccccaaaatctcaaagtcatgaaagcaaggaatgaatgcggaactgtcacagattagaggagtaaggagaaagaaaaataacatgggtgggaaaattggtgaaatctgagtaagggctgtagtttagtgttatttttaccagtgttaatttattagttttggtaattctagcatggttatatgggatcataacattggagaaagctgggtgaagactgtgcaggaactcttaaccatttttgcaacagctctgtaaatgtaaaattatttcaaaataaatttttaaaaggactggatccaaaggaatttctattgaatgctggaaacattaggaaagcatttagcaaggggaagaagtgctgcagagactggaccctaaaacatcctggaagataagcactggaagaatcaccactgtcttgcccatggagaaccagactgagaggagtgaaaggattttaacagattacaatcccagaagcaaaaaagagaatggccaatagttcatgtgacaggagccaaaatgagaatgaaggaggagctggaataggacc

SEQ ID NO: 1561797 - DNA, 4001 bp, Homo sapiens
accagataacacaagaaatatgacaatgttattttaaacaatttcaaacatatgtgattcttacctgatttcatttccaaaagcgtattgttatcaatttcatggttagcttttccaggctgaggcactcgtaatggtatgatctgagggacacacactgaaccagcagtcattttctctctctctctctctctctatatatatatacatataaattccaatgtacacaaaagctgaagagcagcacttaatttaaatgcagcaaaactagttaaaacgagagaatactgttaacatggcactacaaatattattccctttttaattgaaataataattacatttcatctgtatttgctgttgaggtcttgtgtggggttttgattatctaaatacctcacttctgcgaaaggagcatgaatgaatgagatggggaaaagaaagaagttactttaaaaggacaaattaaatgagtaaggcaaaacagagactatcactaacgctctgacttgagttccctgtaaatcattatcgccttttcctgcctctggtgtgtgtcagctctcttggcttcagggcaagtcatcatacaaggggaacagaagtaattctgtgtgtaccacaaaatgttagttagagctaacttttttgggaaagctccgggttcacagccttgccattatcaccagagcagttctagtatttgaaagctgcaaagacactttagaaggactgcagagtactacttctcagtggaaaggaagtttgcaagaatataaacagtgaccaataaacacaagcctcccgtttcatctactgtatttataaatcctggtattaataattaactaccagtatgaaagccttactggtctttttggaggtgagggtggggaggaaggttgtcataattaatgcacagaaggtttcagggggaaaaaacgctcaccttaacacaacaaccatttacatctctgtattgccttttcaaatttcattaataatccatagattttgcccaattataatctacatattcattccatttttatagtctacttcttgcattctcactgtattatttagttttccctgtacttatttatccatttgtggctgggcatttaggctatttctagtttctttttagttttgcctgttgcagttctaataatgctgatctgaacatgtctgcagtttgagctttgtcacagactgtattctcaaaaatggggtacctaaatttaaggggtgaacttaatgccttgttggatagttccggatctagggccaagaatataaactacagatactgacagcacaacaatagctcctacgggagtgtggctggacttgagacttgcccatagtcgcatttccatttaagtgaaaggcagataaaataaaagtagttgaaaaattctaaataaaaaatatgtaggagaggaagtaattcgcgagcgtcaactagcagctgcccttaggaagctggggtggccagtgggccccacgcaaagggaatcaagaaaaaaggcggatccgccaggcccaaatggcaacgtgcagtcaacaggatccccagacccctcaactctcccaacgtggaccgccccctcgcagcccggatccggaatcccgtttggttgttcccgcccatcaggggctgccaaggacacctgcatcctttcggctggagtaagggaagctcttcccctcctctagccgccctcctcttcctctaaccgcggggcccgggatcgggacccctaatgcatctctgccgcgcccaacccagtcgccagcctctcaccgcctcttgcctcctccttcgccgccgcccgggttaccacagacgcggcgagccgcgccccgcccactgggtgctgggcagatgattggtggagactcagcttcttagcaactagaccggcccctgccgctccgcagggagcctggtacccgcctggagttcctttcccagtgctttcccataggcatctaagaatattccttcacagagttgccaagtgctaaaagttggtttcccaactcagaatgaaggaaccaggcttgtgcgtccgatgggcattgacattctggaaaacaagaataagaagctgtagcggcgcctgtaagtgggccggagcaggcgcagcttggccacctcccgccgaaaggcaaggaaggaccggctgcgacacgaggaagaaggcccctcggcctcagcagagcgctatcctccactggttccccgggttccccggcttgctaccgggctgctccgtgcatctttccccccaggcgtcaggaactgcgccctcatggcggaggtgaaggtgaaggtgcagccgcctgacgcggatccggtcgaaatagaaaacaggtaaaccagtgaggctccggcttggcactccatcaggcgcccagtcatttgggcagctggaccccttctccgggatcccttgggagtggccggagcgggttaggtgagcacgcgggaaaaacgattgcggggttctggacccacttgttccttcccatcctgggagagcagaactcaagaagttcaaaatgggtttgacagcttgcaactttgtgtagctggctggctttgccctgatacttttggggaagttgtgatgacgtgctgccttcctactttgacgcgatcagtgctttgagaggagccctcggctttctttccctgtagaacacttgtgaatacatgttctgatccaggatcgctcttgtcactaagggaacgtctatgacaaaacgtttaggcggagttagggcgcagttggtgattacgaagtaacattaagccaggtggtttcagtgcagtattgaactcaagacttttaggacacccaaagcctctgccacttttatttttatttgtttgtttgtgagacagagtctcgctctgtcgccaggctggagtgcagtggcgcgatctcggttcactgcaatctccgcctcccgggttcaagcgattcccctgccttagcctcccgagtagctgggactacaggctcgcgccaccacgcccagctaattttttatgttttagtagagacggggtttcaccatgttgtctgggatggtctcgatctcctgacctcgtgatccgcccgcctcggcctcccaaagtgctgggattacaggcgtgagccaccgcgcccggcccagttttatattttaccgaggcactgccactcttagattttcacgtagttttaaaagactcaactttctcagactgttaggaataatacatttgttgatgtcgactaggtgaagattttgactttttttgtttggtaggtataattccaaaaacaggccccattatggtgaattgtcataacaaattttggcttcctaccagaaacatctgcatttgcctcctgcttgcagatttatggcttaactttgtcatgcttattacacccgagaaaactgaagtctcagctttaatattttttctgtgatttcattagacttttgctctaatttaaagttcttattagtgaggaaaagaaatattcttaaataacaataatactgtaaacatgtatttagaaatcatcttcttcaatttctaacatgctttgatccaaaaccatcacagaaacccagattgtctgccaaatgtgaaaaaggcacagtttcaaactattctacttgtatttttacccccactgtctcttgaaacaggtaaccatgaaggataacattaatacctttgtttctaggattatagaattatgtcaccagttccctcatggaatcacagaccaagtaattcagaatgaaatgcctcatatagaagcccagcagcgggcagtagccatcaataggttgttgtctatggtaaggtgaatctaactattttgcataattactgatatgctgattatcactggtttttattatgtagttgtgatggttaatttcatgtcaacttgactaagatacaggattcctacatatctagt

SEQ ID NO: 1561798 - DNA, 4001 bp, Homo sapiens
cctcccacccactcattaagagggagggcccctaaaagcccttcttgccctttcttcaacctgtatcagcatccccagaaagcaaggcatcccagaggtcaacctcagaggaaacgcagactgctctccccactcaagagcagaatgacatgggaagattctaacatctctaggcctcagcttcccaatctgtaaaaagggactgctgctgatggggttaaatgagttaattaagtaaagcgcttggcacagagcctggcacacaagacatcctcaaaacaatggtggctgctattgttattattattagcattgtggtgattccggaaggcagcactgggcatggggccaagggggttgggggagcctcctcaggatgcctcagggaccagctgccacccacacccccatcagcagttaggcagcttctacctccttgtcctgagtcctgcctcacccctcccacttgctccaagttccctgctgagaccccatcctgcctggccagaccccgcctgcacaccagagccccaccttcacccataggctgcgccagtcaaactggtctccacaccctgccctgtgccccacagttcccagctccaggcttctacgcctccaatcccttctcccactggaattcagccgcctcttctgggccctccagtctgaattcgtcttgagctcagcgatcagggagggctttattaaaggatctccctgagacattttctctcctggcactgggggcctcctctccagctcccagaggcccagcccacctagtccttctacagagactcaggggtcggcctgcctgattaatgaggttccatggcaaccagggcctgggagggtggagggtggcagatggaaggacaggcagagggaggggatcagcagctggtccagctgccccgcccctgcagagaaggcctcccagccaggagggctgtccccagaggcctggccggccaggcctgcacctggcagtcagcatcgaggcaggaaggagggtctcctcaatggctcaccaacggttaggccccaggactttcctccgccccgccttcacttcccctagcagctgtgctcactaccgagatgcaaattctgagctgaagccagcaggcctcagttcaaatcccagccccaccacctgcagccgtgtgaccaggggcaagtcactttccctctctgggcctcagttcctcctccgtcagatgggcacagtgacaacacagctcacagcggggttgtgagttttagctggcttgaagtcgcccaaaggcctggcatgcagtaaacgccagttgaatacacgtgggctattattatcactgagtccgacgctggggaggctccggtgaggaagctgaggcgcagagcacagagcagcaaacagggaccggcccgaggtcaccccgcaccccagggcggggcccggaggcccaaccccggctctgcaccgcccagcctgggcgcctcagtcaacccctcccccgccccctgccgcctccaggccaaacacggcgccctcccgggtctgcgcggggggcacaggcggcgctgtcggcgcggcgtccctggggtccgtaccggcgggcggccgagcgcgggccgcggcgcactgggtgtgggccggggcgcctgcggtgtggcgaagagcagcaggtcagggtcgcaggggccggcggcgggcgccgcggggccggtgggagccggcggggcgctggcgtcctgcgcggcggagatgatgacgatctgcgaggagtcgagcagccgcagcgcgccggccccgagcagggcctccagcgccggcgcgcatgggccgcccgcaggggccccggccaaggccatgacgctcacggcccgcgcggcccgggtgacaggcggcggcggcggcgcgggcccatggcggcaggcctcggcgagggctcgatcccgctccgcccccggccgccgctgcctgcaaagtcccggccacttttacgcgccaaatcctttttgccgcgaaagagccacgagccgccgagcgccgccacaattggctgccccggccgtgacgggaacaacggcggcggttcctattggctttaacgcgccggacccggcggcgaggggcgggatggggcggcggcgcggggcggtacggccaatggcggggcggggcgcgcgcaggctttgtccggatggtaccaggcgcggtgtgactccccgcccccagcccgggcgtcccctgctggaggcgtggggacaccggaacataggccccgccccgccccgacgctcccgcatcccactgacctttctatagtgcaggttcagaacagagcctctcttctgcacgtgaccctcaacctgtagcccccaacagcctcagcttagatttccagagactgtcccctcttcttttcaggatcatcagttccacagcccagccatcagccacctcttccatcctcaacttgcctcacccatgacattatcctaatcctgcacccagccctatcccgctcacccagagcccaagctgaagagcggtgcctggaaatggcgagggggacgtcgggctttcctgcaagtcccattttagccaaaatctccaacagccaacgtatagcatctgcttgaactcattcattccctcactcattcaacaaacgtttggagagcttgctctgtgccccatcctcaattcgtggccctaaggagctcacagtccagtagacaggggaacagaaaggtaacagacgtttacaatacgatgaagtggcgtctgggcgcggtggctcaccaccggaatccctgtaatcagctggcggggtggatcgcatgagcccaggagttcgagaccagcctgatcaacatggtgaagacccatctctacaaaaaatacaaaaattagccaggcatggtggcgtgtgcccgtagtcccagctacttgggaggctgaggtgggaggattgcttgagcccgagaagtcgaggctgcagtgagctatgatcatgccactgcacaccagcctgggcgacagagcgagatcctgtctctaaaacaaaaaaagaaaacacatcacttctagggagccctcccaaggatttactcacttcctctattgcccactgctgcctctgctccaatgctgaccacacacactccttttctccatctgcctcccctgccaatctaggagctcagtagcgactcctcccaacactggtctggcccagagcaggcgctgagaaaggttatgaaagaaacagaggctaagccagaggctgcctagactgtgacaaggagaccacggttctgcaagggtggtccttaggccactggcttcagaaccacgtggtcacttgctaattttgggcccaccctggccctgccaatttaaaatctctaggtgcccaagaatctgcattttaacaatgccatgtcccctttccaggtgatatttgttattctttttctttttttttttttgacacttagggaattagaaaagccagtatcttattttttttttcctatttattttatatagacgaggtctcactatgttgcccagggtagtctcaaacccctgggctcaagagatcctcccgcctcagcctccagcatagctggtactccaggtgactgccacctcaccaagcttccaggttatttttatgcatactcacatttgaaagcaaactggtgtaccagcataatcaaaatgagtggtgcagcctcaaatcacagctcctgaggatgcttctcacccttagtttcaaatgggcacacagaccttgccctggccccttccagggttgccaggagaatgaaaagcataaggaattggaaagtgttttacaaactatgaggtggtttaggaaatcaggagttgttttcccctccaatgagtagtttctgaaattactcattgcaaatcctagaatgtatcatagctagaagggaccacagagaccacataagcctcttgctgtatggatagg

SEQ ID NO: 1561799 - DNA, 4001 bp, Homo sapiens
ccccccagcgttccctcccgacagccaggaaaggaccggcgtgcagaaacggcttcagtttgcacatgaagcgcggtgtgtgtctgttacacggtgaggttgaggcgtcctgcggagtgtgaatgtgggctcctgtgtcaggcccggtctgcattaagccccccattcagaatcccttcgggctgctgcaacagctcagacttctgggaagccaagtgcccaccctgtcccagctgtcagcagagctggcacctccctaatcctaaccactgtgactccccataggatacctaaatgcctccctccatggtcacagctgaaggtgcaaaaagccagggggtgcaggggctttgggggcaggtcaataaacttttaaagttcgctttcaaatcctggagtcaaccccctactgagactcccagacccctgcaaaggagtcagaggagaccggcgcgggtgctgggttcccagggactctctgccttccaaaggacctaccagaaaaacacccgagggaaaggcaggggccctgcccagttcccaggccaatcagtccagccaggccgactgcccacctcatctcttcgccaccgtccagcccccagccgcttctctggctctgcacacccccatccgccaactctgaggggcgtgggaaaggaaaaagggggctgggtttcgtgcctttcctgacagagagctgcggaattggacaaggagagtcactgggactgcccaggaaggaggggctggacgttcctagacggccggtggctgtgggtcatggctgggagctctgcctcttctctcagagccatagacagcccggctggggtggcgttcaccgccgcacccgcgagcggccgtcagaaatctaccggggcagcccggagtggaggcagaagccccgccccagcccgccccacagcctcaggaggcagcacaggcactccggacggggtgggccggggagctcgccgggaccgtccagagttagggctccttccgcccctggctccagcagctccagcaagctgagctgaggcggcgcgcagccgtccaacccgagcgcaccgggtccggtccgagcgcttacctctgcgccgcggtgctggcgtccaggatgcccgcgccctgcatccaggagcgcactgagcccaggccggcgggcagcagcggctcctccttcaggttcagcccgctgcggggcagagcgtcctgcgcagggaacatgagggcgcgcggtgagtgagcgcccccgccgccccggatccggtcccgctgaggctgcgggcgtctagctcagcccgacccgacggcaccaggcgcctccagcagcgcagcgccgagtccgggtggctcagtgcgcgctcgcctcttgggcgctccctcggagaaagcgggtccgcgggcgccggcgctgtcccctcccctcctggggcgctgggcggggagatggagggattcccccgcggcctgagcgctggcgggcggactgcgagcggggcggggagggcggggagcggagcccgcacccggtccgcgcggaggcgccccagaggcgcgctctggcggctgcccggggccgcggtcgtcggagggggggcccgagcgccccgggagctgcctcgggcaaggcgggggcgcggggccgcccgccctttccccctcgccgcccccacctcccgcccgcccgcccgcccgcggcgccagcgcggggcgctgattaccatccgggaggcggaggctgcgggcgcggagctcggcggcggcggcgacagtggcggcagcggcggcaggagcagcagcagccgcgcgtcccggggaaaggctggggccgcgccgggccagcagacgccgccgccgccagcgccagcgccccgcgtgccccggcgtcccggccctgccgtagccccgggcggcagcacctggagcagcagcagcagcagcccggccgactccccccggggcccggttcccgcgccgccccgccgcggccgccgccgcccgccgctccccggggcctggcctcgggcccgggccatcccgccgccgccgccgccgccgccgccgctcccgggggagcggtagccgaagggagggagcgcaggcgggaggagggatgtcgggagcgggcgggcccaggggacgggggcccgggggaggcgggggcggggcggcgcggccggccgaggggcggccggggacgtgacatcatcgggggaggagcggccgggcccgggccgcggcggcggggcggaccctggcgagtcggtcgcctgggctgggggctgcggcctggtcgaggccgcgggagggaacggaagagcccggcgggggccacggaaacccgcgcagggaggatccggggccgcgcggcgagggagcccggcccgagcgggaggtgcgcgccccgctgcgctcgggaacctccgcggcctccccgtcgccgccggacgaagccccggcgtcttcgcggcctcatctccctcccccggcacccgccgtactctccgcgcccgacgccttgtgcctggacttgctgctcattttgacgcctccgagctttcgctcttgacgtctttctcccgcgtgactgtactcccgcatttccccggcgaccctgacctcactttcaccccagctaaggactgaaacgtccctgccgtaggctgcggccccagacaagctgggcgaggtccctgcatccaaccatcccgattcctgatgctgggttacctaagcctaaagcattttcagtttccatctgtgcctttcaggaacctcctgatttctgattgcgagttggacaggtaggctcagagcccagctcacctcctgtttctccccagccgcgtcccgtctcagatcccattcctttttttttattagttcctggcacagaagtcgtctggcccttgaccgtggggcagagacatttctgcccctctccccacgttgtcctggccaggcttcgagcaagcccagactgagtccagcactttcctgcagaacagcatgggggccacctgccctgcctgccatgttcacgctcagacacccctgcaataacaccttcctgctccaactcactcccatcctcttctggggggcctccaagtgtgagttagcgttctgtcacacattggcccagatgaggcgtcctgggggcactgctggttctcctgccatcacagaggccctctcacctcctttcctggtctctttaccaccccttctctctatgcctctccccatcacccacagggggctgccattcccaccaggactccttcaggtctcagcttttaccctaggtgggattatcaaacatgggtttctccttaagacaattcttaagccagtctctttctccatctcctgatctgcctctctaaatcttgcttctcacagtgtggtccccggaccagcagcattgacatcacctgggagctggtgaggaatccagactcttaggccctgccgggacctgctgaatcggaacctgcaatttaccaagacctgtacacacattacatgtgagaagcccccccagagctgttccacacttgctccactcctctccccaacattcagacccacctctggctctctcatttccagcagacacccttcctcttacccagtggagaggactcagggaatcttggcagaaccctgctggcaccatcagcggcgtatgctcctcctcgtttctgtcttttcacccgttctcttctctcggtcttccactgtggagatggatgtggaacctttttgcttagtcctgtcttctgcctttcctgagattaccccaccgatctcctgtttgtgtctcaatatgttcttttctctgctcagatctccccattcttaaaagaactgtcccctcctcctcgcctccttcttcaatttctgcccctcctgtgtctgagaccgttcacaggaacgctctgccaaggatgcctgactggcccccagcaagccactcctggggccct

SEQ ID NO: 1561800 - DNA, 4001 bp, Homo sapiens
tgtttgagagtgttcatggcagtattgcttagaacagcaagaggctggaaagaacccaactgtccacccattaatgggtgattaaactgtgttataaacagtgcaaaactatgagttatcaaaaagattgttatcaagacttctatgtgctgatggaaagacattcgaattgtttttaatgaaaaagtcagggtggtttagtatgtttccatctgtttcaaaaagacatgctgacagaaagcagacagcaattgttagggtcagtggtggtgcagggatgaactataaagggccacaagggaactttttaaagtgacagaagtgtttcatatcttgactgtgatggtggtcacttcaaacgagtgtaggctgggcacagtggctcatgcctgtaatccgccagcactttgggaggcctaggtgggtggatcacctgaggtcaggagttcaagaccagcctggccaaatgacaaaaccccgtctccacaaaaaaattagccgggtgtggtggtgggctcctgtaatcccaactacttgggaggctgaggcaggagaatcgcttgaagccaggaggcggagtttgaagtgagccaagatcacgccattgcactccagcctgggtaacaagagcgaaactccatctcaaaaaaaaaaaaaaaaaaaaaagagtgtattttattatatgtaaattatgcctttaagaagttcattttaaaaagatacacatacacacatctatatatataatggtataaaccaagaatatttctggacagatacaaaggaaagttaatagttggaattctagggtatgggagatatttattgtatataatcttttaccacttgaatttgccatttgtatttactttgtttcaacttaaaaaaataaaaaccatcacaagttttgagtttaatttctcccgaccttagcacattcgtgtgtaaaacagggataatggcacctaactcgtaggggtattaagatactgagctgagatctgaatgacaagcagcagccagtgatgggaggaaaatggggagtgtatttcaggcacggggcacaccaactacaaagacttaagttttaggagtgtcacactccttcctggatctgaatgcccacctacataatgaaaggggtgggttttctaattcttggagcccttccacggtatctcgttactccagaaattgcctatgtccccacagctgatgcctgttactgctggggctgagctcagcgatccagcccacccggctaatccaggactttttttttcactgcgagaggctaagtggatcctggaggtgatagtaagaattgcggggagcgcggctctagctcagctgggagctttctggtgccggtgaggagaccatgaagccaccagccccagctgacccgcccgccgaggcccagagagtcagaccctggccgccccttgcccctccgctcgcactacctgccccaggtgtcgtgcccgtcacaggtgagaggtcgcagctcatcgaagggaaaggcattctccaggtagctgtcgtaggcgtggtagaacatggccttgactcgctccctgggtgggggacgagaaatcaggcatggggcaagaacacaaaaacaagcgggggaagaacaagatacagggcggaaagtgggaatcactagctgatttctccctgggacctagcggctgtgtcggagcaagtcggggtctgggatggacggaaagggaaaggaccgggttcacgcttcccattccccaactgcgaaagggcgggtcacagttcacctgtagtgggcgggatctggcgcggagccgtcgggacctggcgcaccatggtgctgaggcagcagcgcgcacaggaggccgagcgggatgagcagccggaaaggcatagagctcgtgtcctctcagcgcccccgcagcagcagcagccactgcaaccagttcatcctgggagctgctgcgggttcttccgggaatccgcgccactgcgcctgcgcgctgagaaatcagcctctcacttccggactacaagcccctgaatgcaatgggcagcgaaacgcggccgaagagcaacttcggatgtacggtttcggcaacactgatcaacgtgtcttaaagtcagtggctgttgttactactgttattaattaatgttttaataataacagctagcatgtattgagcacttattgtgtactagtactgtacggagcatttaaaatgcattctctcattcatttttttcaacaaccttattaagtatgaaggcagggtaagcatgagaaatgttcagcctttaccattattacctagcaggacaagccgcagacaaaactcctcagacaccgggttaaagaaggaaggagctttattcggccgggagcgtcagctgactcacttctcaaaaacggagctccccgagtgagcaattcctgtcccttttaagagcttacaactctaagggggtccgcgtgagagggtcgtgattgattgagcaagcagggggtacgtgactgattaccggtgcaccggtaatcagaacggaacagaacaggacagggattttcacaatgcttttccatacaatgtctggaatctatagataatataaccggttaggtcaggaggggtcgatctttaattaccaggcctggaatgcatcgccgggctgtctgactactgatttcacttctgtctttcttttaactcctacattttctttgaggcagaaattgggcataagacaatatgaggggtggtctgctcccttatttagggatattgagtttcccaaaccagttacttgttgattgtataagacacaactcacatttatttgtccaaaacttccactcttttttttttaaaacctcttgcattttccgatgctgtcactcttgaggtttcctgaaatcccgtcagttctaggaattcatgacacttctctcctcccaatttgggatgtggttacacaatcatggtcccttcagtctccatctcaaaccggaagctttacccctgtcagccctgtagaatgtcttgggtaagaatgaataccctggttgggcgcggtggctcacgcctgtaatcccaacactttgggaggttgaggtgcgtggatcacctgaggttaagagatagagaccaacctggccaacatggtgaaaccccgtctttactaaaaatacaaaaattagccaggggtggtggcgggtgcctgtaaatcccggctactcggaaggctgaggccggagaatcgcttgaaaccggaaggcggaggttgcagtgagcgaggatcgcgccactccactccagcctgggcaaaacagcaaaactccatatcaaaaaaaaaaaaaaaaaaaaaaaaaaaaagacaaatgactaccctggggcactatagctttcaggaggtttgtgatccatttctccattccccttattcccaagtttctaaaatttggtcagcaccttagaccacagcaacacccatgactttggtcagtgtgacatgcggtagaaccaacactggatttgaagtcagatctaggatccagttaattacaactctgtcactcatctataacctgtgtatgtgaccctctccttctctggggctagcatccttgtctataaataatgaggagtttgaacaaatggatctttaagatccttttcggtcgagctttctatgattctaggattggctatctcttatttgctgaaaaagtcagatggaagtgatagctcagtttgttgagccagagtgcagccaggcctcccaaagtgctgggattacaggcataagccactgtacccagcctgggatgtttttagaaactcttcttggccgggtgcagtggctcacgcctgtaatcccagcactttgggaggccaaggcgggcggatcacgaggtcaggagttcaagaccaacctggccaatatggtgaaaccctgtctctactaaaaatacaaaaattggccgggagtgg

SEQ ID NO: 1561801 - DNA, 4001 bp, Homo sapiens
aaattcaggatggtgctgtctaggccctagggtaagagagtttctaaggactgcaggagagaagggaaggccctctgtgaccatggcagtgggtgactggagccagcctgtggaaggcccaaggacgagctgatgtgaattcaccctgccttggcatccaggggggcccacaggaaggaagggagcccatcccaggggaattctaccccgagtggactgtgcaggttctgtcaggctcagctaaacccacccttagactccctggagaccaggatgctttcaaggaattttaaaccccttggatcctggtggggtcaacagtgagtatgagcccccttggcccctggggaatgagataaactttcggggctttctctatctcagaaaagaggctcagagagacatctcaggtatctaatccccctggtcagttcacttcattcagagggagggctcctccttccacaggatcaaactcaggattgagtttctcttgggccaggccctcaggggggatgtgggtcacacccctgacctgcagaagagacctgggctggcaagaggccccagcaagagctaaaggctgtgccagggcaggctctgggctaactgagcggggctggggtggagtgaggtcctcctgggaatgagcagatgtgggcctggtccgggagccacgttcctcaccacaaaaggctgacttactcgggagtgttgatccaaatgatgtccaggtggcaatagtagacacactccttgtccttgtaggtgaagcacgtgcagcgcctggatcggtggtgctcaggggccccctcggccgcctgctcctgcccagggcttccagggcttggaccctgcagtgctgtcggggccacagtcccctcgccagggccagccacagtctcctcgccagggccagccacagtctcttcacagtccccctcagatctggctgcagtgggggcctgggacacgccgcgcctgccagcatccccagactgggagcaaggcacgaatcctgcagaaggcagattgaggggctcctaagctgagtgtgcagacccctcaacacccgccacccccaaacacctgaggaggggggtggagcaagcaaaatgtctgcaaagtttccaaagctctgcgcagtttctgaaaagtttccaagctatctgcacactctgtgaaaagcttgcaagctatctgcacccgttgaaaacttgcatgcattttgcatactttctgcaaactttgccagggtttggcacagcctctgaatagttcgcaaactttctgaaaagtccccagtttcatgaaaaattgaccaagtcggcccaggcagcaggtctccagccagtgcgcgggctgcaactcccggagcccgtgcgggtagtcgttgcgcgccgcttctgctccccagccctcccccaggcgtcttcacgagtgcagagcccaggcaagagtttgctccccgcgacgcacatcttctccgcgcctcgggtcccccgccctgggtccttttgtgtgcgctcgcgccaggagaggcgcgccgccccgtgcgcttacctgcggcggaggtcactgtgagcccgaaaaggagccacagccccggctccatgaacctagatcaggcgccggagcaccggaccaggaggacggccgcttgtggccgcgaaagggcactggggccgggtacagctggcctcgccctccagctgtgggggttcgaggccggccgatcgctcgctgcgtctccagctccggccaggagttggctgcggcggtcataaactttcagagcgcgctgcccatccctgcgcggagctggccggctgtggctcgggcttttctggcttctgcaccacccccgtcgcctccccgccccccagaggggctggaactgcctcgccgggcctttgaacccgggcgcactgggggtcgcctcccaggcgctggggggagctggccaggagcgcagcggcccgaggcgcacccaggacagcgaggggcgggggcggcgtggcgtggcgcggctgggtggggtggggtagggtggggtgggggccgggacagctgccagctgccggaaggccacgagagcgcgcgcacacacgcacacgcgcgctcacactcacaggcgcacccccgcccgccagttcgccgctccggagtagcagccccccatccaagagcaagaacagatgagaaaaggctgtgctcaaggggtgttatcttttctatcaggggctgagggaaagacacatttctcattgttccccgagtgacaccttccccttgaagagcctgcttgccaaggaactcggtgtactttacactcttgactcacgcctcgggctggctccctacctctcccaggagttcagagcctgcgtgtggggcagtggcctgggagcaaagtcaacaaagatcctgggttagcggtcctgtggtgtccagggcttcctcagccatctgcacaggttgggtggcttcaggtgagagtcgggctcctctccctaaaggccaagttcattcacacaaccgtccctaccaagggaaatgacctcccaagagagccccctacttccttcatagccttccaagtcctgtgtgtgggaggctgtccccatctccagctcagataaaaatgtctgagactgggaagtcctcctgacttctcagggcacttgtggtcaaaggaccctcctttcataacagatggggttgggggaggggcagtgcttcacatctgtaattccagctctttgagaggccaaggtggatggattgcttgagcctgggagttcaagaccagcctgggcaacatagcgagacctcatctctaaaaaatggggttgaattgggtcctgccctctactagccttaacgaccagcttctgaaaactagaaagcagctgaagtgaccagagcagtttctgaggacagtccaaaagagtgctacaacatccccctggcttgatagctcaggacacctgtcctctgaacacagctgctgtaccaggaggaagccctaacaagcccacctggagagatcacctggagaaacctacgtggagagaaaccgaggcctcccagccgaccaccagtgtcagccactgacctgagtgaatgtgccttccgatgatttgagctcccagccctcaagacttccaactgaggaatagctgtcccgctgtaccctgtccgaacttcccacccacacaatccatgagcataataaatggttgttttacagcactaaactctgggtaaattggtacagagctgcagtaactagagtagcactcaagcttccagcactgaagctgatgctgaagttctccatccccccactcccatcccatcctgcctagcccttgaatccaagtgtttatttgtttgtttttgcacttgatgctttgaaaataagaaaaacccaagactcacaatatcttctgttcctgctgggctagaatttggatcattttagtattatctttgtttgttggggctactataacaaaacgccataagctgggtggctgataaaccgcagagttttatttttcacatttttggggtctggaaaaccaagatcaaggtgctggtagattcggtgtttaataagggctcgatttctgatcatggatggtgacttctcactgcatcctcagttgtggaagggtcaaggcagctctctgggggtctcttttctaaggacaccaaccccattcatgagggctgcaaccctcatgacttaatcacccctcaagggccccacctcctgacatcatcaccttcatggataggatttcaacagataaatctggagaggacaaatattcagaccataataattactatctctttggaattaaaatttccatcttcaacaaaataaaaagttcttggattgggggatggctggaggaatagaaaatatactaatcagctaaaaggagaaaaggagtaggaggaggtttccgggtaccatgttcagacac

SEQ ID NO: 1561802 - DNA, 4001 bp, Homo sapiens
cctccagccccagctcaacatggcagagttccagagccttctgcagaccctcccaggtcacctccctcaccacagggcaagtccggcagctcgatggccacccctcccccaccaagctccccctaagagagaggctgccccaccagaccctctgaggcctgagtgccccacagcgggggtccctcctgccctggaggaggtcacctgagccccatgccctggggctgggagatgccaagcctggccaccacgggagttgggggttccttctcagggggccaagaccatagcctggggagctcacctcagccgcctccttctcgaacttctcaatggtccttttgtcaatacctccgcatttgtagatgaggtggcccgtggtggtggactttccggagtccacgtggccgatgaccacgatgttgatgtgggtcttctccttgcccattttgctgggagtgtgaggggctggcgggacccggggtgctctggctcagggcgaggggggctgcagtgattctgtggggccagtggtggtggggagaccggtgatggggagccccagggggagacaccagcagagactgtcctggcacaggctggacaggcatccctgcccacaaaccaagcccccatgtttggtggggagggaagggcccccacccacagctgggcctggccagggcaagcagaggctgtgcactgcccccaccccacacttgagcccaaacagccccatctgctgtaaataactgggcgttggagcccgcgggctgctccttgggaaggggttagccaccatttggagagaccacgcagcgccaggctgggtacgtccgtgaccagcagagccgggtgatgagtcacctgcccagcgctccagggccctgtcctgcacgcgcactcccctccccggcggcagggccagggacacggcgccccacccccacccgctgccaccggggagagatggccactgctccccactcccctcctcaggcagggacggcgccatcttcccctcatccctgcccggcaggctgggccagagccccgacggagatgcgctgcccagattaggaacccagaatagctctaggcacccccctcccggactctcacagggacagacagcggccgggaggtgggggtccctgttccagcctgaggaaggaggacccggccctgccgagcccagcaagtgccaggtggagatgccctcggccccgtgggggtatagggggcaccctccctccccccctccctgtgactcaggaccctgggtcacagccctgtcccatcacagaggtcagtggagaaacccacgctgctcctcgcggacaggtggctgggggagggaaagaggacagaagccaccctggggtgggaacacgggtgggggtggggaggccagggcccccagatctcaccacctccctcagcgtcctctggcccagcgccccgaagcccgacccccatcagcccccggcccgcagggtccccgcggccccaaggtcacggctacggggcgatcgccgcccaggacccggccccgccgccccgcgccgccccccaccccgggcccagcccggccgacgcggggacccccggaagccggactccgggcgcgcgcgggggcgggtgcggggcccggccaccctctgccccccaggaccggccccgggggtccctcttcggaagacgggggcgggggcggaggcccgggggccgagcgtccttacccggagccgaggtctcagccagagggactggcggcgccggcgccggcggttttatctccgggagggggtccacctattgacggtggcggcgcagtgcaccgcgccctgcagcacgccaatgcggaaccgcgcgggagggggcggggcgcggacgcgcgcgggcgggcgccacggggacgcgaggcgatgcgggaggcgcgggctgcaaagacggacgcgggaggcgggggagaaacgcgccgcgggcgggggcggggcggggggcagggcagggaggcggcgggagggagggaccgggacggagacggcgcggggagagcgcggcgggcccgggagacggggcgagagccggctcagggcaggaacacgcttgagccgcgaaaagcggtccccggggacagggcagacgccgaggaccggagccggcaggcgggggaggggagcaggtgggctgcagcctgggagacgagcctgggtctaccggcccctccccggccctgctcatgggggacgccccagaaccaacgaagcccggctctgaggggctctccctaatgaggcccgggggtgcaggcctcagggtggaaatctgctggtttccagtccctgtcctcacgtgcctgccctcctgggcgcaccatgacaggccccgaggatccagcgcagaaccaccctccccctgagaggctggtctcccacggtgcagggaacgccggaagcccgctcccagacccactgacatcttccagggaccctcccctccgggtgcgccgacctccggctgctgctgggaaacagcgccagccaagggcgagtcagatccagacagacccaggcccccccgcccagcgccccaccccgctgcacctcagcgccttgtagctgatgctcatatggggtcaggatgccaagccaaagaccgggccacgctctgtaggaagtggggagtccctgaggtcctggcacacgcgggtaatgaccaacgtgggttgtgaggaaggggatgtggcagccatgtgttgtgtgaagaccaaggttaggggctttctccagaccccaagatcctgtcgtctcacccaggtattcaggtcttccctcccacgctgcccccccacccccacgcactcggatcttcctgccagcggggtctcgggaggtgtgtgctgagtgggggcagagccctggcacctgtcctctcagccctgagttcccactgggtgttgacatggaggccccgggtcgggcccagcagctgcgactgggcaaatccatggggatccccagcgactggacccctacctggcctgctggcaggtgtgaggaggaaggaaaggtgggggcccagggtcggggccaaacagttctccccagcctgtggagagggcctctcaggaggaccctggtctgtggctgcgtctgccccataggagtccagggacttgggctcctgggccacaggcaggagaggaggcagggagggcctgctaggtgccccggcacttccgagtgctgccgatgccgtcaaacaggagccaggaataaaaataaccgcctggcaagaaagcaaggcccgccccaccccacccagctggtctctatatttaacgcctcccctgcagcctgaaggttaggcagggatttggaagtgggcttgctgcaggtgctcgagtggcccaggccggggtcccggggatgcccaccccactcccccaagggatcaccaggactctgggctaccttttccagacaccccttccccctcggctcccggctcacccatagcagtgccaggggctcacatgtgccgtggggccttgccacccacaggagtggcccctgagagtggaatgtggcaacctccccaaagcacctgtgtgctgactctgggcaagggtgtcggtggctgctccaaagggtctcccaggcgccaggacacgtttggtccacggtgtggcccctcggggtcctgggagccaccgactcagttccgcagacacttggaacacacagctaacggggctgcggtcacaaggctaaacactaacacactgatggttccgagccaccgcggagactgaacaggactgaatggctactaactacggaatgctaactgctgaataacggcagtggcctgaccacgtccccaaagtgcacgagttgtaacttaatccccaatgcaacagtgttgggggctggcgctttcgggaaggagtctgggtcataaagggtttgcccttccgaatggatttgtgccct

SEQ ID NO: 1561803 - DNA, 4001 bp, Homo sapiens
ccagatgttaaaggaatggcctaaaaatacttacctagtcaacagcactacaggaaccaggccctataccctattcttcatacccctctctactcctaacttctacctggcagaatggaagccaaagaccagggttcttgtcctactaactttctgcatgatcttggacaagttaatctccctcggccctggtttcctgtaaaatacagttggaccggcacccctaagtggccaaactaatactttattggcttccaaagtcctatgccgaaatgctggttctgccatctttgcttcacaaaattctgttcatccagcagtaatgcattcatattccacttctttcaaagcctaatcccactgatccctctagccctccaagtcactacgttgatggtcctatttctaccttgtgtgtcatctagttgacccatacacagaataacaccccatggaatcttgcacacgtaagtactgtatttgccaaaggttatgagaagtttgaaaaatgagtagaaacaaaacaagtgtgaaacactgccactctcagaacttttgaaatacagcagcctagagcaatgtctataaccgccaaggaccatatacaaactttcagtttctctaacccattaagatcctagtcaatctggaattctactggtttagccacttagtatttgatcatgggcattatacaactctgtaacactcaaatttttcatctctaaaatgggcacaacaatagacctattttacaggactgttgtgagaaccaagtaagagactggaatcccgtccagaatatattccaaattccttaacttcgtcttcacagccctccatgaactagtcattacctgcttggcaagtgttcaccccttaactctaatcaaactggagattattctacttcctgtgagcacatttactggcctttctcgaccattcctttgcccttgtgatcaaggcttcctattgcctgaggaaattctcaacaacttacggggcctcccccaatgttaagcaatacctactgggagtacttaacatcaacttcattttaagtcgttagacgttatatcaactaggataaatctgagggaaagggatttgaggaaattcactgagatccaagtaccacggtaaaaaaagatccagccagtttcacagcccgcacttcccgctcacgtcgccggtagccctctgttaagggaagctcaggggctcgcccggaaactttccgggaaggtcagtcacttcctgaggctgcagaatctttttctctcgttctaaccccatcaccccctcgtctttttaaaaaacaatgctaggaaggcaaacaagggcgggataccggccccgacaagatagcctagaaagttttaacgagggcgttataccaagccaagagaggctcctcgcggcacccctggcacccccggcacccagtgaggcgagctggggcggcagtgcccagcagaaaggaatgcagggatcgccagccccagtctcgttcggggttattaaccgggcattcgagccccttccgggaggacgactcaacgtgtgctctccattccggaaacgccaaccacggcaggaggtccgcctcagcgctgccgccctgaggaaagcgggctgcggccaagcctgcggctccggagtcctcgccggctctgccgctccgggccgcctaggcgcggctgcctcacatggcggcggccggctgctaggccgcaggcccgttctcccacactggagtgggttaggcttctcgcctcaatccttagcccttacgccgggctcagatcctcacctcgtccccagacatggctgcggctcgagtgggctcggcacggacgggaagtcagacgggtcagccccaggccccggcggcagcgctgcccctgccgatacctctcccaccaccgcactaggctcttgcatcagcgaaaggaaacgacaccccgccctctcctccaagcgttggaaatgcgcctgcgcagagctcgccaaggcgcaggcgcgcagaagagccaacctagcgcgcttcgtgtggcgcgagttaccaggcgacgccgcgtcgccaggcatgccgggacttgtagtccatttataagagggttgcgcttgcgctgtagccgcccagcgacctgtgcgcggcgtctgagcgagctgcagccggaagaacattcggttgttgatattgcctcagccttttggagcattcttttgcgctgcttgtagagtgaattggggtcccttcctcctgggttagggtagtgggttagacactgagtcatatgaacccgctggagctttagtttcccacatgacccccgggcgtcatggtgtttgagaaattctgagttggagctagaggcgcccacctccctaagggtttttacttcgtaagaaatttgacggctggttttctgcttgggaggtcagaaaccaaagtatcttcccggtcttcccccgggagagataacatctcctgaggagaaacaaccacgcaagaggcagctgtcggggagcctcagaatacttgtttatgaaatctgattgaatgggtgcgccacgcaatttcccttgagacctaacaacagcagcgaccctttagggagctctcactgcggctgtgctctccagccaaagaccatcgagaacactcctgtagctggacaaagtggagtttatggtcttgcaagtagggcagtacgccgtgggaaacaccgggacgtctttggaagagggtgttggaaagaatttacagggtttgggcagggtttaaggaagcagagcttctctctggattagatgcagtcaggaggtgggggtaattctatgattgggtaatttaataattcttttttttttttttttttttttttgagactcgctctgttgcccaggctggagtgcagtggcgcgatctcggttcactgcaggctctgcctcctgaattcaagcgattctcctgcctcagcctcccgagtagccggaattacaggcgtgagccagctcgcctggcctataattcttacatgataagaaagtagaactggccgggcgtggtggctcacgcctgtaatcccagcactttgggaggccaaggcgggcgaatcacctgaggtcaggagttcaagaccaacctggccaacatggcgaaacattgtcccgactaaaaatacagaaatttgccgcgtgtggtggtaggcgcccataatcccagctactctggagactgaggcagagaatcgcttgaattcgggaggcagaggtttcagtgaaccgagtttgcgccactgcactccagcctgggtgacagagtgagactccgtctcaaaaagaagagaaagaaagaaagaaagcaggagggagggagggaaggaaggaaggagggaaggtagaaccaagtgaggctaaagctgcaattggttaaaaaaaaaaaaaaaaaaaaaaagctctgcctcccgaattcaagcgattctcctgcctcagcctcccgagtagctggaattacaggcgtgagccactgttcccagcctataattgttacataataggaaagtagaactggctgggcgcggtggctcacgcctgtaatcccagcactttgagaagccaaggcgggcgaatcactaggtcaagagatcgagaccatcctcgccaacatggcgaacgcccatctctactaaaaatacaaaaattagctaggcgtggtggtgcgcgcctgtagtcccagctactcaggaggctgaggcagcagagttgcttgaacccgggaggcggaggtggcagtgagccaagatcaagccactgcactccagcctggcgacagagctagactccatctcaaaataatggtagtaataaaaaaggccaggcacggtggctcacacctgtaatcccagcactttgggaggcgaggtgggcggatcacgagatcaggagttcgagaccagcctgaccaacatggtgaaaccccatctgtacta

SEQ ID NO: 1561804 - DNA, 4001 bp, Homo sapiens
tcccgcctcagcctcccaagtagctgggattataggtatgcgccaccacacccggctaatttctgtatttttagtagagacggggtttctccatgttggtcaggttagtctcgaactgctgacctcaggtgatccacctgcctcgacctcccaagcaggcttaagatttttaaaaattaaagtaaaagtaaaaaaataaaataaacagacttctaaaagtgacctcaatgagcagaactaagaaacaatgggcagcagtaatggaagacagatccagcttaatgaaaggaccggccgggcgcagtggctcacgcctgtaatcccagcactttgggaggccgaggtgggaggatcacctgaggtcaggagttcaagaccagcctggccaacatggtgaaactccatctctactaaaaatacaaaaaaattagccgggtgtggcgggatgcgcctgtaatcccagctacttgggaggctgaggcaggagaatcacttgaagagagtgttgcagtgagccaagatcgtgccattgcactccagcctgggcaacaagagcgaaaactccatctcaaaaaaaaataataataataataaaaaggaaaggaccaacgaccagaattaacagtgctgacaggtaggaaggtagggtagagatgtggtaaagggaatttaagattccaacgtaactgagcaggaagaccgcatatcttagctaatctttacagagacagaaatggatgcttagaaagagaaagcaccttgcccagtcagtggcagggagagatgagatacaaatcctcggctgggtatagtggctctcgcctataatcccaacactttaagagaccaaggtaagaagatcacttgagcccaggagatcaaggccaggctgggcaacacagggaggccgcgtctctaccaaaaatgtaaaaattagccaggtgtggtggcacgtgcctgtggccctagctacctggtaggctgaggtgggaggatcacttgagcctaagaagttgaggatgcagacagctgtgatcttgccactgcactccagcctgggcgaaagagcaaaaatctggcctcaaaaaaaaaaaaaaaagagaaaaatccttctccaacactaggaactaggtgtggaacttactgagtcacttaggtcaagtctcaacttcctcatcagtcaagttaggccagtaactcctaccttctagtgtctttgtgacgaaggaatgagaacaggagtgaaagcactttacattatttgttattactattatccagcagcctttgctagagggttgccccgatctcctgacgcttggcctgagagattctatagtgcccagagataacagatgataccctgggaatccctaggtcactccgggttccctccgggggtgtaattaatggtgcttggagaccactccctccctcggcgtcctccacctgccttacccacacacatgcgcccgatgatgcggcagccggcgatagacgcgtgcaccacggggatggtatcggagagctcgccctcgaacacactgtagggacatggactcggtggtggcggggcagaggggccggcaccctcccactgccggagctcttgactcctgcgcacgcctccccgccaccgtaagccccggggctcccgccgcacctgtagaagttctctgagcctccgatcgctaccagacagtaggtgttggtgagcttggcaaagcagccgatctcacagttgttctcgaacgaagctcggaccgccatgaggcctaggggcggcggaggcgggagttcaaggccggcggatcctttcccaagtatcccggcctccgtccctcaggccccgccgcgaccccgcccctctcggcctcccggcccctccgtcctcgggtcccgcccactgggcccccaccagaacctccggccctgaatcctctggcccccacccctcccgacccaggaccggagctgaccctcccaggttcccctcacaccagcttaccaagtaaccagtaacaagctccgcacgcggcgactgtaccttggactccctaaaaaggtttccgtttccacttccgtccagggagacttccgggagagcccggcgctccccgccacgcatccagcccctctacctccggcctccggcggactctatggtcgcgagcggtctgggcgcgaccccgcctggccccacgcctagcctgctcgcgttcattcattcattattcattcaggagctttttaggagctgtcatcgacctagacctccggctggtcggttgtgaggcatgagggagaggaggggccaggagtgtctcgcggaagggttgatgatggaggtattgatggaaatgaagccggaggaagggcaggtttggggaaagggatgagtccagctgtgccttgagggacagaagtccatgtctggagcccagcaggggagtggagtgctgacgaatgagatgaggggctgaagacgggtggactagaagaggctacccatggagagagttccaggaggcagaagtgcggccagaccgaggctggagaaagagcgcagccagagacggaaaggcagccaggctgcaggtgctggagagaggggaggactgaggaagcaggggctcaggaaaaggctggaaaggggtccagggtgggcaaggatgtgggtgctggttggcttccacgatgtgcctctcgcacggcctctatcactcactcagcagccaacttctgtccccaggatagtgatgggggccaagggccctgctgcacacttggacaggatgaacttggcccacattttgtagaatctgcaaaagccccgggttctctcaaaatgtcacagtggtaacttggagcccctggactcccccaattcctccttcggcattcaccctcctccaggggtttccccataattggcctgaatggtgcccttcccattcccccaacgtgtccctcccataactcctcaaagttcaggatacaccaggcgctgtgattcacaataaagtctgcctttattgatgtgtatcatgtttactatcccgggtaagtggtgagttcaggaaaatggcccacaacctgtcacagcctgtacttcaagagacactcagcaagatgatgacgacgacaatgatgatgatgatgatgatgactcagcaagatgatgacgacgacaatgatgatgatgataatgatgatgtgtgtgtgtgtgtgtttccgggtatccacatactctgctcttcctcactcattcacctcagacccactcagtcctctttagggcatctctttcacctgattctctctaccaaaaatttttctaactctctcctccctctgtccaaaacctccccatccttcagggcctggctcaaaggccacctccatctcctctaagaaagttttctgactactccaccttctccaggactctctgccctttgttttctaacaccctctgtaactggttaacctttaacttgatatggctctgaccccttctccagcagcttgtgcatttcacctctgtccccaggtctgagtgtgacccacctgtcagctctacaggcccagcacagggctggaaacacagcctagattcaagaagatactagttagggtgtgtgtgtgtgtgtgtgtgtgtgtgtgtgtacacaagaatcttgagcccagagagtgtgtctgacctgggtttctagacacctcccttccccagtctgggacctgagcaagtccagagtctcggtggacagaggaggggcctgcccttgccagtgcacccccgatgccagtcctttggctaggactcaaagcggcttcggagctgcttgaacttggacttgttgtacttagtgatgaggtccagtttgctgtgacccagggtcagccgtttctcatccctgaccaggtcactgttaccaccattgagatggccacccttgggacccccaggctcagttccctgcctggccccgtgcaactga

SEQ ID NO: 1561805 - DNA, 4001 bp, Homo sapiens
tcaggttagtctcgaactgctgacctcaggtgatccacctgcctcgacctcccaagcaggcttaagatttttaaaaattaaagtaaaagtaaaaaaataaaataaacagacttctaaaagtgacctcaatgagcagaactaagaaacaatgggcagcagtaatggaagacagatccagcttaatgaaaggaccggccgggcgcagtggctcacgcctgtaatcccagcactttgggaggccgaggtgggaggatcacctgaggtcaggagttcaagaccagcctggccaacatggtgaaactccatctctactaaaaatacaaaaaaattagccgggtgtggcgggatgcgcctgtaatcccagctacttgggaggctgaggcaggagaatcacttgaagagagtgttgcagtgagccaagatcgtgccattgcactccagcctgggcaacaagagcgaaaactccatctcaaaaaaaaataataataataataaaaaggaaaggaccaacgaccagaattaacagtgctgacaggtaggaaggtagggtagagatgtggtaaagggaatttaagattccaacgtaactgagcaggaagaccgcatatcttagctaatctttacagagacagaaatggatgcttagaaagagaaagcaccttgcccagtcagtggcagggagagatgagatacaaatcctcggctgggtatagtggctctcgcctataatcccaacactttaagagaccaaggtaagaagatcacttgagcccaggagatcaaggccaggctgggcaacacagggaggccgcgtctctaccaaaaatgtaaaaattagccaggtgtggtggcacgtgcctgtggccctagctacctggtaggctgaggtgggaggatcacttgagcctaagaagttgaggatgcagacagctgtgatcttgccactgcactccagcctgggcgaaagagcaaaaatctggcctcaaaaaaaaaaaaaaaagagaaaaatccttctccaacactaggaactaggtgtggaacttactgagtcacttaggtcaagtctcaacttcctcatcagtcaagttaggccagtaactcctaccttctagtgtctttgtgacgaaggaatgagaacaggagtgaaagcactttacattatttgttattactattatccagcagcctttgctagagggttgccccgatctcctgacgcttggcctgagagattctatagtgcccagagataacagatgataccctgggaatccctaggtcactccgggttccctccgggggtgtaattaatggtgcttggagaccactccctccctcggcgtcctccacctgccttacccacacacatgcgcccgatgatgcggcagccggcgatagacgcgtgcaccacggggatggtatcggagagctcgccctcgaacacactgtagggacatggactcggtggtggcggggcagaggggccggcaccctcccactgccggagctcttgactcctgcgcacgcctccccgccaccgtaagccccggggctcccgccgcacctgtagaagttctctgagcctccgatcgctaccagacagtaggtgttggtgagcttggcaaagcagccgatctcacagttgttctcgaacgaagctcggaccgccatgaggcctaggggcggcggaggcgggagttcaaggccggcggatcctttcccaagtatcccggcctccgtccctcaggccccgccgcgaccccgcccctctcggcctcccggcccctccgtcctcgggtcccgcccactgggcccccaccagaacctccggccctgaatcctctggcccccacccctcccgacccaggaccggagctgaccctcccaggttcccctcacaccagcttaccaagtaaccagtaacaagctccgcacgcggcgactgtaccttggactccctaaaaaggtttccgtttccacttccgtccagggagacttccgggagagcccggcgctccccgccacgcatccagcccctctacctccggcctccggcggactctatggtcgcgagcggtctgggcgcgaccccgcctggccccacgcctagcctgctcgcgttcattcattcattattcattcaggagctttttaggagctgtcatcgacctagacctccggctggtcggttgtgaggcatgagggagaggaggggccaggagtgtctcgcggaagggttgatgatggaggtattgatggaaatgaagccggaggaagggcaggtttggggaaagggatgagtccagctgtgccttgagggacagaagtccatgtctggagcccagcaggggagtggagtgctgacgaatgagatgaggggctgaagacgggtggactagaagaggctacccatggagagagttccaggaggcagaagtgcggccagaccgaggctggagaaagagcgcagccagagacggaaaggcagccaggctgcaggtgctggagagaggggaggactgaggaagcaggggctcaggaaaaggctggaaaggggtccagggtgggcaaggatgtgggtgctggttggcttccacgatgtgcctctcgcacggcctctatcactcactcagcagccaacttctgtccccaggatagtgatgggggccaagggccctgctgcacacttggacaggatgaacttggcccacattttgtagaatctgcaaaagccccgggttctctcaaaatgtcacagtggtaacttggagcccctggactcccccaattcctccttcggcattcaccctcctccaggggtttccccataattggcctgaatggtgcccttcccattcccccaacgtgtccctcccataactcctcaaagttcaggatacaccaggcgctgtgattcacaataaagtctgcctttattgatgtgtatcatgtttactatcccgggtaagtggtgagttcaggaaaatggcccacaacctgtcacagcctgtacttcaagagacactcagcaagatgatgacgacgacaatgatgatgatgatgatgatgactcagcaagatgatgacgacgacaatgatgatgatgataatgatgatgtgtgtgtgtgtgtgtttccgggtatccacatactctgctcttcctcactcattcacctcagacccactcagtcctctttagggcatctctttcacctgattctctctaccaaaaatttttctaactctctcctccctctgtccaaaacctccccatccttcagggcctggctcaaaggccacctccatctcctctaagaaagttttctgactactccaccttctccaggactctctgccctttgttttctaacaccctctgtaactggttaacctttaacttgatatggctctgaccccttctccagcagcttgtgcatttcacctctgtccccaggtctgagtgtgacccacctgtcagctctacaggcccagcacagggctggaaacacagcctagattcaagaagatactagttagggtgtgtgtgtgtgtgtgtgtgtgtgtgtgtgtacacaagaatcttgagcccagagagtgtgtctgacctgggtttctagacacctcccttccccagtctgggacctgagcaagtccagagtctcggtggacagaggaggggcctgcccttgccagtgcacccccgatgccagtcctttggctaggactcaaagcggcttcggagctgcttgaacttggacttgttgtacttagtgatgaggtccagtttgctgtgacccagggtcagccgtttctcatccctgaccaggtcactgttaccaccattgagatggccacccttgggacccccaggctcagttccctgcctggccccgtgcaactgatgatacttggtgatgaggtccagcttgctgtggcccagggttagccgtttctcatccccagacccagctccagccgtgcgagcagggcttgatatcggg

SEQ ID NO: 1561806 - DNA, 4001 bp, Homo sapiens
ccacaatccctggccataggtggttactaagcacttgaaaagtggcacaggctgccctctgtgtaaaatacaaaccaggtttcaaaaacttagtacaaaaaacaagaacgtaaaatatcccattaataatgttttaatattgattatgttataataatataattttggaatatattgtgttaaatatattactaaaataatttcagctgttccattttttaatgtggctactagaaaatttaaaattatatctatggctcacattacatttctattagacagcagcatcactctagcatagagcctggcacacaaaaagcattccaaatgtcagtttcattcccctgcaggtaggacatcagtgaccacgattcacatccccttcctcttgccaaattcaaaccctgcatctatttatttggtaaatatttatattgcctggccctgtgtgagatgctagagatactacatgaagcaaaaccgacactatcttcttcgtggaccttacaatctggtgggatggacagagaaatatcaatacttttgtaaataaatgtaaaattgcagttgtgcaagtgttgttaaggacaagtacccagggtgataaacgtggggtactggtcgaaaagtcagggacagggatgcctcccctgcagaagtgatgcttaagcggagatctgaaggatgaagaagagtttacaagactaagccaggggaggaagagcagaccagggaggaggaatactaaataaaaggccccaaggaaggcaggagcttgggatgtagaaggaacagaaagaggccagtgtgtggagagcactgagcaagcggacggacgagtagacagacttgggagaggtcagcgggaccggatctccagggcctgggtgaggttctggatctgaccctacaaaggggtgggacgccgggccagtttcatgccctaagcatccagatctgctctgcatttctcggctgggcgcggtggctcacgcctgtaatcccagcactctgggaggccgagacgggcggatcacttgaggtcaggagttcgagaccagcctaacacggtgaaaccccgtctctactaaaaatacaaaaattagctgggcgtggtggcaggcgcccgtaatcccagctacttgggaggctgaggcaggagaatagctggaacctgggaggcggaggttgctgtgagccgagatcgcgccattgcactccagcctgggcggcagagcgagactccgtctcggaaaggtttcaaaaaaaaaggaaaggtttctctgggcacggtgcaaggccgacaggagaagggcccctgtgcctgcgcagggcagaccagttaacacactgcaactgcccaggcaggaagcgagaggggcctgaactcaagggtgagcgcaggaggtggaaagtacatgcaccggggtgctactgagccagcaggatccacggggcggactggtggacgcgggcagccgggtccaggttgagcatgaccccgggctttcaactcgtgcgggcccgccccgagcgctctccggcttcttcccagccctctccttgccgcccctccccgatcttcccacccaacgcctccctccttctccctccgaccgctgcccagcccagcccccgtgcctgactgcctggcccgccctcttccgccacgcgacgccccttctgggtccaggacccggtctctcctcccttcctaaggccccggcagggccgccacccctcgggggcctgacgagccggcgcggtccagcccaggcccgccctctcagcccctcagcctccggagcagacgctagccgcaacgctcggcccggcctctcttccctgcgtctttcgggccgggcccctctccaccgcctgccgcgccccgacccccagggcgcccctcactcaccagggcgcagacctaggcccagctcctgctcccgggtctccgctcggcggctcctccagcctccgcccgccccgccttcttgggaccccgccccgcacaggccgggcccggcttctattgctccgactcgccgtcacgctgaagtctctttcttcaattaggttgcttgtctgtcactcaagaaggggcgggcacagctgccggtagaggggaaaaacgccggccgtccccgcccccctagtggaggcctcttaaagaaacaggacgccattcccctgcgggctacagggtctgaaggaaggtaatttcccagctaacccaagaggcagctttctttttcccccaaacttttttttctttttggtatgcagtcctagagtgaaggaaaaggcttttgctcgctgtgtcaaatcataggttgtgagctctaagcgggcctctggtggcactccgccctgtgcccagcgggcacttaccgcacactcaacagtggggatagctgtggtttggggaactgagtgggaggtgacagtcgtgtcagaggctgtgagcagccgcgctgctcaccaccgagttggagctaattataccggcacccagggctgaccgtgggcgctgagcagaggcagaagggtacaactcagctgtgctgttggaagggatccgtgggaggtggcattcgtcactgcacctgcggatcggaacaaggccgggcaccgcgccaaggactcactcctgctgtctctcttcatgctcacagcagccgtgtgatggagggagcaccgtgatcccttcgctgcagatgaggaaactgaggctcagagagggtccgagatcttacagctggtgaggggcagagcaagatgccaacctatgcctgttggattccaaagtttatactttaatcgtttgtctagcagattcttacaacaatcctgggaggtgtgtattcagctgtccctttgcagataaagaaactgatactcagcaaagagacgatgtagtgactaccacttgtaggccactgcgcagtctgcaaagcagttttacatacgttgtttcatttgatcctcgaaacatcttggaattaaagatgatttttgttagtcctattttacaggtgaataaagtgaggcttggggaggttgaggcttagccatagctaacattgctaaaactctggcaggagttactctttctccttctcactggctggacccagccttgaccttgtgatgatgatgacgacgtgctagggaacagagctacagcacaggaggtgccaaatgctacctgcctacttgggacactcacttcatactcttatgtgaaagcgaaatgatcttctccgttccttttattattaactttgatagcagggagggctgtttgagccaaccctgcactcacacaacactgaggaagaaaggcttaaattttgtaccctgggtgcctcagtttgcttcatcctagtcctggctctgcttaataacacatttatccaaggaatgaatcactcacttgagagctttacaagactgtgtcatttttttttcctgatattgccagtgcaggttctttgattgccagtcttaggaatcaattctggctaactttacccaaaaaagattttattggcaggctagtgtttaactcacagaggtaacaggaagctggagaatcaggcttagaaaaggacagaaagtggagatgctttgagagtttaggcaggcaagtgaatcaattccatgtttttcttccctttcttgaccagagttttctttgatgagtcaaagtccctggagcaagggttcgattggcggagctcaggtaacatgtccacactttagctaaggagggcgggcaacttgatggacagctccaccaagactgcacagaagtgcagagttccagatccctcttcctccacctcagctgctcccagtgggcaactaggttcaggtgccgtgttttcaggctggaatcaaataggaggagtacctgcagctgaatgtcatgattacacaaatgcaattgtgtctggcacgtgggagaggatagtagagattctgagctttgtaacctt

SEQ ID NO: 1561807 - DNA, 4001 bp, Homo sapiens
tcctccttggcaccctcttttctggggccgccttctactctggcctgtatgggggctcaggtgggctctctggagtccaagaagccccttgtggagttggcagctgctctcagctgaaggcaggactggcgcttgtgccaggggattccaagtgtgtaggtgaggagtgcacttacgtgactgtcccggggcacttgggcccccatctacactgccggtattcagcctttacgtagctctccgctccctcctgtaggatgcaggtcacattcctgtgcaccacataggcacagagggccctacaggagaaaatggcacccctggaatatctggctgagcgaggcccacagaggcgcctaccctcccacctccatctgtgggcctcagcaggactccaaactcccatgtctcttctgtctgttctctgtgtccctgggagccaacgcccttggtctggggtccagccccgctgctggtctctgattccagcctccgtgatgggtggcccctgggctaagcactatttggaaccaggagcctgatgtggctgcccctccctgcgtggggaagaggccagcccggattctccctcaagtgccctgccacacccccccatccttcgctgattccaaactccttatcttggcatttaaggcttccgagtccccactcagtgactcctttgagagcaccatgtcttgtccttcctccctgcctggctcccggggaaatccacctctcctcgtagttttgcagcccctgcctttggtcctgttcccttactctcagagcagttcttgtaccacctcctccaggaggctcgctgtgatgtacccaggcccactgagtgtcggtactcttcctcctacaacagctctcaaattcagctagaattcaagttcagccagcaccccaggcagagcctccagcccacttaactgaggccagttcgcaagccactgcccacgaaacaccagaagctgaggcggggaaagcaggctccttgatgagccacaagggctgaggaggtggctgcctggcataagccgaccgctgtggacggctgtgccacagcacaggcccggagccaggagcccgctctggctctgcagcccggccacgctggggctcccatggggttgctggggccaggctgactgcgagagggcagcggccgcccggatgcgcagctctatctcctacctggccgggccaggggagagaagggaggcccggggcgggggagccccgcgtgctcagcgcgcggaccgcctttcctcctctccctccacctggtccgctcgcccggagtctgcacacagcgcagctggaaaatgttacttcgctggaaaggtttccgctggcactgccaggatcccaagccgccgcgccaggccccctcggttcctttttcctcgccagccccgcaacctcccggagcgtagggcgctcgcctgggcaggggctcggccccgggcgccgccccctctgtgcagcggcctcggggtgcccggggcctcgacgccccccgcgggtgcgggcaggtgggagcggcgacgcgcgcgggcccatccctccctcttcccgcccgccgcccgcccgcgcttacttgtgcggccccgggcgcagccgcgggcgccatcccgtcgtgtagagactgtagcgggaggcaccgggcggcgcaggccgcgccaggagcggggtgcccctggcctgcgcccccgagagcagcgccgcgacggcgcacagccagacgagcaggcggcggcggcccatagcggcccccgcgcctctgcccggccccgcgcggtgccccccgccgggtgtccgcctgcagcgccgcgccgcccccgccgctggtcggcccgggtcccgccccgagggtcccggggtccccttcggcccccgagctcgctggcccggccgcctggcgcttcgcggcggctgcgtcccgcggagtggccggcgctgctagcggctggggccgcggaggggaggcgggaggcgggctctttgcggattagcataaacttggggccgcgccgctcgccgccgccagcccctcgccccagctccgagcggacggccgaggagccgcctgcgaacaggaggttccaaagggagcagccccaggtggcaggggcgcaggccgccgcgccctgggaggccccccgagcacaccagccactctgtcgcctgcgggcacggggcgagacgcagagaagcggacccctgaggccagcctgggcgtggactttccaggagtcgtccaccctcaggatacgcttgtcttcagagtccgtgtgaacccgggaactgctctccagggctctggagccgagatggccgtgactgggggcacagcagcaccacctcccccgccacctctttggaatagaccccagatcatccccgtttgctcgctctgcctcctggccccatcattgcccgggaaccttagtttgataactccgctgacctctccccaggcatcccacctcccccttaccccgcaacctctgccacgtagcctggtggcccggttgcacctctggttctctggaggcgcctgtgttgcctctctgtcttaggtatgggttgcaccgagcccgaaaggcctatcaccgccccagcccagccaaaagtgctgtgcttttcgtgcaactgaagctctaagccggctggtcagagaaaatcctcaggtctttctcacaaggcactgccgcggtgaagccaggcgtcgtccacattttgcttgtgaagttgactcttggaacccaagagttgggttttatcgtcgtcctcattcagtatcaccttgctaactctctaacctgcacagagtccttctgattctgtcatcagagcggtactttcctggccttgtctcatccacaccggtggctacagccgtctgtgtctttgccccaggagctgataggtgtacagaactctggggcttgcttggagagacctccctccaaattgaccttgagatatgaattaatgccttttggatagggtgatggttatcaaggatactggaaggggcagctccgaaacccacatctatttcctgcccttagctttagtggcttttgggttctgtggggcggacatctgaccccagctaggcccatcctgctttcccccaggctttggaatcagaacacagaagctgaaggaatccagcttccaggtgtaggttgtgtgagtttctcagggctgtggtaacagccacagactcagtggcttaacacacagaaatgtattcttgcacatttctggaggctaactccaaaatccatgggccagcagggcaatgccccctccagtggctctggggagaagccttccttgcctcttccagccactggtggttcctggcaatctctggcgttctttggtcaaggattctttgtagcagcatcactccagcctctactttccctccgcatatccctcttcaggtgacctttttttctctgtgactgtgatctgtgtcctttcctcttctttctgtttttgttttttgagccagagtctcgctctgtcgcccaggctggagtgcagtggcgcgatctcggctcactgcaagctctgcctcccgggttcacgccattctcctgcctcagcctcccgagtggctgggactacaggcgcccgccataatgcccagctaatttttttgtattttttttttttttttagtagagacgtggtttcaccgtgttagccaggatggtctcgatctcctgatctcgtgatccgtccgcctcggcctcccaaagtgctaggattacaggcgtgagccaccgcgccctgcctttctggttgtgtttttaaatttgagacagggctgggcgcgatggctcatgcctgtaatcccagcactttgggaggccgaggtggggggatcacctgaggtcaggagtttgagaccagcctggccaatatggtgaaaccccatctctactaaaaataaaaaaattagccgggcg

SEQ ID NO: 1561808 - DNA, 4001 bp, Homo sapiens
ttataatcatgttcaccatcccctctccccaaggaacaggtcatctccatgtacctgtgtcccagatctaaacagcaatttcattccactaggttaaggtgtttgcccatggctgagacacctgccggagaggaaatggggtttctgtgggaaccactaacaccacagcgtgaatgtgttgatcaggttctccctgacagactctttgaggaaaacaatgccatctcagtctgttctttaaaggagagacagggtgggatgaggctgtaaggaaggtagcgggtggggactgagggaaggcaggggtaggaagtagggtgcacacaggcaaacagagaggtgtggctcctgctgaggccaccctccagcaggtggaggcaggagtcagagaagagaatctgagggtagagcagtgttgttggtggtaggagctaccctgtcccctggttggctttctagatggggatggcaggtcacctcttggaaatacaggggccatctgatgtggattgatggctgcctaatctgttggccagtttcttcaggttttcagttcaagtacacggaagggtcatgaatgcaaatgcctgccatgcacgctgtatcaaaaaatgaagcacattagaaacttccactcatcctcctggtgggtttcagtaggtttttctctccttggcaaaaaccggtgcgtgaaccgcccgtcaacaccacctgctgtttcctttacacaggaggcggtgggaggggaggcgcttccagatctcctgacacaaagggctgcccacctccctggtcctttacccgaaccttcaggaggcagacgacacacacactagccagccactctctccaaggcaaggggagggggacaaaaagcaattttgagatttgtacagtgcttgccaggtccttcaaaaatgactaccggccgcccatggctcttgcacagcgggtgggaggaagagtccttgtaatccacctctcccaaggaactcctgcgcgaggtttcagattccccgcctgcaggctatggctgacttccccgtatcctgtgtgacgtgggatgtgtggcttcgcgcaggtaaggctggaatacaggtgcctggagggacacccagagctgcccaggcacttcccggcggctgcttcctttgcactttgcacttacaggtgcacttataataaaaacaccctcccttccacgctcccctgggccctcccatctctccttcctcttccacgctctcctggctgttgaatgttttccactgaaggagtctagtctgtccacctagggggctctccctccctcggtccagggcattcgcggctcacaggtcagctcgggcagaaccgccctgaccacctatgagctcctcgggacaccaccccaatgccagggtgaatcgtccttacaccctcagtcctgtccgagcggcctgatcctacctgtttcccagaaactgctacgcgaagcttccccgccgggctcatccagggcggaggggtctgtccctgacgcagactgggggcgggtccgcaaaagcgggctgaatgaatgaacgcagcagggctggggccccctggggctacaggcccctgctatttggcccgccctgtggcccaaaacactggacttgccccccaccggtcagcggagcccagacatccagggagccctaatggagcctggacaggaaggcagcaggaggtgggacccggggtgcgagtgaccccgaggccgtcctccggagcgcagcgcgcccgcgtgggggaggcccgcctacagtcggtgatccccggccgcccccgccagcgccccggcccgccgcttaccatgcaccgcgcgctccgccacacccacggagacgagtgcccttttccggggagcaggcggcagccggtcttttgggctcccccgccccggccggcgccaccccggcctccacccgcgggatacgaccccacgattccctagggcctgggctccgccccatgcacgtggcgtcacaggctgggcgggggggcgcacccagccgcgcatgcgcaggcgggagaggaggtgggggtcgggggacccagttgcgcaggcgcgggcggagtatgggtgctcagctgcgtaggcgcgatggccttcttttctttctgcaggtggccttgcggttttctccagtccacagccgggctggcgtcggcccagagaggggggctcggcagtctggttccccgagcgtctcatggcgggccctcgccagattcaaggggttcccttggccagtttccttacggcgcggcggagctggccctcgtcgtccctggtagggggcagcctcacagcctggaccggcctgtgcaatttcccccatccctccacgtctacattttatttttttctttttctttttttaggacaatgcatgatggaaatgcagccacatcatagcaggcaggttcatgaaatctgccctcctcccaccgtttcttgaccccattttcttatttttttttttaacaggttctcacccaggctggagtgcagtgatgtggtctcagctcactgcaacctctgcctcccgggttcaagcgattctgttgcctcagcttcctgagtagctgggattacaggtgtgcgccaccacgcctggctaatttttgtacctttagtagtgacgaggtttcgccctgttggtcaggctggtctcgaactcctgacctaaggtgatccgcctgcctcggcctcccaaagtgctgggtctataggcataagccaccacacccggcccttgaccccattttctgtcttcctagaaatcaccaaggttgcaactcctgactgtcctggctcacaggctccagcttacttaaggaccccacggtgggggctgcccacttgcacacctatgctaggcgccctcattcccgcaagggccagagccccttcccggcccatggcgtctggccaaggaggtgtgggtgcgccccagccaggcctggtcctagaggacggccccacctgcgcactggggcatctgggagagctattagtggaagaagcccaggttcctgaagcaccaagtgggcaagagtttattttcaggatgggacgcttttgagggtgaataagtgctagctgtatgggatgcggggacagtacacaggcccggcctggcagccgggcaatgcggtgcctgttggaaggtcgcccacaagcacctggttggacactgccactgagatttggttattacagaggttagcctatgcgggccttcactgatggaccttgaagtgtttcccagttgctttgggttaggaataatgtgactggatcccgtggattgtctttgtgcatgcatgtgggtatatctgtcagaaatattcttagaggtggaattggctatggtgggatatgtcctttaaaataatatattagccaaacgtggctaaattgccccccttagacactgtactaatttacactctggcaaataatgtgtaagactgtgggtttccacacatcttcaccagtggggtctttccaaacttttggatctttcccaatccaataatgacaaaactatatctcatggttttaatttacacttcctagtattttgagatcctgtcgtgaagtggtgatggccctgtttctgcctgctgcacttggcaacatgtgttatcacttcctttcttttcaccactttttactcttagagtttctagaatttgtgaaagtaaaatctttttgctggcatgggcttttgtgtgtattatacactgcttggaaaggtcttgcaccacatcttcccttcgtagattgtttctcaatgtttaatactcagctcaaatgtcacctcctcagaccattttatctagaatggcctcctctagttattctctgtcaccttttatgttatttccttcatagcactcatcacactgtaaccacccaacagcttcttcttgcctgtcgcccagatagagccaatttttcaagatgg

SEQ ID NO: 1561809 - DNA, 4001 bp, Homo sapiens
gctgcttttggcagggaaacatttttaagaattgcagaaatctgctgctggcccccaatcctatcacccatccaccttccttccttttacactcccagctccctccctttgcactccaaatcctgtgtcctgtatcttggcaagccaagcagcaaagggggatgtgacgttacggggaagaactggaactaatggaagaattcttgcacttggatatccttctctctgaacaatttcttcctcctataagactctacttctctctacccttgtatcacagtcaaaatccaacctacctacatttcagtaccggtatctgaaacccacaaagccacagactaaattcccaaacttccttttcacgcagtttttcaaaaatggcgtggcccggtacagaatgtttctcttctattccatttggcagcaaaatgccacttctctgcaaacccacatgcacagactaatatacaaacaactacacatacataaaaacaaatataccagaacctataaaaacacacacacatatacatcaagagatacattttcactgttcactatacacccaaatgtacaagaagtacacagggaggacacatgcacacagactacagatctagaaatgcctgtatgcaccagtacttggagaaaggggtatggacatacccagagacatctctttcaaagtagagaggtctcctgaggagggattccctggagtgaggagctggccctttaagagagtggttctccctcctagtccttttcagggcacctgagcttctacccacctaccttcccacccacccagagccctgcacgggtgagactggcacaggctaggtctggtggggggctggggggaggccggaggggacatgtcccctggccacaacaggaaatgaatccctgaaccggctggtcaccagcctggaaactgctgttgctaccaccaccaccccgcacccacacccacatccacacacgcgcgcgcacgcatacacatacacacacacacacacgcacgcacgcacgcacacgggcttcaagcaggacacgccctcctctccagctcaggtcagaacgcgggctctgctgtcagcccagttcccccgacccccggggtgtggccgcccacctgccagcagggagtctctgcccgacggggaagggacacccccgccgccgccacccaccgcccaggccaggtgcccagctcccagcggcggcggcgcctggaccgccgcccccaccgcttcctcccggcagtgcgaagacaaagccgcgcacacgcacacgggggctacgcgggagcacacccgcactcacacgcgcacacacgggagttacactggcgcgcacacagcgacgcgcgcgcacacacacacccacacccgccacaggctgcagccacaagcgaagccactggcacacgccctcacccagaggtgtacacactgctacacattcggacacaccctctcacagatacattcaccgacagacacacgcagacacacgcaccctcacccagatacgcacgcaccactcgcgaagacacgcaaggcacacaccctcacacacgcacacacagatgcacacccggcgcacacacgcacgcgcgcgcacaccgagcagccgctcgcacggatccacgggcacacgcgcgctcacacctaacacacacccagagactggagccccgacacacaaacccgcgacagtccccacacacacgaaccgaagcccgcggctcctggagccggcccgccggcctgtcagtgcccaaagatcgggaatcgagcccgccgccctcggcggccaccccacacgcacacgcgggacccgacgcggcggggtccccgggacgcggagggggacggcgggtgcggctaacctggcggcggcggcgcggcttccgggagctgtctggctcgcggtcctggtgtccggcggctgccccggcgggctccgaggcgcgctagagctgcgcagaaatgccccgctctctcgcgcgctcgctcctgctctccctcccacggcgctcagccccctcctcgcccgccccccacaccccctctcgccgctccgccccgccccggccggctcccccggaggaggcggcggcgatcccggccccccaagcagcagcgggcgggcgaacgagcaagcagcggcggcgagcagccaacaccaggggagcgccggagccgccggagccgccggagctggggccgcgcgccggtcccggggaggggagcagaggaaggggctgagccccgcgaaccctcccggcgctggggacccgccgccggcttccccacgtgggcccggcgtcaacctgagctgcggcgggctcagaggccgggcgaagaagaggagcagaccccacccggggcccccacgtcctcccgggttcccgccagcgccgacctcgattttccctagcttagacttctcggctctgtgcccggtgccccggggtaaccccgcggccccgcgcccagctcgccgacctcgtctacctccagccaggacctggcccacgcccacccttttccacgccgcgctcccattgttcccgcggccagggctcgcggaggatagcccagtgcgttccagcccctcgcaggtggcaacctctggactctctggggactctccaagggctgagtccctggctctgggatcccgacgcccaccctccacaagcccaaacacccccaaagtaatgggcttttctaaattagggttataaccaccacggcccgtataggcgctcctttaggtccttcttggagtacacactgaggctaggagagaggaggaactaacccgtgttcagcgagcccaagatagcatctgaaagaagatggggcagggatgaagtgtctgccttctatagataaagaaaggaattcctgccctagggctcctggggcagggccaggccctccagaagtgcccggaataatgagcctgagcctcctttgttagatgctaaaggaagaaacagggaagatgcaaatgtcattcacttgccagggttttactggaagtcaagacatgcaaaggcctgctaagtagctttcacctacttgtctcacttaagtggcagctgggattatccccattttgcagatcaggagcctatcctaggtctcccctccaggcagcacagagccaagatgaagcccaacaattctggttcttcactgtggtccatgcctcaggtataggatactaagagcaggtgcaaagtgagcagctgagaacataagaaagcaggaaggagaggcagggcttgggcctccaaggacttacacaaactaagggagggcaaaactaaggaactgaggccccaaagcaggactgaacatggcttgtccaggaaggaagattatgattaacaataagaactgataataactcaccggttaggaacacttactatatttattgttctaagatctttatttgcattaattcgtttaattctcacaataacattagaggttattcttattcccacattatgcatgctgaaacagaaacacaaagacatcacatagcttctaaagtggcagagctaggatccaaacttgggaagctgactcccaagcttccgttttttttttttttctttttgagagagactttcactctgtcacccaggctgtagtgcagtggtacgatcttggctcactgcaacctccacctcctgggttcaagtgattctcctgcctcagcctcctgagtagctgggattacaggtgtatgccaccacatccagctaatttttgtatttttagtacagacagggtttcaccatgttggccaggctggtctcaaactcttggactcaagtgatccgcctgcctcggcctcccaaagcactgggattacaggtgtgtgccaccgtgcccagccccaagcttccacttttaacaaccacaaaacagacagaagaggcagccttgaatgggaagcaaagacatttg

SEQ ID NO: 1561810 - DNA, 4001 bp, Homo sapiens
aggtgcccagctcccagcggcggcggcgcctggaccgccgcccccaccgcttcctcccggcagtgcgaagacaaagccgcgcacacgcacacgggggctacgcgggagcacacccgcactcacacgcgcacacacgggagttacactggcgcgcacacagcgacgcgcgcgcacacacacacccacacccgccacaggctgcagccacaagcgaagccactggcacacgccctcacccagaggtgtacacactgctacacattcggacacaccctctcacagatacattcaccgacagacacacgcagacacacgcaccctcacccagatacgcacgcaccactcgcgaagacacgcaaggcacacaccctcacacacgcacacacagatgcacacccggcgcacacacgcacgcgcgcgcacaccgagcagccgctcgcacggatccacgggcacacgcgcgctcacacctaacacacacccagagactggagccccgacacacaaacccgcgacagtccccacacacacgaaccgaagcccgcggctcctggagccggcccgccggcctgtcagtgcccaaagatcgggaatcgagcccgccgccctcggcggccaccccacacgcacacgcgggacccgacgcggcggggtccccgggacgcggagggggacggcgggtgcggctaacctggcggcggcggcgcggcttccgggagctgtctggctcgcggtcctggtgtccggcggctgccccggcgggctccgaggcgcgctagagctgcgcagaaatgccccgctctctcgcgcgctcgctcctgctctccctcccacggcgctcagccccctcctcgcccgccccccacaccccctctcgccgctccgccccgccccggccggctcccccggaggaggcggcggcgatcccggccccccaagcagcagcgggcgggcgaacgagcaagcagcggcggcgagcagccaacaccaggggagcgccggagccgccggagccgccggagctggggccgcgcgccggtcccggggaggggagcagaggaaggggctgagccccgcgaaccctcccggcgctggggacccgccgccggcttccccacgtgggcccggcgtcaacctgagctgcggcgggctcagaggccgggcgaagaagaggagcagaccccacccggggcccccacgtcctcccgggttcccgccagcgccgacctcgattttccctagcttagacttctcggctctgtgcccggtgccccggggtaaccccgcggccccgcgcccagctcgccgacctcgtctacctccagccaggacctggcccacgcccacccttttccacgccgcgctcccattgttcccgcggccagggctcgcggaggatagcccagtgcgttccagcccctcgcaggtggcaacctctggactctctggggactctccaagggctgagtccctggctctgggatcccgacgcccaccctccacaagcccaaacacccccaaagtaatgggcttttctaaattagggttataaccaccacggcccgtataggcgctcctttaggtccttcttggagtacacactgaggctaggagagaggaggaactaacccgtgttcagcgagcccaagatagcatctgaaagaagatggggcagggatgaagtgtctgccttctatagataaagaaaggaattcctgccctagggctcctggggcagggccaggccctccagaagtgcccggaataatgagcctgagcctcctttgttagatgctaaaggaagaaacagggaagatgcaaatgtcattcacttgccagggttttactggaagtcaagacatgcaaaggcctgctaagtagctttcacctacttgtctcacttaagtggcagctgggattatccccattttgcagatcaggagcctatcctaggtctcccctccaggcagcacagagccaagatgaagcccaacaattctggttcttcactgtggtccatgcctcaggtataggatactaagagcaggtgcaaagtgagcagctgagaacataagaaagcaggaaggagaggcagggcttgggcctccaaggacttacacaaactaagggagggcaaaactaaggaactgaggccccaaagcaggactgaacatggcttgtccaggaaggaagattatgattaacaataagaactgataataactcaccggttaggaacacttactatatttattgttctaagatctttatttgcattaattcgtttaattctcacaataacattagaggttattcttattcccacattatgcatgctgaaacagaaacacaaagacatcacatagcttctaaagtggcagagctaggatccaaacttgggaagctgactcccaagcttccgttttttttttttttctttttgagagagactttcactctgtcacccaggctgtagtgcagtggtacgatcttggctcactgcaacctccacctcctgggttcaagtgattctcctgcctcagcctcctgagtagctgggattacaggtgtatgccaccacatccagctaatttttgtatttttagtacagacagggtttcaccatgttggccaggctggtctcaaactcttggactcaagtgatccgcctgcctcggcctcccaaagcactgggattacaggtgtgtgccaccgtgcccagccccaagcttccacttttaacaaccacaaaacagacagaagaggcagccttgaatgggaagcaaagacatttgaactactagagcacccaactcagcaggactcttttttttttttaattgatgtcttctgacttccttgtaggtacctggtacccagcacagcacctaggatataggcctaatttgttaaatgactgcacaactgccgcatgggactggagagcagggtgtcacatagagggctcgattgcaagcctctctgttctgctgggtatttttatcagttggttttagatgaagcagaggaaggtatgaaacgttgatcaaatctactgttgtcatgaggttgggagggaaaatgaagactccggaaaccagaatcagtttcttaaagctctcagcagttttggaggctgagctggaactctcaagatgacgtgcctcagattgtaagtataaactcctgctcttaggtccaaaccagagcagtcccacagaactttccatgatgatggaaatgtcctgaatctttgctgtctgatacagtggctactagccctctgtggctattgagcacttgaagcgtggctagtccaactgaggaaatgcaaaataataattgtatttaattttaagtactttaaatttgaatggccacaatggctgccatattggacagtgcccttccaaatgagcaagtgccccaaatacagtgtagaaagaatctcaatcaacagtaattacagtgaaagtgacttaaaggttttagttgacctcaagctcaacaatgcaacgtgctgccaaaaagaaagaaaggaagggagaaaaggagtaaagaagagagagagggagggagggagggaggagggaacaaagagaaggaggaaggagaaagcgaagaaaggaaggaggagaaagtgaatatgaatattctatcaacggaaaccagagttgaggccaggcgcagtgtctcatgcctgtaatccaagcactttgggaggccgaggcaggcgggcagatcacctgaggtcaggagtttgagatcagcatggccaacatggtgaaaccctgtctctactaaaaatacaaaattgaccgggcacagtggctcacacctgtaatcccagcactttgggaggccgaggcaggcggatcacgaggtcaggacttcgagaccaatctggccaatatggtgaatccctgtctctactaaagatacaaaaaaaaaaaaaaaaaaaatagccagttgtggtggcacgtgcctttaatcccagctac

SEQ ID NO: 1561811 - DNA, 4001 bp, Homo sapiens
gccctttctctcagccctgacctctcctgctcacctactgagggcaagggctgggaggccaacataacacccctcctaagggatcaggtagcctcaggctccaggctacaatgcctagcccttggcagagtcctgtctatagcacaaccaccgcagcagggaagccagcacctgagctgcaagagccccagaacaagaggtggaagacctgggtacattaatgctgactcccccgctcagctgctttgtgaccttggccaagtcactcttactctctaggccccgttcaacctttcaatatcgactgagtgaggactacctgaccaagcattgttttcatgcaggattctatggaagaagctcttcaagaagctcacagggctgagcccaggaggactgtcacatagcccaggaagggctttaataggaacaatgccctctgcactgatctcctccaggactgccttgaggtgcccctgaaatcccagggactgtgctctgcatgccataaatactatgcctgggttgccaggcaggcatgacctcaggctggccaggagaagccagctccatccttgcacagagctggcagagccttcctgggccacggtggctcataggggaggctggcacaggctgcctctgccgcaggctccatctggaggaatgggtgggcagagaggcacacagctgcctctattctccacacccttgcccgggacaggaggcactgtcttccaagagctgcggagggcaccatccaggccccagatcttgacctggctcaagtgccactgattctggaaggctcctaatgctgagggtggggggatggggtgggaatgaagccaagccgctggaccccgcacagccctggagaggtcctaaatctggccgtctcacattcccacctttgggtgcagaggaggtgctatgcggatccagaagtgaatgtgggaacacgtggtgctctctcccccaccaatgcatcctcagagctccgagggaaaagcaacgacgatggctggcagctgagggagagaccagcatccccagaactcccttttggtccttgtccagacttcaaggtctccatggaccactttgagccatatacgtctgccagtcagtggcctctgcacccagtaagtaccccaatggctgtagacattggccccccatgcccatccctgagaccccagcctctcgggcccttggacctccccaagtgtgaaggtgccagacacaagtgggacacacaagccctctccctctgatcaggggacggtcactggccaggacaatgccaggccagaactgcagaagtcctagggctaagatccctcctagcagctctgaggtacttggaagggagacggaaggggaggcaagcccagagcggggaagggtccgtaaccagagtgaggagagatgagggcaagggctcgccagcatcccaggctccagccaagaactcctcctgcagcgtcagaagcagcagaaatccaaagagcccttggcctctggaggcggcagcaggagtgctctccgaaaagagactgggccagccggtgggagcccagcgcccacccaccgctcatcctacagcaggaccaaccccccgccaacccccagcctccggatcctctctccaggccttggaggaggctgcagaccggtaggtagggaggaacagcgagaccctcccccacactggccaggggaccaacagcctgaaaactcagttctcggcctcgcccccgttcctccccagggctggaggctgggcctagatgttgcaagcccccggccccgagagccacctgattcccccatgtgcctacctgggcccggggttccccatgtcgggcaggttgggcgaggggcggccccctcggctcctctggcaggcaggccgcggggcggggcggcgcggggtcgcggcgggctctgcggagcagcctgttcggcgacacccccgcccgctgatggatgccgactgcagcagcggcggcggcggcggcggctcggcgtgcgccaggggctgggcacggtgcccacagccccgggcctggcgcccgacgcgcggccagcccccgcccccgccccggcctcggagcccagcccaggggcggccgccgcttgcgcctgcctcccagcgcgccgcggccctgcccctgcctccgcctcctctctgcctgtctcctctaccacccacctccccccgcgccccgccctctctctcaggctcccaggccacctcctcccggtccgtgccacacgggcagttcccagaccactgcgggactgtgcagctggggggcctctcgagcgccccggctgcccccaccctggtcctagccagccccgggcctccttgctctcgccaagccctcttgggggctcatcagcgagaaagggagggggaggagagaagagggggatgcatgcctgactcagaaggggtgactcagcctcagtgggcctcccatcccaccggagccggatcccctcaccacccctgcagcacagcgacagggcagaacccgcctaggactcggcgtcctcccccaccgggaggaggtattacaactgtctcctgggaatcctctgtgcctctgagtgtgtccagagggtgtctatgtgtacatttgtccacatgcgccttggtgacaatgacagtaagtgtaacagtgagagcccagggacctattggggatggggcctgtgtacaggcgcacttgctgtatgtgtctgagcacaggctgagtgtgcacctgagctccaggaaagggcaggggctggccaagcagcttgtggcagagatcatggctcaaaaccaaggtaagccatgctcctcccctccaggagcactgttacccactaaaaaaaccagtccaaccactgcagcacctccatctcacacaatccgaaggtggggacctcaagccacagaggactctgggagggagagggcctgggttccagtccaggtctgccactggctcagcaagtacccttgggcaagttgttccatgctctgggcctcatttgcaaatgacgaaagggctggacgttcctatctctagggtccctagttcatggcgaaggcatagagagaatggtgggtaaccgcagcatgatctccaaagatttctgtccatgggtccactgcaacccatatgaccgcgaacccccagtcaccaccctcacctccaggcatacacaactattcattcattcttcacatcattcctaagtacctaccatgtgctggccatagttcttaccacagaatccactgccctgggaagcacagaggccccaagctgggaagcagcctcgatgtgagctgagccctccatccttccctgatgcgattccctcagtatcagcctcaccagtgggctctccatctctgcttgtcacacactatagagccaggcacctccctcccccaactcctccctcccagtgtgctgctccatcatggtgaccttctaccctgggtcctcataggcactctagggcctccaaagaatgaggctatgccctctcctcagcaccctttagagaactcaagatacaattgcgtccctttgtaccatgcccaaagcaagccttctcttctccaacttaaacctccttcatcaggtgtctttagacaaagcttccggtgccttcactccccctgctcaccaggttcagcagcggatgaagagcagagagcagaatgaagccagcttctcccagtcctagagaacaggcccaccctccagacagaaggtgggaagacagacaaatctgcccaggccgactgacagaaggacgagtgtcctgcttggcagccttctgtacaaatcctgtcctttgcctttggacttctcatccccaggcctttcaaattcactttttcccaggagctcccaagggagtctcacacaggcccctggggccgtggccttgggcaagtcactttgccacacaaggtgctctgtttg

SEQ ID NO: 1561812 - DNA, 4001 bp, Homo sapiens
ctgagtctcagacattacctgataggataaggtcattcctaatggcacacaccatatttggcacagtaatgaatctaaatcgcaggtctcccaagtccagcagttttgccagagaccagccctcagcgatcagggcacaaagccagtccaggaaggcagaaggtgaggacagggggaggaggggttggttattctgcagctctgaatattaccttgtttgagatctaaacatttttttccgcagctgaagacacaacacttcttgttgtcctggcattgtctgtcctttgtacacacatccctttcttggaattcacattcttctctgattttgggacatctccctagggaaagagcggttttacacccgtgtgccttagagagcatagtgtctccccactttgccagacacaaggcaattctagagagtcagggaagtttgctttcagtttgcttgcccccaggagttcttttcctcagggcagcctcactcatttccctactgcctacacccccaccactccccagtgacctctcctccctctattcccaccccccagctccatcccatctaaggcagaatttctcaaccactggtgatatttgggctggataattctttgtttggggggctgaactggggattgtaggatgtttagcagcatcccaggcctcttcccatcagaatccagtagcacccctgattgtaacaactgaaaatgtctccaggcactgcaaaggtcccctggaaggcaaaatcacaccattgtgggccactgatgtaagccaatgcggtctttttggccttgttgaggaatccatgtttggaagttcctctaggtggtagtattatacagcaattagtatcacttaccccggagccagtttagattttgaattctgacttggtctgaattctgaccctctctgaaccttggtttcatcatctgtaaaatcattttgcccttacggattttgtgagaaaacaatgagacaaagtatataaagccctaatcaaagtaactgatgcacagtcatattatctaacatttgctaagtatttaccataagccgagcactcttctaagcattttaaatgtatgatctcatttaatctttataattgctctatgaaggaagttctattaatatccccattttacacatgcggaaactgagacccatgaaatttaagtaacttgcccaagattacagggctaccaagatttgaacccactaagtctgattccagatccctctgttgttttagaaatcccttttcagaaatccttacttcctgagtgttcagcaaatgataccaatgatcattgttacattatagtcatggaattaatattccacaactaatgtgtcttaagtttaaagagacttctggatgctgtcctttatctcaaagttagggaacccctagggatacagggacactttatgggactacatttgaaagaaccaagagtggatagagatgatgcctcaaggaaggggcctgttttgcttgtggggtaaggagaaggtcccttggtttcccggattcctgtagcgactcccctgaaagctagatcctgtgactctcctccacctgcttgataaagaccctccacttcaaaggagctgaaagtggggattgcctaagttggggttactgcattcccagaaggaatcttacacaggagggatcttacaaatatctctctcctctcccaacccgggacctgggctaagatggtggaaagcaacccacatctgaagagttcttccctgttccttcctcccagcaaactcccctctctctagggtaagggctgaggccaatacttactgggaaataaccaatcagtcagaccaggtccctggacattcgctaagaggacgaatagcaccaggaggctcaaaagtccagaagatcccatgttgaagagaggccagcctttctggtggttcccgaatttggaatgctcagctgctgcaccttggatataagaactggagacaagccagccaccccctttcttgctgggaacactaagttcccaaggtcacaaatgggactaactggcacccacagctcacagcttgggaggaagggtctcttattgaatggatcttgatccttacacccctaggctgcactgggctgggggctctagtcaaccacagggagtgggcaaagcgtgtctcccactttccaggctaccttcagagtgaatgccaccatcttgggtcttcatcttgataacttggagagtggtggaatgtcctcattcttcattcattttccatcgtacgtgcacacttactagcacactccttctgcttgtctctgacaatgtgtctctgtcggtctcttggtatctcattgtttatctgtgcctctctgtgcctaagtctactgtttctctttccccatggtctctgtgttcctttctccctctcccacagtttcctcccatccttctgtcttttattgtatctttggttcactcatattcgttgactaaggccaaagaatacagatttgccacagagcagggtgtaggggaggaatcaggctgatagcagagtcttcagagaatgtttctcaaagttttgttgctctgagagcaagagaggatatcagagcttagagggagcctttatcatcactgccagctccttgatgtctgaggaactatgaagtgaagggacttgcctgggagactgcagtggaataaagttcagtaacacagcagactttggggattctaactgggctgctagaggagctgtgggaaagaggtgctggggaacttggacagctttcctttcctacagccatggaatctacactggccactcagccagtcctgggaagaagagagacactctttacagagtaaatgttatcccgagggctcccgttttcttctctaactaggagttacccttttgggccaagtttgttctccaaattttcctacatgacagacagaggccagacaaagacagccttattatcagagagtgactatatggtcacaaaatttaggatcacagacagccgccgtaagaatcccatgccaccaacttgacaatctcacttgaagagactaccgaatcaaatttttcttttcttttttcttcttttcttttcttctcttttcctttcctttcctttcctttcctcttctcttctcttctcctttcctttcctttcctttcctttcttttcttttcttttcttttttttctttaaaaacattcttgctctgtcatccaggctggagtgcagtggcacaatctcggctcactgcaatctccaccttcccggttcaagcaattcgtgcctcgacctcccaagtagctgggattacaggcatgcaccaccatgcacagctaatttttgtatatttagtagagatgacgtatcgcccttggccaggctggtctccacctcctggcctcaagcaatttgcccacctaagcctcccaaagtgttgggattacaggcatgagccaccgtgcctggctagaatttctaatgaatgagtaagacgtcgtaagcagtgctgtttcactcatttcatttcccatattctcacaaactcagcccaggagagagtgaaaactggaatatctaagtggaagggctctgagggaccatcaagccctatttctcaatttatagatgggaatcataaggcccagagaagtgaggatgctgactaaatgtcacccagcaagtgagtgtcagaaataagattaagagggagctgagcacacaagttcttgccagaggacaccagggcatgttttgatgttggtgtggatataatattttcttgtagagttgaaggtagagaggaagggtgagtctaaaggaatgaagtaatgtctttagtggagacagaggctgaacacccacaaagtgaaagtcagtaaatttctttttttttttttgaaacggagtctcactctgtcacccaggctggagtgcagtggcg

SEQ ID NO: 1561813 - DNA, 4001 bp, Homo sapiens; identical to SEQ ID NO: 1561812

SEQ ID NO: 1561814 - DNA, 4001 bp, Homo sapiens
atagatagatagatagtagattcttcagtgccccatcaatccttagatgactgcaacctcgtgagataccctaatcccgaatcacccaaacaagccactcctaaattcctgacccagggaaactgaaaaaacacatttttattgtatcaaactactaacttttggagtactttgttacacagcagtggatatccaatagccactcctccctcccaccaaaaaaaccttctcctccagtcatctccatctcaagtcattcatttgctcaggctgaaagcgttggaatcaacaaccatgactttgctctcctccactccacatccagtcctatagcaaattatgttggttccactggtgtcctgcattaatctgctgaaacaacgaatgataaaactccccaccagagtaatctctaaggtgttagaaatcccagctttgaggacagtttgctgtggtgggaaactgagttaacgaagggaattgggaagccaccaagataaaggaaaggaaggtaaaagtgggtacccactctgtaccaggcattttacacatatgacttcatttgatcttacaattccatgtggttggtactactgttttattaccactttctagctgaagctcacagactgcaggagacaaagctagatgtgaacccaggcaatctgacttgagaacctaaattctcattaaaccacctgcattccaaaggggaagagcattaagggctgaattaagccaatgggctgggaaagcaaacactcaaagaagcctgggtccatctagacagttctaccaaggcaagagcacataagacctatcttcaaacctctggtattcaaactaccatctgcaggtattgaggacctctgagaataatagccaggtagattacctgactcgatatgtatagaggattttagctcactctgactcttactagctgggggaccctaggcaagtcacttgacttctctagctcttagttgtttaatgtatcactatgcctgccacagttcacttgctagcagataggcttgggtacatccagctttgggatctgagacccggccccctcccctggttaccatgccgctcagcctctgagctcacggggatgccatctttatctagtcgttgcttgaacaggttgtgttccacatccagctgctgttctccggccacatccatggcatcaatactcagatctggaagcaggaaaatcaggctaaggtactgggaccctagggacaaggggatgtgggttttggaggggaaggggatactgggcctgtcttggggcagaacgggatgaggagaaggaggttgtcctggggtccagtccagaacctaagggtggaggtgtgaatctggcagcccacatgagaaccctgggtctctccagtcccacccatggtgaggtactcacaggcacaaggcatgtgcggaaaaagtacatcgatgttgatcttcagtttatctccccgcgacttgtccacgtagagctcaggatgcacctggggcagcgctacctcagtaagacttagccccaaacctctccttccccactcccacccctaaaggtcctactcctagaatgccaagccccgcccacgcactaagccccgccccttacctccgtggtgaggtaatactgcagctcggacaggaacagtagcagcatgagaaggccactgacaatggtcactgcaggacaaggggcgagggtcagaatggcctcgaatccgctccctcagacaccggcaggccagtcagagtccaggagcccgggctaagctctaggacgcccccctccacgcgaccccggccccgctgcggcctaccggtggcgcccccgcaggtcttgacccggaagtcctccaaagtcttggggtaggcatcgaactgcttcagcttccccagcgcctccatggggaccggccggaaaggggacgccagccggcccgcccctacagactccctcttccggcctggagccacgcccccctctttttcctcacgcaggcgcagcaaaccgcacgcttggccccacctttagccgcgttctcttacaggcggccccgcccaacgatgctgccacgcccccttgcgcgggcaattgggtctggaagctactgccccggcctccgctgtccggggcgggattttgaggactggggtgcgaggagttctctgcggggttagaaacgctaatagcaccgttcgtgtgccttgtgctcggaactgcaccaggtgtttaagactcttggaacatcttggaatatcctggaacagtggtttttcgagtgtaccggaccggccgcatcattatcaactgattacctattagaaatgcaaataattgattcccacctactgaagccgaaacgctaggaatggcatcggatgattctgatgtaaagtaagggtgtccgccctgaaagcaggtgtgacttatctccgttttccaaagagcaaactgtgacctggagaagttaaataacttgcccaagatcacagccaattaatagcaggacctgcttccagcccagttcttctggacctcaaagtactctgggaatcagggtcttttgggttgattttacctaaacagcgtcccagtgcttctcctgagcgctgctttctgaatattaccctaaattgctctccaggccctgggatcctcacggacacgctctatccctccaggtttagactcaagtgatatggagcttaagctctccctgacacttcccattgcagcccagtgtctctagagggacagctcccacagtaatgcagctgcaatgagtaagatataaaagctcataggctttcatacaggaattccactttaggaagtaaaagcaccatgtcaaggttaatagaaaaattttgaaaaagaaaaaatatgtaagcagctatccaaggttaacagaaaaaaattttaatataaggataaaagtaccatgatctgggtggttgttacaccttaagatattgaatctgtctcttaaagattttaagtgcaccacatcataaagatgtatgcatgagattgttcaatggcaaaaatctggaaccagccagaatgcccactgatacattaaataaattgaataaatcacgatacacccattctatggaatattaggccacttttcaaaagaatgaggtagatttactcctttaggtatactaagaatgtatttttaagggggaaaagatgcaaagtaatgtgcattccatcattccattttttaattaaaaattgggctgggcacaatggctcacacctgtaatcacagcactttgggagaccgaggaggatcacatgaggccaggagtctaagaccagcctgggcaacacagcaagaccccactctacaaaaactttaaaaactacatctgtaaccctagcacttcaggaggccgagccaggaagcatcacttgagttcaggagtttgagaccagcctggtcaacatggtgaaaccccatctctactaaaaatacaaaaattagccaggcgtggtagtgtgctcctgtaaacccagctacttgtgagtccgaggcaggagaatcgcttgaacctgggaggcggaggttgcagtgagccgagatcatgccattgcattccagcctgggcgacagagtgagattctgtctccaaaaataaaaataaaaataaaaaaattagccaggtgtggtggcatgcgtctatagtctcagctacctgggaggctggggttgagcccaggagagtttgaaactgcagttgttaccaggttacctgcagttgttaccagcatagagttgtccaggttcttggcgtgttgaacaaaacacataaagtaacagaagggcaacgaaagacaaacagcaacagaagaacggaataacaaaagcatagatttattgaagacgattcatagcggcagctggttagagcaagctgctcaagagcctcctcaatcagggtttgtattaagctaaagggac

SEQ ID NO: 1561815 - DNA, 4001 bp, Homo sapiens
cttcaaatcctctgtagtgctatggctaatggggcgccctcttttatccacggcatagttcaacttgaacttcttgtcatgaaacatggctcgaaatctcttgtcaattttgacttttcgatccttttctggcatttcccaaaatctcgggtcctttgcaacccgtctaaaccgctggtcactcattatttcttgtttggatgacatttttaattcttaatctcgaccaaatgcttgaagaaaacaaatactgaaaaataaaacaaatgttttaatggtaataatggttagtacaataattaaatgttttaaaacacattcacaatatattctaagttaatatattctaagttaagtgtacataaaatagaggtaacaagtctaatttcatctctccaacgtattctgggtcacatgcaaaaaagcagaaacataccaaaatatcctctttccatgacagatcatttagagaaataaacttaaggtagacaaagcagaatcccagggctttatggaggggaacaaatgtttattcatccattgctctcacttagaatttctatttgtataccagtatgtgttactaattgaaggcaaatgtagttaagattccctaggccgagtgcggtggctcaccagcactttcggaggccaaggcgggcggatcacttgagcccaggagttcaggaccagcctgggtaacatggtgaatccccacaagaaatacaaaaatgagcccggcatggtggcgcgcgcctgtagtcccagctactttggaggctaaggcaagaggatcacttccacccgggaggtcttggctagagtgagcctaacggcactacagcacaccagctggggcaacagagtgagaccctgtctaccaaaaaaaagtaagaaagaaagattccctagcctccgttggcctcatttgtttcttcacattctggtctcattctgcttactccttatctccggctactgccaacaaacagcctttagttctgtaagactagcattctaactaaacagaccaaaatcaactcaggtttagctaagaaagtttcctttttaaattcgatcatccttcaaaagtaataaaaagtttaaaaataaaaagtaaatttgagtctccaggtaaagtctcacaccagttaataaatatcacttctttctataatatctgattctaccagtgatgaaggcccaagtgagctcattcccccaaaacatactagaacatatacatatgtgtgtataaattaatattgttcccttgtgaaaagtctccaatggtttagcatctctggatgggaattttgcaaagagccaaaagtcgttgattattaagcaacccccccccaaaatgattaaaagggcaatatttcttatttaaaaatcaagtccttttaattacactaactaggaaaaaaaaggaagctatcgctggtgcatttacacatttttcgatgtattacagcacttaactctctgagcaatcttacgaggtaggtaccacctcaaccaggagaagtactgcatgtattgtaaatgtttagaaggaaagcactcattatatgtcagataatccgagagaggggaaggcgaccggacctcactcccgacacgcgcccgcatccccgtagcccaccctccccttctgcccgctctctaattcggagaacacagggctggcccctgaactagggtctcctttccacctcctgtaccgcaggggggcagctaacagactgattcgagaagcgaccctgaaaaggatcgatgaagactgaagaatgagaccgaaaaaggctcaggaggaaggggcaaaacccctcgcagatccgaaagagatcctgttagagactagttttttccccgcgccacacacacacacgccctcaagcccttcatctcgagctcttcaactccagtccatccccactcaccgtccgcagtcctaccaagcctcacgtggggctcacacccacaatcctccgcgtgacgctccgccgtaatggcaagcgaactaggccaaactacttgcacgttccctcgagaagatctttggagtagacacaaaagccgcgctggcgcatgcgcacaaaaagcgccggcaattggggtcgcagctggagatgctgcggccggcagggctctggcgcttatgtcggcgaccttgggcggcgagggtcccagcggagaatcttggccgtagggaagtcacctctggtgtctctccccgcggtagcacctcgcccagaaccctgaatattttcgaccgggatttgaaaaggaaacagaagaactgggcagcccggcagcccgagccgaccaaatttgactacctgaaggaggaggtgagcccgcggggcggcggggcggcggggcgggcgacgcggaggcttgttttcctctccgctagttccggctaggccccgagctcaccccacctagccgtctgaccttgaccagcagccctgcctctttcggcctctactgtaatcacgcaaggcctggcctcggatatttgtaacatgctttcattcattcatgcattcatttcggcaacgtccttgaggctgaaaggaccttatagaggcctccagtgaagctccggagagggagagagtgggagagaaggttaggaggacccaaatcatcagggccttgcaggatagggacttggggttttcttctgtatctgcactgtccagccagtatggtaactgccggccacacatgtggctgttgaacacttgaaaggtgactagtccaattgagatgtgttgtaaaatacacacgagtatagtgacttagtatgaaaaaaggatgtaaaatagctcattaagagcttttatattgattacatgttgcagtgattatttttgatatattgggtcacatgaaatatattaaatataaatttaaatttttcaattaaaatttctctcgtttttactttttttcttatgtggctactagaaaatttgaaattacatatgtggctctcatgatttttggtcagcactgctctaggggaatgtgaagctcttgttttaatcagtggagtgatctgacttatgttttaggaagatcaaattaagatttctgatttgtcttggctcgtttgagaaacctttctccctgcccaggtgagccagagactgagggtttctactttcaggacacgcattctcaagttcaggcctcagtaaatttttattcaggagtggaacaaagttggagtcaagtataatgcaacaaacagttattgaactcatagcttgagcagagctctgtgcaagtacaggtctgatcagatgattgacagggtgtctttctcaggaagtcttaggctggtaatgtctattataggaagtttactaccaataaattttttgtgtctcacttgtaaggcatggtgcacgtactacactgctgatgtcgtgtacttagaagatgtgcgctcatagccctttccctccaaagaaagcacctggactacaacttgattgaggcctcgccaatttgtgagactagaacaaataagataaagtatatgagagttctttttataataaacatagggtgttcatattaggaatgacgtacaaggtggactcctgggaaaaacatctacgctcccttctcccttgcccttctctcaaaaagcaggtacatctgtgtttggaacttttaagtcctaagagcaactctggggtgtttatgagggaatgagtggaatgtggggaatactagactcccacgtctttattgctaccagatgaagctaggccagcaaaaggtggtgcttaccttatgactcttaaattgggatgggattggagcaggggaggtgcactttcctcagatttggctttttctaacttgcgaatgtcactcagaaaagttgttcatttatgagttccacaaaatttgttagtcatcaaataatagagtttttcttaagtgaccacttacatactcatctacaataaacc

SEQ ID NO: 1561816 - DNA, 4001 bp, Homo sapiens
tcttcaccagagagattggaatcagaatctgaaaggtcgtaaaaacgcttcaaatcctctgtagtgctatggctaatggggcgccctcttttatccacggcatagttcaacttgaacttcttgtcatgaaacatggctcgaaatctcttgtcaattttgacttttcgatccttttctggcatttcccaaaatctcgggtcctttgcaacccgtctaaaccgctggtcactcattatttcttgtttggatgacatttttaattcttaatctcgaccaaatgcttgaagaaaacaaatactgaaaaataaaacaaatgttttaatggtaataatggttagtacaataattaaatgttttaaaacacattcacaatatattctaagttaatatattctaagttaagtgtacataaaatagaggtaacaagtctaatttcatctctccaacgtattctgggtcacatgcaaaaaagcagaaacataccaaaatatcctctttccatgacagatcatttagagaaataaacttaaggtagacaaagcagaatcccagggctttatggaggggaacaaatgtttattcatccattgctctcacttagaatttctatttgtataccagtatgtgttactaattgaaggcaaatgtagttaagattccctaggccgagtgcggtggctcaccagcactttcggaggccaaggcgggcggatcacttgagcccaggagttcaggaccagcctgggtaacatggtgaatccccacaagaaatacaaaaatgagcccggcatggtggcgcgcgcctgtagtcccagctactttggaggctaaggcaagaggatcacttccacccgggaggtcttggctagagtgagcctaacggcactacagcacaccagctggggcaacagagtgagaccctgtctaccaaaaaaaagtaagaaagaaagattccctagcctccgttggcctcatttgtttcttcacattctggtctcattctgcttactccttatctccggctactgccaacaaacagcctttagttctgtaagactagcattctaactaaacagaccaaaatcaactcaggtttagctaagaaagtttcctttttaaattcgatcatccttcaaaagtaataaaaagtttaaaaataaaaagtaaatttgagtctccaggtaaagtctcacaccagttaataaatatcacttctttctataatatctgattctaccagtgatgaaggcccaagtgagctcattcccccaaaacatactagaacatatacatatgtgtgtataaattaatattgttcccttgtgaaaagtctccaatggtttagcatctctggatgggaattttgcaaagagccaaaagtcgttgattattaagcaacccccccccaaaatgattaaaagggcaatatttcttatttaaaaatcaagtccttttaattacactaactaggaaaaaaaaggaagctatcgctggtgcatttacacatttttcgatgtattacagcacttaactctctgagcaatcttacgaggtaggtaccacctcaaccaggagaagtactgcatgtattgtaaatgtttagaaggaaagcactcattatatgtcagataatccgagagaggggaaggcgaccggacctcactcccgacacgcgcccgcatccccgtagcccaccctccccttctgcccgctctctaattcggagaacacagggctggcccctgaactagggtctcctttccacctcctgtaccgcaggggggcagctaacagactgattcgagaagcgaccctgaaaaggatcgatgaagactgaagaatgagaccgaaaaaggctcaggaggaaggggcaaaacccctcgcagatccgaaagagatcctgttagagactagttttttccccgcgccacacacacacacgccctcaagcccttcatctcgagctcttcaactccagtccatccccactcaccgtccgcagtcctaccaagcctcacgtggggctcacacccacaatcctccgcgtgacgctccgccgtaatggcaagcgaactaggccaaactacttgcacgttccctcgagaagatctttggagtagacacaaaagccgcgctggcgcatgcgcacaaaaagcgccggcaattggggtcgcagctggagatgctgcggccggcagggctctggcgcttatgtcggcgaccttgggcggcgagggtcccagcggagaatcttggccgtagggaagtcacctctggtgtctctccccgcggtagcacctcgcccagaaccctgaatattttcgaccgggatttgaaaaggaaacagaagaactgggcagcccggcagcccgagccgaccaaatttgactacctgaaggaggaggtgagcccgcggggcggcggggcggcggggcgggcgacgcggaggcttgttttcctctccgctagttccggctaggccccgagctcaccccacctagccgtctgaccttgaccagcagccctgcctctttcggcctctactgtaatcacgcaaggcctggcctcggatatttgtaacatgctttcattcattcatgcattcatttcggcaacgtccttgaggctgaaaggaccttatagaggcctccagtgaagctccggagagggagagagtgggagagaaggttaggaggacccaaatcatcagggccttgcaggatagggacttggggttttcttctgtatctgcactgtccagccagtatggtaactgccggccacacatgtggctgttgaacacttgaaaggtgactagtccaattgagatgtgttgtaaaatacacacgagtatagtgacttagtatgaaaaaaggatgtaaaatagctcattaagagcttttatattgattacatgttgcagtgattatttttgatatattgggtcacatgaaatatattaaatataaatttaaatttttcaattaaaatttctctcgtttttactttttttcttatgtggctactagaaaatttgaaattacatatgtggctctcatgatttttggtcagcactgctctaggggaatgtgaagctcttgttttaatcagtggagtgatctgacttatgttttaggaagatcaaattaagatttctgatttgtcttggctcgtttgagaaacctttctccctgcccaggtgagccagagactgagggtttctactttcaggacacgcattctcaagttcaggcctcagtaaatttttattcaggagtggaacaaagttggagtcaagtataatgcaacaaacagttattgaactcatagcttgagcagagctctgtgcaagtacaggtctgatcagatgattgacagggtgtctttctcaggaagtcttaggctggtaatgtctattataggaagtttactaccaataaattttttgtgtctcacttgtaaggcatggtgcacgtactacactgctgatgtcgtgtacttagaagatgtgcgctcatagccctttccctccaaagaaagcacctggactacaacttgattgaggcctcgccaatttgtgagactagaacaaataagataaagtatatgagagttctttttataataaacatagggtgttcatattaggaatgacgtacaaggtggactcctgggaaaaacatctacgctcccttctcccttgcccttctctcaaaaagcaggtacatctgtgtttggaacttttaagtcctaagagcaactctggggtgtttatgagggaatgagtggaatgtggggaatactagactcccacgtctttattgctaccagatgaagctaggccagcaaaaggtggtgcttaccttatgactcttaaattgggatgggattggagcaggggaggtgcactttcctcagatttggctttttctaacttgcgaatgtcactcagaaaagttgttcatttatgagttccacaaaatttgttagtcatcaaataa

SEQ ID NO: 1561817 - DNA, 4001 bp, Homo sapiens
tatttgttatataaattatagaagaacttacccaagtgtgagagtgtctaaatgcaaagatatgtaaaggatgaaggggcttaaggtgatgaagaaagacaagtggaaaaaatgaacatttatttatcgagtaaaattgtgaaagattctttcacaaagattattttgaaaaagaggttctctcctcccactctttctttgtgtacctctttttttttttgtaagcaggatggttacatgtgtatgttagttgctaacaaatgggtcatagtctggtaaggtgcttactagttctgtatctattatggtcacagacatttcactcaatcaagaaacggctcatgaaattaatagattcggtttgaaatacaattgtccactggttataatttcctttgtaagggatctccctaactcaaacataattcagtgctcaaattcttacatgatgtttgtaaatcatcctcctgcccctccgccctcgctaacagctagattccaatgttcagctcttccactgcacctcgtaattaaaaggtacctcttaccggggtgatttatacctccacgttatattttaaaaagtaattgaagattacatagcatttcggggaaggggaaagaaaagaaaagggtatccataaaaacgcagcatcggtcttgctttttaaaaagaattcagaccgcggcagggtgcacgctgtcaactctcagcctcggcttcggggaagcaggaacctcgcactgcaaaaggcgcttccagttcaacagctgagaaaagcgcactgagtcttttgcgataggagtacgttcaccagtcacgctttcctagtattccttgagcttataaactatttattgctgggggggaggcaggcaggaatatattgaaggagcctgggccagcacggccgtttaacctccagacttcatgactaaaaaacaattccatttcccactttctcccattacaacgaaatccttgccgccttctaaacacccttcggatgtaaacttttctaagtttcaactctacccgcagcaggcgccaggattccctgccccggttcaaagccccagacctgaaccagagcgggccgagcgcaaacggacttttgaaaagaaatatatcaatagctagaaggcaaagtctcagcgggccgttccagccccaagccgggattccagcggttggctctgcttcttggttatcccataaacactacctgagggcttgagtttgcggactgggggagcgccccttatcgcgaaccgccgggaccataatcgaacaaaacgccaaggacccagccgcgtctacaccgcctgcgcgccatgcacttgtcccgcgcgcgggagagcaaacttcagggtcgttgccccaaagcgcatggggaaactggggccccgagcctgggagagcctttccagaggggggctctgctgctgtcccctctgcccttgtgccttcctggccctgggaggcccgtgcgccccagaacgtcccgacagctgcggaggccccgcttggcgagtgccagaaagaggcgcagggcgagggggtcccggtgaacaactccccccgcccggcgaatcccggcgggcggcctggggtgggcgccgctggcggtactcaccgcgcgcagtggagagggcgccccgacgcggtgcgggcgggcgggcgggccggtgcgggtccgacgaggccgggctgactgcggcgggcacgttgctgtctctgccgttgccgctgcctccgcctcctgggctgccgcggctgctgcctgcgccgggaggaccggccccttctcctccctgggccgggccctccctctgcccccgcccgggtccccgcgccgctgcgtgggcgcgtgggggcgccgaggcgcgacgctgggctacgcgggcgcacacacccggcggctggacgcagggcgcggggctctggcccagcacgtgccgccgcgccgcttcctgagcctgcagccgagcagagcgcgctcactctcgccggtcctggaggccagggcccagcctcctccccacccaccgacaccccgcacctcctccctccccggggcagcacatcctccctgcaacccaggcatgacccctgtgaaaggaacgacggctcggagaggacctcaatagtgacactaacattcgttcactcaaccacccattcattcattcaaaatatattgagcatctactgtgccaggtaccactcctgagagactcagctagaacaagacagactagttttctgccctcccggaacttgcattcacatggagaggcaaaccataaacaaataaccaagtaaagaagcaagacagtttcagaaagttagagttacagggagaaaaataatatatgtatctgctgttggggagtggaggagaggcggtaattttagctagagcagtcagggaagacctctctgaggaggtgacatctgaattatgaggaagtgccattggtgtggtatttaggtgagaacggttcaggggtctcccctatgtttcacccattttacagctaaggaaactgaggtctcaagagcttaactggtttagtgaaagtgagaggtatagccccctccacctacatgcccaaatcaaggcaccccacttactccatcctctcatagccaccccccttttagtctccctggcaatgaactgtgttaattggagtctatgcagcctttcctagcccgtcacccactctctaatgtctatgaattccaccgtgggacacccaggatgcttcaatccaaaagcaatatcaaccactgtcatttcttaagtgcagtaaaagacagggcacccaggtgaatttgaatttcagagaaacgaggaatcagttgcagtatatgtcttatgcgattggttgtacgtacttatatttaaaaagtatttcttttgtctccgaaattccaatgtaaccgggggtcctatatttttatttgcaaccttaagctcatccaatgcccaactcttccttatctcatgtaatccccaagagagaccccaaggtagctgctgtcagcacactcatttcacaaatgagcaggtccaagctcaaagaaggcagaaagtggctgagccaggaatgaaattcaggcctggctgactccaaagccgttgctcttgagccgtaacagtcttcaattccagttgtaagtttacaggagctgatgaaggttaagttcttgggcccctgacttgcttggacccctttctaaggggacttagaaaagtgttcagatggtggcttgttgatgtaaagtttacaaaagtcctttgctttggacatttggctgcaggccgtagacaccgctgtctttccactccgattccccacccccaacttgcccttgagtagggtggtgtcaggtggctgctggcattttggaggaaagttgagttgggaattttgtgatgtttgtggtaattttcagcttcttaaaatttgaatttgttgtgatttcttttcttaatttaaagaaataatcattttcttatctaatcttggactcataattttgtactctttttcttgaataggggctgcaaattatacatgtatcaggcctcaccattcccagacccacctctggtcatagcttactccgctttctactccccaaacttcagacagaagcaaatgtattcagtaaacatggttgttctcttctctgggcctgccgcagtaggcttggagatggctctgcttctgtcttctagaggcagaatgtacatatgtacttggccttgattttctcatcactaaagtgaaaataacagtactcatcttatactattattgtgaaaattcatggagctcatgctcataaaacactttctactatgactgcagctggcactagcaattgctcaacaaatattattactgtacacacagcttcacttcccatagtatctttgctaagtgctccaagtcattataaattgagcatcttaatgaccttcaga

SEQ ID NO: 1561818 - DNA, 4001 bp, Homo sapiens
gagtcagccttgctcagggtggccttgcactaacattaggaagggagaagggagtaggctgtggaatgggtgtggatgtggacatctaggcccactgataccaagttgatcttctaggcctaggtctgcacttgaggttgcaaaatggggatgaaggattttgcagtgaggacagaatggaagataacacatgcaaggtcttggggaagggcctggcacgcaggattagaaaggggagggggaggcagatccacagccaagcccacttcctatcctagactgccctctgcccaggcctgagtgcaccatcatgacttcttagctcagcccagagactgaagaaacttactcaatgtcacagagcaactcagggacagggcagtggtttcatgatttataaatatgcatatatatacacatatatacatatatacacacatacatatatatacatatatgtgtgtgtgtatatatgtgtgtgtgtatatatatatatagagagagagagagagagagagagagagagagagagatgggaggactgcacttcatgaaggctgtgtgagttaacctcctgcctgcagaacacacaaatggtccatgaacgttagtttcagtcttgattactgaggttttgggcatccctaaattttgcactggctcaattgcctcagcccctgccttgcatcacagtgggagaagatgatacatttgctaataagtaaaaaaaccaaaacatgcaagaaccagagcagggcttatgaagtcaataaataatatttgttgaaagaataaaagaaagccttgttttctttctgagtcctcggagatcctgtcccccaaagccaggggcaggctccagaggagagaggatatgtaactcccttatgaagagattgaagactctcaaaatgcatgattctgtgtgtcaaggattctaagattgaagccagagggactaggagctaaccactgcattgtctgactgtgacttcgaaaaggggcttaacttcttagaacctccgtttccccacctacaaaaggagactgacaatagcaacctagggggcagggggtgtccccaggagacacagcagggtctggcctaggtcagctgctccacctggggggattccggccccactcccaattccaaagtctctggtgactagtggctttggtttagggactggctctattcccttccccaaactggggatgattcccaagaggccagcagcggctctgggggctggagaatctgctgcccctgcatccagcccagaaatgtcagtcccgtccgatccccaaagagtggtcctctgtccccgtagacagaaaggcgccaaatgagccgagtccaaccccggactgcggagaaggaaagacagacgcccaaagggggtatcccgaggacagtgtggggcgcggggatatgtgatccagccaggggtctacaggtccctgccgataaaacgctgggaaaatgactaccagttgcccgtctgggcctctcaaggcaagtccagatgtgactagactagggggctgcgaggtggggcagaaagacttgaactggattctccgccagagctcgccgggccgggacacttgcctctctgagcctcagagtcctcatctgtgaaatgacacgcaggtacgacgcggggagaaagcagacagcagacgctcggggaacggggcccccagacccggggtcgcacccggacccacccgcgccctcacctggagcccgcgctaggcgtgtcccggctcctctcgcgcaggctttggagaggctgacagctcggacccgggccggtagtggccgctcccaacgacgcccaggaggccccagccccgcgtgggcacctttggggtcccctttggagctgccctccgcggtcgagctgagcgggtggccctcactgtcgaaggcccccaccgcagggaaagtccctggggcgccgtggaaggggaagtgagcacgccgccccccttcacaccagaatggttcgccccggacttcctgattggttcctcgcttccgttcgaacggcgcgccgccagggttgccaggcgaccgcttagcttcccccgcccgaaggagaggcgctgctcagcagctccgcccgctcctcccagccggccccaccttcttcctgccgccgcttcagccccggcgcctggttctttcccttcctcctcctccctcccgcggccagctgggacttcctctaggaccccagctggaagagctccagttagagggccctggctggttcctagtcctgactttgacgctaactccctatgtgacccggtgcaagccccttcctttctctgttctcctaactgcatgatgatgagtgagttaattttaaaatgtgcatacccagcagtcccgaaatttacaaaggaaatgaccaaagatatgagcaaagattaatattgctcagccttattcatcatagcaaaataatggaaacaacttcaatgcctcttgaaagggattggttatataattccatcctgtggaggagctaacttaattgagctttttgcatgccgggtagctttacagaacaagtcttgtcaaggcttatgacataaccctctaaaagtacttttaattattaacactttatttatttctttatctttttcttttctttttttttttttttttttgagatggagtctcactctgtcgcccaggctggagtgcagtggcaggatctcagctcacagcagcctcaatctcctggggtcaagcaatcttcccacctcagcctcccaagtagctgggactacaggtgtgcaccaccacacccggtattttctgtattttttgtagggatggggttttgccatgttgcccagactgatcttaaactcctgagctctagcaattctaccaactcagcctcccaaagtactaggattacaggcatgagccacgccacctagcctaatttttcccactttctgatgaggaatattatgcagccattaaaagtgaagtagctaccaggagcagtggctcacacctgtaatcccagcactttgggaggctgaggcgaccagatcacctgaagtcaggagttcaagaccagcctggccaacgtggtgaaacctcgtctctactaaaaatacaaaaattagccaggcgtggtgccacatgcctgtaatcccagctactcaggaggctgaggcaggagaatagattgaacctgggatgtgggggatgcagtaagctgagatcatgccactgcaccccaacctgggcaagagatcatctcaaaaagataaaaataaaagtgaagtagctagaagatatttaaagatagggggaaatgctaagtattaaacattggtttatttatgttttttagagacagggtctagctctgttgcccagggtggagtgcagtggtgcaatcatagctcactgtaacctaggttgaagcaatcctcacacctcagcctccagagtaactaagactacaggcccgcatcaccatgtcaagctacgggtctcgctatgttgccccaggccagtctagaactcctggcctcaagtgatcctcctgctttggcctcctgaatttctaggattacaggcataagccaatgcacccctcccaaatttttttgaagtacagtatgcttcaaaacactatgtacagcataaatatgtattaaatacatatgtatatgtgtataatcatctataatcacagcagttaatttcttctttgtgtttttgtgaattttccaaatttccaatacttgaacatgtcaaaaaagtatatttttagggggattagaatgaattaactctaagggcctttaaggtgaggaaattttatagcagtcagtctgaattgctcaatttggaaccagcttctctgtttcattccagctggtgtcttttattctttgtttggattgccaataattgagaacttactgcgtaaacccctgggtgggcaggggag

SEQ ID NO: 1561819 - DNA, 4001 bp, Homo sapiens
ggtgccatcctccctataacctcccacaagcctgtgggtcgttgtgcagatggagaaactgagactcagagaagtggctttcccaggtcccagaatagataaataaggcactgatctcaataccacgtcctgtttctccccggcactcctgaccccctcccggcactattccttttctccttatcccctgcacaagtactctatttgtgtatggttgttttactctttgttgtctctatccccctaaaatatcagctccatgagggcaggcgtgtgtgtgtaggggcgggggttggctattttgttcactataccccagtttcaagatactgccctagacacatactagggcagaatattcaataaaaatttattgaactgaaatatttatgggagccagatgtgaactgggtgatcagggatgaactagacatctaggtaccctgcctgctgcaggcatatgggtccaaggtggtaggtgtattgttccaggaagctggaaatccaggagtacataaaaactctagattcttaactgtcagcatattcgataataatgattaaaacattgcatatacagcaaacaaaatatgtctgcgaacatatctgtcccctcctcctccatctggcccccaaccaccagctggagacctctgcagcagccatgagttgggaatagatccttgggtgctgctcccaaggcaggagagatggagtggatgggaaaggaagcctcgctccaccagggccgacccccaggagacctcaggtgggaaggacctgacaggaaaggagcacagcagagccagccaaactctgccccacccccaggccgccacctcccaaaccagtccaacccgtccgcagtggcagttcccttgcgggcaccatccggataaagagggagaaggaggtcagacgggcggggccggggcagaaaccccgtgcacgaccccgatcgggcccccagcccctctggccccatctgctggccctgaggtcccctctggcggggccgggacagatgcgagagccaaccccgggtttggcgccgcgggcccgccggccttcggctcgcccacccgcccgctgtgcgccttgcgcaagcagcttcgcctctttacagactcggttaccttatccgtgaaacgaggttaaaaatagaccttcctgagcctccaggtcacgataaggatggagagatcaaacaggtcgagggctttcctcggcatctggcaaaaaggcggagccacgaaccaggctcctggtcttcaagaagatttcgactaaccaagtccacagaccacccccacgcaggggtctctaagcaagccccacgagggtctgtcccagcccacaccgcggacaaagcaggcccaagacagaggctgatcggtgagctgacctcaacagccccacgtcacgggtgggcaaacggaggtgcagcggctcccgccaggtgaagccagggtcccaagtccccaagcgcgactcaatgtcccctctgaggcctcctctcaccgcccaatgccccacccacggattcaaatgcctcccacggatgcccccaaccgccggcccttctggcttgcatcccgggggcgcgcatccccacctggccccctccccactagctccccagcgtcagcctccagaggccgcggggcagggctggggggaactcagatccccaggctggcttttgctctccctcaattccggaaaagcttgaggactcccggtggcgggggatggggggtcggctagcagggcgctgtgtgacccttgcccctcgccgcccctcctggctctcaaatgagggagagagcggcaccatccccgcggtcctcttgaagccgaaaggtagatccctgccccgttcccgccgtcctggggtggaggggtgctcgggccgccccctaccccggctgggcgccccccgccgcggtccgcacgtacccggctgcgcccgcgccgctggcctgcgctcctccggcccggcccacctggggctccggcaagctgagtttgcgcaacttccggcggccgcgggcaagtgaacccgctggtccaggtactacccgaaaagggtaaggaaagccaggcaggggccagaacccgagccccggccgccggcagctggcctggctcaggaactgggtccgacccgctccaggaccacccagggaagttcttccgggagccgagacccgcccaccgcacacctggcgcgcggggtccccgtggctctggcaggcaagcgcacccaccttagagatggacaaactgagccccgctccctgacactcagaacgaccgccaggtgatgttcactgtgccaggcacgggaaagtgtttttcttggtatcgggtaacccattttaatcttcccaacaatcactatctggtgagttctattgttaccccatttgactaatggtaaactgaggctgagagaggctgagtcactagcccaaaatcactctggggagtccagcctgcgcactttccctccagaccaaggcttaacgccaccactttctagctgtgtgtccctgaccaggctgcgggaccctcctggtgctccatgctgtcacgtgtagagtccatccctctggaacaggctgagcctgagcatgcctcagctgccttgtgaaaacggttaacatcggcaacaacagccgtcatagtaacaacaataactagaattttggggtgccaggcaccatactcatttaaatccccagagccccctcatttaatcccatgagactgcagccctgcaggaaggaattcccagagggaggtgactgtcacctcttccaccccaagtcctataactcactgcaggtaggaacatttgataggccattttttcatgggaatcctgaggcccagagaaggagctgtcccccaggcctcagccccagccctctgccacactcaggctgaagaggctcctgttccatgtctgtgcctgtgggagctgggccaggactagggtacagggcatgaggagaccggcagtgatgcacatcagctttccttccccctcagcactgcagcctcctccagtccctgactttacaggggacggggcaacaagtccttcatcctccaaatggcctgctgagccctgcctagccctccacggaggcagaaatgggggatggggagggaaggctccttcaggcgctaatagtagtaacagcaaagcaacaataatgattttcgtaatagcaaagaaaagaacagtccttcctttccagccccagccccggaccctacagctgccaagatgctgatgcctaagaagaaccggattgccattcatgaactcctttttaaggagggagtcatggtggccaagaaggatgtccacatgcctaagcacccggagctggcagacaagaatgtgcccaaccttcacgtcatgaaggccatgcagtctctcaagtcccggggctgcgtgaaggaacagtttgcctggagacatttctactggtaccttaccaatgagggtagccagtatctccgtgattaccttcatctgcccccagagattgttcctgccaccctacatctgcccccggagattgttcctgccaccctacaccgcagccgtccagagactggcaggcctcggcctaaaggtctggagggtaagcgacctgcaagactcacaagacgggaagctgacagagatacctacagacggtgttctgtgccccctggtgctgacaagaaagccgaggctggggctgggtcagcaaccgaattccagtttagaggcagatgtggtcgtggacgtggtcagccacctcaataaaattggagaggattatttcacattgaataaacttacagccaaaaaagaaaagaacaaatctcatctgagcactttctttgtaccagacactgttctaagctctacaaaatgttaactaatttaatcctcacacctaccctgtgagggctactattattatgcccattttcag

SEQ ID NO: 1561820 - DNA, 4001 bp, Homo sapiens
actcctggttggggagagtctatgcaccccatcggcctttcccctgcaggctccctttctggtgcaggggaaagaccccattcctactcccagctctattccagctcactcatggctggatctcagtttcctcctcgatgaggcaggcctgctagccttccaggagagttatgagaacccaccacggggacatgtctccagccaggccagccgctatcatcatgccccaccactagacctcggggtgaacaattactgttttgatggccccaccccaagacttctctcaccctttctcttgtgaacacagaagagtctgaaggcccagcccttgagaaacaagcatttgtgtttattaaccaaggagagggaagtcaaagcaatgcagactcctaaccagtccctcctatagtctgcccacctaggccagctgccaaggactaggaagagcagtggataggcccctccccactgccccgaccccagggtgagttctgctgggtaaggaagaggaagtcagcaaaggacagaggccaaggaaggaaggaggaaacagagccgctggggagacaggattgaggagatcccttggcccctcactcacagtggggagggcaaagcaccgcaaatgcagccccacaagaggaactaagcaggagtacactcatgtcaaaaaccttgtattgggggaggggaggagggggttctcaggtgtccaaagccaagaacaaaacccttggagagtcagtccttgcccaacaatgctggtccagcctctaagcctttgcctccataccaagttcacaacagggtggagcctctgacacggccgtctagagaatggatgcaagagaggtccagggaccacttgcctctgtaagatccgtcctgtggcgaattccaggcccagtggcgcctagccttcagctgctgggctctcccgagcctgccttagcccatacaaccacttgatcacgcgggcattgcgctccaccaccgacacgccatagggaacgcgctcccgggcccgctcctcaacagtcaccgagctgcggcgggagcagcccccttcagagctgcccggcccagcactgggccctgccagggacacgatatccgagctggcccgtgccaggtgggccacacccaaccctctcgcctcctccgggtccaggccgcagaagttaaaaaagcgctcgagatcagcggctgccctagaaaagcgctcgctcaagtccgacttggagcgttgcaaacccggcggccgggctgggctggaggcggcggcagggccgggtgatgggcagggccgggcaggcgaggcgggcagggggcggacgtccacccggcggaccgcagaggtactgggcggcggtcgcggaggggtggctgggggaggacggccggctccctcggcccgtccaggagtgcggctggcctcggcaggggacacggggctgtcacacaagtcgatgaggctgctgaggatgtccaggtccagctggggccgtcggcaggggccaggcagggctcggcggctgggcgtgagcactgtgcggcgagtctcagggctaaagagcggctgtttggacagcaggggctgcacaggctcctggcgggtgttggccacgtgcaggctcttgacgtacttggccttgtcggcctccaggcgctccacagcgctcggtttccgggctccaccatctgccggcccccgtagcaggtagccagggaccctggtccgcaggcggcaaggtagggcgggggcggacggggctccggggctcagcgtgtgcacaggcatggctgctgcatatcccgagggctttagtctgcggagaccggagagatgaggagccagagatccgggcagaaagtaggcagctggacaccggccactgctgcagggaaggagagagaaaaaaaaaaaaaagccgagcgcgctcagacaaagaggctcagccgcggctgagaggataagacgccctccctattataaggtagagaccacgcccctccacaaggagccaatcagcaggcacaaggcagcagctgcggggcctcaggccccacccacaccccctccctcctgccccgggagaaccaggcccagctgagaccaagagaggaaaaaaggtgctagagaaaaaagacctgggcgacctgggcaacctgagcagaaaagacagggcaaggcacgcgctaaagggagcaagggaggctccaggctctgtgctacgcaccagtcaactcaacctcaggtcctctcaacagccccgttttttggatggagaaactgaagcccagagaggcaaacaacttgcttaagttaacccagcgagtaggtggctctgcccctgaccaccaaaaaggaaggtgctggcaccggggcgtagggttaaatgaccaagaaaaagggctccagccccacaccccacctggactccccacagggagcctggtaccacctctacccctcacccatccaggcaggaagctgccctgtgccatccacccgcctagacatgccaggccccaggcaaagggcagagcttatagggaaggagcaaagaaaatctccacccgcgccccagtggagtccagacatccgtcagcttcctgcatggaactggatggcccacggtgatccacaaatgcctgtcacgtggaaacatcagccctgagctatgctgtgctgagagaagctggaaatgtccaaaatcacacagccctgcatggaggcatccggcagaccctcgatctgcctgcagccatggaatgggtactcacctgggaggagggcatacacctggatgcacaagtgtctacgtggtcacccaagtgtcaggacctgatgccccagacatcaagccaaccctgaccctgtttccaaggaagggccaagcccacagagtcaccccacaaggccccttggagatgggacagaagaaaacccacataccaagtcccaaacattctcatctgtaaaatggagggggcgggtacttaatctgggtgttccccaagaaggcttacagttcaagccatctagacccgtgctgtccagctcaatagccagcagccacatgtggctattcaaccttaactttaaatttaaatgaaataaaaacataaaattcagttcctgagctacactagtggcatttcaagttctcaatagccacatgtggccagttgccactgtgtttggcagcacagagtacagcatttccatccatggtaggaagctacattggacagccccacctagacatccaaaaatccagaagggagtgagtctggattggggtggggaggcagggatctctgctgggtgccatcctccctataacctcccacaagcctgtgggtcgttgtgcagatggagaaactgagactcagagaagtggctttcccaggtcccagaatagataaataaggcactgatctcaataccacgtcctgtttctccccggcactcctgaccccctcccggcactattccttttctccttatcccctgcacaagtactctatttgtgtatggttgttttactctttgttgtctctatccccctaaaatatcagctccatgagggcaggcgtgtgtgtgtaggggcgggggttggctattttgttcactataccccagtttcaagatactgccctagacacatactagggcagaatattcaataaaaatttattgaactgaaatatttatgggagccagatgtgaactgggtgatcagggatgaactagacatctaggtaccctgcctgctgcaggcatatgggtccaaggtggtaggtgtattgttccaggaagctggaaatccaggagtacataaaaactctagattcttaactgtcagcatattcgataataatgattaaaacattgcatatacagcaaacaaaatatgtctgcgaacatatctgtcccctcctcctccatctggcccccaaccaccagctggagacctctgcagcagccatga

SEQ ID NO: 1561821 - DNA, 4001 bp, Homo sapiens
ataggtacattaccacacccactcataacaacagtttgtcttaatcttagtgatcagccaattccttggttaaggcagtatctgccaaatttctccactgtacagttattattttccctttgtaattaataaatatcttgtgagaagagaaaaaaaaaaaaggacagggtccctaagcaccaagcctcctccccaaaccctcaccgtgctcctggcctttccagacctgtcctactcttcctccaacttcaagtcacccccattcaagctgggctctgaccacttctacccaagtcctgttctttctccaaagccaccatatacaaacctctgcacacactggttctgctgcctgcagtggtcttcactactccatccccctggccatatctgtaaggtatagcatggactccagaacccattcaaatcctagctccaccaatgattagctatgagaccttggataaaatactcaacttctccatatctcagtttccctaactgcaaaacaggactcacaacagtgcctccctctctgcatgaggtccatgcatgacaaatgtcaccaaagtgcaggctatgataactattcaaccaaatagatcatccagtgcccagctcctgagggagggcttcatcagcccagaaagctgatccactattctcagaggttacaaatctaagagaagcacaggtaatggttaagaatgcagagtcatgactgggtgcagtggctcaagcctgtaatcccagcactttggaggctgaggcaggtggttcacaaggtcaggagttcaagaccagactggccaagatgatgaaaccccgtctctactaaaaatataaaaattagcccagcatggtggcgggggcctataatcccagctactcaggaggctgaagcaggagaatcatttgaacccgggacacagaggttgcagtgagccgagatggcgccactgcactccagcctgggcgacagagcgaaactcttgtctcaaaaaaaaaaaaaaaaaaaaaaaacaatgcagagtcacttgaacagacatttctccaaagataacaaatggccaacaggcacaggaaaagatgctcaacaccattagtcattagggaaatgtaaattaaaaccacaatgagacaccacatcacacccctgaagatggccattaccaaaaaaaaaatacaaacagaaaataacaagtgttggtgaagatgttgagaaattagcactttgtgcactgctgatggacacataaaatggtgcagtcactgtgaaacacagtaaagtagttcctcaaaaaattaaacagaattgccataggatcacccagcaattccacttctgagtgtatacccaaaacaattaaaaacaggaactcaaacagatatttgtacattcatgctcaaagcagcattagtcacaacagccaaaagcaatccaagtgtccatcaaggaatgaatggataaacagaatgtggcatatacatagaatattagaatagattattccgccataaaaaagaaaattctaacacatacaacaacatgggtgaaacttaaaggcattatgctaagtgaaataagccagacacaacaagacaaatactgttatgattccatttataatacctagaggtacccaaagtagtcaaattcactcaaacagaaagtagaatggtgattgccaggcactggggggagaggcaatggggaatgtacttaatgccactgaactgtatacttaaaagtggttacaatggtaaattttattttatatacattttaattcattcactgccccaccccacccccccccccaaaaaatgtaaaatttagagccagactctctgggttcaaactccacctctaggttatcttatgcaaattattaaacctctcttgtgctcagtttcccctctgcaagatggaaataagaacagcagtaattaccttatatcacagagttgagggaattaaatgagttcatacttgtaaagtacttagaacatagtaaatgctcaagaggtgttagtgatttttattctttggtgagggggtgggaggtgtggtttccaaaggttataattttcatgacattctacacccaacccgcccccttcctcccacctgcttctttctttcccttcagcagaagcctggcctagatttggggaggcccttgcctgccccagaggagattgggaaggctccaggcagtggcaaggggccagccagcagggcagccccagctcaatttcagcccagctgtccaggtcagggacacccagctgggccacctccagagccacaccaggccctgagctatttctggaggcctcccagacgctggtgccctggcctgcccaggagtcagccttgctcagggtggccttgcactaacattaggaagggagaagggagtaggctgtggaatgggtgtggatgtggacatctaggcccactgataccaagttgatcttctaggcctaggtctgcacttgaggttgcaaaatggggatgaaggattttgcagtgaggacagaatggaagataacacatgcaaggtcttggggaagggcctggcacgcaggattagaaaggggagggggaggcagatccacagccaagcccacttcctatcctagactgccctctgcccaggcctgagtgcaccatcatgacttcttagctcagcccagagactgaagaaacttactcaatgtcacagagcaactcagggacagggcagtggtttcatgatttataaatatgcatatatatacacatatatacatatatacacacatacatatatatacatatatgtgtgtgtgtatatatgtgtgtgtgtatatatatatatagagagagagagagagagagagagagagagagagagatgggaggactgcacttcatgaaggctgtgtgagttaacctcctgcctgcagaacacacaaatggtccatgaacgttagtttcagtcttgattactgaggttttgggcatccctaaattttgcactggctcaattgcctcagcccctgccttgcatcacagtgggagaagatgatacatttgctaataagtaaaaaaaccaaaacatgcaagaaccagagcagggcttatgaagtcaataaataatatttgttgaaagaataaaagaaagccttgttttctttctgagtcctcggagatcctgtcccccaaagccaggggcaggctccagaggagagaggatatgtaactcccttatgaagagattgaagactctcaaaatgcatgattctgtgtgtcaaggattctaagattgaagccagagggactaggagctaaccactgcattgtctgactgtgacttcgaaaaggggcttaacttcttagaacctccgtttccccacctacaaaaggagactgacaatagcaacctagggggcagggggtgtccccaggagacacagcagggtctggcctaggtcagctgctccacctggggggattccggccccactcccaattccaaagtctctggtgactagtggctttggtttagggactggctctattcccttccccaaactggggatgattcccaagaggccagcagcggctctgggggctggagaatctgctgcccctgcatccagcccagaaatgtcagtcccgtccgatccccaaagagtggtcctctgtccccgtagacagaaaggcgccaaatgagccgagtccaaccccggactgcggagaaggaaagacagacgcccaaagggggtatcccgaggacagtgtggggcgcggggatatgtgatccagccaggggtctacaggtccctgccgataaaacgctgggaaaatgactaccagttgcccgtctgggcctctcaaggcaagtccagatgtgactagactagggggctgcgaggtggggcagaaagacttgaactggattctccgccagagctcgccgggccgggacacttgcctctctgagcctcag

SEQ ID NO: 1561822 - DNA, 4001 bp, Homo sapiens
agtgcagcggtgcgatctcaatgcaacctctgcctcccgggtttgagcgattctcctgcctcatccccctttttttttttttaaatccaattattgacaaatgtaactgctagtgtggtagaaggaaaagtcaatatacacggaacctttgacagggaatgagtgaaaggactcttgtggtgagagaatcagataactctagaatacacccctcctaattgaatcattttaccattttaaaactatcattaatgctgtcttttgtaataaatcaaagataaaaagcagttctgcatcttgcacaaatagatgctatagagagcaagagtttgtatggaagtgacgtcagcatcttatcccagatttccctagctccatcgtccacccgcggccattgaacagaagcacgagctcatcacgtactattatgtagctttcggtgttcttctcaccacccacagctctagatgacgtgagagaggcaaaaacaaaaccatcactgctatggctactggtctcccattcactttttcttctagtgaaaaaaagaaaagaagcaagctctcaaacatggaagttcttttcttcagaatagttttattagtttgcatacagtttgtcaacactcaacttttttctctcctgacacacaaatccattcagctagagctttcttctccccatatttcacagatcgtgacatggtatggatctgcaggcatctctgactttcgaagcctgaggttactgccactacctgttgccatggcacgtttaagattccgcactttggacacaaatttcataagctccacctcgagttccattaaggtattgaatgcacagtctttgttgggggaagcatttctttttttctttaatggagagtgaagttggccgcctcgaaggccaggaggactctgctcctgtcaggaaagatactcaaggtcagtaatattgtgaactttgttggttttgacacagttcgtgttacaacagcagacttgagtagttgcaagaagaccatactgcccacaaagctgaagatattcgcaccctccctggccctttacgggaagggtttgccgatccctgctctcatcagtttgggcacaggattatgaagtgctgggtctttctaggggagaacgcactttctctccccttccttttctacctgaaagagttgtttgtggtcactttgaggaccagctcaaactaccttacatctttatctcttcagcacaagtctcatattttgttgggataatgatatcatttccatttagctcaggattttgtagtaagtcaaacactagcaagaatttaaaaaacaggggctagtgaatctggccctgtgaataattttgactttctgaaacacaccataagttcttgaatctatcctacatttgaaaaaatccatctaaccagaaaatctgtgagccagtaagcagaggtcactttccactctttgtcccagtatctgtggatctggggacaattgtcttcactaaggatacatcaggaagtgaatttgccagctttgcccaggaccatgaggtcggttcattatacccaacggtgccgtctagactcactagaacatccgtttccctgagactcctgagattgaatcaatatggtgtaaaaaaaatggagccatccttaccttattcttctcactgtctctttgacactgcagtatcacaaacggcacaacaacaaaaagaagccagagccatttgctcccaagccagccttgggtgtgctctggtagattctgccgaatccgaaagtgctctccgtattgcaccttcccctggggttcgctagttttctgtctcagagaagagaacataaaggcatagctgcaggtgaggcacagaagcaggaccagggacgatttcagcgtccacatggtgagcagagatggggaagggagttgctcatgacgggtttgcttgccctcgcaactgggagactgggcacctggtgccaggcccttggtgatgtcacagaggccctgagctgaggccactctggccattgtgatgatttcaggacagaggttacaggtcacaggggttgcccgggaggaggactcaaagggagatgggggcatttccagcaggcagtcagagagagaggatgggcacgacggggtgccaattccctgccaggggactctttccaaccctggagctttgctgggagaggccatcatgtttttgtttttcatttgtttgatccagacattgtgatgagcagagggagatgccatgtgccccgtggagctgagttaaacgggagagaaagatattaaaccacaggctacctacaaatttggagccacctatgtggctcaaactaaacaaacaaaaaatttgtttttgtttttttttggggacggaattttgctcttgttgcccagactggagtgcaatgatcttagctcaccgcaacctccgcctcccagttcaagccattctcctgcctcagcctcctgagtagctgcgattacaggcatccaccatcacgcttggctaattttgtatttttagtagagacagggtatctccatgttggtcaggctggtctctaacttccgaccttaggtgatccacctgcctcggcctcctaaagtgttgggattacgggcatgagccactgcgcccggcccacctatgtgttttgtttggcctacattgtttttaaaaattgtcagtacttaaatattggggggcatttcactttaaaactccacattctggcttcctttgaaaatatgggaggtccagaaacaatgagtgcacaccctcatggaaccagtctctctgctgcagccaagtgaaaccgtcctttcggtggccatattccctccacagtccccaccactcactattacctcacaccatcattgatcgtagcagtgtgtgcccaccctgggttaagagtatactttgggctgggtgtggtggctcacacctgtagtcccagcactttgggaggccaaggcaggtgggtcacctgaggtcaggagctggagaatagcctggccaacatggtgaaaccccatgtctactaaacaaaaattagcccggcatggtggcataggcctgtaggcccagctagttgggaagctgaggcaggagaatcacttggacctgggaggcagaggttgcagtgagctgagatcgcaccactgcactctagcctgggcaacagagtgagactccatctcaggaagaaaaaaaaaaagagagagagtatactttgattaaaattgtgataagaacaggaagctttagagactagcataaggggactgctctaaactaggttatgcaggaagcaggaagagtgtccagaaaaagatggttgagtagagcaggggagatgattaagagttggtgggtaaaatgggaaggggctgaatcccccaagtaaaaaggaacagctagcttgacaactgaggccaaggctgggaataaacctaggactccatagtatactcgaaaccatgtgttctttaaaatgacatgaaacaagaaatcctgggtgctggaacgcacggcttgtacttgttcccctgggtcatctgtagagctatcttcctgaggaaggctctgatttgcagatttactcccgaggagcagaactttatgctgcacaggaaataatcaaagttcagctgggcaccttcgctgtgccttaaactactgatctctgtggagtgacaaagtagttctgcaagactatggccaggggcagtggctcatgcctgtaatcccagcactttgggaggccaaggcatgcagatcacctgaggtcaaagagtttgaggccagcctgaccaacatggtgaaaccttgtctccactgaaaataaaaacaaattagccaggtgttttggtgcacacctgtaatctcagctactctggagctgaggcaggagaatcgcttgaatccaggaggcggtggttgcagtgagctgaggtg

SEQ ID NO: 1561823 - DNA, 4001 bp, Homo sapiens
ataccagctaattttttttttttttgagacagagtctcactttgtcgcccaggctggcgtgcagtggcacgatctcagctcactgcaacctctgcctcccaggttcaagtgattctcctgcctcagtctcccgagtagctgggattacaggggtgtgccaccacacctggctaatttctgtatttttttttttttttgagacagagttttgctcttgttgcccaggctggagggcaatggcgcagtttcggctcactgcaacctccacctcccgggttcaagcgattctcctgcctcagcctcccgagtagctgggattacaggcatgcgccactacgcctaattttgtatttttagtagagacgggctttctccatgttggtcaggctggtctcaacttcctgacctcagatgatccgtccgcctcggcctcccaaagtgctgggattacaggcatgagccactgggcccagctttttttttttttttttttttttttgagacagagtctcactctgtcacctgggctggagtgcagtggctccatctcggctcactaccacctctgcctccagggttcaagtgattctcctgcctcagcctcccgagtagctgggattacaggcgcccgccactacgcccagctaggttttgtatttttagtagagacagggtttcaccatgttgcccagctggtctcgaactcctgacctcgtgattcacccgcctcagcctcccaaagtgctaggattacaggggtgagccaccgcgcctggcctaatttctgtatttttagtaaagacgaggtttcaccatgttggccaggctggtctcaatctcctgacctcaagtgatctgcccgtctcggcctcccaaagttctgggattacaggcatgagccactgtgcccggcctacacctttatctccttacagaagtttcatattttgttgggatgatatcatttccatttagctcaggaattttcagtaagtcaagcactaggaaaaatgtaaaaagcaagggaacagtgaatttggccctgtgaataatataattttgaccttctaaaacacaccataagttctttattttgagacagagtctcagtcgcccatgcaggagtgcagtagtgtgatctcagctcaccacaacctctgcctccagggttcaagccattcttctgcctcagcctcccgagtagctgggattacagacacacgccgccatgcccagctaatttttgtatttttagtagagatggggtttcaccgtgttggccaggctgttctcaaactcccgacctcaggcaatccacctgccctggcctcccaaagtgatgggattacagcatgaaccactgcgcccggctgagttcttgaatctatcctacatttgaaaaaatccatctaaccagaagaactttgagccaagaaactagaggtcatcttccactgtttgtcccaatatctgtggatgtggggactattgtcttcactaaggatacatcaggaagtgaatttgccagctttgcccaggaccatgaggtcggttcattatacccaacggtgccgcctagactcactagaacatccgtttccctgagactcctgagattgaatcaatatggtgtaaaaaaaatggagccatccttaccttattcttctcactgtctctttgacactgcagtatcacaaacggcacaacagcaaacaaaagccagagccatttgctcccaagccagccttgggtgtgctctggtaggttctgccgaatccgaaagtgctctccacacggcaccttcccctggggttcgctagttttctgtctcagagaagagaacataaaggcatagctgcaggtgaggcacagaagcaggaccagggacgatttcagcgtccacatggtgagcagagatggggaagggagttgctcatgacgggtttgcttgccctcgcaactggaagactgggcacctggtgccaggcccttggtgatgtcacagaggccctgagctgaggccaccctggccattgtgatgatttcaggacagaggttacaggtcacaggagtcgcccgggaggaggactcaaagggagatgggggcatttccagcaggcagtcagagagagaggataggcacgacggggtgccaattccctgccaggggactctttccaaccctcgagcttttgctggtagaggccgtcatgtttctgtttttcatttgtttgatccaaacactatgatgagcagagggagatgccatgtgccccgtggagctgagttaaatgggagagaaagatattaaaccacaggctacctacaaactcggagccacctatgtgttttgtttggcctatgttgtttctaaaaattattagtcagtacttaaatgttgtggggggtgggtatttcactttaaaagtccaggtttccggcttcctttgaaaatatgagagcgtggccgggcgcggcagctcacgcctgtaatcccagcactttgggaggctgaggcgggcagattacgaggtcaagagatcgagaccatcctgtccaacgtggtgaaaccccgtctttactaaaaatacaaaaattagctggatgtggtggcacacgcctgtagtctcagctacttgggaggctgagacaggagaatcacttgaacccaggaggcagaggttgtgatgagccgagatcacgccactgcactccagcctggcaacagagcaagactctgtctcaaaaaaaaaaaaaaaaaaaaaagaaaaagaaaaagaaagaaaagaaaatatgaagagttctggaagcactgggcccacactgtcatagaaccagtcttctgctagagccaagtgaaatcatccatcctgtggccatattccctccacagtccccaccactccctattaccacataccatcattgacagcagcagtgtgtgcctgccttgggttaagagtatactttggagccaggcctggtggctcacacttgtaatcccagcactttgggaggccaaggtaggcagatcacccaaggtcagaagtttgagaccagcctggccaacatggtgaaaccctatctctactaaaaatacacaaattagccaggcatggtggcatgtgcctgtaatcccagctacttgggaggctgagacgggagaatcacttgaacccaggaagtagaggttacagtgagcttagatggcgccactgcactccagtctgggcaacagagcagggctcagtctcaaaaaaaaaaaaaaaaaagaaaagaaaagaaaagaaaagaaaaaaagagtatacattgggccaggcacaggggcaggggctcacacctgtaatcccagcactttgggaggccagggtgggcagatcacctgaggtcaggaggagttccagaccaatctggctaacatagcgagaccccatctctactaaaaatacaaaaattagccaggtgtggcaatgcacgcctgcaatctcagctacttgggaggctgaggcaggagaatcatttgaaccttggaggcagaggttgcagtgagctgagatcaagacactctactccagcctgggtgacagagtgagactgtgtttcagaaaagaaaaaagagtatagttcgattaaaattgtggtaagaggccgggcacggtggctcatgcctgtaatcccagcaccttgggagggtgaggtgggtggatcacctaaggtcgagagtttgagaccagccaagccaacatggagaaaccccatctctactaaaaatacaaaaaaattagctgggcatggtggtgcatgcctgtaatcccagctactcgggaggctgaggcaggagaattgcttgaacctgggaggcagaggttgcggtgagctgagattgtgccattgcactccagcctgggcaacaagagcgaaactccatctcaaaaaaaaaaaaaaaacaaagaaagaagaaaaaacaattgtgataagaacaggaagctttagagacgagc

SEQ ID NO: 1561824 - DNA, 4001 bp, Homo sapiens
ccgacgagggtgggcggccagaacagacgacaggggaggttctgggctctggccaagcccagaccctccctgcactgctcccaggccctgctggggacgcgttttctcaggcagatgagttatcttttgtcctaatctcctttgaggttctgatcccacttgggtttctgccgattttaccacggtgcagaagaaacaaggacagctcacggggccctggggccttgtgactgtatatatttactgcaattatagtcatttctaaccttaatttaggacacaccagatgccaggtatgaacatatctcattttacattcatattctatgaagtctgaattattaacgtcccattttacagatgaggggcctgagatagagagaagggaatttgatcaaagtcaacaacaagtgagtagagagaggaatccagggagtctgaggccaactctttgccactgtatacacacacaccgctccagtgccagggcctgagctggggacaaggtcaatgtggctgacaggcaggacaagaggccattccagatgagtgcagagaagacccacagccatggggtggaagcaggcccagtggaggcatccgagacctcacaggtcgttagagagggcttcccggaggaaggaacagctgggctgggccctgaagaatcatcaggaggcggcacggtgtgtgcagaaggtgccactctggagaggatccccaagacctgtgtgccacctgtcggactggagaaggcaaggaaggaagttgatctgggcaggaggcatgatgaaagcctgggtccaatccccatccgctccttactgaaaagctaggaaacggtcaggagatgttcgctgggccggcggcactccgctgaggcctgcaccagctcatggagttgtctcccaaactcttgctgggaaggtgctatttttggccctctaaaggtcagaaaacaagctcaaaagccttcaggactcggtctgaggtcaccgggcgatgaatggaggggccctgtctgcacccaggcaaacaaagaggctccagactgccaggccggatgcgctccgggctggacgccggctccgcgtgtctgggcttgccattcctggaccgccagacttcatttactactatttttatttaaaaagactcacttggaagaaagtgatagatttcttgaaaggaaagctggtatgactgctctgaaggaaaaccagttttcacttagcaccaatggaaagtgacggaaatgaaacataacaaacagcactgtgggtttcttgcccgcggcttccctgaggacgcctgctcttccactcagaagaaaagggaggagcagcgagcgtcgggaggtgttcaaaacacagcgagacccagccagaaggcctggacaacaactccgcaggcaacgtgtggaagttcagaccaagtcagtcggctgcgccccagcctggctgaggctctgcagacccggggctcggccgaagactgcgcgaccttgggcagagcgccacaccttcccgagcctcagtttctctggctgtcaactaggaggatcgcttccttggcttgcagggatttggggtttcggggaccctggaagagctcggtcccgggcagctacaagtgcaaaggcgtccttggcggaggcggccggaccccggcgcggccctgcggacgtctggggacctggacaccgcccgggatcagggtcggggtggggtgcttacctggtggccgcggcagtccccgcgcgccgtgcggagcagccgggcgtctagcctgggcgggagcagggccagggccaggggcggcggggcgcagggggcggtggcgcccaggagccaggtggcgcgaggccggacccgggcgcccaccctgcctgccggacccagcaacgccagcaacccggccatggtgcgcagctaggcgcagcacccgcgccgctgacccgggaggcgggcggaggccggggagggtgggcggagctgacccggcgagggccctccccggccccgcccgccggcttcgccgccgcgcgcgcgcgctgggcgggactgaggaggcctgtgcacatccccttggctcacccgctagctccgctcctcgggagccggagtccagggctggtgggcggggctgaaggagcgcgccccgcctcctctccgcccaccagccccgcccctttgggggtgggtgcaggtcttttcagggtcttgggctttctaactgtggtgtgtagttggcgggtttccttattctgcgggcacaaaggtgggcgtagggccgtggcttatgagcttttctccctgcagaaatgggtgaaatctgaaaaaaaattatagatatgtttacgtgttagctccaaagaagaaaataaatatgagaattgatattagtacatgtttaataaaaagtcctctgaccctcatagattgttggcgtgaatgtaaagcgaaagatggtgtggcagtttcttgaaaagttagacatacactaaccatacaacccagcaactccactcctcggtagcttctcaagagaaacaaaggctcgacactcaaagactaaaatgtgaagacaccaatgtttgtagagatcttataaatattagtcaacaattaggaatgcccataaactgggacgtactgtggcacaagtcttcaatgggacgcaatgcaacaattaaagggaacagactactgatacatgcacaacataaatgaatctcaaagctcttatgccaattgaaaaaatctaggcacaaaagtcacacactggaggattccagctacatgaagtgcccagaataggcaaaatcacagagacctaaaacagatccgtggtggcctagggctgggagtgggaaatgagattgactgccaaggagtgggaggaacgtcttggggtgagggaaggatcctaaacccagattgtagggatggtgacagctgtgtaactaaaactcgtgggactgtacacttaacatggatgaattttatgctgtgtaaattatacttcaataaagatgttctggctgggtggaatggctcatgcctataatccaagcacgttgggaggctgaggtgggaggattacttgagctcaggagttcaagaccagcctgagcaacatagcgaaaccctgtcactacaaaaataaaaataaattagcctggtgtggtggcatgcacctgtagtcccaactactcgggaggctgacgcagaattgcttgagctcaggaggtccaggtttcagggagccacgatggtgctactgcactccagcctgggtgacagagcgagaccctgtctctctagaaaaagaaaaagaaatatattttacaaaagatgtaatattctattagtcaactgcaattcaactcaaccaagctcttacacaggcacagaaatgatattaaacacatatgcattaaaaaatatttattacataagatggagttatagctgtgaaagtaacagggtctgttggagggaggtcctaaagtgcccctggatgggaatccttccatttaagtgtctgcaagaagctggggaagagtgcttaagggtgcagattgtctgtcaggttggccctagaagtccagctgtgtgatttggaagtagtgactcaacttctctgagccttggtcttttcatgtgtaaaatgaagataataatagtttcccccatgagattgttgagataattctttgacacagttcttggaaagggcttcactcagtgcctggtgcacagagagggcacacacgttagctgggatgttgtagagatgccttgcctgaagcccctctgtcacccggtgacagtgccacctccagatggcatctgatctcgacttcctcatggttcccatgattttctttcttttttttttttttttggagatggagtctcgctttgtcgcccaggctggagtgcagtggcgcggtctcagctcactgcaacctcagcctcccgggttcatgccattct

SEQ ID NO: 1561825 - DNA, 4001 bp, Homo sapiens
gtcttgccttgtcaccaacgttggagtgcagtggtgcaatcatagctcactgcagcctccagctcctgggctcaagcagaattctcctacctcagcctccggcgtagagcagctaggtgcacaggcacatgccaccacgcctggctaattttgtttttttgtagagatagggcctagctatgttgcccaggctagtttcaaattcctggcctcaagcaatcccatcaactcagcctcccaaagtgcagggagtatatgtgtgaaccacggcacatagtttccaaattttgattataattgagaaggtttttcatgaaatgccacggtctaaaacctttaaaaaaaattaacagtaaaattaatgatatcctttttttcttccatgttgtagtttacggatgtttactaaataatccgcaggcttcctgaacacatgaagcaataaaaaagactaacatttttcttcaactaaaaagcggcaaggtaaaaaatcatcactattaatttttgaagtgtattaggaaaatttctgtgcgttcgcaactccaccatgaaggatcttagatctattggcggaaaactaggtatgaaaataattatgcaaaattgccaggtcacaattttgaagcactcttcgatcttcttacattttgtgttatacattattagtacttaaacgtataattcaaaagcattgaaagctttgaacatataaaatcccctcaaatccctgcgtacacctgtgtaccttagattgcatatgtaatctgtcagctctgaattaaaaaactaagatatcaaaattaagttcaatgggggtagttacaaagttgtcaagaagttggtaattctagctaagcagaatatttaaaacacctctgagagcttatttactgtgatttgatctgctctggtccacaactgagctttgattctattaccttgtgtttatttttttcaggtgctttccaccgcacatttaaatcttaatcccatatttttaaacaattagtgccttttagataagaaattaaaatgttattaaaatataattttaaattttgatttgaagatacctataaaagtttaactacacatacaattcaacttttaaaaattgatccgacacaaatattaatccaaaggtggtttgctgcagtattatttgtaatagaagtgtaggctcatcagtggaggattgaattcctcggatgaagttaatccacatgattaaataattacgaagctgttagaaagaccgagctgcatctcagtgcacgtggaacagtttccatctcagaacgcgagcacggggaaaacacgcagaagactgagcgccgaacaccgacgccctctgcgagccaaggggcaaggagaccctttcgcggctgtgcctgtctcagaagggcctgcgattttttacacaagcacccgctggctgcataagttaaacggatctcttaaatggaagcgtctgaaagagcctaggaatacacagttgggtacccagctcagcaccccgtctccggacctgcggtctctcccgccctccggcacccgcacccaggagcccaggcggccctgcgccccctgccggcaggagccaggcctcacccaggagtcgtcggcccggcgccctggtcccccggtccagctcgcccctgcagggctggctggagccgcgggtcccagtggctctggggacgcatagcgcggggatgggcttctcctggtcccgcccgcgcttccgtcccttccatcccttcctgctcgcctgtcccgggaccagggccccagtcaaggcagcgagtctcctcgctggcgggggtgactccgctcgcggggcgttcatcaggagagcatagcgcgagaggacgggccgaagcgcggggacagcggggacccactaacctgagggcctggcctgagccgcgcccacagcgtcccccttggctcaggcctcgggcgaccccggcgagcgttggcgggggtgggggggatggggggggcgggacctggctggcggcgacgccgattggacgcactatcgaccgcacctggcgcggattggacgggcgcttcccgccttccgccgttcgccggaggcgctgcggcggtccctgaggcgcagagttgcgacgctcggcggcatagggggcggctccaccgacactacgcggacgcctcctgccgcaggcaggttgagcagagtgcctgggtgggcttcccccacggcggggcgcggagggagggtggggcttcggcttggcctttcaagccggcaggcgagaagcttccgacggttgaggcggagccgttgtggaagctgccgagggggagggggtgcggttctgcggcagtgggcggaggggaggcgccgaggctgggccagggcgtgggctgtgcagagttcgcggcgagggtggctcgcgcaggcgcgaggctccccatcagcacctgcctggccagcctcggcctcggggatgggaaatgggcgctcggagccgcccccgcgcgtgggcgactcggtcaaggtggctgaggcgcggggcggtgcgcttggcgagcggggagcaggcctggggctgcgcgcgtcgccggcccgaggaggctgaggggtgcgggagaagcggtggcgacgggagccctggggaccgctgctcgcctgtctccgggacatctgaaggggggttggcgctgcggcctggggcgcatctcgggtgtgtgtgtgctttgttggttcgggggtgaccctgggaaaagggtcaccgtgccggcggtgggagcagggacttcgccttcggcctcgttgttgccactgccggttccacttagggaagaagggagtgcgcgcaaaaccttcctcctgctcggcgccttcagtcccttctctccctcccgccgtccccacctgcggcctctccttgcggttgaggccgccagcccctccgcgcagctgggcctgatgcgtcccgcggcggctcaatgcgcgacacgtggctccacgtgcggccttttctggaccgggctccaggctggccgagcatctgcgaatacggcagcgtggtttttttttgttgttttttttcccgagacggagtctcgctctgtcacccaggctggagtttagtggtgcgatctcgcgtcactgcaacctccatcttccgggttccagcgattctcctgcttcagcctccggagtaactgggactacttggcgcgccaccacgcccagctaattttgtatttttagtagagacgggttttctccatgttggcccggctggtctcgaactcctgacctcaggtgatccacctgcctcggcttcccaaagtgctgggattacaggtgtgagccacctcgcccggcctacattttttagtaatgatgggaggaggaggacgccttccctccccttcattcacctttaatgtctttttggacaccttagctatgttagttaccagggcagaggggactttgaattatctactgctgcttgcattcattcagcagtttttcctttgggggaaaatctttgcctcccccatctgccaaattgttttctttgttgttgtttttatccgtaacgcttttatctgcctgcagatacacaatcatcatcttactagttctctgtgttgctcgctaaccagtcccccagttcagtagactggagcccagagcctgcttacttgtcaggtaaatccacgcttctcttgaaacattattattctgttctcggtttccgaagtcgttctgttacatagtagtagttcctaaagatcttttaaattgtttccttatgaggctggaaaaaataagtgtataacttttgtttctttttagagttagccttctctttcacttgcaaatgttaacttgtttgatgttgtggatagtgctgtgcttttgactctattgtggcctgtatgcattcagctttgaggcatgcgtgtgtgtgtgtgtgtaacctgattattcagtttgctttccttgg

SEQ ID NO: 1561826 - DNA, 4001 bp, Homo sapiens
gtacacaagaaacaagcaagcaaacaaacaaaaatcccagaataaatctaagtcagatttttcttctaagtttacattacctttcctgtagtgctcaaaatattcttgctcaatctgctggaagatgatgacagctggggaggtgacttctttattcctcttatatttggaaaggtctcctcaccaccggaactagaagcaacagaatactgtcagtaactattgattgcaaatggtcctaccaccagtatcgggttggtttttcacttgttttttaatacttgtataatattgaaatattaaggctgtgatcatatagtggtttgcactctaggttatgaaatactggggaagggagacattgtcttatgcttacagctttgtcttttctgcttattacagtagatattagagacaggatcacaggatcacactactataaatactgtgaatggattccatctctctctctctctccctgttcacacacaggtataatcttccttggaaataatatgttgaagaaatctggaaggctaaataaggtcaggtcttattacagcgttcaatcattgcattgcccaatcattcattcatgcaacaaataattacaggagtacccagaaaaatggcaatgattatgcacgtccctgttcagaaggagcttaaactctaggaggaacgttcccattcaatttttcggccttctctatcacatcaatccattataagactttccatatattcatacatattacatattatatatcatctctttatgaagcattgttgacctataccacatattgctgttattcccctctcattttgagtggcctattaaaagtgcactgaatggaaattggatacttctctttcccgtatcacctgtctctgtaaaataaaagagatgattatagaagatttttattttcttcctgaaactttcctgtatttttcccacattaatcatgtaagcctttttagttagcttacatccaatgataaataaaatcattctctcacatttcatgaattataccacaatcaacagccttgactcattttagatgcaacgaatgttcttgaatcaaccccctttcattagtctggttttctttctgctttgtccctctggacaataaaaaggaaccttcttaatggaatggctggccccaaactgctctctggaaagtgcacttgcatcttttctacttcatttcacctggtatgctttacaccaaaggctgtggggttttgtgctcaaagctaccgggtgagagacacgaatgcctgcagggttctaaataggcagaaaacaagctccaggccttgctggtgtttctggcttgcttggaaacaaagctaaaagtcggagattctggctacaaatatgctccccaagcgccagaggctgattaagggcagctgcagaagtcatcagcgggtaataactcttgttcccctgtcttcctctctggcgcggagtccaggaagacaacagcagcacctcccctccccaccctcaagggaatctgctggccattcggtgcggcaaagcattctgggtgatgtggacatgacgctgctcctctacgcagtgaggctccctcggtctgaccaagggtccaggttgcagtgaacctgtccaaagtgtgggctggcctcgatgtttaaaattagcctgagaccagctcctggcaaggccggtttttgcaccaccgctccccccatccacaacccagaaatctaaggacacgcagcatgcattttccttgtcctccgtttgtgcagacaaagtctatgatcgataggcgcgcaatccaggcagacgtaaacagaaattgatcagacctgtttcgcgactgcagcggacacgtgacgaggctgccagccttccttcctctccggcgcccgcgcggggacgcccggctgcggcgcgctgcggcaggggagctggaggcggaggcgcgcagctccgctgagctccctggctgagctgaggccggcgggggcccgcctgcaggcggcgtcacgaggggcggggcggaggctcgctaggaagttgcacccggtcaagttgcagccttgtaagtaacgccgcggaccgggaaagtgggaggggccgctcccggaacgcagccttcttgtaagaacctccaaggaagcaagaagaaaaaagaggcgctaccctgcgctcccgggaggcctctgaaagcttccactagagaaaaactccccactcttacaatttctttaaccgcaagaagcggaggacctggacaaggactcgaggagcaaggtggcgaaccaagggtagggcgcaccgggcccgagaggtcccccgcaggttgcagatacggtggactctctgcggcttctgagcacggagggagctgtcgcggggtcgggaggtcgtctctcatccctgcctcatcttccgacggccggcggggccatgtccagaggcccgagctccgcggtcctgcctagcgccctgggatcccggaagctcggcccccggagcctcagctgcctgtcggacctggacggcggcgtggccctggagccgcgggcctgtaggccccctgggagcccgggccgcgcgccgccgccaacgccagcgccgtcgggctgcgacccccgcctgcggcccatcatcctgcggcgggcgcgctcactgcccagctcccccgagcgccgccagaaggccgcgggcgcgccgggcgctgcgtgtcggccgggctgcagccagaagctccgcgtgcgcttcgccgacgccctgggcttggagctggcacaggtcaaggtgttcaacgcgggagacgacccgtccgtgccgctgcacgtgctgtcgcggctcgcaatcaactcggacctgtgctgcagcagccaggacctggagttcaccctgcattgcctggtgcccgatttcccgccgcccgtcgaggccgccgactttggcgagcgcctgcagcggcagctcgtgtgcctggagcgtgtcacttgctcggaccttggcatcagcggtacggtgcgcgtgtgcaacgtggccttcgagaagcaggtggctgtgcgctacactttctcgggctggcgcagtacccacgaggcggtggcgcggtggcgcgggcccgcaggccccgagggcacggaggacgttttcaccttcggctttccagtaccgcccttcctgctggagctcggctcccgcgtgcacttcgcggtgcgctaccaagtggcgggtgccgagtactgggacaacaacgaccaccgagactacagcctcacatgtcgcaaccacgcgctgcacatgcctcgcggggagtgcgaagagagctggatccacttcatctgagccgcgcggggaccggccacctggagcctccacacctaagctgcgcctcctgtcatttccctgctgggctctcacatctatctggttgttcttcaccaccctccaagtcctctgacctaattttctgctgcaaggtcccctggcagtggcccatcctgtcttctacttgaaacgtctgagtcacttggtctaaaaagtagcctcaggtggccagaaggccgagttgtgtaatgagttggggcagggtggtggggtaggtgcatgggagggtgggccctctggggaggcccaagcagcttgttttgcaaaggcccaagtcctcctgctaggaaaagcttttgcatgtgtcctgaatgtgtctctgtaaacatagctgttatttattattgtgatgttgggacctttagcccatagcggatgcctcctcaggaatattctcgatttaataagctaaaaaaaaaaagttctgtgtttgtgcccacagtaaacagaatgtacagtgtgacccacatcgtggtccctccaggcattcctgccccaggataaggaaaacctgagcccacatctgattgccaacggctgtagccttctaacagtgggaaactattaataggcaagaaatttctgctttatcagtcatcac

SEQ ID NO: 1561827 - DNA, 4001 bp, Homo sapiens
cagttcggaacttaagcgctcttcaaccagactcatggaatctcagggttgcggagagattttagaggtttcctgaaatagtccctttgttttaaagacgaggaagctgagagaagggaagtgacttgctcaaggtcacagagaaaatccagggtggaactgggtagggtgaccaattgtcccagtttacctgggactgggggggcttctggacaagttgctcccagatctgagaccacaactcagggctgacttgtccccaaggtgggtggtggggggttcacagccagtccctgaaaggaaaggaggcctggatcagtacagagctgctttgggatggaattttccaagggaagaaaaaagaaaaggccacatctgggtgctgggacctttcactctggcccgatgcctggaaccccagggattccccacctgctgtgtgtttcctggcccttgagtgtaacctgcaccctccctttccgtgccagggagacacgagctgactttatctgtctcttatctcttggctgctgccagccacagctgcagggatatatatgcaaatagcttacgataatattaatatgtgattccccccaggggaggcatgtggaaagcgctgtatgcgtttcacaattctgtttcatccaaaaacactgcacgggcccagagtgattcgaaacagattttctgcaaaggcaaaataaaattggaacaaaacctagttgaggcatatgccagtctccctgcccccagctctctccacctctgacatattaaccctcttctctcatgcccccaggagcctcctacgacaaggcagcaaatctaggaaattgcactgggcactcttcgttcaagcctggagcccctgccccatcccagggcagccagcctccaccctgggctgacacatcctttagagagtaaaaggctgcttgccagtgtcagcctgtcactccttctgtcccacctctgcctccttcctgcaggtaatgctccatccatacctccttctccttcacccctgctgcttgggataattgcagaaccatggagcacagaatacagaatactgggggtgtacaggagagtttagccaaagcaagtcagaaaaacctaggtcttttttcgtttctgccactgaccggctgtgtgacctcagcaagtcacttcacttcgcccagctgctgtttcctcagggtacaatgaggacaccaataatacttaccctgcagggggcttaccgggatttcccgagccgacgcttcaaaaatgcctacacagtgcctggcgtatagcagatacacaaggaatagctgtcatcatgagaatctcttaaagatcacctagttcaaccactgttttagaaacggacaaatggaggcctgcagagggcaaataacttgcctaaggccacacagcacgataccgccatcccatctcagcctcaacccaggttccctcctccggccttgggagctccaggtggcctgtgaggaacggctgcctcctcctgtcacccccagctccagaagtctgtccacacaaggcggcgtcacggcacacatggggagcagtcacttcacactcaccatcgagcaggtctggacactcgagtgcagtcccgccgccctccttgcagctgcctcactttccctattgccgccagcaagcgtctgctcccatctggcccgggactcccggactcgagctagggctctgcaaattccatccacactggccaccagccgctggtcccgctctctgggaagatcgccttgaggacctgctgcgccccgagtcttccttctggtgcagggaggccggtgccctgccgggctctgataatgcagccgggactcttatctggcctgtgtcagggtgcaggcggccatggagctggggttccaggaagccctcctggggccccccagccggccccgctccccccggatgccgcctgctgctctggacgcggccgattgcttgtcagtgtcactcccagctctgccggggggaattccatgctggcccccagcaggcggggcccccaccccttcacgtcccaccccccactcccattttggcaaggggactgggaaaaggcagctaatttcaagtccgcacagcgtttgtggtcgtgtcctgaatcctccacgattaatcacagagcatctgatttctgctttgcctcagagaggggcggaggggacgcctggaagtttctgtttactccattctgcaccaggctgcgtgctaatcacaaacagactgggacgcagcctacccctcctaaactgctcttggccaccccctccctcctccagccctctccttcctcttcttaccttgtcactttcctccagccccttcctcactctttctcctttccctcctttctttcccctttcccatctgtccgcctcttcagtccagatctgatccattgcacaccccttccttccgtcctgggtttcccccaagcccctttccccctttgcgcctcccacttctcctagattgagagtcagcttggttctttcctttacatccattagtgagggtcaggctcttttgttatgtttttttttcttttgtataacttaattatttcagggttcggggtgggcgctcgccccttgcccagtcacactggtgtgtgtgcgactcctacaaagttaacagtttctccaggtcaaggggtgggatccaggcttggtgatgtgcacaatttcttttgtccacttgacacatctctgcgtcctgattctgctcagggacggacccaagaacaaagcagccatttaccgcctccggaggggaggccagccctgtggcacatccagggccttggaacacctagagacagatttctctccctcgccttggctcctttccactctgcagctagtgtggaaaagaaaccagaaataaacagcaccaaagaacaggaacggacacccctccccattaaagcacacacacagactctgaagggtaatttggcaaagacctctgaaaaccagagatgagggtctcctactacttatgcctgtgcacaggagacaggcacagagatgcttgctgagagctgcttatcataggaaatgatgggaaataactgaaatgctcatccaataatgactgcttgaacaagatgtgaaagatatggtacatcaggcagcggttttttgttttttgtttcctgacaatgggccttgtctgtcatccaggctgaagtacagtggtgtgatctcagctcactgcaacctccatctgctgggctcaagcaatcctcctgcctcagcctcccaagcagctgggaccagagacgtgacccaccatgcctggctaatttttttaaaacattttttgtagagtcagggtcttgccatgtttcccaggttgggatgaggcagcaaggtacttttttttcttatttttttatttttaaaaataaagatggtgtctcactatgttgaccaggctggactcaaactcttggcctcatgtgatcctctcatcttgttctcctaaagtgctaggattacaggcatgagccactgtgtcagcttagccagcagttttaaaagagctatgtctgtattgaagagcagaggtggatctccaagacatattactgagtgaaaagggggtcagcatgatacatttggtagaatgctgattgtgtaacattccccctttacacacataaaatgaaacactgtggaaacacttagacagcaagacaggctggaaggatgtaaaccaaactgagttgctacctctgggaaaagagtttgggagtgacgcttttacctgtaatcctttcatttctaaaagtgagaatagattggtctgttacttttgtcccagccatcttccttctttttaaaaaatgtgttttattttttatttaaacggagtctcgctctgtttcccaggctggagtgcagtggcacgatcttggctcactgcaacctccacctcccaggttc

SEQ ID NO: 1561828 - DNA, 4001 bp, Homo sapiens
gctactctggaggctgaggcaggagaatcacctgaatccgggaggcagaggttgcagtgagccgagatcaagccactaaactccagcctggacaacagagctagactccatctcaaaaacaaacaaacaaacaaaaagccagatagtagatatttttggtttttcaggccatacagtttttgtcacaactactcagttctagcattttagagcaaaaccagctgcagacattatgtaaaggaattatgccatggctgtgtttcagtaaaactttatttacaaaagctgcagcagctgttgaggatgatgggtggccctgcctctgacccttgggtagccagcactgcctgctacctgctctgaggacttaaaattctcatttcattctcccaacaccatatgagacaagtactattactatccccattttgcagataaggaaaccgaggctcatgccaggcgtggcgactcacgcctataattccagcactttgagaggctgagatgggcggatcacttgagcccaggagttcgagaccagcctgggtctcatagtgagacccggtccccacaaaaaatacaaaaattacccagatgtggtggcgtgcacctgtagtcgagctactgcggcaggctgaggtgggaggatcattagagacctcccagcaagtcgaggctgcagtgagctgagactgcaccactccagcctggctaacacagtgagaccctgtctcaaaagaaggaaaggaaggaaagaaggaaaggaaaaaggaaaggaagaaaagaaggaaaccgaggctcagagaggacggaaatgagtcctccgaggtcacacaggtaggaaatgccagagctgaaactggaccggggcgcgctggactccaaagcctggcttcgggactccgctgtgcttgctcccgcagctctgctgaggacacgcccccctcccaggagccagacctcctccagcggggaagaggccccagaatggaaataggattgggagggggacctgccaagctagaaagatagccctgggtggtggccgagaaaaatcaagcccaacctcttttggcttcagggtgttgcagccccagcccctgtgggcccccttggggcctgcggaccgcgacagttcccaggcagctcagctgcgccccctcccggctgggcctggtggggctgatccatgacgttgacttggagtccagccaagcagtgtttcttgtggtaaaagaaacagacctccccctggatgattggggatgggatggccaggctgagacccacaatctcaggagccttcagcggacagctcctgacaagtccagtttgtcacctgcgaccaagggtgacattcctgatgtttaagcaatggcacagcagcaaatggaggctgggtgctggagcagggtcttgaagaccctgtcccctcccaccatgtgtcaccacccctgctggggctggcattaaccctttagctactggattgtgggcaggtctaggaggtccctggggaggcatcaggaagagaggaggaatgctcgggtggcttagggcagccctgggtaaccagcactctgcaggcatgagagacagtgcagagaccctgctgggccccagggcagagaagggaggcacagagtcatgcagttcccaaacctttggtggcagacaggacagcctcttctactccgtgtccctcgctgcctctctctggcctggcacttagaactgatgccgttcagacccggctggtgtgtgcagggagaggaagccagatgctcccagacactggggactgtcctgggcctccgtccccaaggtgtggctggaggaagcagagtctactcccgctaagtctgtccgctcactgctggccaaagctgccctgcgtctcctccccaccgccagccagagggaacctgcaatttcacctcatttagaggtaaaacatctaaatttaacgttatgggcttttggggctgggtggcttttatgcctgagtccctcacttagggctcctttttatccactcaaatgccagctagggcttagtttgtttataggagtttccaaaatagctcctttggtttcgcatgaaaggaaatggcaaaatagcccaggaagaggaatgtgagtttacacagaagacagacaggcgcccgaggaggcttctctgggaaccagttcgcctgtaccagagggggcccgagaaagtgtggagtccaacagtccaactcgctcattttaccgatgtcaagactaagcccaggatggtcacacaacttgcctggaccacccaaaggcgactggaagagccagaagaacccaaactactcctccctgccaaagcacaggcctcagctggagcccccctccagcctttgccctggctgtgtcctctgcctggcacacgcctcccttcccccaggtcttccctatcactctctcccagcttgcaggcctcacaaccaaggccacctcctcagagaggtcctccctgacccccttggctaacgtggacttgcccctcacccgtatccttcaaataactcatggttctgattgtcttattcatcagttaatcaagtatgcttctcaagaatcttcgctccagggagcagggggtttttctgtctttttaaaaaaaagtttttggggccaggcacactcctataattatgggctcacgcctgtaatcccagcactttgggaggctgagtctggtggatcacctgaggtcaggagttcaagatcagcctggccaacatggtgaaaccccatctgtactaaaaatacaaaaattagccaggcgtagtggcgggctcctgtaatcccagctactcaggaggctgaagcgggagaattgcttgaacccaggaagcggaggttgcagttagctgagatcacaccgttgcactccagcctgggtgataaagcaagacttcgtctcaaaaaaaaatttttttaaataaataaatacataaattattattattattatttttatagagatgggtcttgttatgtcacccaggctggtctcaaactcctggcctcaagcgatccacatggtgtgagccaccatgcccagcctgctggtttttaaagagcatatttaaatgaaaagagacaaatttaaaggacccttggtttaaatagagcaggttggaaccagcttcagggcagcccatggtcctggctctgccatcctccagaaccacctggagccaggaggggacacccaaggtgtctctgcagaggacagcggcctgacggatagacacacaatgagtgccctgatttgtgatttaagagaagaacaagcagctccttgggaagccccagtgtcccctgcgctccactgtcccaggactgcaggcaaagggacgcctcctgaccgcagaatagtcaacagcaggcacgggagtgaggaccgggatccagggaggccgcttccctctgtctatcagtctgcagccctgggtcccagctcactccattggggttttcccagataaagatgactcatgaatttctttgaattatccagagggcattttaattcaaatggccccatcactgcctcgtcaccactcccaccagccatgccaggggtcagccaggggtcaccttgaagacaaagcctctctttgggaaagaagcctttgaggccactgtggggtggctgtgtgtcggggcgccaggtgggaaggcagctggggcctgcccaggctagggaagagagcgtgggggtgtgggggatgaaggaagataaagatggggtagcgggagggagcgggggaagctgggcctccaagaagcacaggctgacttgggaatcccatctcaaacgtgcctcaccctggtctccagctgtaggagcagtgataaggatgaggacaggcaggagggactgagatgagatgagagcatttggagcctggagagagacccctgacactgagggagtgaggtgacctggtggtggctattcc

SEQ ID NO: 1561829 - DNA, 4001 bp, Homo sapiens
gtgacacagctttgggtgagtcccttcacctctggaagcctcaccttcctcatctgttaaatggagataatgatagccatgtctcagagttacagggaattaaatgtgaaaatgctcaagacataacagagctctataaacattgggctgcagggcaacgcagcatttcccaaggtcactaggagtcatgacagcccagtgcacgaacctggctcctgacccaggatagaggggtctaaatgggggctgagaaggcgaggcactgggggatgccctagttcacagcacaggcctggccagggtgggggaacaaggacaggcaggaagatcaaagaggcaggggtgaggaggacgacagcagcagcctcactaataaccccattcctgatgccaatcaggcctggccgtcccctgcctggggcacaggaaggcttgccagggaggctctggaagtaccggtgggatcccagcatcctggcttcccatctctgcagcaggagcctaactctccctcaaaccctgccagggatcatctcgtccattcccctggagtcggaggccagggcttcagaagggaagctgtgctcgtgtgtggccagagcctttctgggtgctgaccacccctacctgccctcccaattctctttctcctgagctcccgctccccatcactgagcccagcagcctcctctcctccttcctccttggttccaaagcccagccctcaaggccacgccaaagaggcccacacgctggccccttcccctgcttcaggcccagctgcagatgtggtgcaggagggtagggggcaactagggacctgagccagcaaggagggccggactggtccccaggacccaagtcagagagcccctgtctccccaagccctgagctctatgtcaccatatggacctccctgggcaagtcccaagcccctctctggcctcagtttcttcttctataagtgaaggaggtgactcagatgttccccaaggttggagttcttagtgtggggatcataaaactttttgagaatctgatttaaggcagtggagcatcttccaaggtaaagatgcagcgaggactcctccctccaacctgcaccacttcgtgtgcatttcaggggattgtggagtccctgacacccatgccctgttctatgctcatccatactattcctgggtaccaagcagttgccaaggtaaatatgggatgtcccccttctaggagtttgcaatctaatagtgccagaggtgctggtcctcattctgcccctaagtcgctgtgtggccttgggctggtcccttccctctctggacctcagtttcctcctctgtgagatgagtgatggagagatgaggcccttaccgtgtgggcctggctgaaaaggaagcgcagcaggtccttgatgttcttggccttgtccctctggaagtggaccacagcctgggtggggctgaagcctgtggcctgtggcacctcgggccagcccaggtccaggtctggggggtctatgtcagaggccatggggaagtaagtccctgaggtgacttcagagagcaggctgaggcggtctggcccggaggcctcctgcccctgagcctcgctgagctcagggcccccgcgcacatggctggtcatgtagtccacatccagggcgctcaggaagggcagctcccgctcctcggagatgacccgcaggtaggcagcctcaccccgctccaggagggcgtcggccgccagccgagccgcctcgctgtgccgcagcaccagcggtgagctctcccgccaccacggcagcttcagctcttccacccggccccgcaggggtcccgccatgccctgggctcccaggaccccaggccccgggcctccgaacatgcctgccacgcggctgcctcacccgccggcagggcccatggcccgcacgctgggctggctgcagcaggaagaggagaccagcagaaccgccttctgcccgcccgctcgctgtgtgtgtggcagggcccccaaactgttgccaccctaaatcagagccacgctccaccctattgcccctggcctctggaacctgtcaggtcagccccacctgtctgcctgtgttgggactcgcctgcccagggaagcggcagtgccaggccctcggtgcacactcctgcctccctctcttcctcccagcaacgccgccccatccccaccaggctcccagcaagtctccaaatgctgacttcccgggacccacagaggttgaattacagccaagaggggcccaggcgactcaggaacacacactcacacgcacacgcacacacactgcaggtgggtgagcgactcaagacacccaggaaaagacatgaacacccatgcagatggacacactgacaactgaccgatacacagacatggagtgtgggctgacacagaccgaccacacattgtaatcacatccacttgcataaactcttcacccaaacgccgatgtagagaccggccatgacccccacaacacataccacagtggatagcacgtgccctggctcaagtctgcaaggccctgagagctgaacgactgtcacatggaatatccaaggacatcaacgctggtctgtcccccagccagccctctttttgctcccataatcgtcctgccactctccatcatcttaactgtggtgctcacagccccctggctctctcccaccccggctcggagctgtccttcaagaacctagagcagtggctctcaccctgaccccaggggtggtgagaggtgatgaaatgcagatccccgggccccaccctcctggaaattctcatccagaaggtgtccgtaggcttctggagcttgtcttttttctttttctttttgagatagggtcttgctctgtcacccagtctggagggcagtggcgcaatcacagctcactacagctgtgcctcagtttctctggactcgagcgatcttcccacctcagcctcctgagtagctgggattacaggtgcatgttaccatgctcggctacttttaaaatttttttagagatgggatctcactatgttgcccaggctgatcttgaactcctggcctcaagcaatcctcctgtctcagcctcccaaagtgctgggattacaggtgtgagccgccacacctggccatttttcttttttaattgagacatgatcttgctctgtcacccaggctagagagagcagtgatgtgatcatagcttactgtaacctcaaattcctgagtttttaaacaagtgcccagtgcactgtgggcagtgggctaaggcccacccctgagacatgctgttccagatggctgtgcttgcaacacccttaactccagggatgttcttggcctggtggtggccagaccccagccttcttcccctcctccagggctgagtatgaaaatggttggaaggttgtttcagagaatgggcggacacactgcaaggtcaggaggcaaacagggcaggtagatttctgacctctgccccaacaaagattaaagtcctggagcatgtaccgtgtgtccttcggaggatggtgagcagctttgctctggggaagggggtgagcaggtgacagctgcagctggggagccaggctaggcagaagcggtcaccacctttccacggaggcatgaggtccagcgaggatggcgggaagcgcagaagacctaaagccgtgcctcgcagcctgtttagcactaagcgcacttggtttatctggtctgcgatcatgtccggaacacagggtcttctgtgtccaaagaacttgacacacatatagtgggagggagctgggtgggatttagaggttccggagttgagctgagccctaggaccaaaggtgaatggggctagggctgtgtcttcaaggaccctataagtgaagggcctgggggagcatgggggagccacaggtcaggagttatggcctactccatcccatcccaggtgcaggagcaccgggcactccaaggaggccc

SEQ ID NO: 1561830 - DNA, 4001 bp, Homo sapiens
aagaacattggtgagagtcggggcttggacatgtcaacctgacaatgcactggtatcttcacccacactcagacacactcaggtaccagccctaacaagtcttaacatggctggggctttatctgccatgtccctggcacaggcagatagccagggagctgggcactgccagtcagcaagcaacctgaccatggctccagaccaaggtgtctgccacgacactctatgtgccacacccacctgcaggctgccttcttcctccttgatccccagcaccctgctgcagctttatcgaggctggcaagcagacaagacctccattgcacccatgaccatgccatactaagagtcagacagtaggaccaaaacccactatgaatacagaagccgatctaatgcaaatgtatctgcattttaggagaccactgcaatctggcacagacccagcctatggaaaacaaaccccttgccccagtttcccctccagtctctggcagtagaaaaagcggcagggggccgggtgcggtggctcacgcctgtaatcctagcactttgggaggccgaggcgggtggatcacctgaggtcaggagttcgagaccagcttggccaacatggagaaaccccgtctctactaaaaatacaaaaattagccgggcgtggtggcgggcaccggtaatcccagctacttgggaggctgaggcaggagagtcacttgaacccgggggacggaggttgcagtgaactgagatcccaccacttcactccagcctgggcaaaagagaatctgtctcaaaaaaaaaaaaaaaaaaaaaagacaagaaagaaaaagcggcagggctctcactttgccactctcgtgtttatctgctttttacagcaaaagatgcatgaaagtaattagcaataataattgcttcctaatgccccgtagttgtctctggagaccatctttctggaactttccctgcgtaagttctttggtaatgagtctcctaagaagctcctgaaagtgggatctagcgttggctgacagacagggaaataggcaattttccaagtttgattttaactgaaatttggaactcagagtacttctggtccctccttcagggatatgaacgttaggagatggaacccgggcacaattcgcatccttgggaaccgaggctttcccactatcccctgccacgaggagcggcccgggggatccgggggagacacgcagagtggggtgtgagtcggagaccctgggaccacctagcccgcgcgcgcttccggtagggcgcagaggaggtagtggccccggcccgtactcccagcaggcctcaatttcccattcttgaagggggtctcccgtgcgacccagggccctggagggccgctcacctctcgcgccgagcggagctgctggcgcagagcgtccttgcagccgtaggggccaccttcgccagcgccgcggggctggaagtgcgtctcgacacgcgtggcgccgcggtaggcgccctggtagaaggcgggccagccaagctccaacagcggtggctccaggtccgactgctcggggaagtaggtgcccgaagagcagtcgtgcgaggagccgaacgagtcctcggccgccgccgccgccgccgcgccctcctctcccggcctctccgccgcgcgcagaatggcgtgcacctcatcggggttcaggaaacgagccaggcgctcgcgtcgcaggaaggccgcgaaggcttcggggccgcccgccaccagctcctccagagccaggcgccgtgactcgctgaacagctcggtcgggttgggcggcccgcacggcgacaggcaggcggcgggcacctcgtccaggccctcggacagcagagccatggcggcgctcggactcgacagccctcggacaaaaaccggcgtgcagtcccgctttataggcaacctttgaatcaaacaggcccgcgccattggccgcacctccccgcctcggctctcccattggctgctttccttccaatagcggagcgaggcggggcgcaagcctctacggctccgccccctgatgcgttattggctgcgatgctgggcttgctaagaggaatttaaacttgcaggggcgaggcgggccgcagagcagggacagagcggggagagccgagctcctggccatcccagcgcgccccctgccggtcgccccgctgcgcggccgtgcaaggccagggacagtcaggcctagacaacgaggagaggcaggtgccgactcccggagactctggccacgctgctcctaggctctcagtgctttggcatggccaaccatatcgcctttatcacctgcctttaaccatgtattcattcattcaaagaataccggctcatcgtattaggactgctcctttgattacaccctcgggtagtcttctctcatttcatcgatttttgccttgtaaaaccccaaccaaccgtggttataccctactttccacctgcaccccggcagccctacagggctgaagaaaaaacaaaaagagcgtaaccatgcttactgactggtcatgttttaaattcataatccgtaagactgcctgctaggaggccgggcgcggtggctcacgcctgtaatcccagcactttaggaggccgaggagggcggatcacctaaggtcaggcgtttgagactagcctgaccaacacggtgaaaccccgtctctactaaaaatacaaaaattagccaggtgtcttggtgtacgcctgtaatcccagatactcgggaggctgaggcaggagaatcacttgaacgcgggaggcggatgttgcagtgagtcgagatagcaccactgcactccagcctgggcgacaagatcgaaactccatctaaaaacaaaacaaaacaaaacaaaagcaaacaaacaaaaaaactgcctggtaggccgcatttccctcattctctctaccttttcctctctgacagcttgtcttccatgtcagcaagaacacagaaacagtaagaagggaacgtccacgtgcggccatctagtctaccttcctgtctgcatctctgcccgtatactgggcattgatgaactgtgcctgtgcccatccaaccccaacccctctgcctgggcatttccagcccctctactactcaccagcatcgctccagcaatcttcttctttctcctggaacatcagcttccctctttaccgattcatttctatcagcctacaagcatgctgaaatatttttcatcttaaaacaaccctctcttgaccctacattcctctaaagctccccatctcacttcttatttttgcagcatagaatctcagatgtggctggccatggtgacttacacctgtaatcccagcactgtgggaggccaagggaagaggatcacttgagcccaggagtttgagaccagcctgggcagcatagtgagaccctgtctttacaaaaaaatacaaaagttagctgggcatggtggtgcgcctaacttttagtgcatggcagtgctcatgatggtcccagccagtgggaaggctgaggcaagagatcacttgagcccaggagtttgcagctgtagtgaactatgatcacaccactgcaccccagcctgggtgacagagtaagaccctgtctcagaaaaagaaagaaagaaaagaaaagaaaagaaaccctcaaaccagttgtctatacttgctgtctccagttcccttccagccctcttcaatcaggctaaaacccccactgctttaccaaaacctcttgtcaggttcatcatgagttccacagagctaaatccaacagtcaattttcagtcgtcatcttttttatgtaaatgaaaagtgggtcataaatgtgagatgttaccattattatttagcaaccaataacctttttaaatggatgaatgcctgccgctgttgagacgcctctccctctctacctctcctctccccatccccatccctttgtgaagtttctcaagaataagtgtggggacttcca

SEQ ID NO: 1561831 - DNA, 4001 bp, Homo sapiens
gtttcagaattcttttgttttttttttcagacagggtctcgctctgttgttcagtctggagggcagtggtgcaatctccgctcactgcatcctcgaccactgccccccacctctcaccccggcaacctcccgggcgaggatcgctcaaggatctcaaacgatcctcccacctcagcctcctaagtagcttggactacaagcccaccaccacgcctggctacattttgtttttttgtgtgttttttttgttttttgtttttttcgtagagacagagtttccctatgttgcccccaggttggtctcgaactcctgggctcaagtaatccttccacttcggcctcccaaagtgctgggattacaggcatgagccaccgcacctgaccttagaattattttatatcaaagttgacttattcacatgatgaatggcaaggccttattagggactaaaaaaataaaccaatggatggggaagaaaatcatactgactaataaacattagacctgcataactgccaaaggcctcactttttaagttatgttatgcagcacagagtcttcagattttatttacttatttatttatttatttattcatttatttgagacggactctcgctctctcgcccaggctggagtgcagtggcgcgatctcggctcactgcacactccgcctcccggggttcacgccacgctcctgcctcagcctccagagtagctgggactacaggcgcccgccaccacgcccagctatttttttgtatttttagtagagacggggtttcaccatattagccaagatggtctcgatctcctgacctcgtgatccgcccgccttgacctcccaaagtgctgggattacaggcgtgagccactgtgtccggcccagattttattttagtctaccaggtagtagcaaactatccaaggacttgcccaggaccattcaggtcagtgagctacagaatctagttctggaaaggcagccattcttactattcacaaagtgtagaaaacgtgaattcagattccagcagcaacaaatgactggagcacaaaacgccagccacagttggtgctaacgcagctggctatcagctccacaggatgaagcactgtccaagggtctgatcagtgaagcatcacccaagactgatgaacacagctgatatgaggggacccaaagttccctgagtcaagacagaagagctgtgtcacggtttgcacagaaagagaaagagcaactattcttacccacggaaagaaaaagggagaaggccatcaatactacccttaggcttgtgcaacgagaaactgctaaaaatggggggaaggtatatatcctatcatactgatgtttaccgaagactccgcatcccaaatgctaagcaacatactgtagggccttgctactcagtgtgtggtctgcgtgccagaggcttcagcctcgtctggaatctagttaggaacacagttatctcagaacccaccccagtcctacagaatcagaatctctaagcgattcgcaggcacatcaaagtgtgatgagaggcgcggcagaatatctgactacattctcttaacagcaccgtgagacaagtactgttacgatctccatttcacagaggaaaaaaaatcaagggtcagataagccccctgccaaagatcacaaactcaggagcggcgagagtcactgaagttctcaccacagccaggcctgcgagaggcactggcaacccaggccaagagctgaacaaggcctcgatgcgctccagctctgggccggccgggaggacaggaggcacaggccaaggcccaggacggtcgtgaacgcggaaagaggccgccgcgacctcctccccggccgccgccactcacctgatcctcccgaaggtgggcgccgcaacaccaaaccggggacgccgcgggcggcggcgacacagatactggctcctccggcgactccgagcctcacagccccacttccggccaactgcccgctacttccgcctgctgcgcgagtgacggatgcggccgaggctcaaaagactctgtcagcgtttcccaaggacattttccactggaggacgttgttgaggaggcagggggagtctaggacctgcagagggaaaacaccttcctggatggatcgctctggaagtcattaagcagcttagtcccggcgcggtggctcacgcctgtaatcccagtactttgggaggccaaggcgggcggatcacctgagttcaggagttcgagaccagcctggctaacgtggtgaaacccccgtctctactaaaaatacaaaaattagccgggcgtggtggcgcacgcctataatccagctattcaggaagcggaagcaggagagtcgcttgaacccgggaggcggaggttgcagtgagccgatatctcgccactgtactccagtctgggcacccctgtactccagctctgggacacagagcgagactccatctaaaaaaaaaaaaaaaaaaaaaaaagtaagtagcttagacacatgttcaaatctgaggaccaccactcagggttttatggccttggagaagtcacataaattcattcttgttatattattattattattttcatagagacggggatggcagtgtcttcctatgttgcccaggctagtctcgaactcctgggctcatgcaatactgccgcctcagcctccgaaagtactgggattacaggtatgagccatcgcacccggcccacataaattctctaagcctgtacagtgagaaaaacaatacattttttttttttttgagacaaagtcttgccccattgcccaggctggggtgcaatggtgcaatcatggctcactgcagcctcaacctcctgggttcaagtgatcctcctgcctcagcctcctgagtagctaagaccacaggcatgcaccaccacacctgtctaattttaacaatgcattggtcgggtgtggtggctcacacctgtaatccccggtgttggagaccggcctggccaacatggtgaaacctcgtctctactaaaaatacaaaaaaaaattagcggggcatggtggcgtgcacctgtaaccccagctacttgggaggctaaggcaggagaatcacttgaacgcaggaggtagaggttgcagtgagccgagattgcaccactgcactccagccggggcaacagtgagactccatctttttttttttttaatgcatttataatagagatgtatctgtaaagtgctctcaggaaaagagctagtgacatgatggatagatgagcctgctgagagaaatggatgtggagctggggcttagcgaggccagagctatggagcatgagccagggtgattctccaccaccctaagaaggagggctgggtcctactgggtacatatattgacacagctgtcagtataggtacctagacaagaaagagactctactaaacctctacctatcagaaagtcctggccccaggctgccattcctgagggcacttgagatctgctgatcagggtcttcatatcttgtcaatgccttggctctaaggggtgtgaaggagagctgagaaatcatgctccctccagggcctatcttgtagggaagacaaaatcaatgtaggaagaacacgtccctgccaggaggggcaagcctgacatcccaactcctgagctctggagacagcgctgtttgaatatctggagccccagaccacagacaccactgcttagggagggttctctccctcaggccagaccagggcaaacactattcattgttatgactctgtccttgccagtagaacccagagaaagcagagagcctgcccccaaggaatgaaccatgtttgttcctaggcagccatgacaatcctgtttctctttgtaatactcaaattcccattctcccttgaagtgggaggagcatgtggctcagttctggccaacaggacttaaagggaagggtcctgggagggctctgggaaagcttt

SEQ ID NO: 1561832 - DNA, 4001 bp, Homo sapiens
ttgcctctgtcatcatcagcttcaggtatcatttattacctactgactgtatgatgtgctctgtgttaactcctgtcttctgttatccctttttcatcctctcagcaatctcatttagaaatgaggaaactcagcctcagagagatgaagcaagttgcctgaggtcacacagcaagttagatgctggagcccaggtggaaatccaggtctgcctttctatttcaaactcttattcaccacactgggaaaccactttgataatgttgcaatgccaaaatgaaagaaaactcctcaaactacgtgaactaaattctcagtagcctttactaagcatttctatcaacacaaatcttgcgcagtgaggagacaaaagatgccccttcatcgtcaaactcataacttggcattgaactgttcgactttaagatccttacaatttcttaaatgctataattgtgaagtctagttatttaaaatgttttgtatataaagaaaataacttttaaaggtgattccttactgcttatttcactgggcaatctgatataaggtcttttcctaacttgggtgatcaaaacactactcattcaggcaatagatgctgattccccttacaacaaaatgcaggctaaaattagccaagctggttttcctgcattcctttcctatctttctgtgccttcatttttgagtgaacgtctagtctgcagcaagctgttacttgtcaaggatagcagcaaacttcagccgggaaaacgcatctaaggagaccaaaacaagaagcaaagttactggcagagtgctgaaaagcccttcgcagacagtcaaagaaacgaaagcatggagggatggagagcaggaaggaggaaagatgagggggaaacagtccccgacccttcccctggaatatctgaaggtgcttggtgttcgaaggccacccgacctgtcttttgccagctctgcaggatcctggggcggatgttgggtggataaagcatgccccttactcccattaaggcagcacctgcggctgaactgaaagtttattttgcggccagatgcgtagggccggagaaggtggtcacatccagacgaaattattttcaatcaacagctatttaagtacaagaggctgcagaaagaaaggggctaagggggctcaggagccactggtgcccatgaaagcctcccaacctctagctccccagccctagctccggagcacccacctcctttccaggagcccgtagcgtccagcctcgcagtcgcgcacgtggagagctgcgtccctacaaactaccccgggccgagccgaggagcgggcgctggcgaagtggggagcggggggcgcccagtggcggcggctgctcagctaaggctgcggcaggtgagggctggagccagggcgagcaggcgaagctgcctcgggacctcccacggaggctcggtgcctgcccccagcctggcgcggcgtgcccggtgcactgcacggccccagcggcccggctgagggcagcgcgcagcgtggcaggcgagggcacgcccagccccgggcctgctaggtctcgctcccgcggagaggaggcgcagtctgcagatttttaagggcaaagggtggccgaagggctgctcggcggagagaaggcggcgagaacccggggcgcacgctcagtatctgcagctcctcttgcgatgtctcatcctgacgctttaaggccgcctccagtttccctgttcccccaggcccgccggggactagcccagatgattaaagccgcgccacttcccctcctttcaggcatacccatcactcacaccccggggtgcgtccaggcccaggagactccagcctcccgcctagaacagctgcctccctcagaaagagccccggagcacttgtggtcagggaggtgaaggcaacgacaaaacgattcgtctctgagtaagagggtggtgtcagtctccagaaggctgaggctcccgaccaggggagactccaggagacccaagggcaggctgcatgcggaagtctgggccacacctggtatggctcacctcaggatcaccaccggtcccgccagtcgccttcctgttggatttattttcaaagagggctggggccacccaggaagggtgggtgacctgggcagtttacacaacctctccaagcctcctttgttcatttaatcacatttgttgagtgcttactgctctacaggcctcccaatgggcctgggctcagagaatacagtggttaataaaacagacatggaaatgacagtttcctcatctgtgaaataggtacagagatagaatgcgtgctcttccacggagggatttcatgcaatatagtacaggctttagcgatttgcattaaaaggcttgtgaacacttaaattttaataaagaagttataaaatttagaagttgaatctgttttcgcttaaacattaccatattcaggaattattatgggtttgaaagtacatttaatttaaaaaggttagttgaacattgttggcaaatataggatattataattgaaataaaatcattaaaaacttgaaacagaatgtcttcacttggtagcgtttgtcaacgatgggaagggtcatctggtcccacttccctacctcttaacatcatgaaaccctgcttatggcccattagaacttagactgtggtcagtgcgcgcgcgcgcgcgcgcacaaacacacacacacacacacacacacacacacacacacatatatttttttgagatggagtcttgttctgtccccaggcaggagtgcagtggcacgatcttggctcactgctgcaccctccgcctcccgggttcaagtgattctcctgcctcagtctcccgagcagctgggactacaatttttgtatttttagtagagaccaggtttcatgatgttggccaggatggtcttgatctcttgaccttgtgatctacctgcctcggcctcccaaagtgttaagattacaggtgtgatccaccgtgcccagcctgtggtcaagattttatgtgtgaccttgaattatggctctatctattcataccaatatggtttttctcttttcaattgaaaatatctgcattgtgctaaagaattcgactggttttaagcgttcttcttggcctaggttaatttttaaacttgtaattttatgtagtgacttgtgtgtatataaatgtgtatcatatatatacacacccatacatatacacaatatatatagataagagcacaaatcgtgaatgtatagctgatgagttttcgcaaactgaacacacctgtatacagagtatataaagacactagcgtataaagagtgcccagttgaagaaacaggacatcaccagtcctcggaagcccgttagtgaccccttttagttattcctttcagttatgatcactgccgctgcctgcccctacccccgaccccaggcccaggataaccattatcttatcttctaactcctcagaagggttttgcctgtctttgtactttatataaatggaatcagaccatgtgcactattttgtgtctggcttcttgtgttcaacattatgtttgtgagttttatccatattatgtgtcctaggcttttttttttttttttttttttgagaaagggtcttgctctcccccaggtcagagtgcagtggcatgatcatggctcactgcagccttgatgtctcaggctcccaagctgggactacaggtgtgaaccaccgtgcctggctaatttttaaatttagctgcctgagctggtcttgaactcctgggctcaagccatcctcccatcttagcctcctaaattgttgggattgcaggtgtgagtcaccatggccggctgtcctaggcttttaatttaactttatgttttacttattacacggttactgtcgtttgtgtgacacaggtccaacccatcccccaaggtcctgggttagaagtgggttaaaaagtgtattctgaacttcaaa

SEQ ID NO: 1561833 - DNA, 4001 bp, Homo sapiens
gctcactgcaacctccgcctcccaggttcaagtgattctcttgcctcagcctcctcagtagttggaattacaggcacgcaccaccacgccaggctaatttttgtatttttagtagagatggggtttcaccacgttggccaggctggtcttgaactcctgacctcaagtgatccacctgccttggcctcccaaagtgcctggattacaggtgtgagccactgcgcccagcctggttctttcctaacggcagaaacagtcttgcaacaaggtcttactttaagccaaaagaccggggttcaaatcttcactcttacgggttcaaatcttcactcttacttaacttactatacctcctacctttccaggcctcagtttcttcagctatcaaacagagctgagaggaccaaatgatttttaaggtcccttctatatcccaggattcactagttccctctcattaatcagcacagaggcttggaacaaaactccaggatccatgactaccttcaaacaacaggggtgtgttgtcagccaggccacttggctcccagctcacctaggccagaggaagcagcagctgccttgtccgcctccccagcgttcacgaaaggtggctgacctaaacccaggacagagacttggggccactaccactctcatgatctattcttagcccagcctctcagggtgggtgaggaaggaaggtggaccaaggacagaaggacttttttctaggttccaatggattctcaggcaccacccccaggcctgtcactaaaatcttcactgggactgataaggaagatcttgccagagccaagacccgtcaggcatttgaggaagctgcctgtgaaaggaaccagggttttaagcagataaccaaagttgggctgactttcaggacacgccagagacacttattctggaaaacacttaggctcacatcaagggagcagttttatctttcagagtttccctttatgaccgcaacagagtttttgtgcaataaacttactaaccgggagttttgaaaaaagcaagtaagcaagcaaaggagtggatgggtggagttaaggagatgtctcaaagcgcccagctgggattgcttttctgggccactgccatgcattctgagtggctgagatgatccaaggagatccaggggaaagggcacagactagggggttccagccctctgtgagtatctcacaggcgggggctctgcctgtcacaggctggggcgaggctcttccacaggtcgtaaagggattctgtcacgcgctggagggatctgatctgacgcagggtggggtctgcgcggggtctgccacaggcaggcaggacagaggtgagatggcatctcccaaacagggcaggggtcagctcctaactccaaggggaggcgggggagtggtgacaggggctggttcatccccaccccattccacacccctacatatacagagacacacacgaccccgcttgtcaccacctgcccagtcaagctcatgctgcccaaagtgggtctgcaaacactaactgctagtgacaccagctaccccggggcctcccaggcgtgacacgcgtgcagatgctgctgtcacggctaggaggaggacctcccctccaatgactcgtccaccacggcagctagcaccggcttctctgggcgaggcgacagcgggccggctcgggcggggacagcggaggaccggggtgcactcacacgttgaggacgttgcgcttgttgctgaggtagctctcgggcaacggggacaactccttgaggagggagcccgccagcatggaggccaccagggcccagggcaggtagcgccgcacggccgcccgcaccagcgtcccccgcaacaaccactcgcagcgctccagatgctccatgccggatctcgtcagccaccgtcctcctctccgtgccctctcggccaccgtatcgcccttcgcccggacctgcgcctccacctcccttcgagcgcatgcgcactgcccgcgagtcccacagcttgaggcgtgcttgggctccggagcccgcgcgctccccctcgtggccgctgctgcctctggcgcgtgacggtccccgaactcgctcgtctcctctgcgctctcctggccgcctcctctccccgagcctccgcgtcttgctctggtctgggaaaaagcgcttgtgaaagtatttgctggaggctggaagaggataaatgtagccctggagaattggagcagtagtcacagcatcatttgatctttcttggagcctcggagacacctctgccatctgagtcttagttttctcatctgtaaaatgcgagagacaagaggagatcaacctttcccaaaagctagtttatgagctcaggggttcattacgttggcacacgtagagggacatgagatgaagtttccttaggaataattattgtatttatttatttattagttagttgggggggggtccctctctgtcgcccaggctggagtgcaatggcaccgtcgcagctcaccgcaacctcaaatttctggtctcaagcaatactcccacctcagcctcccgagtagctgggaccacaggcgggcaccaccacacctggctaattttttttatttttatttctgtagagacagggttttgcttcgttgtcgaggctggtctcaaactcctgggctcaagcgatcctcctgcctcggcttcctaaaatgctgcaattacaagtgtgagccaccacgctctgcagttattaaattaattaattaatataattaatttatttagagacatagtctcgctctgttgcccaggctggaatgcagtggcgcgatctcagctcactgcaggcctctgcctcccaggttcaagcgattctcctgcctcagcctcccgagtagctgggattacaggcacgcaccaccacacccagctaatttttgtatttttagtagagatggggtttcaccatgtcggccaggctgaccaactcctgtcctcaagtgatctgacctctccaaatcttaacctcaagtgatctgccagccttcacctcccaaagtgctgagattacaggagtgagccatctcacctggtgcaattattacatttaaagtttaaatttctaaatttattttcacctgggcaacacagtgagactcagtatctataagaaataattttaaaaactagctgacttggtggctcaggcctgtggtcccagctactcaggaggctgaggtgggaggattgcttgagcccaggaatttgaggttgcagtgagctgtgatggtcccattgcactccagcctgggccacggagcgagaccgtcttaaaaagcacacaaagaaacacaaaacagctatctatgcctgttggatgaaaatgctggatgctgggggttaatggggagatcacatgaagttgttggagactcagttgctcagtttatcacaaaactaacccctcacccctggttagggctgggtgtctatttcagttcccaaccttggactcattcccttaccccaatgttagtttcctgtggcagctctaataaattactataaactcagtttatttttattcctttttttttctttagttttaaatagagatggggtctcactatgttgcccaggttgatctcgaacgcctgggctccagtgatcctcctgcctcggcctcccaaagtgctaggattacaggtgcgagccaccgtgcccaaccctaaacttgttttaaacaacagaagtttattccaaaagccacaaacccagccaatacacacatatatagtcatatcaagagatgggcattttaggccagacgtggtggctcacgcctgtaatcccagcactttgggaggccaagctattttgatcttggctcactgtaacctctgcctcccgggttcaaggtagtctcctgcctcaccctcccaagcagctgggactacaggcacatgccaccacacctggctaatttttttgtattttt

SEQ ID NO: 1561834 - DNA, 4001 bp, Homo sapiens
tggctatgtacaagctagggtggggagggggtgcggcagaaggcagctcctcacggcttgagtcccaatctttgccccagttggctgcggaactgaatgaactgcccactcaccccagcactgtaaatggttactctcctcatccttccgatgacaaatcaccaaaaggatgcgctttcatctaccagacctcccaggctcaggtgctgactgtggcctacaaggacagctatctaaaacatcaaaagcactttccagcttccttcacggacatgagactgcctgctccccagaaagatgggtttcagtaactcctcctttggcagaatttttaaagttctagtccttaacttctacctcctgcccccatttctacccacggggaagggccacagaaataaaagggcatgggaggggggatgttagttgccttttcctctttccagtgaaagtcatttccctcaatagagggatccctccatgtttccatgatttggaagagaaaggtggagcttattcgtgagcaacttggccagaactgcccacagcctactacccaggaggaggaagaggaggagagggagtgggaaaaaaagagggaggaggagggggaacagaggaaagggtgggaaggttgagaaaggggaaggaggagggggagggaaggttattcgtatcaacaactgtggctacaccaatcactgccacccttgtgggacccacagccactgagtctccgccaactcagctctccccctcccccgcccccatacaaaccaggacaagcttgtaaggagaaggagtaagacagccccaaggcacacgactctgatgtctgaattctggctggggagggggaggtgtctaaaatttcctttggcttgtattatcactatgtattagcctccagatgcttatctttaaaatgaggacgagaaaagtctctacttctagaagagctgggggactaaattacacgtgcagctttcggtcagcctgagccagcgctgtcactgagccttggatttgtaagtggctcaaaagtaaaaagacggaagaaggccgtgcagctctacttcccccaaggccaggaagggccaaagcaatgacttaggaagtgggatgtttccccaccctaggcaaaggggcgaattccgagttccccggaggaagcagcagctctgcagactcggaattacctcgtcctcatctccagtgaagggagggatggaagtgggggcaggggcacagaaatggtacaaatccttcctaatggtccctggccagagctctgcccattcctgaaagtgtgaccttgggaaagtgagaccttgggaaagtgacttcgcctcgccaagcctcagtttcctcatctgtgcagcgggcataagggcagcatctaaggtgcagaaatgcttctgacgggtcagataacacctagcccgcagccgacgctcacagccgccgattcagacccgcccgggttccgcaagccccaggctgcccctgagccaccgcccaggcctcagcctcgggccatgcggacctcgccgccgccacgccccggaccccaggccccgggcccccaggcctcgacggccagccgcacccgggctgcggactgcggcccgggccccctccccgctgggcccccgactcaccggtgtagtgcaccacgcaggtctggccgcgcttggggaaggtgcgccctgaggagacagagacgggcatgctgagccgatgcgcgcggcggcagaggtactccgagccgccgcgcgccactactcaccgtctcctggggagatggtttccacctgcactcccatggcggcggcggacgctgagcgggcgggcggcgcgacgggcggcgtggaccaacagcgacctggcggcggttccacggctctgcctagtacctcggcgcgtcgcctgcgcacgcgcacgccccctcacgcccagccctgcgtgcgcgccccacacggcgcgcgacgtcccggaaacccaggcctccggaagagggaccggaagcccagaagccccgagacctccggaagcccggaggcctccggatacagctgtgtttgccgggtgacttgcttcgttctcctgcccttcctctgtgcttccagccggttaagcatctccctgcccaaagaatgggagtaataatagggggtccgccagtcactgactgggtgactgtcatcaggtttccacttagaagcacacagttactcatcctgggaagagcatggttctgagaagacagcgcacaggtggtggtagtatgttagtattttataagtggctcaaggttgtaagttctgcttttcttcactggaggaggagttgtccaaattcattcactcacccatagcttacatgcatacattcttattgagcatgtgaaagttgataatacgaattgggtcactcttcttatgcccaacggaatcagaatccaggggccaggggaaaagcactggaggcacgcagcgcctgctccaagaaccaatatttccactaactgctgcggaaatggcctgctgtccccctgagaccagattcagctagtaactgctgaaacaacccgccataacctaatactagttttacttaccactgtcagtcaccaatcagagcttgccagctccctgaaactttactagtgccaatgcatttccctttctaataaaacgcccagccttctctttgtttttcggacataccaaagaccaccagatctgtgtgtatgctccgagttgcgattctcgcttccccaaataaaacattacatttagagattcatctccatattttattttgactttgacaagcaccttctgtatgtcatgtactgtgctaggtgctgaggatacagcggtgaaggagtcagacttagtccctgacctcacagaatctacgtatgatgtgggagagataatcaaataacctgtttaagtaaaaaaagatacggaataaatgtaaagtttcaaatctgtaatattatgagacagtaatacatgctgtgaggggcgtgttaatataacagagatgcctcacttagtctggaatgtggtcagatatttccctgagttagccaggtttagccaggtttagccaaggttagaaggccaattgtgtgtatgtgttggggtaaggggaggcagaaggagcagtacctgcagaggcactgtaacgcaagagaacactgtgacatggtctaggacataaggaggcacatgtgactaatctttctctgatctgtgtgtgtgtgtgcttctgcattagtcgattctcacactgctataaagaatacctgaggctgggcacggtggctcatgcctgtaatcccagcactttgggaagctgaggcgggcagatcacttgaggccaggcgttcaagaccagcctggccaacatggtgaaacccagtttctactaaaaatacaaaaaaattagccaggcatggtggcacaggcttgtaatcccagccacttgagaggctgaggcataagaattgcttaaaccaggaggcggaggttgtagtgagccaagattgcacctctgcattccagcctgggtgacagagtgagaaccagtctcaaaaaaaaaaaaaaaaaaaaaaaattcctgagactgggtaatttatggaggaaagaggtttaattgactcacagttctgcatggctgggaatcctcaggaaacttacaatcatggcagaaggggaagcaggcatatcttacacagcagcaggcatgagagagagtatgtgaagaggaactgtcaaacacctataaaaccatcatttctcatgagaatgcactcactaccatgagaacagcatgggggaaaccacccccaccatccaatcacctcccaccgggtccctcccttgacctcaggattatagggattacaattcaagataagatttgggtggggacacagaactaaaccataccagctcctgtagtgttttaaacatgacctcacagtt

SEQ ID NO: 1561835 - DNA, 4001 bp, Homo sapiens
taactggtagacagttttacagaaccgcaatattaatgaattcattatgtttattcattcactaatattttgctgatccttggacttgatgtgttttggttgtgctcttcaaaaaatcaaattttagttttcttagtaaatctatgcgtttttgtaactctgtttttatttcagggtaataaatagatgtgcgtttgtctgtgtgtatatatatgtgtccaaactaaggggcatatctctgatttaattttcccatggtaaaacctggcatattatcattaatatttgtagtagttggtaatgttgatattattgattgtggcacttttaaaggattaatttttctttactcatttcggaagagatgaatattagtcatctgtcactttgggtcaggtataagtgattctccctgaatataagcaaatttattctttatgtttaggctggtcaggatatttttatgcagtcagagataaatgaaaggcattgctacagctgaaggacttttctagtggctttatttatgttgtttctggataataaaataacatagatgagcattttagacagatttattaatagacagatttattaagaatgtttaaaatagccttattattaaaaccattagagattttggactaaaaattgaaaaaaaaatcaattttttttcttttaaattctaaataaaataataaaaacaaaccccccagatgttgagaagacatggatgggcctgttgcactctttacctatatgcaaccattttgtttcagacctaattcagtgaacaaaattttttgagaagatacatttaactactttttcaagctttgtagtataaatgcatttcttccaatataagattttcctattataagttgcaaagaatggatcctctgcaaaacccacttgataagggctctactcatttatttttctttcctgctaccccaaactcactgcatacatcaggcatagcttccagggtgagctttgttagtttttctgagtagacttagccatttactatgctagtcacatacttcacttgcctaagcaatggattttggtgttctattgaagagggaatatggtttggaagagtgtctccccctcctctgagttcaatttactagttgagatttgcaagcctgaaatgcttgaagcagctcaggcacgatagcagtgcaagctttaaaatctaggtgtagctgttaatcctttacagaggcacataagtctccaggagtagctcggctagctgtgagcaagatgtatgcttttcatgtactgcgtactcatgggctgagggattattgattttctttcacagttgtaaaaacagcaattggtgatcatcccacacgtacagtacacaccaagttgctttcctatctgtgaagaatctccttgtattctttaatatttaacattgaactttccaacttgctgttttccataaggctcttttcacatagcaattactcaagacagaaaatagccacttactatcttttataaatgaaagaaggttctaagaaacttcttacattcagccatgatagtgaaatttttcattgctggcttgcacgcacatatattgcttgttgtggtgacagagcaaacgttcctatttggatttctcatagtatcaagtcgtttctttctagagagtaaaaccaagcaaactttctgggacaatcataagaaaaaacatggaaaacacttaccaggaagacgagaaaaagcaatcctatatacactgccgctatagctgtaattccattgacagtgaattggagtaatagccctcccccgtctcccaagctctgcgtccagtccacacaaagcccacggcagctgcaggctgagcttgtcctgcttcagatcactcctacactgaggagtgagcgagggagagcattccagtttactgcacacagcccacctccaagtctgaagtttaaagcttcacctcgcagtggctgaagaagggggtgatgtcatagatgggcaggacttagccaagatcttgttcagtgaggtaactggataatcagacagatgagctttgcaaacgctagagggggcgagagcagccaaaatgaagcatcagcctgccaaagctaggatgccatttggtttgtaggcagccctttggaatctcaacattttctaaagtttactacaaggcagtggtagcatacttatgtattttttttaaaaagcatgttagaaagatatttttaagatcacaatagaaaaagacaggctttgtcttatttttaaaccatctgtattgaaaagaagttaaccaaaatcaaattagttttattattcactagctaaaataatgttataattgtggaagatgtatgccagtaatcccaactgtgaatgtttattcaacatatgaataaacagcagattcaaatatatacatcagggctgggtgtggtggctcacgcctctaattccggcactttgggaggccgaggtgggaggatcacctgaggtcaggagttcgagaccagcctgaccaacatgtagaaaaaattagctgggcgcccgtaatcccagctgtttgggaggctgaggcaggagaatcacttgaacccgggaggcagaggttgcagtgagccaagattgcaccattgcactccagcctgggcaacaagaacgaaactccatctccaatatatgtatatatatacacgtgtcactgattcatttagttatgggaagggcaataggaatgccaaaagatttttttaaatggtattaaatggtctgttcttttggaggcgaagaagttactgttctctatgttttagaaaatgaaagtatgttttatgtacttctgctacgtgtttatattatttaaaatggattatttatatttaacgatcccccaataaaatgtttttaaaaaatttaatagaatattttcctttctaaatgtttttgctgatctgagcatgggtttagatataaacatcttaagaaaaaaatctttcagggtggtttgcctggattgaaattattttagtttaatttaggtacatgaataaacactggacaattgtaagacgtggagattataaatttctatgcctaattaacagaattatacttgtatttttaattatgatttttgtagactggtttctgctatttggtcaacaattgctttgtgcccgtaagttttccatcaaataagtgtatttcacttgttcatgttggtggtaagaacttagcttttatatttacctggaggaccgttgtcttaaactaatatctttatttgctctattcttagaggtgcatgaccttctcctttgtcctttctcaatttttccctgcatgtttatttctgaagaaggccagctaatagtctttcccaggactatttgattgtggtctcttcattagcttcatttagtttatctatttatatatttgtttgataacagtttgacctgagttcccttccaagaatgggtgatatcaaagtaggtgaacccttgataagaaatgtattgaccctattgttctatgattgcacttttgtgggcctcagaggacagacccattaaatctaggagttttagattctaatgtccattgaaaagccaatttctttgaactgctaggtagtacaattaaactgatatgcagcagctgaattttgggaggaaagggaggtggatatttttctgttactatgaaacaaagacatggattaaattattttattaaataattatttctagaagccattttcagataggagttggttctgtttaaaaaagaaaatttttgcctggtcaaattcctgtgggtttatagccatatttaatcagtttcgtcttcattcaggcaggccttaaacagaaaagaaaaatcaattggtgaattgggttataggtatcaaaaataaattgtactggcctgggagttagcagtttggaggtttcccttctctgggctgccat

SEQ ID NO: 1561836 - DNA, 4001 bp, Homo sapiens
gcttctggcggcgcaggtagcagccgttctcgaacatgttgcccgagtcagggtgcagggtccagaaggagcccttgccgggcttgtcgggcgagcggggcaccttcaggaaacagtcgttgaaggagagcgagtggcggatggagttctgccagcgctgctggttctgccggtagaaggggaagaggtccatgatccactggtagatctcgctcagcgtcagcatcttgttggggctctgctggatggccatggtgatgagcgagatgtacgagtagggcggctttgcgtgcgtgtagctgcgcctgtaggtcttggggtcgcgggcgcggctcaggcccgcctgcccgtacatggggctcatggagttcatgttggcgtagggggccaggccgcccatggccccggccgcctgccccccgagcgggctcaggctgggactcaagtgcggccccatgcccgccacgccggccgccccggccgagccgcccatgcccgccatggcgcccgcgccgggggacatccccgccagggacgggctcatgccagcgcccacgtacgacgacatgttcatggagcccgcgctcatgttgcccgagccgctgcccatggcggccgccgacatgctcatgtacgtgttcatgccgttcatccccaggccggcgttcatgttgctcacggaggagtagccctgcggacagagccccgggagggaggcgacagcgttagcaccgcggctggagggtgcccagacctcccacccaccgcccaggcctccgcgtccggggaggcctccggggagccctttcgtccccgatggcccagtctccggactccgagtctgtttcattcagggagagtcatgatcgatcgcccttgggaaggtggcgagcggattgctgcttgggcatgtggcccgttcctagcccttctccacctcgcccagattctagaacaggggtcccatggagtactcccaagccagcaccccaaatacattcccctaccccagagtctccccaaactctcccaccagcatactgagctggcgccgaggcccgaagtccccggacgccacctccggtcgcagcaagcaacctgcgggacaacgcgcggggcgcctcgggctgcctccagcgaagactgtcccgggccccctctgtccggtctccctccagggaccccctcccttgtcccagggaaactgcaaggcagtgcctgtgcggagtgcgggggcggctggaggcactgaacggggcaatagggaaagaaccgagacctgaaccacacgcggctgagctttgcaggcaaaaactttctttctctttgtccactagtctttgactctgcctccacttcagcccccaactcctacccatcttctcctcctcagctccccaccccctcgccggccgacctcccacccctccccagccgcgcgctgccaaacataactctgttaggatagtgcgtggctcggccacgaagaggatttggaggcgccgcaagtcaatatttgatcacaaagttaatattatctcaaggctaacagtgtgtcgtataaaaaagagacccatttgattccaaggagggcggaaaaggcggctgcccagaaaggctggggttgtggggcggggtgggggggtgccagcgagggaagcggtcctgaggttggggaaggagcgagcgccgccgctccacttccccctggaaaagacgagcgcttacctcgggctctgcatagtagctgctccagtcggacggctcgtgcccttccatcttcaccgctcccagcatactggaagccgagtgcatggcagtttaaaatttaacagccacaacaaacgaccagcaatcaccccccacccccaccctcttttaaaaaaaagtcagccaaagcaccgtcccctcctccctccctctctcgcgctccctctccctgggctccactccctctctctccctgggcaggccggaggcggtagttggaagtgggcgggaggtgggggggggcgaggagcggaggaggcccaggccagcgccccgcggtagggagcacccgccgccgccgcgctcacgggctgccgggtggcggctgaggttggcagtgccgagctgccccgaggcggcgggaagcgcgcggcgcgggggctagtgggggggtggggaggaggaggaggaaggaggaggaggaggcggtggtggtggtggaggaggaggaggaggaggaggaggaggaggaggaggaggaggtgtggaccgcggagcggacaagtgccgcagtgacgtgggaggctggtgatatagcgcggcgcgctggcgcgggcctccaatccccagacccggggcagcccatttgaataatcagctcacacctaggtgagaggtagccgcagccggcgctccgcacctgcccctcagcgcctgccgtccgccccaccgccgcggcgccccgcactcctgggcgggccaggggagcgggctgggcgggcgatcgggcacgcgggatccctggtcgagccccctttcctcccgggtccacagcgagtcccctgaggaaggagggacctgggaggaaaccaccctctggggcggctccggcctccagcccccgccccgtctcatcgcgccgggcgcccggtgcgcctgtcggagggcgcgtccagcctcagtgcccggcagatccctatgaaagccggatttatttatgccgggtttcttcgctctcagtgctcattctctgtcaaaacagcaagtccatgacagccaatttgcaaagcgctgtcctatttagaaaaactacgtacacacctttaactcgcccgctgctgctcctgcgaggcccctccctgttacagttcagacccggaacggcctcgggagaagcgcggggcgcacggtctggccgcctcggctctccgactcctcagacaccggccgccagggacccgcagtggggcggccggcgcctggcgcaagcagcccctctagcagcggccgacggttgggaggctgagatttgtctctgatattcaggccggcgtgtttcaaggttacttttcagtcacaaccgaggtgcccacagcatttcgtaactaaaacaaacagggcaggaggtggggagggaggggtgaggagagaagaatccaggaatcaatgatggggcatatggagttgacttcaagagcgtctctgtcctctctgtcttccagagggactgcttaatagaaattagaaactccagcaatcgtatacttttatttccccagcagctcttgggttcaaaaattgtcttctgttctgggttagcctgtgagcccagatttggagtggggggatattgcaggtgtttggatgtggaggctctttcttggttctgaaaacctggctggaccttggggatccagccctgtacccaccccctcagacacagagaatgcataggaactagtgggcatccagcccacctgtccaaaattgggggcgatggtggcagaagacaggcgagatggcagacacggagcttcgcattgaagcttgagtaagggtgaggctggaaggcaagcgaggaggtagcagtaggcacaggggaaccacttccctaaccccaggactctcaggtctgcacggtttgggacacagaaggaagccgccggcagcatcttttgctgctgaaatgcagatggtttggacacttcataaagagggcattaataagcccgccgagtgagcgccagggcgggattctcccacaaattcaaggtctgtatctccgcggaagccgtgcctatcggtcccccgagtgctgaaggctcccacgaggggcaggccagcccggtgcgccagggaaggagcttgatggtgtgtacggctacgtagtgaacgtggaggtgtgcgcagcggagtcagaggggctagatccccagcatttcccacggggtcccacctagcgcgtggatgggagcaacttcatcactccaccgagggcagggaaagaggag

SEQ ID NO: 1561837 - DNA, 4001 bp, Homo sapiens
cccctaccccagagtctccccaaactctcccaccagcatactgagctggcgccgaggcccgaagtccccggacgccacctccggtcgcagcaagcaacctgcgggacaacgcgcggggcgcctcgggctgcctccagcgaagactgtcccgggccccctctgtccggtctccctccagggaccccctcccttgtcccagggaaactgcaaggcagtgcctgtgcggagtgcgggggcggctggaggcactgaacggggcaatagggaaagaaccgagacctgaaccacacgcggctgagctttgcaggcaaaaactttctttctctttgtccactagtctttgactctgcctccacttcagcccccaactcctacccatcttctcctcctcagctccccaccccctcgccggccgacctcccacccctccccagccgcgcgctgccaaacataactctgttaggatagtgcgtggctcggccacgaagaggatttggaggcgccgcaagtcaatatttgatcacaaagttaatattatctcaaggctaacagtgtgtcgtataaaaaagagacccatttgattccaaggagggcggaaaaggcggctgcccagaaaggctggggttgtggggcggggtgggggggtgccagcgagggaagcggtcctgaggttggggaaggagcgagcgccgccgctccacttccccctggaaaagacgagcgcttacctcgggctctgcatagtagctgctccagtcggacggctcgtgcccttccatcttcaccgctcccagcatactggaagccgagtgcatggcagtttaaaatttaacagccacaacaaacgaccagcaatcaccccccacccccaccctcttttaaaaaaaagtcagccaaagcaccgtcccctcctccctccctctctcgcgctccctctccctgggctccactccctctctctccctgggcaggccggaggcggtagttggaagtgggcgggaggtgggggggggcgaggagcggaggaggcccaggccagcgccccgcggtagggagcacccgccgccgccgcgctcacgggctgccgggtggcggctgaggttggcagtgccgagctgccccgaggcggcgggaagcgcgcggcgcgggggctagtgggggggtggggaggaggaggaggaaggaggaggaggaggcggtggtggtggtggaggaggaggaggaggaggaggaggaggaggaggaggaggaggtgtggaccgcggagcggacaagtgccgcagtgacgtgggaggctggtgatatagcgcggcgcgctggcgcgggcctccaatccccagacccggggcagcccatttgaataatcagctcacacctaggtgagaggtagccgcagccggcgctccgcacctgcccctcagcgcctgccgtccgccccaccgccgcggcgccccgcactcctgggcgggccaggggagcgggctgggcgggcgatcgggcacgcgggatccctggtcgagccccctttcctcccgggtccacagcgagtcccctgaggaaggagggacctgggaggaaaccaccctctggggcggctccggcctccagcccccgccccgtctcatcgcgccgggcgcccggtgcgcctgtcggagggcgcgtccagcctcagtgcccggcagatccctatgaaagccggatttatttatgccgggtttcttcgctctcagtgctcattctctgtcaaaacagcaagtccatgacagccaatttgcaaagcgctgtcctatttagaaaaactacgtacacacctttaactcgcccgctgctgctcctgcgaggcccctccctgttacagttcagacccggaacggcctcgggagaagcgcggggcgcacggtctggccgcctcggctctccgactcctcagacaccggccgccagggacccgcagtggggcggccggcgcctggcgcaagcagcccctctagcagcggccgacggttgggaggctgagatttgtctctgatattcaggccggcgtgtttcaaggttacttttcagtcacaaccgaggtgcccacagcatttcgtaactaaaacaaacagggcaggaggtggggagggaggggtgaggagagaagaatccaggaatcaatgatggggcatatggagttgacttcaagagcgtctctgtcctctctgtcttccagagggactgcttaatagaaattagaaactccagcaatcgtatacttttatttccccagcagctcttgggttcaaaaattgtcttctgttctgggttagcctgtgagcccagatttggagtggggggatattgcaggtgtttggatgtggaggctctttcttggttctgaaaacctggctggaccttggggatccagccctgtacccaccccctcagacacagagaatgcataggaactagtgggcatccagcccacctgtccaaaattgggggcgatggtggcagaagacaggcgagatggcagacacggagcttcgcattgaagcttgagtaagggtgaggctggaaggcaagcgaggaggtagcagtaggcacaggggaaccacttccctaaccccaggactctcaggtctgcacggtttgggacacagaaggaagccgccggcagcatcttttgctgctgaaatgcagatggtttggacacttcataaagagggcattaataagcccgccgagtgagcgccagggcgggattctcccacaaattcaaggtctgtatctccgcggaagccgtgcctatcggtcccccgagtgctgaaggctcccacgaggggcaggccagcccggtgcgccagggaaggagcttgatggtgtgtacggctacgtagtgaacgtggaggtgtgcgcagcggagtcagaggggctagatccccagcatttcccacggggtcccacctagcgcgtggatgggagcaacttcatcactccaccgagggcagggaaagaggagtaagcattggagctcaaagaatgagcaatttttcaaagctttctccgcaggcctgggcagacacacacgcacacacacacacaccgcacccccaaaactcaaaagaatgttatggttgacctagtctgtgcgtgtgctgtatgagagtatttgtgagcttatgtgggtgcccacttccctttctattttgctcctgggtggaaatttggtcccagaaattattccaggaacagaaggagcgagctggagggccgcaggagaagggggcgctacacttccaaggagcggactttggaagcccccacctccaccacagcactattggtggccggggtcagggacaccagagagcgctcggcgggggcttccacagtgacagggcgccccctgtcggccgccaggcccgcgggaccgacccgagtcctcatttacccccgcgatcccaaccccgcagctccggcaccggagcaccttctcccccgctctcccagtctctccgaaaacgccttcggggggactcggcctttttggagccccaacccctaggttctgcgcgaacccaaaacggcctcctgcaccctggcgaggttctgggagctccggtagggtagggctggatgacgcctcctagagtctcggagcagccgctcccgcaccctcccggcacgcctgcccatgggaatgcgagcggggtctacggttagctttaggtagctgggagcgggacaccaacgggctgcgaaggaagcagggacgttcagacagcctggggttcgcgttcccttccagctcagcggtctttggagctcctccttcccggagttctgatttctaaagggctatccagagttctggctcaggcttgaatgctgaagattgctcccggagtttctctccaggaaaaagttcgcggggacctcgggctgcagatgtttctcccaatccctctttagtctaccctcatgtagggccgagacctacagagcccttccctttccat

SEQ ID NO: 1561838 - DNA, 4001 bp, Homo sapiens
aagtccaaacagggggtaggtgctgccttttgaaccctaggtgccctgtctgcacaatgggtaaagggtgcctttctagccctggccttccaggattgcagcaaagccctcccacctctgggggccaccaccagctctgccctgaccctcttctccacccttatgtcctcactcaagctgcaggtcagaggctggagggtagagccacacagatgtggttttgatttaccctctgccacccatttgccctctggagttggagctggcgagcctgtttccaccactgtaaacggggccaactttccaaatcacacaggtgagatgatacatacaagcccgggacaggatcagtgtcacaaattgtcagggttatgatgactgcacctacgggggctaagtcccagcatctgagactggagaatcagtccctcaggccagcccagtcttgcccctgcccagtctctcccttgcctgtatcctcctctccctgctccccattccctacctccccttcctctccctttctaggaaactccctgagaaagtccccagcaggagaaaacctcatgtgagatattcccaccaagggtctctgcccccgctgcacaaccccacagccacagccacccccacatacaagcaggcaccctggccctcagcccccagccatcaggcaagctgaccctcatcatcacatggctttattggccctgagagccacagagtaaatcccaagaggccctgcttcccctcacccccaagtttgtccggaggccccaggggcctggctgagcaccgcttcaatcctggctttctgtgtggttgtccttggctcaccagggctgggtccttcgagagttcttcaggtcctagagccaggctcagcccggagggtgagggacctgcagggactgcccgaggtgaggctgcctttactcaaagaagaacattcctggcgtccggtataggcagggggtcagccccaatgggtagccggagcctccctggacagggaagccacctgcaacccagggttccttgtggtcagttggcaggggcagtggggcccggagtgagcctggaggggtgggtggtgcaggggagggggctgctgaggccaagaggtgctcaaggcctgggtcagcccccatgcaaaaattcagtgcctgcagccgacactggtagctgctcccgatgcctgattccggggacaagacgggcgtaggggccttattaaaactctcagcctctgagaagccggcaggaaagccaaacgctgggcatgaggaagatgaggtggccacggggagctcccctgggcatgcaggcttgggcgtggaaatctctttgggctccatgggtggccgaggcctgccatcagtggttgctgggcacatactggctggcatggcccccaccagacccccaaagcttaggcccttgggatctggcagctctggtgggaatgagcactgcctgccggtcgtggcgttggggactcctgggtcctggctggtcgccctgaggggtccacggcgtgccttggcggggccccgggtgccctcagcacctgtctgccgggtgaagcggcggcggcggcgtaggaagctgccgtgctcaaacatgtcgtggcagtcagggtccagcgtccagtagctgcccttgcctggcttgcggtcatcgcggggcaccttgacaaagcactcgttgagtgacaggttgtggcggatgctgttctgccagccgggccggttgtggcggtagaaggcgaatcggcccatgatgtagcggtagatgccactgagggtggcccgctgccccggtgagctctggatggccatagcaataagggcgatgtagctgtagggaggcttggttggctcagttgtgggggcgccaggcccgggcagaggctgctgctgcatgctggccgggctgccaggctgctgggacctgctgggtcaggctcagcttccagggctggcgtccggaatagcctgcccaggctggttaaaaggtccactggcccagcctcccagcctggaaaggcaaaaaggggtgggtctgctgagccatcctcccctcctccctcgccccactcccacaaggcccaaaagaggcgggcaggagaggccagtagtgggaagccgagcagctgccagggatgaggagttgggaaggaagggactgagaccctcagcccacgtgtgctgggtggtggtggctggggagggacaggatgtgaaactgagcgggacagagacaaaaacaaaatgagacagaggcagaaacatatgaaacagagacagggaaaaaagagatagagacagagagaggtagagacatcacaagagggagaaagagggagagacaaagataagacagaggcagacacaacggacagagacacccagagcctctcagacactcacagagagacacacagacatacacgtacagacacacagagacacacagacatacacgtacagacacacagagacacacagacacagacacacacacagacacacacacacagacataagcacacacacacatatacacagagacagacacacacagacacataggcatacacacagacacacacacaagcacatacacagacacacagagacatacacacacagaaacacagagacacagacacagacacacacacacacacacacacacacacacgtagtatacggagaaagtgagaatcactgagcaggcagaaacaaggaaatccacaaagccagagagaaaggagatactgagagacacaggtgcaaacacaaggagtgaaaggaatgaatagagagagagagagagagagagagagagagagaggagagagaggcagggcctgagcccagtccccctagagtgagagaagccccaggggcttctctaatccctacctctactcctgcttttccctcttctcccaggcctgtggtctactgccttctcctgcggtgcagaggccttggggccacaccactcctaccccatcctcctagctctggggtgtctgcagggaggggcacctaggatggtaaggagagcccatgaaattcagttctgctgcatccctgtcgccccctagtgactggtgtgggaaggacagctatctggggagagacattctccctcccaagaggcacctcaagaccttggctgagcctcagtttccccatctctaacatggagctggtgactcctcagctgtccaggccatggtggggaggcaacaggttccccttacacagaatgcagcaccctcatcaagagcctagtatggagtagggatatgaacatggctgcggattgtcactctgaactgaggctaccccagctgcagcctggggtcgggaggtccagagagtcaggcccagaacagtcaggccttctggaggaggggacggcatcctctctgctctcccactcccaagtcactgctcacccactctgtaccaggccagctcacctccccaaccctacacttacttcttcaaccaaccctgctctggagggcttcattgcttcttttgaatagatgagggctctgaggctcagagaaggtaagtaaattccctgatgtcccacatctagtgagtgacaaagctggatatgagcctaggattctgtaattcctaaatactgcctcttcagtgaggggcaggggtagcggagagtcgctgggtccccactagaaaacagaatgtgaactccaagagagtaaagagcatgctgttttgctgtacccccagagtcacacactggacactggaacagaggcctggaacagagtaggtgttcaagaaatgtctgctaaatgactaaacaaacagcaattgattgatttctgtcctttatcgaatcacagttttccccccatgaaggtggcttattaatgtatcattaaaagagacttacaatattggcatctgtaagaggattcctataaataaaatcagaactcagaaaag

SEQ ID NO: 1561839 - DNA, 4001 bp, Homo sapiens
gggagggatgaaggggctttatctggcagacactcttgggcgcccctgggctctcctgggaacgctaaccccgctgtcctcctgttctgcaaagcgggtccatgacaggggtggggggttgggagggtggaggaggtgccttctgtcagcttggctgtggtcgcaaccagtgtccttcctttagaaggccagccccgcctcacagccccctggggccgggcttcgcacactgtgcggctgggggtggaggtcttcctggtcccctccaggcccggcccggcgccggcgcgagggaggcccgggcgccgagtgggggtggggcagggatcaatcatcgccccgccgggggtgggcgccagcagccgggctgtccagggaggcgggggccaggggtcctgcggatgccgctgcgcccgcttcctgcgccaaagggccggcggggtcccaaaggcagctccggagctgggtgtcgaggcctccaaggtcccggagggacgggatgggcccctgcggagctcagaggagccgccttcgccagaaagtgactacgctgcaaccgggaagagccgctcccctcacaggccgagaatccgattctccaaactgatactcgggaagcgactgaaaccaggtctcaaattaaaatcagtaaacgtcctagaaccgagacgaatgtggccacttaaataaaccgatgttttgggctttataaaaatcgtttccaaaacttttcaaaaacaaaaacaaaaacgattaagacttttgaggctccacattggcacaatccggaatgctgtttggaaatagatgttccttctcattaacaggttaaaacagaattctggatgggtgtttcccgtgcggggtgttacccaggtttactcgtctcgccccggggctgctggtgtcgctcctggcagggaggctcggaccgtgggggaggatgaggggagcgtttcgcagggtgcgggtttgcacccggattcggccgctcctgggccccgagactgtggagcccccgcactcaccgaaggtgggcctgcggcctgggaggccgtgcaggacgctgccatcgaagggcccggcagtccaggactgggccacgtcggggctcacgtaggccgggtaggtggcggagtacgaggtccccaccggccgcccaagcggggccgcgaactgttctcgaggcaacagcgcgccctggtaggcactgccgtctcggccccccgcgctgccgccgctgccgggccccgaggggctgtgcgcgaaagggaaggcggtggccccgggcgggtgcgcggctggggggtgcggactgcccgggccgaaggccgacgaatccgcggtggctgtctgcgcccagccggggcgcgcagcgagctcggggggctgcgggctcggctcacacccggacaggtaggacagcatcgaggggacgcgcgccggcggcacaaacatcggagagccggcgcccggagcgtgcaggaaggagcccgagtcggcgtaggcggcctggcgggggctcgcggccagcgccaggctctggtacatcctcccaggcgtggtcttgacctgcagggaagagggacaggtgtggaggtcacgggagctctgcgccctccgccagcgcccgagcttatgccgggcaggtgccgccgcttcgggcagcgcttcccagtccccagcccgggacgttcgcggggcgggtccccgaacccgagggagaggaaccgcggggatgggagaggccagcgcgtcatccccggggcagtcacaacgccgagcccacctcctccccgaccgggcttcggaggtccccggggtgagctcggtgggggcctgggaaggacgggcctggcgcggccgcaggacgcagggcctggagagcggggccccgccgcgctgggaggggccgggtggggaggggcgcgcggctgcagcccgggctggagcactcaccagcgggcagggagggcggcagggcacggcggtggcggtgggtcggcgaccggcgggccgaagactggaagcccgggccgctgaggctccgcagccccctccgcgccgccccggcccgcccccgccgcgccgccccttccctccccgcgcccgccccttcttccccgcagggtcagcgctggggctccggccgtagagccacgtgaccctggcaggccctgctcgcggggcttggcgacaaggacgcacgacacggggcggccagcgcggagcccggaccagtgcagctagacgggcgggccgagggcttcgtgggccccggggagtcgggcgcagagacttctccaagtttgtgcgagtcccgagccctctgcctccctgccccggcccccgccgaaggctggcctaaagacgggctccgtgtctggtggctgagtcggtgatcccggccccgctcaccgatggacacgcggcggtggaaccccgtgggccccctcgttgcgtggccgcacccggggctcggtgcagggaaccggcttccatagggacggccggctcgggtcgctggactgggacggggtgcactggcgggagccccgcgatttcctcggtttctgagcaagcggggccacaaggctcggggtcccagtgggaggtgggcagggtccagcctctaaggcccgatctgggtgccaggctcgaaggccccaaccccggtggggctctcagccggctctcggggactcgggaagagtttcctccaggcgccagaaatgcgtgtgggtaggaggcgacccaggtcagggaaccgtgtcccgctcgcactcccggtgagggctgcatggaggcgccgctgccgcggagcagctccgcaggttgcgggaaacggaacggcgggctcggagcacaccgggtggacccaggcttggcggccatgaaagttctttttttctttttttctttctttctttctttctttctttctttctttctttctttctttctttctttctttcttttctttctttctttcttttttctttctcggagcacaccgggtggacccaggcttggcggccatgaaagttcttttttctttcttccttcctttctttctttctttctttctttccttccttccttccttccttccttccttccttccttccttctttctttctttctttctttctttctttctttctttcttttctttctttctttctttctttctttctcggagcacaccgggtggacccaggcgtggtggccatgaaagttcttttttctttcttccttccttccttccttccttccttccttcctttctttctttctttctttctttctttctttctttctttctttctttctttcctccctccctccctccctccctccctccctcccttccttccttttgcggagtctcgctctgtctcccaggctggagtgcagcggcgcgatctcagctcaccgcctcccaggttcaagcgattctcctgcctcagcttcctgagtagctaggactacaggcacccgccaccacacccggctaatttttgtatttttagtagagacggggtttcaccatgttggtcaggctggtctcatcgagctcctgacctcagatgatccgcccgcctcagcctcccaaagtgctgggattacaggcgggagccaccgcatgaaagttcttccttgcagaaacgggccctcaactcctgtcagtcagggctcggagaggacgctggtgaagggtgaagacctgggaaggcaggaaggcggcgatgtggggccgtcggggtgggtgtcactggatcccccccacgggggtctggacagccggcgctgtccgtctgggaagagctggggtgccccacatgcgcccttattcctggcctttcctcttcgcccacagcagataaggattcagggtgcttgtggaggcgtccagggtccctgcgtctgggaaggcagcaggctgaagcccctggtctgtggtggacttgggaccccacagacggttccgcagcaggttc

SEQ ID NO: 1561840 - DNA, 4001 bp, Homo sapiens
tttctggacctcccatattttcaaaggaagccagaatgtggagttttaaagtgaaatgccccccaatatttaagtactgacaatttttaaaaacaatgtaggccaaacaaaacacataggtgggccgggcgcagtggctcatgcccgtaatcccaacactttaggaggccgaggcaggtggatcacctaaggtcggaagttagagaccagcctgaccaacatggagataccctgtctctactaaaaatacaaaattagccaagcgtgatggtggatgcctgtaatcgcagctactcaggaggctgaggcaggagaatggcttgaactgggaggcggaggttgcggtgagctaagatcattgcactccagtctgggcaacaagagcaaaattccgtccccaaaaaaaaacaaaaacaaattttttgtttgtttagtttgagccacataggtggctccaaatttgtaggtagcctgtggtttaatatctttctctcccgtttaactcagctccacggggcacatggcatctccctctgctcatcacaatgtctggatcaaacaaatgaaaaacaaaaacatgatggcctctcccagcaaagctccagggttggaaagagtcccctggcagggaattggcaccccgtcgtgcccatcctctctctctgactgcctgctggaaatgcccccatctccctttgagtcctcctcccgggcaacccctgtgacctgtaacctctgtcctgaaatcatcacaatggccagagtggcctcagctcagggcctctgtgacatcaccaagggcctggcaccaggtgcccagtctcccagttgcgagggcaagcaaacccgtcatgagcaactcccttccccatctctgctcaccatgtggacgctgaaatcgtccctggtcctgcttctgtgcctcacctgcagctatgcctttatgttctcttctctgagacagaaaactagcgaaccccaggggaaggtgcaatacggagagcactttcggattcggcagaatctaccagagcacacccaaggctggcttgggagcaaatggctctggcttctttttgttgttgtgccgtttgtgatactgcagtgtcaaagagacagtgagaagaataaggtaaggatggctccattttttttacaccatattgattcaatctcaggagtctcagggaaacggatgttctagtgagtctagacggcaccgttgggtataatgaaccgacctcatggtcctgggcaaagctggcaaattcacttcctgatgtatccttagtgaagacaattgtccccagatccacagatactgggacaaagagtggaaagtgacctctgcttactggctcacagattttctggttagatggattttttcaaatgtaggatagattcaagaacttatggtgtgtttcagaaagtcaaaattattcacagggccagattcactagcccctgttttttaaattcttgctagtgtttgacttactacaaaatcctgagctaaatggaaatgatatcattatcccaacaaaatatgagacttgtgctgaagagataaagatgtaaggtagtttgagctggtcctcaaagtgaccacaaacaactctttcaggtagaaaaggaaggggagagaaagtgcgttctcccctagaaagacccagcacttcataatcctgtgcccaaactgatgagagcagggatcggcaaacccttcccgtaaagggccagggagggtgcgaatatcttcagctttgtgggcagtatggtcttcttgcaactactcaagtctgctgttgtaacacgaactgtgtcaaaaccaacaaagttcacaatattactgaccttgagtatctttcctgacaggagcagagtcctcctggccttcgaggcggccaacttcactctccattaaagaaaaaaagaaatgcttcccccaacaaagactgtgcattcaataccttaatggaactcgaggtggagcttatgaaatttgtgtccaaagtgcggaatcttaaacgtgccatggcaacaggtagtggcagtaacctcaggcttcgaaagtcagagatgcctgcagatccataccatgtcacgatctgtgaaatatggggagaagaaagctctagctgaatggatttgtgtgtcaggagagaaaaaagttgagtgttgacaaactgtatgcaaactaataaaactattctgaagaaaagaacttccatgtttgagagcttgcttcttttctttttttcactagaagaaaaagtgaatgggagaccagtagccatagcagtgatggttttgtttttgcctctctcacgtcatctagagctgtgggtggtgagaagaacaccgaaagctacataatagtacgtgatgagctcgtgcttctgttcaatggccgcgggtggacgatggagctagggaaatctgggataagatgctgacgtcacttccatacaaactcttgctctctatagcatctatttgtgcaagatgcagaactgctttttatctttgatttattacaaaagacagcattaatgatagttttaaaatggtaaaatgattcaattaggaggggtgtattctagagttatctgattctctcaccacaagagtcctttcactcattccctgtcaaaggttccgtgtatattgacttttccttctaccacactagcagttacatttgtcaataattggatttaaaaaaaaaaaaagggggatgaggcaggagaatcgctcaaacccgggaggcagaggttgcattgagatcgcaccgctgcactccagcctgggtgacagagcgagactccatctcaaaagaaaaaaacaaaaaggagaggcccggcatggtggctcacacctgtaatcttagcccattgggaggccgaggcaggaggactgattgagcctaggagtttgaaaccaccctgggctacatagtgagaccccatctctattattttaaattaacaagaaaacggagaaaaattcattcatcctatgccattggagttttggatacaagtgtgctaaccaggggctcccagattaattgacatgttctttatcctacttattcaaaatgtggatattttacatgttactgtggctgatggcatctctgtacatacttaggtgcttgcctaatggtgatttctattttcctctctcctacagtgtttattgattggaattctgctgtaagaagagctgttccttcgccgatgattgatggatgggtttctgtatggacttacaggtgtgtttttttttttggattattttctggctccacctttcccacctttggcgttaggagctgcttcgggttggcacttgtgttctgtgagcaagccccttcctcttttgagcaattccttactttctggcaacccaagatgctccatgctcatctggttcattgcctgccttcatcctggaatcagccacttccccaaggggccaggttccctttcttggagaatggtgacctgccctcctgcagccaggatcatgacttatcttaaaatccttcatttaattcatctgcaaaatgtctcttgccacatgaactgcaggcccacaggtcccaggaatgagtgcataggcatctctggggccggtacccagttgaccagtgctgtcaccctcacaagcatcaaagtcacccagggcgcaaggaagaccaagaccatgaggcaggaggccatggcttctgcggctgcagcagaagcaggagagggaggcagggcagacagcagcccagatgcctggggcctcaggggaaggaggccctgcctcgaaggcataggcgtccctcaagggtcccaaccccgggccctgaagggtgggcagcatcttcccgggaagaatatggtggctgggcatggtggcttatgtctgtaatcccagcactttgggaggccaaggtggacagatcacctgaggtcaggagttcaagaccagcctggccaacatgg

SEQ ID NO: 1561841 - DNA, 4001 bp, Homo sapiens
tgagacaagtctggcaaacatggtgaaaccctgtctctaccaaaaatataaaaaaattagccgggtgtggtggcatatgcctgtagtcccagctactcaggaggctgagacaggagaatcacttgaacccaggaggcggaagttgcagtgagccaaaatcatgccactgccctccagcctgggcaacagagcaagactctgtctcaaaaaaaaaaaaaaatcataacactcattatcaacagagtcttgacctctcgccaggcactgccatcatcagtacttttgtgcatcatatcacatttcactctcataatagccctctgaggaagttactgcattcaccccattttacagattataaagctgaggctttggacaggcaaagggacctgtccacagctccacagtgagtcagtgggcaatatgattggtggaccagcttcatcagcatcacctggtcgcttgttggaaaggcagcatcttggaccccattccagacccactgaatcaggatccttggggtagaatccagcagtctgggttttaaccaggatcatccagggactctaatgcacgctcaagtttgagtagtcccagtctataacactaagttcctaagttatatcccttcttcaacaaccatatcagcaaccctgagaaggggttgggattggaagtggctattgttgtatcactatcccgctttccagatgatgaaatgagcctggaccaagactcaaatctaagtctttgagttccaaggccctttctcttcatggattctgtttttccatctggaaaatgaacgaatggaacaaaaggatcttccaggaagaagaggagtcagaaggtcaggcagtggtgccgcttaggcccctgcaggacctgcctctgggccctggccatggtgctgaatccgtggcccagagacgggacaaccgcccagggtgggagattgcgcccctagaggcgcccctgtctgaggggtgcagttcacagccttacccccaggaagcgggaaccctgagaatccagttggatttccaactgcccctcaggtcccctaggtcctagaagcattttaggggctggggccactctgtgcctttaagagcaaaacagacctgatgggctgagccgagctggtgtgaggggatggtttaactccttccttctcagctcaagacacggagtggggggtgggcgacgactggggacagaccctccaagccctagccagaaggcggcccgcagacagaggggcagaggagctgtgacctgggggcctgcagtgtccgggacggcagcgtgcagggagcgactgagagggggctaccgaggctggaccccaagtagcgcttcttctccctccccgcagcagcagcacctcccaccccaccaagccgccttcccagcagtgcccattcccttcccctcgcctttgtctcttttctcagcccccccaacccgccccgcaccccaacagaccggctgtttctgggagggaaagaggcagaatggatgctcctaaaattgagaactgtgctcctggggcccagacagggcctgtcgcttcccaggtgagcagtcctggaaggaacccttgcgtcccccgacctccgggacccccaaaccccaggttcccccctccagtctttcgccgccctcagatccctcaagccctggggctcccctccccaagcttcctggccaccggcgcaggcggctcccggcccggctctaccttctgcgagctgaaggactgggtccagtggtacagaaccaggctctccctgggccaatgggcggggctggccgcctcgggagcgtcgggggcctccgctggcttggccgcatcgctctccagcgcggagatgggccaccagctgcagttggtgggggtcagattgttgggggtcgccatgacagcccggaatcagaggcaggaaagaaggaggctccggcgcggcggctctctctcgcccagcatcacatggcctcgccgagcctgcccctctcctccctccctccccgctccgtgaatgtcattactcaccgggcagttgggggagggggcgaggggatcccgggagctcctttctcctcctccccctggcccgcgccagaaaagccgccagccctcagtgtcaggctccctgcaagggtggaaggagcccgaggaagtgggtcgtgccccccaaacagctcagtgtattgggccaggcacctgccaaagattccaccctcatcaacgctttcctgcctctcagtcttctaaggggcaaatacttcttaactgggattctagagagctattcctttagaaattagtgtctggaaattacttgtctcgctttgaagctgttatcttctaacttttcccctgaagggcctcgaagggcagagggaacagactatgatttatttaacagacacttacatagcacttactgtatgcccaggcactgttctaagagctttacaactatcagcccatttagctctcacaatagtcctattagcttcattttacagagaaggaaactgaggcacagagaggctaagtgaccttgcccaaggtcatcgagctggtaggtggtggagctgatgtgaacacaggcagtctggctccagagtctgtgctcctagccataaggtcatgataatatggtaagaatataaacaatggcacagcaaccatttatcaacctgagccccttacatgcatcatctcatttcatctgcacaataatcatttttcacggatgaggaaggcgaggctcagaaatgtcaagtcatttgttcaaggttgcatcttctaccaaggcacaaccagatgagcccaaagaaagcccataatgcctttgctgtcacaaagtctgccctaaacatacataagaacttcagcaaagttccttaatacacctatacttccgttactataaatactgtgttttaatttatttaccattgaggaaatacagaagcagaccctgggacaacagatgcaaatagatgtactaggaagataagctcagtcctccctctcacccccgaccgcccacccccatccatcatgctgctaaggactcctgggtacctcatcccccaggctgtaagcctggctcataaggaaccggtgaacctccttctaccagataacagatgctctgtggtccctgggtttccctttttgccttggctgccacaaagcctgtagctacattttctatcaagtctcagttgctacattagcctccctggttcagcatactttttttgtcactcttgtgaaatttttgatgttgttcactgttcaattttgcaaaaaagggcatggtatgtcttgaaggaaaattcaatcctgtatgctcccagggtcacaatctggtaggtttaacaagtgccataggtgattctcatgagatgcaaggttggtgatactgtttgcatctgtgtctccaccaaatttcatgttgaaatgtagtccccagtgctggaggtggggcctggtaggaggtgattggatcatgggggtggacccctcttggcttggtgctgtccttgcaatagtcagtgagttcttgtgagatctggttgtttaaaagtatgtggtcaggaacagattaagaaagcaaaaataaataaataaataaataagtatgtggcacatcttcccctactctgtcttgcttcctttctcaccatgtgatatgccagcttcccctttgccttccaccgtgattggaagctttctgaggcctcaccagaagccaagcaggtgccagtgccatgcttcctgtacagcctgcagaaccacgagccaattaaacctcttttctttataaattacccagttaaacctcttttctttataaattacccagtctcgggtatttctttatcacaatgtgagaatggtctaacacagctgggaaacactgagctagaggaaagatccctggattggaggcagtaagatagggctcctggctgtgtga

SEQ ID NO: 1561842 - DNA, 4001 bp, Homo sapiens
catgccactgccctccagcctgggcaacagagcaagactctgtctcaaaaaaaaaaaaaaatcataacactcattatcaacagagtcttgacctctcgccaggcactgccatcatcagtacttttgtgcatcatatcacatttcactctcataatagccctctgaggaagttactgcattcaccccattttacagattataaagctgaggctttggacaggcaaagggacctgtccacagctccacagtgagtcagtgggcaatatgattggtggaccagcttcatcagcatcacctggtcgcttgttggaaaggcagcatcttggaccccattccagacccactgaatcaggatccttggggtagaatccagcagtctgggttttaaccaggatcatccagggactctaatgcacgctcaagtttgagtagtcccagtctataacactaagttcctaagttatatcccttcttcaacaaccatatcagcaaccctgagaaggggttgggattggaagtggctattgttgtatcactatcccgctttccagatgatgaaatgagcctggaccaagactcaaatctaagtctttgagttccaaggccctttctcttcatggattctgtttttccatctggaaaatgaacgaatggaacaaaaggatcttccaggaagaagaggagtcagaaggtcaggcagtggtgccgcttaggcccctgcaggacctgcctctgggccctggccatggtgctgaatccgtggcccagagacgggacaaccgcccagggtgggagattgcgcccctagaggcgcccctgtctgaggggtgcagttcacagccttacccccaggaagcgggaaccctgagaatccagttggatttccaactgcccctcaggtcccctaggtcctagaagcattttaggggctggggccactctgtgcctttaagagcaaaacagacctgatgggctgagccgagctggtgtgaggggatggtttaactccttccttctcagctcaagacacggagtggggggtgggcgacgactggggacagaccctccaagccctagccagaaggcggcccgcagacagaggggcagaggagctgtgacctgggggcctgcagtgtccgggacggcagcgtgcagggagcgactgagagggggctaccgaggctggaccccaagtagcgcttcttctccctccccgcagcagcagcacctcccaccccaccaagccgccttcccagcagtgcccattcccttcccctcgcctttgtctcttttctcagcccccccaacccgccccgcaccccaacagaccggctgtttctgggagggaaagaggcagaatggatgctcctaaaattgagaactgtgctcctggggcccagacagggcctgtcgcttcccaggtgagcagtcctggaaggaacccttgcgtcccccgacctccgggacccccaaaccccaggttcccccctccagtctttcgccgccctcagatccctcaagccctggggctcccctccccaagcttcctggccaccggcgcaggcggctcccggcccggctctaccttctgcgagctgaaggactgggtccagtggtacagaaccaggctctccctgggccaatgggcggggctggccgcctcgggagcgtcgggggcctccgctggcttggccgcatcgctctccagcgcggagatgggccaccagctgcagttggtgggggtcagattgttgggggtcgccatgacagcccggaatcagaggcaggaaagaaggaggctccggcgcggcggctctctctcgcccagcatcacatggcctcgccgagcctgcccctctcctccctccctccccgctccgtgaatgtcattactcaccgggcagttgggggagggggcgaggggatcccgggagctcctttctcctcctccccctggcccgcgccagaaaagccgccagccctcagtgtcaggctccctgcaagggtggaaggagcccgaggaagtgggtcgtgccccccaaacagctcagtgtattgggccaggcacctgccaaagattccaccctcatcaacgctttcctgcctctcagtcttctaaggggcaaatacttcttaactgggattctagagagctattcctttagaaattagtgtctggaaattacttgtctcgctttgaagctgttatcttctaacttttcccctgaagggcctcgaagggcagagggaacagactatgatttatttaacagacacttacatagcacttactgtatgcccaggcactgttctaagagctttacaactatcagcccatttagctctcacaatagtcctattagcttcattttacagagaaggaaactgaggcacagagaggctaagtgaccttgcccaaggtcatcgagctggtaggtggtggagctgatgtgaacacaggcagtctggctccagagtctgtgctcctagccataaggtcatgataatatggtaagaatataaacaatggcacagcaaccatttatcaacctgagccccttacatgcatcatctcatttcatctgcacaataatcatttttcacggatgaggaaggcgaggctcagaaatgtcaagtcatttgttcaaggttgcatcttctaccaaggcacaaccagatgagcccaaagaaagcccataatgcctttgctgtcacaaagtctgccctaaacatacataagaacttcagcaaagttccttaatacacctatacttccgttactataaatactgtgttttaatttatttaccattgaggaaatacagaagcagaccctgggacaacagatgcaaatagatgtactaggaagataagctcagtcctccctctcacccccgaccgcccacccccatccatcatgctgctaaggactcctgggtacctcatcccccaggctgtaagcctggctcataaggaaccggtgaacctccttctaccagataacagatgctctgtggtccctgggtttccctttttgccttggctgccacaaagcctgtagctacattttctatcaagtctcagttgctacattagcctccctggttcagcatactttttttgtcactcttgtgaaatttttgatgttgttcactgttcaattttgcaaaaaagggcatggtatgtcttgaaggaaaattcaatcctgtatgctcccagggtcacaatctggtaggtttaacaagtgccataggtgattctcatgagatgcaaggttggtgatactgtttgcatctgtgtctccaccaaatttcatgttgaaatgtagtccccagtgctggaggtggggcctggtaggaggtgattggatcatgggggtggacccctcttggcttggtgctgtccttgcaatagtcagtgagttcttgtgagatctggttgtttaaaagtatgtggtcaggaacagattaagaaagcaaaaataaataaataaataaataagtatgtggcacatcttcccctactctgtcttgcttcctttctcaccatgtgatatgccagcttcccctttgccttccaccgtgattggaagctttctgaggcctcaccagaagccaagcaggtgccagtgccatgcttcctgtacagcctgcagaaccacgagccaattaaacctcttttctttataaattacccagttaaacctcttttctttataaattacccagtctcgggtatttctttatcacaatgtgagaatggtctaacacagctgggaaacactgagctagaggaaagatccctggattggaggcagtaagatagggctcctggctgtgtgacttctcacaggtcacttaccctccctgagattcggctcatcatctgtgaaatagagataatgataactgcatgaggcagagatggatcactgtcacccagagatctgtgttctcagtccataggacacagtagttgctggaaagtggctgccactcacc

SEQ ID NO: 1561843 - DNA, 4001 bp, Homo sapiens
tctccaagctcccttagtgctggggggcacacggacttattttatgagcccccaaggggtcacagctttccctggctgggcaggcagccagaccacctcccccacctcagccagacctgctgcctctgtgcctcccccgccccctggcagccccctccaggccagctctaatgaggagcctctcccaccctctgacccctcccccaccctgccagcctaggaccagagcaaatgagctgcaggcaacttgagcgaccaacagcccacctccctcttcacactaggaagaaactgaggccctgagagggggagggacttgcttagatcacacagcaagtggagaggaaaagctgcaacagtaacattaggtgggccgagagagacagaggggagcaggtagtctctggagttaatgaggagaatgaggcatgttcaggacagcatctaaagttttcatgttggaagggctctcagaaaccaccctgtccaaccccatataggtgtacagatgggaaaacggagaccccaagtgagaaggagctttcccaaggtcatactgcgagttaggccctgggtctgctccctccccatgtatctgaacatcattccatgactccaagatgccccatttactgtgtgcacctctcttgcctcctctatccccttgcctgagggcaaagttgcagaagcatggggacctcaagattcatttctttctctgccgtctgagaccgcctacaaacctgtgaagcttggaaagttcggccagcccagcaggtacagatgcacaactgagcaatcaagtctcggaatctggtctccaactctgccacgaactggcaggtcttgtctcttctctaggctttagtgcccactctgcaccttgcaggcgttggacctggtgcttcctaggtgccctccagccctgatgtgtgggcagcctaggatctgctatgtgtgagatatgtgtcagtgtccccagacacccaccccgggccagatgcacacagtgtctcccaccagggcagtgccagggctttgaaagcccctccattcatgcagatgcccctccctctgagccgtgcccctgccaccccgccccctcaccttgccctttgtcaataaagctggtgatggtgttggccaggccagcctccaacttcacgctgctgttgcctccctttctgtcagcatcggacagcgtcctgtacagcgagagcatgtactcgtggggtgtgatggggggtgggcgaaacggctccttgggctctcgtgggggcccgggctccctggccttcttcagcaggaaggagctggggacagatcctgcttttgggggtgccttgcctccgggaagctgtccttttggggtcacagtccgggctgtagcctgccttgtttggggagggtgtcctggcttgggttcagggccgcccggtctggggggcagctttttgggttcatccttcttgggctgtgtcaggcctcctgtctgcccggtgcctccctttgccctggcattggcattggtggcccccccaccatagctgtgaccccctggcctgaagacgttccgggccagggggggcctctccttggcctctgctttggccaatcctggcctggtcccctggggtctctggcccaagtcaggggcacccaacacagtgcagatgaattccaggtccagccaagccaggtaccaaagcaagaaagtgaggagtttggggagtctcatcctctggccagccgctgaatgacaccaaagagaacagcggcagcagcgaaggtgcctctggtttggcaggaaaaaccatgaaaggagtggactttcaaaagcagcggcagcagcagtagcagcagaaggaaaggctttctcctcagtctgagactcttgaagtctgccgggtgtgtgtttgtatccagtcccatagtggaaatgctctcgtatccagacgtgcaccgtctccagtcagcagctgaaaataactcgttcttgaaaggagaaagccgaccgccccctttctcctgcacaactgactgagggcttgaaggaggcttgtataaggctgagggatttttccaagaaggaagaatggcgtaatgctgcctgtgtgctccagtttttttttccccctagttttgaatcctttccagtgaaaatacttcacacacacacacacacacacacacacacacactcacaggcctgcaggtgctcagaaaaatcttttacaaacctgaactcaggaattggaaacggaattccaacccaaaccaatttaattactctctgatgtcatgctgtctaaactcatttaagtgcgatatatttatgtgaaaaaaatcaccgctgccctttcgaggccatggctcacgggggctcctggcacagagccctgcagcgggactctaggcttagggggcctccccctccacagggcagactcaggggtcttcacctccacctcatggagcagcccaccccactttcccgaggagagatgctgaagaatgagctcaaagatcttaagccccagaagcatggggagtgtgggtttgtagttaagttcttagagtgtttttaaagcagtttcaactcctgcatctagtctgggacctgatttgttatgcgtgtgtgtgtgtgtgtgtgtgtgtgtgtgtgtgtgtttatgtgcctgtgtgtgtgtgtgcctgtgtgtgtgtgtgcctgtgtgtgtgtattgggagtagggacagcacagatggcagcatttacccacattttcttttattttaataaacttgtggtgacccagagactgaaaaatatcagtgcccactacaccccctccctacccccaaatgccattgactgagtgcatattcttcaggcttgggggcactgtcgcccttaagttcactccttggatggcggcaggtccagggtgtaccccaccaccaccccagcagagacgtcctctgagttttcttagacaagactggctgagtctggggcagcagcggcccctacaggaggctggaaaagccatttcccacatgacgctttttttttttttttttttgagacggagtctcgctctgtcgagtgcagtggcatgatctcagctcactgcaatctctgcctcccaggttcacgccattcccctgcctcagcctccccagtagctgggactacaggcccctgccaccacacctggctgattttttacgtttgtagtagagatggggtttcaccatgttagccaggatggtctcgatctcctgacctcgtgatccgcccgcctcggcctcccaaagtgctgggattacaggcgtgagccaccgcgccgggcacaatttcccacatgatgtttttctggtagctctggaaggtctgaattccagctgaactcaagggtttcttaaagtgcctcattgaagtatggaagatcccttcctctggggaaccttcgccgtagagcccctgggcaacttaacacagggtcagcggggaaagctgttcgcttcacctgaaatatcctcctctctctctcccacaactggaggaagcactctacatcctgagaagtttagctgaaaatttacctccttcgggaagcctttcctcgtccccagacagagccagttaccccttctgtacatttctctacaacaacacttttcacgctgtaagaaggatggcgggggagaagcaatagtcagataggcttccttcttttttttttttttttttttttttttgagacagagtctcactctgtcacctaggctggagtgcagtggtgcgatcttggctcactgtaatctccacctcctgggttcaaacgattctcctgcctcagcctctcgagtagctgggactacaggtgcacaccaccatgcctatctattttttgtatttttagtagagacggagtttcaccatgttggccagtctggtctcgagctcctgacctcaagtgatccacccaccttggcctctcaaagtgctgggattg

SEQ ID NO: 1561844 - DNA, 4001 bp, Homo sapiens
agagtgtggcccaaaggcggggccgactggcactgatcggctctccgtcgtggggatgggcagcggcgggctctggagggctctgcaacacgtcagggatggagagggagcatggaggctgagccaggccttccccaaaagctgaagcccctccttcccaagcatcgccaccatttctccagaacggccacacacgtccaaagacgggtccaggggctcctcctacactcaatggcactacctgacgggggaacaatgaggctttctggggatctggccaatggagactttaaaaccagagatggcatagaagacagtggctgctcctagtctcttaatgacaggctgtgacgccatacctttcctcctctaccccctccacctcgccgcttatcctccaccatggagaccctttgggtgggtctattgatttctgtttctccctccttcctgacctcctgctcctcctcctgccccctgcatgggtgtctcccctctccagcccttcctgatgctcccttgagtcgaggtcatcctgccccatctgcactggcttcctccagcccctccacccttcatcagccaggggagagcggattcatgcaagagctctggccactgaagaacccactgagtcctggctgccagggtgtggattcagagaagtccctgacgacacaccgccgggctttgtcctgagccacaggacccaagggttcatcagtggttttagtgaccaggccccatgataggtgacaccctgctggagacagagaaggtgcctggcaccccagtcacacaccaggggttgggtagacagagggtgagctctgcccacatgcccacaggctgtgtctaaatagagccaggataactggaagttgggacttggcagccccttcccaggatttgagtcacaaaaaccaggctaatcgaatcccccccagcctccacaagttctccagtctggagcatctcattcagactagaagcctttctggtgcccagcctgagtggacgtgcacagcctggcccctcatccatctccctgtgtgtttgtgcacaggggctacggggtggtatcccccccccagggctgggagcagggtgcctctctggcaatggctgtgtctttcaggctgtggattggaccgcgtggtgagagtgattcctgctgtgacttcagcacctgcctctgcaggaaggatgaacatagctcgagggcttagaatggtccctgagtggaggggatagatggcagcggggtgagtcctcccttcctcccctccccaaagggcacactttgctttcctctcacagccttgccaggcacatcctcaggtctcagctgcacacaccagcacctgatgttgcctaagggtttgaacccacctctgcctgttgcttacctgtcacccttgcccagaacacccttacccagtctccaccctcacagcagctcatctcagctgcaagatctcctccaccttaaacctttaccagattccactttccacactacactcggtaaagtgacccctccctccgcgacatccatgcagggacggagcagtccaagaaggtggaacaacagatgaacaacaccgaagattcaccaaggaatctgtgtgatgggtaggagggctggggctgaggggagggtgagagagttgggagatggcagacaataggcaaaagttcctggggcacgggtgccaaggctggactcgggagggggatggcggtggtggcttgacggggctgggaggtgaggtgctcagcacatagtggggtcaattgccaggggtccccaagccgtgcgcacaggcctctcactggcaacccttcctgtggttcagcttttcctggaatatcttgccctcccaccttgtcactgaggagcagggacagagaggccagggttcggggtccaggggaagagaggggcgctcacccagtaacagcagcagcagcagcgcaggccccaggcagcggaccatgctggaccttcaacagagaaggatggctggcagagccctagtctgataggcgcccccttcctagtgcctctggagcaggagcacagtgaaaacccagctgtctgcgctgatacccctgggaggagcctttgctgcagcaactccccgccctcattaagtctccaccccaggctgcaccgtcaggtaaacctgggagccacgggattcggcgcctgaatgtgcctagacggaccccaacacactagccctgccacgcacacccagcaacacacagacaaccacccagggagacctggtctctcccatgctaaactaggaacgctatgaaacagcatttttcttttccttttttatataattctattttaaacttaaaaaaatttttttgaatagagttggggtctcgctctattgcgcaggctggtcttgaactcctgggctcaaaccatcctcccacctcggcctctcaaagtgctaggatgacaggtgtgagccaccatgcctggcctattttaaacttcttattgttgactaattttagacttgcagaaaagttggaaaatgtaagcattttccttacacccttcacccagcttcccctgatggtccatcttacttaatcatagtccaatcattacagctaggaaactaaccttggtacaatcctgttaacgaaactgtagactgttttgcatttctcatttttccactaatgtcctttttctgttccaagatccattctaggatcccacatcacagttgtctccttattctcctcaatctgggagttccttcatctttccttatctttacccttgacacttttgaagaatcctggccagttattttgcagaatgtttctcttgagttgtctgatgttttattctgatcagaatgagacacagcattgttttgactaaccaaaaagttattctataagtaaatattgaggttaaaaatctcatccaacctgggcaacagagtaaggccctgtctcaaataaagtctcaacactaagatttaaaaagtgaccagaaaagcccccactatgatttgtcttgacttttttttaaaaaacaaacaaacaaacaaacaaacaaacaaaaacgatgtcttgctctctctctccctcaggctggagtgcagtggcacgatcttggctcactgcaacctccgcctcccaggttcaagcgattcttctgcctcagcctcccaggtagctgggattacagacgcccgccaccatgcccggctaatttttgtatttttagtagagacaaggtttcaccatgttggccaggctggtctcgaacttctaacctcaagtgacccgcccacctctgcctcccaaagtgctggaattacagacgtgagcaactgcgcttggcctcattagcatcttaaatctccacacaggggtgtgttccttactattataaggagcaaaggatcagtttgaggacaggtaaaataaaaatgcgcttgctgcctagagggagaagtccctgctgaagatagctttgcttgaatgagctcaattgcaatgccagtgctgaggcttgttgactgtacggtcaccacagttgctgctgcgcgcctagaacatggtcactttcttgactacctatcctgtctcagtacatctgtctgtggtttgtggtggtccatttcctaatttttttaatgaatcagaagactgtgatgtgctttccgctgtgctaaccatggccgctgaagcaaaatgtaaaccaagatgcccctgcagtggttgtgcttcactctacgacatctgttaccggaaaggggtccagattcagaccccaggagagggttcttggatctcgtgcaagaaagaatttgagacgagtccataaagtgaaagcacatttattaggaaagtaaaagaataaaagaatggctactccatagagagcgcagccctgagggctgctggttgcccatttttatggttgtttctggatgatctgctaaacaggggtg

SEQ ID NO: 1561845 - DNA, 4001 bp, Homo sapiens
tcggctcactgtaacctctgcctccccagttcgagtgattctcctgcctcagcctcccgagtagctaggattacaggcacccaccaccatgcccagctaatttttgtatttttagtagagatggggtttcaccatgttggccaggcaggtcttgaactcctgacctcaagtgatccacccacctcaggcatgagccaccgcgcccggcctatggataaggtcttgatgctggagaaaggagagtgaacaaaacaatcatgatccctgccctcatggggcttacagacagggagtaatcagataattgcacaaataaataatcatagattttggtaaatgctaagacatttacagagggccagaagaaaacatgtcaggcagttccaatctctaggtcaagagagacaggcattctctgttgagctggaagaggaaactaaggcccaggacagggtaggtgtgcctgttgtcgcttggtgagtcagggctgtattaggaccagaagtctcactcctgactactgaataaaaggcctagcttcaggctgatatccatcatgacacatcttcccactcctctccctgctacctcctgattccactccctttggaaaataagttttgatccgcagccctgacatttgacgcccataaacctctaaactccatcttcattatctcctcacccccaccccatacagagtgcagtccagtcaggttggcaagggctgctggtcagggccagatgaccagaaagtgtagaggaggagagaatttggggctttcaggctgggagcagctagggaagggccaagccggaaaagcagcatctgccaggctggtaagagacaaggctcaagtgcaggcactgcgaggaagcgagagtgaggtagaaggatgctctaatgccaggaagtgacgtgcagggacagagggatgggggatgaaggatgaagaatggaggggaggatgaagctgggccacatggctaggaggaagagcagcagggaaggaatgcacagagagctctttgcccccaggtctcttccaatccctgtctcctccttctcttacccccacttctcacaattccagcagagggctgaggggaacacagtaaaattctggagactgcttcctagggagcagagtaccttactaataccccggccagatccatggctcagggaggggtggggtaatccacaggagagtgaaggcgttctagtccccaaggacttttgagaggtcatgcagtccatgcctccgtctcccaacacccaacagaggggaatcatattctctttacccctccctagacatgaagagattctccgcttctcccagaccctctgcttctcacaatccctggctgtggggaacttctcttaaggcacagattggatccctcttgctgcagtctctgacttggtttctcctatcctgtcctctgtggctagagaaagccctcttctgggtgatcacagcggttccttaggatctccccttcaacattccttcatcgttagttggttcttcccagaaggtaagcccaatcccttctactgcagtccctagcatcctctccgttgtcgcatcctacgcctccaaggcagaaatgcacccccttcctcaccaaataattaacagagacaagggagaagaagggagagatccaagaagatggggatgaattaaggagatggagctggaggtggatgcttgacacagaagaaggaagaccggggacttcccaaggcagggcagggacggggtcagcgggcctcaccggtgtcggggtctcccagaaaggcgtcctcgtccttgcggcccctcagcggggccgcgggcgccggctcgtcctcgggcagccgcgggaagctggtgatgctcatgtagtccactggcgagtaggcgcccagggcgctctcctggctggcctcgttctccgccgccatcctcgcccgcgccccccagcagcgcagcgcctgccggaagtggctgcggcgggggagtgggagggcggagggcggggcctgatcttcgcgacagccgggagggggcgcctctcccagccctcggccgtgtcccggtctgactcgcccccgtctgctcagcgctatcagcctgcagctggcacacaggtgcgtgtagatggacagccaggaaggcagcgcagggtcgaggggagagcgcggggcaagcgagacttcagtggctctgcactttacgcagctcagggaccaaaccccttcctccttccagcctgaatacagctagtgtcctcctcaaatcccaggcttccttttcgggccccagaccctttcactgaccgcaaatccctctcgaccccagatcctgtctctgaccccaaactcctcggaccccagacccctccttgaattccgagatcctcctcctccgattttagactcctcctccgaccttagacctctttttcgacttcagactctgtcttcacccccaaacccttttgaaaaccccagcccatgcttcatctccaggcctctttgactgcagacgcctctttggacaacagatccctcctctgacctcagatcccttcccgcaccccgacacttctgactcctctttcaaccgcattctcaaactttagtgtgtgttaggatctttgaaagcggatccccagattccactccagagatcatgattcagtaggctgggatgaggtccttggaacctgaatatttaccatcattttaagagtttttgatgtggttctggaaaggacactttgagaaagaaggagtggtggtagtgatggtagggcaggagtggggcaaggtggggaataggtctccatattctggatgtctgggttctattctgccaccgctcaaacactgtgtaatcttgggcaagacaattagtctctctatcagtttccccatctgtgaaatggaaagaataatagtacccattttagagggttgtcatgaggattaagtaacagaatggaaagcgattagtatagggcttggcacctactcaataaatggcatcatcatcatcatcatcattgccttaatctggtagattcattccctccaaactcatccatcctctctccactccaaaattccaaccacactacagcttgtactacttctccatatccaaggatgagggaggttccttcttttacgaggtctctgttccaaactttcattgtgaagtccacaggaagagaggggggctggtgaagcctctatacacacatcctttctcttcccaaccccagaccagtctcagggatggcctgaagtgcttgaaaaatctactatatacacagcagctgcagtagcaactatagacaggagggggaagcagtgtgtcgggaacagctctggggtttgggtgtaggacttgggagagaggataggaaggagagggctactcagagctgtgtggtaagagtgcccagggagggtaacagtctatcaccaaaaagtgtacccattgtctgtgcctttccccaccccagagagttcttatctcctcagtgatgtttgtagggtctattacactaccctgaggtctaatccctctggtgggacccttccccacttgatgaggtctgcaccttctcagtgatgtccactcccacagtgtagttggcagctcctcactggagtttgagtcctctggtagggtccacgtctccttagtaaagtctatatcctctgtatctcttaggggaaatccatgtctcctcactagggtaagtgcccttcaaagccattcatgtcctattagcagggcccagggcccttcagtcagatctgagaacccccagcaacatctgtgctcccttagtggagtccatgtactgtcagtgaagtgtgtgtcccttcggtgcagtgaatatctcctttatgaaagtatctgaccccttggtggggtctatgtccaccccaagaggtctgtactccttcagtgggccctcagattcccgccctc

SEQ ID NO: 1561846 - DNA, 4001 bp, Homo sapiens
gcatgaccagtctgactccctgtctctgtcgcattccagcaactctgaatgtttgtctgcctggtcctcagcctccagacccttgctgcattcaatcactcattccttcatgcaaaaaatatttctagagtttgcactgcatgcctggcactggggaatcaataggaaacagacacttaggtcctgccctcatgccaagaaaaacaaacacacacagcgaaagtgctgaaaccacaagccaggtaaggggaatcaagaggcatgaggtatgggcagagtggttagggagagcttctcagaggaggcaatgtgtgaaaagagcctggaatgtggcctaaatggtcagtgcaaaggccctgaggcaggtggtataggctggtgagcgataggcagagagtgaatggagtggggtggggagaaaaggctgaagatgcaggctggggcccatcccacaggacatcctaggtcccataacaactggcttttgctctgtgccatgcaggcttagggcagaggaatgagcaggctggggagtgttttcacagggtccctctggcagctatgacggggataaggataaagtccaaaggggaggctgtgggtatcaaccaggcaagagatgatggcctgggtgggagaaagagaagaatcaaggatggcgccgactagcgaggtaaactctgcagaaggggcaggtttggggatggtcaggagcttgattttggatacttcatcagacctgaagagcatgggtgcacgtataaaaaaaataaataaataagcatgggttcacgggcaagggcgggctgagagatgaacatggaggtattgacattgagtggctgctggatgccatgagcctggccaaggtccccaaggcagtggcgaggaggagatgaggaggtcaaggaggagacagagaggatggacccgaaggccgaagaaaatgcctcaagggagtttcaacaccgggcgcggtggctcacggctgtaatcccagcactttgggaggccgaggcctgtaatcccagcactttgggagggcggatcacgacgtcaggagatcgagaccatcctggctaacacagtgaaaccccgtctctactaaaaatacaaaaaattagccgggtgtggtggcgggcgcctgtagtcccaactccagaggctgaggcaggagaatggcgtgaacccggtaggcggagcttgcggtgagccgagatcaggccactggaatccaggctgggcgacagagggagactccatctcaaaaaaaaaaaaaaaaaaaaaaagagtctggctctgttgcccaggctggagtgcagtggcgtgatctcggcacatcacaatcccttccccacccccgggttcaagtgattcttgtgtctcaaccgccggagtagctgggactacaggcgcatgccaccatgtctgactaaatttgtatttttactagagacggggtttcgctatgttggccaggctggtctccaactcctgagctcgtgatccgtccgctccgacctcccaaagtgctaggattataggcataagccaccacgcccggcctcttttttttctttttctttatttggagactgagttttgcacttgttgcccaggctggagtgcaatggcgcgatctcagctcactgcaatctccacctcagcaggagagcaggaatcttcagtgatccacgggcagatctgccgccattgtgggcacctgttcctcccgcgacctttgtgcccgtgtctctccttccagtacctattgcatgaccccccacgtccgcctcccgccattgccagcaagtgccttgcgcgggtacctggctgcgcttattaatccgttaagctcactctgtcaccggcgccattaagtgctcacgcgcccactccctcaggtttaaaaggcgcgttgcccggcagcagaagaaactgctggcttcgcctttggccgagttggcggctggacgaggacgcagagcccagctctcgagagttcaagcaaccgacggttccccagggctcccaggagcggttacctgggcactctgtgcccctccttcctgttcgggcccaggcctaggacctgccagtagggctcagttgcctggagccggttcagcccatcccccagttcactttgcttgtgggatctccccgttgctcctgcctgtggactgagtggcaggccatcctacaagcacccggacacttgacatcagtggtgtcaagacaactctaagaaggttttccgtgatcctgcaagccctgcgttccttcctgggatcctgctttcaatttgattgcacaggtaccacagcaagccagtgctgtgtgctctgagttccagggcgtcctccagctcagccactccactgagcacaaggactctctgtggggcccaggagccgggagtcacccctttggtgtccaaaacacccggctgtccccagacttgtgtccagggaagacagtgttgagggccctcaaggagagcggggcagggatgcctgagcaggacaaggaccctagagtccaagagaatcctgatgatcagagaagggtccccgaggtcaccggggatgcacggtctgcatttcggcccctgcgggacaatggaggcctctctctccctttgtgcccgggcccgggcctctgcagacagacctccatacccagaggtgagaaatcagatataaccagacatcccagacctcctggacgagctcctgcaccaaacgaaatgccatctccagctcctgcagctccacgggaggcttgccggggctaaagcggaggaggggaccagcctcatcccacagccagctgaccctcagttcctcaaagacagtgggtgaggacaggcttcaggctgtctcttcgggtcacacccagtgtgaaaaggcagcagatatagcaccagggcagacactcaccctcaggaatgactcctccatatccgaggcctctaggcccagtatacacaagtttcccctgctgccatgcaggcgaggggagcctttgatgctgccacctcccttagagctggggtaccgggtcactgttgaagacctggaccgggagaaggaggcagcattccagcgcatcaatagtgcactgcaggttgaggacaaggccatctcggactgcagactctcacggccttcccacactttgtcctcacttgcaacagggacttctggtctgcctgccgtttctaaagcacccagtatggatgcacagcaggagagacacaagtcccaagactgcctgggcctactggcccccctagcacctgctgcagaggtcccctctacagctcccatgtctgggaagaagcacagaccaccaggccccctgttctcctcctcagatccccttcctgccacctcttcccactcccaggactcagcccaggtcacctcgctgattcctgcccccttcccagctgcaagcatggatgcgggcatgagaagaacaagccctggcacttctgctcctgcagccgcagcagcccctcccccctccacattgaaccccacgttggggtcactactagagtggatagaggcccttcacatttctgggcctcagccacagctgcagcaggtgcccagaggtcagaaccagagatcccagacctcccggaccagctcgtgccccaaacgaaaggccatctccagctcctacagctctacgggaggcctcccggaacgaaagcggaggagggggccagcctcatcccactgccagctgaccctcagttcctcaaacacagtgagtgaggacggacctcaggctgtctcttcgggtcacacccattgtgaaaagacggcagatacagcaccagggcagacactcgcccccaggggtggcttccccagatcccaggcctctaggccctgtagacacaagtttcccctgctgccacgcaggcgaggggagcctttgatgctgcctcctcccttagagctggggtaccgggtcactgctga

SEQ ID NO: 1561847 - DNA, 4001 bp, Homo sapiens
ggcagggcttggtgtgaaccttcccctggcccccagccatgtgcctggctctccccatgctgaagatgctgaggctagttccagtgcccgcattgtgaagatctccgaatcccacctctctgttcctccccagccagatggctccatttcacacacaatacactgaggcccagagagtggggagacaggccagggaggccacctggagcctggcacagtggcctcatttattgtgctgctctgctgctcacaggagaagcctgtcccccaaagtcctcttcctcgtcctggtgagtattttgttcctggattgcttgtcagccttgtccgcctggagcaatcagtagccagcaggttccccacctttcctggagtccgaggcagctgcccagccaccagccatgcggacgatggcttgcaccacagcaatgaaggtggacgtgatctgggtgtgatggtgccgggtctccagggctgcagtcacttcctgggggtgggaggagaggggaagcctgagcagggctccagatgccacctgaaccacacctgtgtggtcacaggcctcagcccaggtggtgccatttcaggccaggtcatcaggaagagcaggttggggcctgctgggtctcattggagcaaggggtttggccctcatggcacaggggctccagatggcccaggcactagagagaggacaccaaccattgtccactctgtgatgatccaggcctccagcccacgatgccctggggccccacaccgtgactcagtttctccaacccccagcccacctggtcaatgtttctctccactgtcgtgacgttgggcagaagctggttgtgcagccggggctcctccacggcccacttcacgtcatagccgaaccagaggttgtagatgatggcctggggcatgggagtgtgatcagcatggcttgggggctgtgcagggtgggcacggccagggagaaaaggtgtgacacataccagtgcagtggccatggtgatctgcgtgcccccggcagctcccaccaccatccggacctggccgtcctggcccaccatgatcgtcgggcacatggacgagagcggctgcttccctgcggccaatgggagaagacagggatgcccgtcagctgcctgcccaggacacccgcccctctccaccccagtcccccaccctcggacctccaccccatacctggctggatgaaattggcaggtgaggggggtaccccaaactcgttggtgatgctggtagagctgaagtcatccatttcattattgagcaggatcccgctgactggggagcgcaccttggagccaaagctatcgcccagccaggtcagacagtgcccgaccttgcctggcccagcctggtccctatccacccactgaggctcaaacatactcactgagaggctcaggataagctaccaaggttgggcctcagtttcccaccaggaaaagaggtgatggagccaccttactggataagtgggcagtccctgagccaccctcccctggccctttcccacccaggcggcccagcagcccctactagaggttgatggtgctggtggcggacacagcactgccgtcctctgcgaccacagacaggtgagcagtgcccccgtcatccggcatgtagaactcgggcttgtagtaggagatcgggtgagtggtgtcgtcagagatctgggcccggagctgggcagagaagaactcggaggtcatgtcgcggaccacctgccgagaccccagagctggcctagggaggtggggagggagggtggggagggggcacaggtctcagaaggcccctgactgtggctctgaccacaaccctctggcacccacaaccttccgtggctccccaggacccaagggcaggcccaggaccttgcatgaccagtctgactccctgtctctgtcgcattccagcaactctgaatgtttgtctgcctggtcctcagcctccagacccttgctgcattcaatcactcattccttcatgcaaaaaatatttctagagtttgcactgcatgcctggcactggggaatcaataggaaacagacacttaggtcctgccctcatgccaagaaaaacaaacacacacagcgaaagtgctgaaaccacaagccaggtaaggggaatcaagaggcatgaggtatgggcagagtggttagggagagcttctcagaggaggcaatgtgtgaaaagagcctggaatgtggcctaaatggtcagtgcaaaggccctgaggcaggtggtataggctggtgagcgataggcagagagtgaatggagtggggtggggagaaaaggctgaagatgcaggctggggcccatcccacaggacatcctaggtcccataacaactggcttttgctctgtgccatgcaggcttagggcagaggaatgagcaggctggggagtgttttcacagggtccctctggcagctatgacggggataaggataaagtccaaaggggaggctgtgggtatcaaccaggcaagagatgatggcctgggtgggagaaagagaagaatcaaggatggcgccgactagcgaggtaaactctgcagaaggggcaggtttggggatggtcaggagcttgattttggatacttcatcagacctgaagagcatgggtgcacgtataaaaaaaataaataaataagcatgggttcacgggcaagggcgggctgagagatgaacatggaggtattgacattgagtggctgctggatgccatgagcctggccaaggtccccaaggcagtggcgaggaggagatgaggaggtcaaggaggagacagagaggatggacccgaaggccgaagaaaatgcctcaagggagtttcaacaccgggcgcggtggctcacggctgtaatcccagcactttgggaggccgaggcctgtaatcccagcactttgggagggcggatcacgacgtcaggagatcgagaccatcctggctaacacagtgaaaccccgtctctactaaaaatacaaaaaattagccgggtgtggtggcgggcgcctgtagtcccaactccagaggctgaggcaggagaatggcgtgaacccggtaggcggagcttgcggtgagccgagatcaggccactggaatccaggctgggcgacagagggagactccatctcaaaaaaaaaaaaaaaaaaaaaaagagtctggctctgttgcccaggctggagtgcagtggcgtgatctcggcacatcacaatcccttccccacccccgggttcaagtgattcttgtgtctcaaccgccggagtagctgggactacaggcgcatgccaccatgtctgactaaatttgtatttttactagagacggggtttcgctatgttggccaggctggtctccaactcctgagctcgtgatccgtccgctccgacctcccaaagtgctaggattataggcataagccaccacgcccggcctcttttttttctttttctttatttggagactgagttttgcacttgttgcccaggctggagtgcaatggcgcgatctcagctcactgcaatctccacctcagcaggagagcaggaatcttcagtgatccacgggcagatctgccgccattgtgggcacctgttcctcccgcgacctttgtgcccgtgtctctccttccagtacctattgcatgaccccccacgtccgcctcccgccattgccagcaagtgccttgcgcgggtacctggctgcgcttattaatccgttaagctcactctgtcaccggcgccattaagtgctcacgcgcccactccctcaggtttaaaaggcgcgttgcccggcagcagaagaaactgctggcttcgcctttggccgagttggcggctggacgaggacgcagagcccagctctcgagagttcaagcaaccgacggttccccagggctcccaggagcggttacctgggcactctgtgcccctccttcctgttcgggcccaggcctaggacctgcc

SEQ ID NO: 1561848 - DNA, 4001 bp, Homo sapiens
atccatgatcctggattgggtcccagatcagaaaaagaaataattgttataaaggacattttgggacaactggtaaaatttgaatatggattataattgataattatattatgattatgtaaggggatgtcctttggttaggtattaggaaacacatatagaagtacctaagggtaaagggtcatgatgactgcaatttactctccaatggttcaacaaaaatgataagaatacttaatgtgcatatgtgtttctgtgtgtatgtatctatatctagctatagatatagagtaagcaaatgtgataaaatgttaggaattggaagtgtatatggaagtccattgtgcttttgttgcaacttttttgtaagtttgagatttttttcaaagtaaaaactaaaaaacgtataggctatagagtcaggcagtttggctccaaactctgccactctttgtgtgtcctttaaaagctattaaccctgggccagggcgcaatggctcacacctgtaatcccagcactttgggaggccgaggcgggcagatcacgaggtcaggagatcgagaccgtcctggctaacatggtgaaaccccgtctctactaaaatatacaaaaaattagctgggcatggtggcgggcacctgtagtctcagctactcgggaggctggggcaggagaatggtgtgaacccgggagggggagcttgcagtgagccgagattgtgccactgcactccagcctgggggacagagagagactccatctcaaaaaaaaaaaaaaaaaaaaaaaaaagagctattaaccctgtacaatggggataagggttgttatgaagattaaagaagaaactaaaagctgggcaaggtggctcacaactataatcccaatgctttgggaggccaaggtgggaggatcacttgaggccaggagttcgagaccagcctgggcaaaatagtgagaccccatctctacaaaaaataaaatagtcagttgtggtggtgcacactggtagtcctagctacttggtaggctaagatgggagggtcgcttgagtccaggcatttgaggttacaatgaggcatgatcattccactgtactccagcctgggcaacagaatgagaccctgtctctaaaaaaaagaaagcaagaaactaagaataatagtagctgacactaccaagggcatctgtgtgcccagcactgtgccaagtgtctgtaaatgtcctagggcagagcctttgtttttggcatggagtcatgattaaatggtaactactaccagtgttgttactgtcggagcctagcctgaagagacacgtggtaggcatggaggtaagttgaggtttaacgctggaacccttttgctatgggaagtccagaaatgacacttgctgtgccaaggaagagatctgaattggtccctggtcccctgtagggaacaagctcctgcagactctgctgcagggtgtgggaagaaatcactagaactcctgcttacccctgctgcctgctcatgatgtcctggagcagcttgcgggcggacagctggcccagcaccttccggtagctgttggtgaagatggcatctgcataccgccgcatcctgtgcggaaggagtcaggggtcagagggcggggtggaggccaggcgagaggacagtcgtggctgcactcgccatgtctctgcaagatccttctgttgccatctgtcccactcaccccaagagagactcagacccctctgagtgacctctgtgaagctgtgtctgcctcctctgcaaggacgggcagtgggtgctgcctggagacatagccagggcccagctgatgggctgagtctgcattcactaacgcctgccccatggcagggatggcttgggagtggtgggaactttccccagggtctgcttacctgagggtcaaagggggaggtggggagcagtgggagctgttgctgagggtgaggatcacaaagaagaacacccagagtggcatccttcacccggggtggcacctgcagagtgacaggaggggaaggtcaggtacagccacagccattgggatggccttcactggcccagccctgggcttggctccatggcaagccttggtccttggtttttggaagctgtgggatgggaaaaagaacccagacactggaagtcagacagacctgagttcatgttctgcctctgccagccacctgctctgacttcattttctccatctgtagaatgggcgtgatggagctcccctgccaaccacatagggttgaaccaaaaaccagtgatagtagggaaatttccccttgccataaggtattagaagtaggatttgggctcaggcacagtgactcacgcctgtaatcccagcactttgggaggctgaggtgggcggatcacctgaggccaggagtttgagaccagcctggccaacctggtgaaatcccatctctactaacattacaaaaataagacaggagtggtggcgtgtgcctgtaatcccagctactcaggaggttgaggcacgagaatcccttgaacccaggaggtggaagttgcagtgagccaagatcgtcccatgcactccacgctgggtgacaaagtgagaccctgtctcaaaaaaaaaaaaaaaaaatttaaataaatagaataaatgggatcccttagcaaggaatggggaaggtcaaagaaccttctctcagtgcccctcattcaaccccatccagtgtggcagtgaaagcaggcagcaagggtaactgctcagctctgagtcagacaaactggaagttcaaatcctggctctgctgtcattagctgtgtgtcccaggacaagtggcttcacctctctgagccttattttccccggccataaaaccaagatagtaactagacctcctacttcggctcctggaaggatctggtgaggtaagtgcctgaaccaatagggaattctctagaaacctttgctgtgtctacctaagaccaaccctctcagagggcaggctcttcctgttttaattttgtttggagttggagagaggggagaagggctctaagtcttgctccagatgcttagattttgctgaagagttttagtcctggaagagactgaagagccgggggatccagtgtggcgcagtcatctcataggtcctgtaactacccttaattggggcctgcggacagcatgctctgcaattaggggaaaaacagccagcaggggacagagcccgcctccgctggggcaagtgccactgctgtcagcccagacctgcccaagcatggaaacacggctggcctcgggggacttggccacctaggaattgggtcctcccatctcccatgggtttctccctctctcagcaggatgtctactccatgggggtgtagatccatccagaagcccagccagccccggaggtggccagcacccccgcctttcccacaatctcctcacatggcttccttctctcccactcctgggtcctgctgaggagttctggcaggcagggccagcactggcagaacccaccttgctctcccggccctctcagggtatcaccctcctttctgaaggcactgaagtctcctctaacccagggatgccttgggcccccaggcagcactcagggggtctgcttactgcagcctgagaccctgtacctgcagagctggagggagcagcagcccaggcctcagtggtcagcccctccctccatgacatgagcatccccacaacacgcacactggctgtcctccacttcctgctcgagtgagcacttgctgccagcgaatgacagggatctcactacccccaggcccgggagcttatttccagatggttctttatttatttattttgagagcgggtctcactctgtggcccaggctgaggtgcagtggtgcaatcatagctcactacagcctcaaactcctgggctcaagcaatcctcctgcctcagcctcctgagtagctgggacagcaggcatgtgccatcatg

SEQ ID NO: 1561849 - DNA, 4001 bp, Homo sapiens
aacaaatatgtacgtggcaaacctattttgtttgtttttttttaaataagggcatgaaagctgacactcaggagggggttacctgtgggaggggcaaatggctgaagccccagaggcagctgttccggctttgggagaatgggtggatacctgagacaggcaggggcacgccaccgtccactctgtctttctcttttgccactgatacatacgttacacatactactttatacgaagtactgctaaagtgtttcaataaattaaaaaactttggtctcttggctgaaaatgggatgaatgcagggtggtgagatctgagcagccagtcccttagggagacacccaagcgagagagaacatcggcagaagagatggagagcaaggtgagatcaagatgctttggccagagtcaatggctgctgctagacagattaccggacaaaagagagggaagaatagaagatggtcacaggtttcaagcatgagaggccctgcaagatggggccacaaataaggaggaaggactggaagaagaacaggtttgagaagcagggcaagtttgacgtgactattagacatgcgtctggagaaatcaagcaggtgtctgaattacagatcctgagctcagagctgaaaacatgaattagtgaaataaggggcggggggggcggtgctggggcacagggatatttaaagccaagaattcagcaaagaccataggaagagcgtagatagggaatgagaatcgccattacttggaggatgccaaccttgaaggtaaagcagagaaagtggcaccagcagaagaaaacttgatgtggagcggcaggtaaagtggaggagaaaccaggagtcgctgtcacacacgaacacccatctttcgttgtcaactgcaaaactcactgagaccaactttttattcacgacaattaatggtaacttaaggactcattttctttttcttttttttttgagacagagcctcgctctgtcgcccaggctggagggcagtggcgcgatcatggctcaccgcagcctcgacctcctgggctcaagcgatcctcccacctcagcctccagagtaactgggacaacaggagcgcaccactctgcctggctaatttttttatttttagcagagaagggagtctcgctgttgccacggctggtctcgaactcgcgggctcaagtgatccgcccacttcgacctccgccaccgcgcccggccctaggaccaacgttaagagctccctaggaaaaggcaccttttctctcggcccattcggtgatcggcactcacagcgcttccactccgggcagttacgtgcgcccatgaaaagcaacaactttgtagaactggccagtcctgttagcaggaagaactcggtagtctcaaactccagcataaaaagattcagcagaagaaaacacccgtgtgctgaagactcctactttccatgccacactttacatcctcacccgctcggtttctgctttaaagcagcagattttattaaaaagacttcgttacggacgtcgctcctccacagagacagctaccgccgcccctcaggctggccgggaccgccccagaacaccagcgcctgaggccgcgcgcctggaggctgagccctgactgccccctgggcaccggcgcggggcggccgtccgggcctggactcactgcgcgccccaattccgcacctgccagcgccggcgcttccaaggcccccagagcgggggcggcgcgcaccccggccacatcccgcctgcccgcccggcccggccccgggagacgctcggcccggccgcccgggcccgccgccgccatcttaccgtgcggaacctgcctcccgcgctgcgcggtctgggcggctgcggctccgcagcctctcctgggctggggagaggtggcggccgccggggcgcccgagtagaaggaggcagaggtgggggccgcggcggaggcgggggcgggggcgggggcggggagcgggagggcaggcgcaccggaggccgcccctcagcacctctcgcgacagcaagagagcgcgagagcgcgagccgatgaccaatgaagcgcccccgcgagggggcggggcggacggcctcccggaagcgcggaacctcagcttccgtacttgcgcagaactcccctcgcggcgaccacgcactacgggttggcgccagagtcaaaaggcgtcggccctctggcaagatggctgctgcggaggcgttggagcgcggaaatctggaaccgggatggcgacgtctacactgagtcggaggcgaaggtcccagcttttttcctgtcgtttgcgtgaggccgcacggggtggggcgggggaaaggcgccgggtgtccgcggccgcccctcagacggggagggagtcccctcccgaccggcggccttccagggctagtgtccctgaggtccagggagagacggctgacccgagaccgggctgggcgagagctgtgctgtctgcgcgttgaagcgagttcccccgctttactcgagatgttgttgagcgcgtcctcactcgaggccaggtggggaatcagaagggccctgccctcagggcgcctcccatgggctacgccgaagggcgggacgcggccagggcgcgcgggacaaaggagaccccacttgcttgcggggcggagtcccggcggcggcgcggggcagggccggggttactcggtgactggagaccctcccggcaggagcgcgggttgaggccgcacttgggtatttgcgcgtttacttgcttattgcctgtccgctcaggaggaatgcgaagtctgtcattgcagggtcccatgtttccgttgctgggaagtaccttaaaatatttgatagagccgaaggaagaaatagagtccttgaggggcagctcctgatttcatctgtgaggaattcacgggacggcttctttctgaagtcaggggtgaggtggtttcgtgtgtttgcttacaagcgagctgaacaacgtgtaagctatgtcggtcggtctactcagcgacagtaagtccagttcggcaaataggttggaggagactgattttggacattttccgttaatcgaaagagctaaatctgcaggtataaggtcttgacaaaattatgcttcatatgcagaggcagtacatgccagtaattttttcatttgcaactacataaccctatgggaaacagttattggtctttatttagttatttattttgagacgaagtctcactctcgcccaggctggagcgcagtggcgccatctcggctcactgcaacctccgcctcccgggttcaagcgattctcctgcctcagcctcccgagtagctgggaccacaggggcgcaccaccacgcccagctaatttttgtatttttagtagagacggggtttccccttgttggtcaggctggtctcagtgtcttgacctcgtgatccgcccgcctcggactcccaaagtgctgggattacaggcgtgagccaccgctcccggcctattttgattttattttattctattttttgagaaggagtctcactttgttgcccaggctggagtgcactgtcatgatctcgactcactgcaacctccgcctcctgggttcaagtgattctcctgcctcagcctcccgagtagctggaactacaggcacccgccaccacgcccggctacttattttgtatttttagtacgggtggggtttcaccatgttggctaggctggtctcgaactcctgacctcaaatgatcacccacctcggcctcccaaggtgctcggattacagtcatgagccaccgcatccggcctatttttattttttaaagttttttagagacggggtcttgccttcttgcccaggctggtctcgatctcctgggctcaagccatcctcccgcctcggcctctgggagtgctgggtttacaggcgtcagccaccatgcccagcctgaacgtcaaggagaaagtgtgcaaggggatgcacgagcaga

SEQ ID NO: 1561850 - DNA, 4001 bp, Homo sapiens
attcagacgagttccttaacttgacccataatttgtgtcagctcagtttcttcatttgtaagacaatctaattgtctggctaggtgctctttagtgttcaaaacaaaactcattacctttcccaacacactctatctcctgaactctgatgttgtttacccagtttcctaaggatcctccaagatcccaattcctccctcttattcattatggaccccatctctgcccctgctctaatagctacaagtcatgtttgcttcatgtctctaaaacccaaacactgatctcagtgccactgacctgacacagttcagaccacacacctctcacctgctctatcagccacccagtagccatctccctgtcccattctttcctctcttcaatccattccccatattgctgccgcagttaccttcaaaacacaaaaattaccctatcacttccttgtctaaaatcctctaccagctcccagcatgccttataagtgaacaacaaattcatgtaggctgtgagccaccttcctagactccccacaggccctattggtcaccctctccagtgtgaccacgtgactttgtgctgcagcatcctttggctgggatgcctcgcttccttctcagatcagtaacctcatccttgaggatggaaaggctcatatatcacctcttctaccccagctcatactggtgtttctccttcgtgctccttgctatacctccttagtatcacttagcgtggtgaattctattatctgtttttgtgcccatcttccagcagaatgtgtcctgacatccacataatgcctgctctatgacgtaagtgaaatatacaatttagagtgcaggctctggagccagagtgccagggttcaaatcctagctttcttgctgtgtcaccttaggcaatatacttaaatctccccaatcctatgcatatatagctgaaaaaagtagaaaacaatagtttaaacatcaaaaagttatttttgttttgtttgggacagggtctccctgtcactcaggctggaatgcagtggcaggatcaagcgatcctcccgcctcagcctcccaaagtgctgggattacaggcaggagccatggtaccgggccctcaaagggttattagaaagacaaaagataatgtacatgaagtgcttagcactctccctggggtagcagtgatagaaaaatacaaataatcataatattaatagtaacagcagcagcaggagaaaagtaatattaatagctaacactgactcagcccttactgtatgtgaggcatatgcagagacccttacacatgccactcattttgcgtccactacatcatgcgttgggtactattattgtcaccatccccatttttgcgtatgagaaaactgagagcacagaaagcttgagtaactgccccaaagtcacactacagaaccagaatctcagccaggttccagaggcctagcttttactgaccacgattagatgcctgagtgagcaagaaatgctaaattatcaggcaacctgtaaatattttaagggaccggaacaaatctgtccaaggaaaactgctaaaatgcaaaatttgctcagatgaggaaattcaccaaatcgctgggtagcgtaagcatgaatgctttctctttcctcctgaattttgttttgctgcttcccaagttttccggagctcggagggaacaaggtgcgaaagtgaaccctgacggggagccgccccgccccagagcccagggcccaacgccggcatgccccgtccaagtctacccgcccctcacgttgaaggcaggcagttgcccttcgggcgcgcgatgcagctcgcggatcagttccatggctttttcgcagaacatggcggacgcttcccactcccgcggccttgccaaccaccagctctcacgccaaaatggtatctgggctctcggcgcctcactcctttcgttctagtcctacagcgccaggctctcgcctcggcctccgctccgcgctttggcgccgaacaaagctagccaataggaacgcgcctacggcgcccgaaaagggacatccaccgctcagccgcattccaagaggggcggagtgggaggggtctttccaaggtgaggtccccgccccggagatggcagaacccctcggctgagcagagacggcttttccagttctcaggcagtgggccgggggactctacgggcagcagagctggaaataaatgcacgccccgcagcttccttgtcattttccttttgattcattcattctcgtttaggttcaagaaaagagcactttgaggttaagaggaaaggcccaaaaacttggtgtgcattggtaggacgcaagggtttcagttttgcagtgcgggttttctgtttgatattaaaatgaaactctcttttattgggtacctagtgctggtagggactgcagtgtgtatttcattcccacaattatctctgaagtgttttaagacccgggattaataaggaaacagaagttaggtaacttgcccaaggtcacacagctccagagtgattagactgttatttaggctttccatttccaacaccacagtaccaccctttgattttaaaatagtcttttaaaaatatttgtaatatctgccctagattaatacgaattcactaggaattttcttggctagatggttatggaatatttcttaagcatatggaagatgggaatcactgctaaagaattgttttattaggcaatttttcaaaaagcaatgttaatttctaacaagcaatcttggatttttttttttttgagatggagtctcgctctgtcgcccaggctggagtgcagtggcgcgaactcggctcactgtaagctccgcctcccgggttcacgccattctcctgcctcagcctcccgagtagctgggactacaggcgcccgccaccacgcccagctaattttttgaattttttaagtatagacggggtttcaccgtgttagccaggacggtctcaatttcctgacctcgtgatccgcccacctcggcctcccaaagtgctgggattacaggcatgagccaccgcaaccggcgcaatcttggattaattctagctaaccctagaaactatgttgatcttttgcaaatatacagtagatatgtcatctaaggaatgggcatgggaatggcctactcaggcttatgttgaataatgacattgccttttttttttggagacagggtcttaactcccgttacccaggtggagtgcagtggcgccatctcagctcactgcagcctccacttcccgggctgaggtaattttcccccctcagccctctgagtagctgggactacaggctcaggccaccacacctggctattttgtattttaagtagagacagggtttcaccatgttggccagtctggtcgacaactcttgagctcaagggatccgtccgcctgggcctcccaaagtgctggaattacagcgtgagccaccgcacccagcaaacattgcctttttgaaaccgcctttgaaaaaattataatagagaaaattattacagtgaaagagatctgacctaactggctccatcttgcttctaaccgccaagccatccttgttcattcctgggcttagggcgaattaacttggggagaaacttagtttatagtttaattttgaaacaaatacttagccctttaccaaagcgaaaccctttttgtctggggactagattgcctttgcaggagtaacagagtagccacaagactagaaatttacgagtctcgcagcgggaggctacaagattctaaaacctccccaagtgctcctagggatagcagcactattataaaacctaagaccagtgcttgagatattttgtagaccctgcacttgatgggatcagctggcaccacccagatcgataaactggctcatctggtcttgtggtccccacccaagaactgactcagcccaagaggacagctttgactctctatgatt

SEQ ID NO: 1561851 - DNA, 4001 bp, Homo sapiens
ttcaaagcaatatgcacaaaagttacctcacagaaaatagtgcaagtccttgatacaatgctctttagacacagaagaagcactatagaatagagcacctcgccctattgccttcccaagggcgagcaccccctcctctctccacagctccttctttgtttttttgagatggagtctcgctctgtcacccaggctggagtgcaatggcaaaatcttggctcactgcaacctccgcctcccgggttgaagtgattctcctgcctcagcctcccgagtagctgggactacaggcacccaacacgcctagctaatttttgcatttttggtagagacggggtttcatcatgttggccaggctggtctcgaactcctgacctccagtgatcctcccaccttgacctcccatagtgctgggattataggtgtgagccactacacctggcctctccacagccccttctgtgttgaagccaagacccacccagctttgatcccaaggcttgggttccccactagtgtgaagtgagtttccaaattattaggtaaatcagatatgagaaaatattttattttacttttttttttttgagacgcaatcttgctccgtcacccaggctggagtgcaatggcaccatctccactcactgcaacctctgccttctgggttcaagcaattctcctgcctcagcctcccaactagctgggattacaagtgcacaccaccacgcccggctaacttttgtatttttagtagagacagggtttcaccgtgttagccaggctgctctcaaactcctgacctcatgatccgcccacgtcgggctcccaaagtggtgggattacaggtgtgagccatcacacctggcccaagaaaatatttttaaactagtattcttgaccggcacggtcaacactgatgtaattgaaactgttgtatttgaagtgttagcaaagaaagagaattctggttcaacagaaaagtcagtcacgacttttcagtcacgcatgaattacacagtaaccaaatagataacatgccatgactgacgacgggcccacaacaaatcagctccgaccaacagggtccacaccaccatgggtctacacagatccaggtcccgcctgtgagcctacagtgacgcgggcccctgtggggtggtccctgcaggtcaggtccctgagagtgggtcccagtggggtgatccctgcgggtcgcgtccctgcgagttgggtgcctgccgggtggcccctgcgggtcgggtgcctgcggggtggtccctatgggtcgcgtccctgcgggtcgggtgcctgcggggtggcccctgggaatcgcgtccctgcgggtcgggtgcctgcggggtggcccctggggatcgcgtccctgcgggtcgggtgcctgcggggtggcccctggggatcgcgtccctgcgggtcgggtgcctgcggggtggtccttgtgggtcgcgtccctgtggggtggtccctgtgggtcgcgtccctgtggggtggcccctgcgggtcgcgtggtggcccctgcgggtcgggtgcctgcggggtggtccctgtgggtcgcgtccctgcgggtcgggtgcctgcggggtggtccctgcgggtcgcacccctgcggcgtggtccccccgggatgggtccaccgaggaggccgctggaggccgagcccgcgcccgcccgcggcgccaagatggaggcaggaagcgccgccgcccgcgcccgccaccgcccgcgccgcccgcctgacgccgccgttgcgcctgacgccgccgcccgcgcggccgcccctcccccggccctcccctccccccgccgtaacgtcctgacgctccgcagggacccctgactggacggcggcgcgtgagcggagcgagaggcctcgccgcgggggggccgcgggctcgccggcgccgcttacctggggccgcgccgggcctgcttaggcacccggcgggggcggcggcgtcgggagctgcggcggcggcgggcggcggcggcggccgcgggcttcgctccttgttggggattcggcggcggcggcggcgcgggcgcgcgcttcctagtgacgcaggcggcggggccgcgcacgcacggggctgggagggccggacacttatttggcgctcgcggaggaggaaggcggggccgtgaaataaggcccgacgggccccggggcgcgtgcgcggaccgacactgtcagctcctaacgccgcaggttcctcctggtccccgaggcccccggtcgggcgttgcctgccccgcgcgggcggccgggccgagggacgatggtcagtggacggacggcgccagggagcagtgcccacgcgcggcagggcggtaccttcaggcctccaggtacgggcgctcctcgcccggacgctgctgtgtgtgaatgggcgcgaggggactcccctgcggggcggacgcctgaacacgaggctgtggaggaggacgctgtagggtgcgcggactcacgcggaacatgccagaggctcagccagccacggcgctcccagcgtggagggcgaggggcatccgggagcggccgggagggctcggtcacccctcaagctgtcaccccagtcccacaaccagcaccccgatcctatcgcagtcccacagccgacaccccgatcccacccctgcccaacagccggcacccaccccaatcccatagctaacaccccggtcccaccgctgtcccacggccggcaccccgatcccaccccagtcccgcagctggcaccccgatcccaccccagcccaacagctggcacccaccccgatcccaccgctgtcccacagccggcaccccgatcccaccccagtcccgcagccggcaccccgatcccacagccggcactcaccccgatcgcatagcatagctgataccccgatcccaccccagtcccatagccagcaccccgatcccaccccagtcccatagccagcacctcgatcccatagatgacaccccgatcccgccccagtcctatagcccgcaccccgatcccacccgagtcccgcagccggcaccccatcccacccatgtcccacagtcggcaccccgatcccactcggatccggcagccagcttggatcctgtggccctcctccagcccccagggctcatttatatgttttattggcagaggctggggctggctctgttggcctctgtgctgggtttcttcctctgcaccgcaggactggctctcctgacctctccaggtgtcatcgaacacccttgtgcttgctgtcacccgctgcctgtctgcaggatcccggattccgtatcaggggaccgaaattagtcggaaaataggaagcaggtgctcgcttggatggaaccctgaccctgtgctcacacttgtaggaggagggctctgcaggccgcctcccggaacgggaggttcccaagccactgcacttcggaggggctgtaattagagttgcacattcattcagttcccagtaaagtagaacgtgctccagccagtgaggaaaaggtgtttttaaaaattagattggccgagtgcggtggctcatgccttttacctcaacactttgggagacaaaggtgggaggatcacctgtggccaggagttcaagaccagcctgggcaacagagcctgtctctggggaagaataaaaaaaaaaattgagcctttgtcagtgctactattttattatctggtaaatatgagagggttcacgcggtctatgtgtgtcatttatctgagtttgcctatcgtcacgttttggaaataaatgtcaataaagtcgaagaggagtgctgaggggggcctggggatgggagggtggctacatcatgcctgtgtgttgcgcaagcccaccgaggtcggcctggggtgagccctggggcctgttctgcctccttcactctggggctccaagagacaaactgggcaacaagagagaaactccatctaaaaaaaaagaaaaatcacctccaagataacttagctttc

SEQ ID NO: 1561852 - DNA, 4001 bp, Homo sapiens
atgctgtgtaattcttttggtcatttcattacatttttttcccccaaaacagcaccttaagaaaaaaaaggaggaaaggccatctccttatagttaacctttttttattttattattatttttttaatcagaggaaaaatcgcaatcaaaaaaagaaaacccaaaaccaaacaactaaatgtcacttgataaacaactaattaatgtctttttatctcttcccacctggaggaaaagtctccttagagcactctcaatcccccctcccaccttgaggaggacaaaaaaaaaaaaaaaaaaaaaaagaaaccacgccatttccagaccaagaagccatttacagacaaatgtcattctccagttttatctgatttgtgaatgtctttgttttttcttttcacaaagcactctcaatgtggccagccagcaggaaaatgtgttttttttaatggtttattaaaatagtgttgggggggcgctgctcgtggtgggtggggggggcagctgctacaattaattctccgctctgcttttgaaaaagcctgcaagtctggaaggggaaaaaaaggtcacactgtaaaatgacgtgtcatttggcttcactgggcacttctcgtactaactctatccattttttggtgttggggggtggtcttattttatttgactctccttctcctccttccacggcccggcctggcccgggacacgtctgctccgcgcacacacagtcagtcggtcctgcccgaaacgcaccaagtcgcgcccagcggcaaccgccctccctcctcccctcgccgcccccctcccgactccggcgccacgactcccttgcgccccctcccccccactgcaccacctttaccgctccgatcctttccgaggggctgatgtcaccagcccccccactctcctcggccacttctccccgccaaagcctccctttggcgaggccccctccgccaccacggcgccccccagcgtcaccccctcctctcctcgcccctttcttcccctctttccctctcccaacaaatctcacaccccacggaggcgggtccccctccctctacccgccacccggtttcctgtccccgaaaccctctttttgtcgcagtctccggagccccatgggctccccctccccctccccaacacgcacccaaacccctggcgtcgtgtaggcctcgcggaaaaagagagaaagagagaaagagggggagagcgagagcgagagcaagagagagacactgagcgggcaggccgggggagggggacccgcgcccgcgtcgccacggccccccgccccgtttttgagcccccgcccggccgaatccgcgcccctgggtcccccttccggcctcgccccccacagacagagcccgcgaacgggcggggggctcgggagcgcgcgcccggggcggggggcgggctcggcgcgcgcggcctgcggggcgcccttcgagggcccccgggccggggccggcgccccccgcccgcccttacccagcagcagcaggcggtgcgtggcccggtagacctgcttgtccttctgcagctgcttctcgatctttttgttggcctcacgctgcgccttctcctcgttgcgctggtcctcggtcttactgttcccgaggcagcccatggcggcggcggcggcggcggggcgcggccgggctgcggcggcggcgggcgcgggcggcctcacgcgggccgggagggccggggcagcgccgggcgggcgggccgggcgcgggctcggctcctcggcaaggagcgcgcggggcggactgcgggccgcgggccgcggggcgcgcggacgggcgggaaggggagggtgtcggtcggaccgaggggcgcgcgcagctccccgcccctcgagccgaggccgagggggctgatggccgccgccgggccgaggcggaccagagcaggagctgcgggagctgctgccgccgctgccgccgccgccgctcttattgcctcggccgggcccccgccgccgccccgagccaaaagcgccgcggcgggcggggggaggcggggggaggaggaggcggcggcggcgaggggggtggaaggaggaggaggaggaggagggccgaggagcggccgcggcggcggcggcggctgggagggcgggagccggcggagggaggcggccccccgggagcccggggagggggtccctccgcccgcgcccggccggggacgggacgggccggggagacgccccccaccccccgggctcgggcagcagcccggctgagccgaggggggagagggggcgtctccgcgccagtgacgacccctcgcacgacgccaacgctccaccccccggaccgcgtcgcccggcgcccccgaggcctcctccccctcccgcgggcgccgccgaggggctggggtgggcggaaggggagggagcgcgcgcccggacttaggaaaattttcgaaagagcgagagacacagagagccagagagcaggagtgtggaaaaagcgaggcgagcacgaaccaaaggacagagcaaccgaaaaggaaaatgtgtccacacacacacacgaacacgaataaaaacccacactacacagcgatggtggtgtctggtggcggtggcggggtggggggtctgactagatgagccgctcctcgcgcccccggcgccgggcgccatggcccgagccgaaggcgcctctggccccggagcgcccgcggcctctgcgcttggcgcggccgcccaagtaggagaagaaggcgcagcccaggaacactcggaagcagcaggtcgccccgaacacgaagccgcagccgcggccctgctccgtgcgcttctgcagcaggaagttgagcacccacgaggggctgcgcaccgagaagaccaggaacaccacgaggggcaggtgggcgctcagcgcgccagccttgagcggcccgggccgccacacgatgcccccaacgcgcggcgccgcgtagtaggcgtcgtcctcgtcgctcgagtccgtgtcccagtcagcccaggccctactcgtgcccccggcggcggcgccctcctcggcgcccccgacggcgccctcctcggcgccctcgtcgtcgtcggcggcggccgcggcggcggcggcctcggggcatcgggcctcctcctgggcttctggcaccttcttcttcttcttcttcagcatcttctccatcttcttcctctccttctccttcttcttctcctcctttcgcctctgctccagcagcttcttctcgagcttcttgcgctccttgtctgttaggaacttttcggggagcgcctcccgcgccgggttcttggggttcttcgcgagcttctcggggtccccgctcttccgcggcgcgagcggctctctcggctcggccaacgccgcagccgccgccgcagcttcggcagccacctcggcagccgccgcggccgtcttcttctcgctctccgccgcccgggctttgagcttcatggccatcttcagcatggtggcccggccacctcggggagctcggctcgcgcctggcccgggctccctgcttgcccccggcctcgggctgcccggcccccgtgcgccccgtgtcggggggcttggctgcggttcccgccgcgctgccccggggccgcggagcgcggctgcccgggcttcgggctgctgggctggctgcctaagagttagcgccaaaaaggatgagcaaacgaaaaagggacaagaacaaaccaaaaagcacccaacaacagcgagaaaccaaaaagcaccaagaaatgtcaactcaaaaagaaaagtgcaaaggcgcggatggcaggagtctgtttaccctcaggcgctccttggtttggctcttgggcacgccaatggagaagagaaaagagagagaattggggggtgcccggaggcgccccggggcaaggcagcggcgcccgggcgcccctgccttgtcccggacccggcggctcttgcctgcgccgggcgactcgcacttccgcgggaggcccc

SEQ ID NO: 1561853 - DNA, 4001 bp, Homo sapiens
gctgctggccaccccttcatcgtagtacacgcggcggccgcggctgctctcggacttgccccgccaggcagacgcgcgagtaggccgcggagtaggcggatcggcagcctggatctcggggctggggggtctgagatggatcttgcgtctggccccggaggcaggggctgcagaggccgcccggcggacttgggctgcccgggtggcagaagcggctggggcagtgggagcccctgcgtctggcgcagctggggcgacatgggctgcccgggtctcagcagccgcaggggcggcgggagcctcaggggccgccccggcatctggatcggctggggcgtcaggggccgccccggagtcgggatcggctggggcgtcaggggccgccccggagtcgggatcggctggggcggcaggggctgccccggagtcgggatcggctgcgaatgccccggagtcaggatcggctggtgctgtcccggagtcgggatcttctggggttgccccggagtcaggatcggctggggctgcaggggctgccctggcagcggtatccgctgaggctgccccggcggcaggggatccgtaccccggagagggtacttttcctccctccgcggcatcagcggctccttccatctctgctgcttcctcctcaactgggggtctctctgctcgctctctcttatctggggctccggagaccttgatgggcgggccgtcaagcgcgattggggggctgtccatgttgacgggagtgtcgtcgaccccagcgggggcgctgccaatctcgaacgggggtccggagatctccatccaggggctgctgcccgtgaagttagaaggaggtctgacagcctcttgggatgggctgccgatggcgcctgggacccagaggggaggcgcgttcgcggcgggagtgaggcggaccgcactcgaggccgcgactgccgcgaactggctgctgccgtcgacttgtgcgataactcgggaaagccccgggggtgggctgtcgtccccaaatccttctccatcaagctcaaatggcatagtctcctcagggggagggctgtagcctcctctggagccagcctttgcaggcctgagggcttggggctcctcgggaggagctccggggacccctgcagcacctgggcctcctggagcaaggtctgggacctgtaagagaagttgactgcagcctctctgggcaggctggtcaaactcaaagggcatagcttcttctggtggagggctgtatcctcccaggcctggtctggcaccactgaaggctccgggctccatgagtgctgggccgaaggcctcaaggcctgcatggaccccactggggaatccaggctgctccagtgtaggccagaagcctcccaagctgggctgttcagcctcgaagggcattgcttcctcaggaggtgggctgtagcttccatgggctccagcttccctgaatgccgggttgaggacctgaaagttgggtctggagacctctgggggtccacaggcctcgccatcattctcgacggggatgggctcgttgtgaggcggttcggtctccatctcttcggctgggctaggcccagcaccgggggcagctgcccctggggcctccaaaggtggttgctcgggctgttccccgatttcaggggggatatcgcgttgtcctgacatattattgccgtagaggcagttgcgcacgcccataacacggtggcggcctctcaaaataagtttggggctccgtaagatggagcacccaaccgaactagggtgaaaaaattattattattattttaaaatcaaagtaccagctggaaagttcaccggcctcactttccaacccttgtgaggttggggggttcaaggcctggaaggaaccctagactgaggctgaagcaactcaattgttgctggtggagtcttggctccttcctggccacttttcatgcccccaggctgccccccagcccctcttccttggtctatccttacgccctcctctctctttctttttgctccaggccagtcccgcctgcttggatctgacgagcgtgccgattcggtccgaaaatcgccagtagcgctctctctctgccaccagaggacgccggttccagtgccgagctggctccggctccaggagcctgctcctggcgccaggggcccgggactttgggtaagggggctggtgagcgcaggcctcgcagggacgttttggctccttccactcctctccctgactgatttggagtctttctcctcgcttctccgctggccagagaaagcgctcctgcgttgcgggacacgtgacgcaagacgtgggcctcggaacgctggagtacaggagctgaaaccctccctccccaacccaaccgactcctcgggggaggggggactgaagaaggatttcatcaccccaggatacccctgaaactctgagtcatagcccccagcctccaggcagccccggatctcaagcccctagtccggagcgcaaggcttttggtgcctgggaaggggcgcaggcacgcgtagggatgcgacaggtggtcgtgagcccaccaaagaagcagagagaggcgagggagaggggatgccgagtatgcaagcacgcaatttgttttttaaatgccttgggtgtactttttgctgcttttgtttgtcacttgctgaggttggctccggtaaagcactttaacagcccccacccccatcacactctaggggtctccgcagtggcccacagcggcgcaagcagggtgctctcttgtttatgtggatggtgacgcaggggaataagaaggtctcgggtgcgtaccaccaagagcaaagccccctagggagtagctgcggcggcaccaagagaggggtggggggcgtgctgcgcagaggaggacctcacaaagcggcctcagagtttcgcaggtcctgctgttctagggaagggttaaaggggattttggttggggtttaatgccggtttagggtggtttcgagactggacaacgctgtgcgcactgaacccacagataaataccatgccgcgcggcaaccggagctgaggtgcgctgctcgctgcttcgggcaccggccgcagcgctggtcagtcagctcctttagccccactacagcctgcctccagcacccttctagcccctctcctctcgctctgggtatcttagggtagtcgctttacttttctactgctagagcccactgaggcggcactgagcccgccaaccggccacaaacccggcggttgcccgcgcagctgcgctcccgctaccatgctgcggtgagctcagagctagccaaaggtaaatgcccacaccacctggtggccttgatgtgtgcacatgctatgctctggtctggggtctgcagagggattggaacccgggagaaaagctgctgtaagggggtcacataaaactcggcaggtgcgcatcaggtcggtctcaccagtgagacagattggcgagccacgtctaggcacagagcaactgggcaggaggcagggggtcatctgacctgcagaaccctgggggaggggaggctggatgagttacacagggcgggctgcagcaagcagggcgcacggcacgggctgctgtataagagctgcaggcgggcgaaccaccgcaagttgcgatcccgtttagtctaatgcatccctcttagagccagggtaccacaggcaccgtgcatccttgcacccctgcatccaccatccatgtggccacgcagcacggaaggaggcgaacacagttggaccctgggaaacgtttgggatcccccaaagatatatcgctttagctctatgggtctacacacttccagatgtcaacactgaactttgattcaaactttggccaactacacccacgcaagacggcttaaccacttgagcatccactgaatggcccaactgggtcccaacaccaactcactcccctccgaccccagcgccgggtcagccattgggcagg

SEQ ID NO: 1561854 - DNA, 4001 bp, Homo sapiens
gcctgtgcgttcaaccctggtagcccgtaggggcatccccaagggtccccttacctcctctacctttcccccaggtactttcccctaaccgcccgccgccgggagaggtcagctccggcgcgcgcgggcaggtgcgcacgctctttgaggcggtctctgtcccgcgagcgacgggaggcgggctgtggcggccaaggctggcgcacggcagctggaggcactggcgcggaggtcccgcggcttaattgtcagctctgggacctgggctccggctctgagctgcttaggcgccgcgcgcgcgtgacttccctcccgggtggtcagtctctagagttctcgcccattcccattcagattactttccgcacatttcaacggtgtctctacagcgcggctgctctcacatcgtgaaagttggcgcgcgcacctccgaaccacattttggacacctgagaaggccaacttatttgagactagtctttctaggaggaagaaaagcgcgcaaaacaagtgacttaccaatgccgtttgggtgtgcagctccaaatctggggtgcgttcgggattcagtcgcgtagccggggcaccagctcggagacctcaggttgtctccagcgggacgcacggcgtgcgccccgccgtccaacaagcctttggccaccagggcgcccctggcatcctgggaagtttgggggagccctcgccgcctcaccctgacccccgatcccaggctgaccagctgagcctcctctcttcccactcgcccctgacctgcctttccttctcacctcctttccacctgcgctgctcccacaccgccctcaggctccccagtttagcggtgggcaactaacctgaatccatgaaaacaaggagaatctggacggcgtcctccattagtgacgccggatggggatgggtccctttttggaaggggactccggggacgcgtcacggcgggtgggcttctttggcttgcagcgacgccgctgcttctcctccttgggctccttcgactcttcggggtcccttggatctttgtcctcgggcttgagctcctccccttccctggggctctggggctcctgagtgctgggcggcgcgcgacttggggaggcgtcggggcttcgcaacttgagagcgtgcagacgctgggtgagggactggccgaaggtggagtgcttgggcaccaccgggccgcgatcgtcttcaggctcggtctcgggctcagtggtgggggcggtctcaggctcggtctcgaagtcggtctcggactcgatttcggactcggtctcgctctcggtctcgtagtcgaactcttcctcgtactctaggcactcggggagggacagctcaaggtctgcctcctcgtgctcgtggtcagattccgattcgggggactcagggaatacctgggcgccggagcggtggtgggcgttaaggaagctccggcgctgttgggcagccgcgcgctgctgggcacgggcgttggaggtggcaagggcgcggaggagcgcgatggagcaggagagccagaggagcgcggtggctgcccggcggcctatgggcgggcacaggtcgttgtaattatggcgagctcggcgccactgctgagcccgggacctccgatccatcctcttaggcacacaccgagaagccggcctgccctctggctctgcagagagtggctccgaagcacattggctgctggagccgggaaaggtacaccctatgaggtgagaagctggcccggaggtcccagcctcacctccttgtgaggagaaaaagggaagcacctaccttcctgaccacttaagaactttctaaagctccgcgccttgcttgcctctctgagcaagaagaagggatgggaaaaaaggggaaagttctgtctcctcccgggctcctctcgctgagtcttagattccgcagcctaagactcgagagaggtgcctccgccggtcctcttgcctgggagaggacagaggagactgaggcgaggagggacgggcagtgaggttctgcgaagttgcgcgcccggacttctgccgggcatgtgcagtaaggaggtgggggccacctccccgcgagctgcgtggtggcgccgagcctgtggcgcagaccctagtgggccggcaggtggcaggagggaaccttgtttgaaaggatttgggcgaagcgatgggcggggggcctggcgggtggcaaggagcaagcggcaagctagccccaggtccagtacttgggcaggtgggcgcaggctcccgtggggtcgtgcccctccccagtttccccagttattggggaaataaacacagcctgggagcagctaaaaacccagaaccccaaatagcaaatattcaggggaatgagggtctgtctatacacgagtattaagcctctagcattttccaatggcttaatagtttgaggatggtaacttcgggcagccattaatcatgaaactacctttagcagatctgttatagtgactgtaattagaaaagtttccaaacaatacgtgctcaaacagtctgaattggctaattacctcatcttcttcaacaagggcccccacggttgaggtagtagtttgcaagtctgcaagcccatctgaggactgccctgagctcgattgagctgagaaggtggtgctggaagtggactggagctgagagcatgggtaaagggaagtctttcctgcgctctcagttcacacaaccacttctctcctgcggggcagttcagggtgacacggaatcctcactggaggccccttacagccatttcctaggtaggtttttttttttttttttttttttttgagacagaatcttgctctgtcacccaagctggagtgcactgatgtgatcttgggtcactgcaacctctgcctcctggcttcaagagattctcctacctaagcctcctgagtagctgggattacaggcgtgcaccactacgctcggctaatttttgtagttttagtagagaggggtttcgccatattggccaggctggtttcaaactcctgacctcaagtgatccgcccgcctcggcctcccaaagtgctgggattacaggcgtgagccaccgcgcccggctcctagataggtttttaacaaaggtaactcagcaatactcattgggtgccttgcatgtgccaagctgtgttttaggtgctgaaggtagagtagtgaacaacaacaacaaaagtattgtattaaggaaaggatattttggattaatttgctgtgaatcaggagattgaatcagtcagaatccctctgtacccaccaacattgtttaatctagcttgaattccacatgagaaaatgattggatcagggctagggggcggtcagacaccactagatcgtgttgttgtactctgcaaggctgaagatttggagtaaatagtgccgctctttcttggccctagaaaatcaaatgatggcctacaggaggagatccctacagtgggagctaacctggctgctgcttttgaggtgtgcgtgtcttcagtctggccctccatgatgattatggggtgcctttttggccatagtgacaagtccaaaggcgaaacaactcagagcaaagccatcatcctaaaatccctgggagtatcaagaaggttgtttcacttaggacacatgtcatgggttgtggtccttttctccttcttgagtcagtatggggaatcttaaaaaaagaggctctaccactgggtggcccaccaggccctcctggtactggtacttctgcctggtgtctgaagagtcagtcaggtacccacagccattctcaccatgatggaacttaacctcacaccttcaacaccacacccgtattaaaaccactaagtgcagagttcataccccagtgagagaccagcaactgctttggatgtgttgaggttttcctttctgcatcttggctgtgtctagcttgtatcttgcactctgtgttagtttgtagcattaaaatagtgattgggc

SEQ ID NO: 1561855 - DNA, 4001 bp, Homo sapiens
cttcctggttctctcccctctcgtcccccccagtccccatgtggcctcccacagcaggacgccccccgcctcccgtagaagcctgaggatccagctagtgtggggatctccagctcccttgggcatgccctcttgtccaccctaaacaagcctgacgcatagaaacctcagcacatacacacaaatcaggcggtaagacattgcctcataggaactaaccactttcttctttagttaccgggctctcctgatgcactgtaaatgtttgatttgcaaaacagtagcaaaccatttccccacgcctgtcttctgctatggtcttggggagctctgcagtccctgagatgttcctagtgcacatgtcagtcaccacctggtcctcttggccctgttgtctgtttgagtgaggttgcatccctcacctctttccactggcctggggtctgtccacctcaagacagtcattggcttgtcaggatgcctgtgggatcccatggccaccactgtcttatagaacaattatctccttctagtctactagtgactttggtctttaacccaagtgctttgtaaattgtctagaatcctcctgggaaataggaaggatagcagacagcaccctgctgtgtgcagtaggggcactgagaaatggctgggggtgctgtggcagggggcatctcagtggtgtttcattctccccaccctcccagcacccaaccctaagccacaatggcctctgatgaccagtggctggtcttgatgctggggacctctcaccctactcaccagcagtgtccgtgccaggtgtcgcttcctgtgaagggaccactgggccgtggtcctgccctcccagggcatgctgtcgtccaggggagccagggcatcacttgggaggccatgggcagtctggactgggctgcctgctgcagtgtccagggcccttccttagaagggaactgatgctgtcctccctaccccgacctcaggctccaggagggtgggggagcccccggccatcactttcttcctccccatgaggctgggagacacccacctgggggcctaagggcattctggggatcctgggctgagctgagggctcgctttcctccagggtaccagccatgggaccagtgctgagcctctgagggtccaaggtgggcagtcagcagcagcaggagcaggaggcctcgcctggagctggccatggctgctctaatggacagggtacagcattcaaggagacttacctcacccccacatccccctacttcctccagggccactttggaaaactggcatctcaggggcagctttggtatctccttatgcccttccctctctgccaccgctcctcatcccaagcatacaggggtccagatcctgggggatcctggcccagcaggggatgatgctccaggggacgagccttctccctgagcctggggcacagaggctacctgccttgccagctctgagggccctcccacttgtccaggtccatccatctttccttcaaggagtttccagaagtggaagaaagttggaggggaacagagacctgaattcaggccaatggatgggaggatagatggatggtcaggggagttctcaatgtaggcgtgtttggagcaccagtgctagggaaccagagttgcaggccttctgcccttttctccgtggcctgctgtatctcttccatagtagttggggatgtggaatggatgagtggtattgatgggggcaagtgcttctaccccttatccctcccatgccaggggcaacaagcacaagaatagatggtagagctgttggggagaggagaggaaaaggggacttctctggcatggttcaggggtggaggcacctgggaatggggaagaggagcagcacaccatacgcccaggatgaaacttggtccaggtgtcctagcccttagggaaggctccccactcaccaaggaagagctgtggatgagatggctccttcaggcagctgcaggaccctagcctgatggccccaggatttatagaccaggcagctccacccccagactccagtgacgtcttcagaggggaagagagaagctcaccacccaacccgcttcccagagcatccagtccatgaacattcaccaggcagctgctgccctgaggccaccgacacatgctccctccccaccaccttcccaggagccttcaggcccaggactcttgctttaggctggcctatgtcctggtctcaccttcccacttcccaggctgcatcttcaagctcctgatcttgagacctagaaagccctcacagccttccctgatcccaaaagagaattgtgtcctgggcaggggcaatgcctgggggctccccaactcccagctcagggctttccctggtggacagtggaagcctaagagtagggagcctggcaggctgttcagaggtacaggggaggctgtgaccactctcccagagggcttccgtttgctcactgtagagtgggttgggtgggacaattcacatccacacacctgggaaccagggctgggtcactccagatggctgggtttgggtggggcagtacctaccccggagtggcttctctcctggcgaagaagcgggcccatgagatggggcccagctgttgggccagtgcagtctccctaggtaggtagaataattttgtccctcaaggctctaacccctccccagtcatggatttggacacagctagcctgggctgctggaagtgggctcttgcttcccagtctgcgtcagcagctcagctttccttggccagccatcagcctctgggggtcagaggcctgtttacagggttcatagccaatctccgcacttgggctgaacagcaaatgggagggccagggtcatttggagagctggtgcgtcaaatcctgtgacaaagatgggggaggggaggcataatgggcatcagtcagccctagacacctggacttcagcagccaaggcaggatgggcacacctgtgaacttccagactgacttattagcagggaccggaaatcaacgtgtggcccatttgttcagttaaattgttttggcttaaatatgcggactttgttaactgggtgatttttagggaaacatttgcttgtggtttagtgaaaatgaatctgagttcgacgtactagtttagttctggttggggtttacagaatgctttcttcaaagatgcaccaaggctggtgtacctttaaaagggggatggttgcctttatttattctgtaatttgattccggcttttcctgaaaaatctaaaccagagccaagcttcctggggaaagctctgctcccttttttttccggcaacatacttagcttttaagaaatgtttggtcctttccagactagaactgtggaactcttgtatccctctcattagaacatagaaagccatctgttcaccacggagctccagtcctcaggatatgaagtcactgcagccaggagctgcgtgtactcaggtgggaaagcagaggttcagaggtgaataaacactcaggtgctgcaggagcacagagaggcacaaaccctgagcaggcggcctgggtgaaggacagagacgagtgagctggagtcacggacgcagggagtggcagcagaggggtgcagcataaggaacaaaatggagaagggccagcaggaactgccgtggatccatggggccagagtatgtgggaaggttagaggaaaggagggcgggcccctgggtgtgggcagtgggaggcaggcatctctggaccaccctgacatgcgaccaggatgcgggggacttgggattggaggagagctgagggtccacagagacagatccagaatcctgacctctgagagaggagacagtggaggagcagctaaagggtgaggataagaggcagaggacagcctgtgacacaaaggggaagagaccatgggtccctggtgtttagcaccaaggtgaccttggtgcgcagggatggaaa

SEQ ID NO: 1561856 - DNA, 4001 bp, Homo sapiens
cactactgatttaccaggctgggaaaccaaagggatatgaagtaaaccaaggtaaagggacattcactttagagctaaattgaagtcagatatttttagctaaagtgtttttttggctacaaggaacatgtcagtcttccttcgaattttttcaaggaaaaaagctgtttccaattcttcttgccctttcccaggccttggcagctttgatcctcctaactagctaaataaagtaatatataaaatgcctaactttccctgagttaatttttgctcatcttggtgaaggatcattacgacccttgctacatttctgacaagttgtgactgtcattctgattcccatatacttgaagccaatatcttaatcaaatatgttaagacgttaatggatctttatttaaaaagtgtttctggaataagtttctttacgccaagttaattccttgatcaactttctaaacaatgcagtaacattttcccaaatgttttccattcattttaccgtgatattattctcttgtgtatgtttcataccttttttcctgttttaactcatacgtaaagattcgattcatcaacgtactttatgtacgtatcaaattttactcactttgctacgatgagttttcttttgtggtcattatttctcaagagtccagctttcccacgtcgttattttgcagatttaaattttgtctagaatactggttttctctagctcttggttcttcctagttcttaaatcaggaatggattgcaccatgtgcagttttgcttgtttgcttggtgttatttgtatccacgacattaggaattttgaaaaaaaaaaaaaaagactgataccttgtatttatttcttagttaagtcacagctcgtcagcaacgtagcaaggggaagcatgacggggtagagtagtgggtgagaactgtgcagaaatgggaggaggcgacagaagagtatgaagaaaaaacatcgggtccaaacatcctgctcagttccatcagttcctctatgcaggtctacatcagactaacagctgccttaaggtggaagaatcctctacaattcatgcccgatttcttttccagccagccagtggagtctggggagagggctgatgaggacacctaagtgattgaggctctctctcctacctcagcaaggcagtctgaagagctttgggaaaagtagagctttggagagaaggggcagcagacctaaaaaattgtatcgagggcactcatgactattcctggaaccttttcctaggaaaggcactttagtttcttggaataactgaattatacaagcatgccctagactacgtgtccgggcaatttcagaaaataagcagttgtcaaaacacggtgagtaacttagggacagagagcggcggtgagccgggggccgctgtggggcaggggatgtccccagaggacctcatctgcatttttggtgtctttgttccccgactcagtactctgcatatttgcggtagtcctatgctccacgcaccctgctactcctcaaatgctccacgtattttttagaagggaactaagccccaggcagcccagcagaagcgcggcagtgaacaataaaagtcgaagagtgcgtcccagccaccgatttagcgcagcgaacgcccggccgccgttcccctgcgggcagtggccggcccggcccggcccgaggaccccgcccgcgcctcggccccgacgccccaggcccgccgcgtcccgggccgccctgacagctcagcccgccacgtgagtggccgcccggcccccgcacccggctcgctgcctcacctccgggttcgctagtccgcaggtccgcgtcgccgccgccccgcccgagagcgaggaccgcgggcagaggtaccgggcgcccgccgtccgtgcctcgccagcgctccccccaggcggcctgccgcggcgtcgagcggcaggaagcagccacgctcaaaccggtttcagctgctccagaccaaactgccaggccaccccgcggggcggggccggagggcggtggggcgggccctgacgtcacgcccggcgccgtcccagccaatcggcagccgcgtgcggggggtgcgggcccgcgcgttcctggaaagggctgacgtacgcggccgagggcggccgggcatcccccgtgtccccgctgcccttctcagccgaccccggcgcccgcacgttggagagctgccctggggtcataggcttgtactgtggtccaccaaagccgccttagaaataacccacgtgggccgggcgcggtggctcacgcctgtaatcccagcactttgggaggccgaggcgggcggatcacctaagatcagagttcgagaccagcctggccaacatggtgaaaccctgtgtctactaaaaatacaaaattagccgggtgtggtggtgcacgcctgtaatcccagctattcgggaggctgagacaaggagaatcgcttgaacccgggaggcggaggttgcagtgagctgagatcgcaccattgcactccaacctggacgagagcaaaactccgtctcaaaaaaaaaaaaaaaccgactatggatcctggagctacaattcagagttgtattttttttccccatttgaaaacgggggaaattaccagtactgatgttttctagaaactttctttcgttgcaaaacagcaatcacacttggatcaaatcattagttgaaaactattaagtcacctaagctggatgagagtttatacccttgctacgcaaagtatggtcgacaagccagtagcacctgccagaactcagaattgcacactcccaggaccatcccagacctaccctatcaaatctgcctctagcaacatccccacgttaacaagtatgcaaattaaagtttgaaggaacttttttgaaagctgactctccctgccagagttgtagtttattttctaaaaaatgaaccgtatcaaaaaaaaaaatttttttttcctctcctttggtggtctccagaaagttaatcagcatttgccacttgaagttctcttacgaaactttgcaacttgcggggcgtggtggctcacgcctgtaatcccaacactttgggaggccgaggcgggcggatcacgaggtcaagagatgaagaccatcctggccaacatggtgaaaccccgtctctactaaaaatacaacaattagccaggcatggtggcgcacgcctgtagtcccagctacttgggagggtgatgcaagagaattgcttgaacctgggaggtggaggttacagtgagctgagatcgcaccactgcactccagcatggcaacagagagagactctgtctcaaaaaacaaaacaaaacaaaacaaaaactttgcaactcatctaacttacactgttaccttaccagtatcaaagttaccctctggttagtgtccaatataaaattatatcagcagcttttacttaaatcaagtgagatattgaaaagtaaaaagaggcctggtgcggtggctcatgccagtaatcccagtactttgggaccccgaggcgggcagatcatctgaggtcaggagtttgagaccagcctgggcatcatggcgaaaccccgtttctactaaaaatacaaaaattagccgggtgtggtcgagcgcctgtaattccagctactcgggaggcggaggaactagaataacttaagcctgggaggtggaggttgctgtgagccaagactgcaccactgctctcctacttgggtgacagctagactctcgcaaaaacaacaacaaaacaaaacaaaaaaccgactaaaaagaaccacctttcaggagatgtcgaagttctcttacaacaagacatagagaaatagctcgagttgcacgctagttcaaaatgggcctactgaaaatgtgtttggattagatgagctctagctttaggcagaatttctggttttataaatcggattgtcctctaccacatttgatatttagcttggattcaatcccag

SEQ ID NO: 1561857 - DNA, 4001 bp, Homo sapiens
tagagacggggtttcaccgtgttagccaggatggtctcgatctcgtgatcccccactctcggcctcccaaagtgctgggattacaggcgtgagccaccccgcccagccgacttccctttcaagtaagattgctgtgtggattaaaagagaaaaatcagtgtgaaatttatcagcagtgtttgaagctctatacatgagaccattttttggctgtactctctttataggtaggaggagacttgtcagaggtcacacagaagcctagtggcagagccaggacaagaacccattaccttgacattagagtaatgaaaccctccatgagcccccatcgttccacaactctgaaattccaacatctgtttgctgttgggcttttatttagttggcaaacactgatttgcatttaatgccactcccttgactaggtactggggatatggaggaggataagacataaagataatcaccatgggccaggtgtggtggctcactcgtgtaatcccagcactttgtgaggccgaggcaggcggatcacccgaggtcgggagttcgagaccagcctcaccaacatggagaaaccccatctctactaaaaatacaaaattagccgggcctggtggcgcatgcctgtaatccgagctacttgggaggctgaggcaggagaatagcttgaacccaggaggtggaggttgtagtgagccgagatcgtgccattgcactccagcctgggcaacaagagcaaagctctgtcaaaaaaaaaaaaaaagaaaaaaagaaagaaagaaaagaaatcagatgaaggtgctaagtgggccctttgtttttctcattctacagcctcaaccctcccttggctttatttatgttttgctgatgacattcaaatctacatcttcacagcaatactttcctaccttcaaactagaatatccaattttttcctgcgagtctccatacaaccagaatagaatttgttgttgtctcccacaaatctgcttcttctctgatgaaccccacccaggtacccaagccttgagtacttgtttcctacatctcactctccccaaatcctatggattttgctgcctaagtatatagtactttgaattcctttatttatctccatttccagagtttgtagcctagccccggccactgtcatctcttccctgggcgtgaaacagattcagagtcaggtgtcttcagtgaccaggatatgttggcctctgtcccccttccaggacttggcacgtgctgtcttctctttggaactctcgccaccactcctgatctgggctcgcgatttcgttccggaagctgtccctgttctccgccccgggcttctacattctacagcccatcacttttccctgtaccgtaggaacagtgtttgtcttgatcacttctctacctagtaattagccgcgcttagtactgtattcattcatcacatgaatgaatgaagaatgaatgacagacgggtcagatcaccgaaagcctcaaaacgcccacaaggaaatcggtcgcactttatcgccaggacttaggccagtgcctggaaaggccccgaggcaacgacacggtcggctgcccaggctggccccacttcacgggcccgctcgcttccaccctggacaaagtttggccctaatcgctccccgttgtagctctaactggctccagtctcactggcctacatgccccgacaccggcccgatctaaaggcagaagatccggaaagtctgggatcagtgcgcgccagcccaaccccctcactagacactagttgccccgctcctacgaagggtttcagccacaaggtctcccggcctccggaattccaatctcttgccagacccctccctcacatcgttcctcccgaggaaacgtgacccatgccggccgccgtggccgccccaacctactagttcgcctttcctccgcgaacggttctcccggccctcgcgccgctacccaggctcagggggcggggcctcgatgcgacccagtgcgcttgcgctgaccgccccggctaggcttaaagagcaggcggggcagagacccatacctttggcgctgagtcgaggccaggaaggggcggtcgatgagagggcggccttagcattaggagtgcgtcggctgcaccctggcggatggaccttgggaaggaggggaggggaccatcggggtcggcggggagctacgggtatgcatagctcatagagcgtcagagctgacgacgactagtggaagatggggaaactaatgctcagagcgggacagtcactacctcaggggcacacaattgataagggtgggggtggccgtggtaatggaggccccaaggaggggcaggggcccatagtacgtcaggggctgagcctgtattagaacccaggcttgtttcccagcccagccaagtcccagaaaaatccccctgattttatctatttttttttaacctgggataccagcagggaaagcattagaggcaaaaggaaaggattttcatttttccaggaatgctgaagtcaggactgtttgaggggagccctgtgtttctcagactctcttgtaccgtttacatcaggatctggggcagtttttaaaaatatgcggattcatgattcctaccccccacctcattgcttggcagcccccaggtgccttccctgtttcttccttctgggttgtgataggcttgtctgcagtccgaagcacctgatacgaattttagttaaatggaatgtatcagtccagcttctagggaattaaccataaataagacacagccactgctttcagtctgataagataggcaataaactgcctttctgaaggaatcagggatggtttttggggtcttgaaggatggataggaaggtataggtagtgaaggaggtaggggtagaggtgagaggctgggatggggacagtgttccaaattgcaggaacaaaagcagcaaaggctggctgggtgcagtggctcagacctgtaatcccagcactttgagaggccgaggcaggtggattacttgagctcaggagttggagaccaggctgggcaacatggcgaaaccccgtctctactagaaatacaagaattagccgggtgtgttggcccgtgcctgtaatcccagctactcgggaggctgcggcgtgagaattcttgagccccggagacggaggctgctgtgagctgagatcacgctgcagcactcctgcctgggtgacagcgtgagaccctgtcctaaaaacaaaacaaacgagcagcgaaggcatataattctgagggttgctcggcttgttttacagacactgaggagtttggtgtggataatgaggaagggcctgagggttgcaacaggacttaggcgcttaggcttggagaggtagcctcagacgccagttccactgagcaacaggagctaagggctttaagcaggggaaggacatggttagttttgtgtgttaggcactggttacagcgtgacaaatggtttggaagtggggagatgggccagagaaagcagagagagttaagatgtgagatcatgaggctgtagccagtgcagcagctgtggagatggagcgaagcgaacagatcaaagaaatttaggagtgagaactcctagtgatcgtaaatcagtggcccaacccagggaccaagatccttttgactctttttttttttttttttttttgagacggagttttcgttgttgttgcccaggctggagtgcagtggcacgatctcagctcactgcaacctccacttcccaggttcaagcaattctcctgcctcagcctcccaagtagctgggattacaggcgtccaccaccacacccggctaatttttgtatttttggtagagacagggtttcaccatgttggccagattggtctgaaactcttgagctcaggtgatccacccgccccagcctcccagagtgctaggattacaggcgttagccactgcgcccggccccttttgact

SEQ ID NO: 1561858 - DNA, 4001 bp, Homo sapiens
ggtggcatactgtatagactgctctggacttgtttttgttttttcttttctttttccttttttttttttgagacaaagtctcgctctgtcacccaggctggattgcaatggcgtgatctcggctaactgcagcctctgctcccgggttcaagctattctcctgcctcagcctcttgagtagctgggattacaggtgcccaccacacgcccggctaaattttgtatttttagtagagatggggttttgccatgttggccaggctggcctcgaactccacacctcaggtgattggcccgcctccggctcccaaagtgctgggattacaggcatgagccaccgggcccggcctggacttggtttttatcagttaaactgggggttggcaaaccatggcccaccagtcaagtccagcctgccacctgtggctgtaaggcattttattggaacctctgttcatttgtttacatattatatgtggctgctctcgtgttgcagtggcagggccgagtagttgcaacacagactgtgtggctgacaaaggctaagatatttgccatctggccttttacagaaacagtttgctgacctctgagctcaacagtgtgtctcaacctttctatatcagcacagaaagagcttcctcactttttttaaggcggcataatattttgttgtatggctgcagtataacttatttttaatcaggcccttttaatggatatttaggtcatttttgacttttttttttgttgcttaagacaggatctcactatgttgcccaggctgaactcaagcgatcctctcgcctcagctcccagagtaacaggctacagctgtgattcaacacacctggctcatttctaactcttttgctgctgcaaataatgctgcagtgaataagctagtacttagctcattttccacatgtgtgattatatttacagaatgaagcctggaagtggaattgctcaatcaaagcctgtatgcattgataatgtttatagctattgtcaaattgccctctgtggaggttgtaccaactgacattctcaccaatgttatgaaagtgcccattttgccctacctttgccagcagagtattttaagccttttgatatttatcaatctgccaggttaaaaaaagaggtagcccagggtagtttactttgcatgtcttttattctgatgcattgcacgttcttccatgcattgatgaggcgtgtgctccttcctcagctggcagtttactgtcctggtctgaggatcttctggggactggtctctcttgctgactctttcgtgtcattttcacaaacaaccttttgaggaaaaaaagtcttaaggacaaacacatgctggcaattagcgccatcgacattccagatatcggggctgggaaggcagggtgagacctgctgggtgtcatcgttctgctctgaactaggaggactgactttcagagggttctcggtgtcctcttcttccacagcgctcctgttgacacaaacagcctcatgttcctccagatttttgatggggaccacgtggcaggcgttgtatttgcaggtggccatctttttggctttcttggggttctttctcctgcacgatgccaggtggtactggaatctgctgagtgggattcggtggtgaggatcataagggcaaatttcaaaggcttctggctccatgagaaattcttgaagcagggtatctcactgctagagtctaacggaaatgcttcttgtggagaagcccttttgtaagaaggatggagttgtcctctgcccagttttggcccttgggattctgtaggtgacggtcttaacttgtggtctgttctctaggactgtgagtggtggattagaagagagatgaggagctgccaaaagcagctacacagagaacagagttagcaaatggcacccgagacagaactatagcagatgcaagagccaaaaacccacagccgcttgactcacggatatactatgatgtcaagctgcagtcaccggtggtcacaatgggcagcctaagtcatcaggaagaggctattgtgcactgcttgggaggggtggatggctttgggaatgctgccatctaaaattgctcatggatgtatgttgtgacttaagtcttttaactgtacgtatttgttttttgtttttgtttttgttttatttgagacagagtctcgctctgttgccaggctggagtacagtggtgcgatcttggcccactgcaatctccgcctcccaggttcaagtgattctcctgcctcaggctcccgagtagctgggattacaggcacctgccatcatgcccggctaattttttgtatttttagtagagacgggtttcaccatgttggccaggctggtcttgaactcctgacctcaggtgatccacccgcctcagccccccaaagtgctgggatgataggtgtgagcccctgcgctttgccagggctggtttttggatgtgattctcagggccgtctttctttacccttctgctctgctgaggcccacagcagcctagtctccttgggtgtgggggaagggtttaaatctattcatatatcgcagaaggtgaagccttttggtgttcagcttaacatgggaaacatttcctataaaacgccccatcttaggtcgaccctgccgttgtccctcacagaactggaccaaagtctgaatggacgcaattgacacatatctcagggtgttagtggttttggtcctctgacattctatttacatgtctggtgttaggtaggatttcttctaaaaattggcctggagctccttcccaccccccaccctgttaaattgtttctcaagatctgagtgacagtagagaaataccatattcctgaataggaagactcaaaatcataaatgaatattctctgtaaactaaattacataaattacatagtcatcctaaattgatacataaatataatgcaattccaaataatttttgtagctttatgtgctgatatctgatagagcaagtctctgcttgttattagttttccccccaaaagccttgactatcttcaaggatttgttattctagatcatgtgtcaacaaactatgggcccatgattcaaatccagatggctatctgcttttgtaaataaagttttattgaagcacagccacacccatttgtttatatattgtccattggctgcttttgagctagatttgagtagttgcaacagaatccagatgacctagaaacctctaatgttttctgtctggcccattatagaaaaagctcacccatcctattcttggtggtggttaaggaagctgactgtattcaaattctacctcctgccacttaccagccatgtgaccttggggaaggtgtgtgtgtgagtgtgtgtgtgtgtatgtgtgtgtgtgtgtttcctggtatttactaagctctattgatggtgtcttttcaggtaggctttgtagttttctttctattttttgcacgttaaaaaaaaattaatctatgatgctttatggttttttctttttcttttttttttgtcattgtaaatgacactttttccatctctccacatcctagctatggtgttcagccttttttgagaattgaagtgattggctttgtctacattgttacataattgcaactgatcatacatgtgggatgtcttgttactatcatatgacatgcagacaatttagcaacatgacactcactgatgtcatagtaagaaattgtaatgggaacccaggtatagacaaaagattagacaaaggattctaaaaaaaggcatctttcataactacaccatttattctgggtgtgccagtcaggataggcaaggttaggctgcaataacgtacagtgccaaaacttcagtagcttaaaacaacgaaggcttatgagtcactttcaagtctaaagcaggtttctgggttggggaggggtattggggatctgctccttgtggttaatggagccagg

SEQ ID NO: 1561859 - DNA, 4001 bp, Homo sapiens
agactgacctaggtttgagggcagatctagaagagaagagaaaacaactgcttgttgggatttcaagaataaatatactaagaactataagaaaacttatttaaaaacatcaccacacacctgcagctcagaaacatattaagaaacagaaagcactgtctgtcctgattctggagtgcagactgcctagatggcactccttccaagcctgagaaccaaaagaccagagacgagtcctaaagcctgaaatggcatctcactgaggtctctactgagactgtgggacccggatggtcacagaaccccaagatctaaacgaagagtcaggaaaggagaaataaaggtaacgaggcccaactcttcctccagcacggtggggcgagcccgcggccgctgtcgcggtcccaccagagggacgtcccggccagcaggggcgccccaggggtctcagaacaagggagcagagccatcactcgcagcccctgtaccttgacagagaactaaacgctgtctcgaaataagcccccaggtttggagcggagaaattaagcagtgagacatcaaatcccaggacgacctcagtgcttgacacacccttccagtgcgcagggacccctccggacggctccccgcgtacctcatgtgcgtcttgagcgcggacggctgcgagaacctggcgccgcactcggtgcagccgtagggccggtctcccgtgtgtgtgcgctcgtgcagccgcagcgctgtcttggaactcaggcccttgccgcactggccgcagcggtgccgctcgccgccgccctcatgcacctgcagcacgtgccgcttcacgtccttcttgcgcttgaacttcttcccgcacagctcgcatgggaaatggcgctcgctgctgtgcacgtggcgctggtggctcttcaggttgcagcggttggcgaaggtctggccgcaggtgtcgcagcggtacaccacctcggtggccacgccgtggcggtgcttgctgtgcttcaggaagctcttctcatacagaaacgccttctcgcaaatgctgcacttaaagttgctcttcttcttctccccttcttcgtcctcctcctcctcctcctcttcctcctccggccctgctttctttgacaattcctccaactcagcacctgcctggcaaccctcatttttggaaacctgctccatctccgtgcccaccctgtccgggctttggtcctggggacacctgtagtcccccacatcaccctcagcagttttctgctgctctcggagtcttctcgtatatttctttttagggatctccacaaagaccttcctcccagccagccttccactagctctcctgattttagggtagggaggtttaactacctctttcttcttgtctagtttgtccttggacttcttcggtggcaaatctgaagacatgccattgctggctctctctcctgggtagtccaaggaatccgtgagaccactggggtgagggccatcggtggccacacttgccctgggggcaggagcagcactaacttgggagccactgctcacctccacctcctgagactctgagaaattttgcaactccaaaagtactgactctaacatctgtttctttaattgaaaacaagtttctgataaatccaaacatttcagcttttcagccacttccagcattcgctgcacccgatcttcttccacctgtacctttgcagtgtagacaaactcaagaaatgaagcaaagtcagcaacctgcacttcatttaagtagacattagtcctagtaccatccacactcttctcattaaggaacacttccttaaaaaacttgctggtggcagccagcactgccttgtgggccatgaagtctttgcggacaccctgatactccacgctgactgtcacgtcacacaggtgacccaggaggcgaagctcatgcatctcatgcagtaggttaaatggggaggatttggattccagcagaactgcaccgctttccatctttcttccttccaaaaacagctttgaaaaagaaacaagaattatgcatgagcaaccactgatgcaaaaggactaaaatttatgaggattccttcagtacttgagaggatatagactcattaacaacctagctttactcaggtaaagattcgaatgacattttacttcttagcagttttctaaagtgaggttcctcatgcattttcctaaggtaataaattggcatgaaaaatagtgtattctaaggtttcctccagtgataaacaaatgatggaagttgtgattagtgaaatacattaacacagtaatttgctcaccaaggtcactgtctaatttgcttacatagtccccaaaactgtaaaagaattcatggcaacaataatgtctagttctctgatcaggaaaccagataattaaaacacatagccaccaccatctgggagcaaatccaaaacctcagggaatcatttctgcctttgaaaagaaccaactaaataactactttccatgaggaaaacttcttggaaaagtagttcacaattcatcgcccattcccaacatcctaaactcctcagaatttgaattattgttactctactgaaataatgttaagttccacagcttttacaagctgtgctactttgagcaagcaacttctctgaacccatttcctcctctgaagaaggctgaccggctgttaccagggttccatgagcctgaaacttgttggctagtttattggtttcccacacataggccaaggtgctacagtgatccccatttcatagatgaggacctatcaaggtaacagtcaatggctggttgggacatgagccagggcctggtgcccggattcaactcagactactcaacacactcttcccctcagccttgccaaaggcaaagggctatctttagcccctaaatctttccactgcagcgggcatgcaaatttcaccaaccccacctaaggcctccagataccgtcaccccatcgtcatttctgctgctttgccacaaactccctgaatgtgttttctccctgcccttcagctcctgaatctaccttcctctttgattcctgtttccatccatccaaagcacatgccttccttctagcctccttcggccagaccacagatgtcacctcggattcaacgtgtctagaaaaaaagttgtcatcatcttccctgataaactagtcccacccctctccccttctccagtctcatcaatgagaccgctccccacaactagcagtccctcaaacatggaaaagactgccctctgggagttccgctgtaaacaggtacctatgaggcttgatcaatgtcgcctgaaggagacgccccagtaaaactgtgagaacactgacaaagcctaaggaagggatctataagagtggggctcttatagagccactggggtttcagtggtcccagccccagcctggggaaacaagactgcagagggctctctcagcctgatgccctgacttccccagacctctgccaacagggccctcgaggagacctgatttctcaatcaacaaagtgggttctgagcgcgatttcctatgttgcttggctactggagtgcaggcactggaggtggcgacagggcagtctgcggccggtgacagctgcgtatccgccgaatctcattggcattccggccgcctcccagtgcgcccggcatctgcaccaacgtcggcggcccctgaatccccgaggctcacggggccagagcccttccaggagacgctgctacccgcagcccagtccacggccacaagggccggggtttccagtggggcttaaatccgccgctgtcctcgccgccctcacggcacctcccacccttcccgcgccacttggccgccccagcgcccggacgccgctcggccactccaaagacgacccagagaacaaactactgcagccacagagaagcccctcctcggcccgacgcgccgcctcccgacgcgggcatccggggcc

SEQ ID NO: 1561860 - DNA, 4001 bp, Homo sapiens
attcattttcattatctgtgtcctatccctaagttactcggtacacacataggatgggaatactcacttgaataccatgtaattcacataaggcatgaggcacttttccagttcataacttagaagtcaccaagccttctatgtctcccaaagtttctacattttaaagggttgcataggtgatccatctgctttggggcgcccctttgcatcctctctgagacctccacttggccaactattttgggcccattttgcatcaattcaacccaacagcattatggaggctgatatgcatccaggggaatgtaagttcctagggacaggaactttgtctggctcactgctttgtcctcagcatgtagtacacagtgtagctcatggagactcctaattagctctagttaattagctagcatgcgacaaagggaattaagaagtaaggaaagctgtatacaaatgaaataaataatcacttgagcattggaggtctagcaatgctgagacactaactctataaatctgtcaagggtctgaaatttccttggttgtaataacctatttgggttaaagtgttttcaagagaccactcataggcaaattttggtggacaaagttaatatcggcccaagaaggggcatcttccaagagcagaaacttttaaatgagtccaaaatagtaaataatgatgcagaattttaagcccctctactctcagtcaacttcccttcccatgacttccctggcatttgttgagctcatttgggttccaggcaaaacctgagacaaagtcaaggcttgaaagggttggggagaggccgtatccttcaccccattgccattttcagtcttctacatggatttgtgggtgaatcagtgctgcctaccagagaccaccttggccaggataattttatttctcctaatttaaatatggaaaactgattttgagtgattttgttgtagactaaagaagaaatcagggaggaaggctaattctctccccctgcatattttctgcctttttgtctttatcaccatcaatgagtacccacaataccgattgcctttactaacagccataatgttagatggatgagactgagtgtagtgtagtgaaggcactcctctcttgctccagcaaataaaccatttttgtaactgctataaaaaaaaaccctttgaaatgattttatttcttgtttttattacaaacagaaaacataaaccatgtcacccaccatcttgtgctttgaaatatgaaagtcaaaggaaaactaatttgggaagagagatgaagtgctttgaaggagagatgaaacagcaaagttgaaagattaatgctgcatagacaaattgaaatctaaagtgaaagtttagacaacagtaatcaaaatgaatgataacacgaaaagccagcaggaagaaaacatttgagccaacaatccagtctggttcatccggataagatggttatctggcatttaatgctgtttcctacaccatgaacataagcatttactgtcatactaagaaaaagaaaagtcatccgaatttatcgctatttttacatgtagttaaattaattgttgtcatatttccaagtgaagtaacataggtttggcttttgcagtcagttcctcaagattcacaggcttggaatattttttaacaatttaaaggcccaagatttcttacagccccaagaacttttccctctctactaagcacaaatctgaacaaataattacacaccaccaacgtaaaactaggagatcttattttggtacggtctttgtgtaattttaaaacatgattttaaaaaataaattttcttacctggaaaatgctgcaatattatcagccaaagtttcttcatcatttgccccagacctgtaatagtcatatatagactttggaagtactgatttagcatgttgttcataatcattgatacaaattagccgggggagcattttcacaggttattgctatcccagatggagttcgttgtttttttttttttaatgtattgctttctacatcctcactgttctgttatttgtcaattattaatagacttttgccaaagttcagatttagttctctgttgcttacatcaagtgagcaaacattatatgcttagcctttgaaatttcatttgtaggctatctgccaaagaacaccgaagtcactatctgccaaagaacaccaaagttgaggttgggaaggcagcagaaggtgattaggtgtctatcacattaaaaaggggaaaggaataagtaaaaaattaaagacttagaggaatacctgtatgaaaccactcttggttcagttttgcctaaggctgcttattgcacatggtctgtgcctgtgctctttgcttgatacccagaataggctgcccactcattttctttccacatttggatcatgcacaaatcatgtaaacaagagcttatgaactgaacggggcatccatgaaatatggggcatccgtgaaattcagggcttctgcacaatataaaatttagctgattacaaacatagacatttggctttaacatggaacattaaggccaaattgacagctaattgttttattcattctgtatatttgaggtttacaacatgatattatgagatacatatacacagaaaaatggttacagtagggaggccaatataatatatgtatcatctcacccgtaattacttttttgtgtgtatgacaagaacagctaaaatcaacttatttaacaaaaattcctaatatgatacaattttattaactttagtcctcattttgcacgtttgctctctagaccaggggtcccaaactccccagcatggactggtactggtccgtggcctgttaggaaccaagctgcacagcaggaggtgagcagccggtgagcaagctttacagactgagctccgcctcctattgtgaactgcacatgcgagggatctaggttgcgccactccttatgagaatctaatgcctgatgatctgaggtggaacagtttcattccaaaaccatccacctacccccactgcccatggaaaaattgtattccacaaaacttgtccctggtgccgaaaaggttagggaccctgttgtagatttatgtatcctacgtgtctactattttgtatcctttgacctatatcaccccttttcctcttccctgcttcccactagtggtattcactgtttcattctctagctctgtgcatttgaagtcttttttaaaacaaaatcccacctataagtgaaataatgcaataatttcccttttgtgcctggcttatttcacttagcataatgttctctgggttctactgcaaatgacaggattcccttctcttataaggctgaataatatttcattgtgtgtatatctatacatttcccttatccatttgtctcttaatgggcatttaggtttaccattaattctttttttttttctttttgagatggagtctttctctgtctcccaggctggagtgcagtggtgtgatctcggctcattgcagcctctacctcccaggttcaagagattattctgcctcagcctcccaagtaactgggactacaggcatgtccaccacgcctggctaatttttgtatttttatttagtaaagatggggtttcactatattggccaggctggtctcaaactcctgacctcaagtgatccaaccacctcggcctcccagagtgctgggattgcaggtgtgagccactgcacatggcctaccactaattcttagagtcttatcttgccctggagagggtatagggaagtgctattccaaaagacctgtggtctcagtctataatttcactcaatcatggaacacctggggaagattcacattagtaggatatgcttgagaaagcaatgattttaactacagttagacctgagtttcaatctaggagccgccacttaaagctgcttgccagttgttcactatctacattccaac

SEQ ID NO: 1561861 - DNA, 4001 bp, Homo sapiens
agtgatacaaggtggggagacttcaattttttctgttacttttagtaaattaattttttaaaatctcaaaacaaacacaacaaaatgctattatttgttaattctggatggtggattctcgggacatctaatatattattatcttcacttttctgtattttaacctgtcaccccctcccctaaaaaaaaaaggaccataaagagaaaaccatgggataaggcaactgataggcattgaggcctttctctgtgccaggcataggctaccccagtggttctcaaagtgtcctccttggatcagcagcagcagcatcaccggggatggaagttctcattgtcctgcacagagctactgaatcagaaactctaggattcggcccagcaatctgttttcacaagcagtccaggtgatgctgatgtaggctaaagtctgagaacacggggccatatgtctagctagggcaatgttaacatacattaagcctgtgtactgtcagacagcattctcaaagctttccttcagtaacttttttttttttttttttttttttgagacagagtctctctctgtcgcccaggctggagtgcagtggcgcgatctcggctcaccgcaacctccacctcccaggttcaagtgattctcgtgcctcagcctcccgagtagctgggattaaaggtgtgtgctactacgcccggctaatttttgtacttttagtagagacggggtttcaccatgttggccaggctggtctcaaactctagacctcaagagatccacctgcctcggcctcccaaaaagctgagattacaggcgtgtgccaccctgcccggccccttcagtacccaattaatcctctaaacaaccctgtgaaggaggtactattactctccccatcctgcagttgtgaaaacagaggcaaagaaaggccaaatcctctaccccagccccaacaggcagtttgcccctagaagccccctccgctacccactagcctgtctctcacacgcaccacctctcgcatactccaatttcctgcatccttgcaagaaagacttcatagccccgttttacagatgaggaaacgaattcggaggcggagaattcgtccaaggaggaaagagacagggcatgcatgcagtgtggtctggggccaggaggtttgggggtttgacctagacctgttgtgggaggaggggcagagagccgaccagctgcagccggcctgggtgtggctcgcacgtcacgcctccgcccaactacccccttccccaagctggctgccaacccggcgtgacccggcccccaccgggaaccgtaagggccttccccttcccgggttctgtgaagccccatcccttccttctttttcttttttaaattaaaaaaaaaatccccgcccccccccaagaaggggaacctggacggcccagagaagtggtggataaagtcactgcacgggcccgagcgtccccttccccgggaatccagcagtccgcaacagtgccgcccctccctagggcaccctccactcgctgtcgacccctcatcccccgggctacccgcggctcccccgacgttccgtctcccctcgctgcccccagccgcacccgtagccagccctccccaggctcctgggctccctccgcctcctgggacccctcgcgggccgggtattcccggtcccctgtgcgcggcactcacctgggcgcccgctcctcgtctcgcgggcagcccggatcctcgcagcttgagcgcccccccagctcggcagcccctgaggttccggggtgccagtgccgggaaactgactttctagaactagaggcgggggcgacgctctgaggggctttggtgccgcgggcgtttctcgtcctgcactgtctgagtcccttcccactcgcctctaagcctctgatgtgctcccgagctgggaccagggacgtggtggcgcccgcaggccatctgggcgccttagccgcgccctgagcgaggctaactccgccccaagtgtcctaacacctccccgaagattcagacgccaccccaggatcctaaccggctccccgagggtcataacctccgtctcctgcaagaaggatcccaaaccctccacgaagagaaaaaaaatattagcaccatccataggaggcttctaacgcgtccaccaaggatgcgaacccccatcccttccgctccactttccctaacacctccccatcccaccgcccagcgtcctaccccagtctccaaaggatcccaaatcccactcctagggattcgaacccgcccgtctaagaaccccagcacccgctccaaggctcccaagatactaaccccgccccgccaaaggatttttaatcccacctctgaaggatttttaaactcaacttgcccccaaagattctaatctgcccagtggaaggatccgaactctcacttcagtggattctaaccctgccctaagatttagaacacaaaccccagggttccaataccgctcctgctcctgcgcgatctaacctcccgccgcctaagagttttaatacccaggggtctataccgccggtccaaagattccaaccctgcccttcagagatcctaaccccacctatcaagggattcctgccacagtcttcaaagattccaacccaccctggaaaggccttaccctaccccggaagcatcgtgatctcttttccccaccactccgacccctcccttctggcccggccctccccaactccgcggcccgagacttccaggcaggtctgtggtcagcggtttctcttccgcaggcctgctccattcagacaccatgcaaagttcctctctcgaaggaaccaccatggccatgcaaagttccctgcccgaaggaaccaccctggcttcctggcagctcagaggactcccaagctgggggaggtggtcgggggaggggaggagtcgggctggagggtgactgaggccccaagtggatgggattgtgcccagctccaggcaagggcagaacacaccctctcctggaaaagacaggggctatcaccctaaatgctgtgtaacacacctccaaaatctccaaaactacaagaattctaccgcgtctctctattcccgttgctaccagctgatcaggaccacagtcatttcttcattcattcattcataattcattcagcaaagctgtcctgggggctggggaatgcaggggttcttaaatttggcactattgacatttgggccaggtaattctttgttgcgggggactgtcctgtgaatgataggatgtttaacagcattcctgggctctacccactagttgtctatagcatcctcctccctagttgtgacaacaaaatgtctccagacatttgtaaaatgtcccctggtggggaaggggggaagaaccatgaatgagaaagacaatgaccctactcttatgtttttggtatatgtacctgtatgggccttttttccttctctttagcctacagtgctaactattttgagggggtctcccatccaagtactaaccaggcttgatcctgcttagcttccaagatcagacaagatcagatgtgttcggtgtggtatggcatagacaacttaaaaaaaaatagagatggggtcttgctgtattgcccaggctagtcttgaactccggggctcaactgaacctcctgccttggcctcccaaagtactgggattataggtgtgagtcattgcacctagtctgtatgtgctttttataaaaacagataatgttctgaatgtatgtttaatgttacttattcacttttgtacattccctcccgccacccccatcactgttgttaatatccagccatgttgccaaaggtagcggctgtacgtgtagtcactgtttacatccttcacattttatttatccattctcctagtcatggacacctagattgcacacaatttcccactagtgtaaatagtgccacagtggacatcctcatacacgtccccttatcg

SEQ ID NO: 1561862 - DNA, 4001 bp, Homo sapiens
caggtgaccaagcaggccgggcagtacagctgggccccagggggctggccaaggggggccgtgcgcccgtcgccatcaggggcagggggtgtgagcaggtccccccgctggaggccacccagctgctcggcctcccacacagccatctccacggcgctgtgtgcaaactggcagcgggactccccacgccagcacggctgcccacgccccacaaacctgcagtaggcaggaggctggccggcccggggccgcggcctcaccaccacaaactgttgcttgcggcggccctcggcgctcacgtgggccaggagggaggggcaggctccgtgctcagggcactgcccctgggggtccacgcgacagatgcatgggggacagcgcctgaagcagagggagcaaagcagctcgaagcggccgccaaactccgtaaggatggcgtcggccgcccggcctgcccctccctgggccccgctgccctgcacctccgccttcagccataggcgctggaggttgtgctgacgctcgaaggtccagaccagggcctcctcgcgactgcgggcaaaggtgcaccggtttcggtggcgccggcagccgagcccagggctgtagtagtggcagacttggtagcacaggggccttgggaaggtgggccggcagcccaccacgcgccagaccttgctcttggtggcctgcttaaagcgggccagcaggatctcgcgggagcagtcatgctccaccctacggaggacgtaggtgctttcattgagccgctgggtgcagcgggagcagcccagacacaggtccaccagggcacacagccgggccagggacggccctctggtggccgcggggctgttgggcagcagggtggaccctggaggcgccacctcgaacaccagcttggctctccagggaggcgtctgaggctcctgagctcacgggtccacgcagtccactggaactgttggccacggttcgaagcctgcgacagaaggagcaggtgagactgaggccagaggacatctggtccaggcccagctcagaagcacggcctctccaccaggcaaggagctggggatctgcctatcctgatgcccaagcagaggcctctccaccaagcaaggagttgggactctccccaccctgacgcccaagtggaggccttggcagtagctgtgtcctgtcagggagtacagggctcactgacccggacacagccagaccctccctcctgaagggtctcaggccccacctagaaggagccaaggtgactgcttgtggagccctggagggggcagagcccttggcacagtgccgcccccaggaggccgcacccctctgccccagccaggggtcctgtgcaccccagggcctcaggctcctgactcttctaaggacacagcacctccttttctattgaatgaccactggcccccaggaaaagaggactccacatctgcacctggggaggggcctcacggagaggagggtacagtgcccaccagagctcagggtgccaggaagagatgggtccccgggtccccaccgcagctgggatgctacaagaagagtaagtttaaaagcaacagactggaggcagacttcagtatgagaacccggcactccccgcggacccctctgagaaaacatccgagtctgccatccagaaaggacgggagccgagaccccaaaatcctgcgctccagtgggtgcagagaccacagcgctgggtcttgctgcggagggtgctggtcctggacgggctgcactgccccgggctgggtctgtggctcccgggactccgcgcccccggctgcactcaccctcccggacccccccctccgcccccggccccgccaccctgggacccccgcgctcaccctcctggagccgcccctggacccccgcgcccccgcccctccgccctgggacccccgcgctcaccctcctggagctgcctgccctgccgagcctgcccaggagctctcagtttcgattctggcccgggcactgacgctgatcgcggaaattacctcaccgccccccgccccgccccgccctgccccgcctccagcgacagctcggcccccgctgcgagggaacctcgggaagcgccagcgagcagaggacgcccctccctgaagggccagcgccgtcgaaggcggaggcggctgggggtgggggtcctttcccgcacccctccagggccccacgccccgtccagcccttcacacaccagagacgccccgatgatgtgccaggcggaaggggtgagaccctgcccggccctggacggcaggatggtctggtgactccaccatcagcccctggagaaatccaggcacagctgacctggaagcctgggtcccctgacaggcaggacctgcccgtggccctggtgctgctgggaccccaagtcccttctgtcaccaaccaggatatggcaggaatggctaagtggccgccgggtcccagagtcagcacgcctggctcttggctctctggactggctctgggccctcagcagccctgtggggaggccccatagaggagctgaggcctccagcccacttgcagctcgagtcccagccccagccttactgccatctcagggagaccccaggcctaaccctcccacctagaccacgcccagctgttagatgtctatgtttaaaataaacgtcccattagccaggggtgggggcgggcgcctgtagtcccagttactcgggaggctgaggcagaagcattgcttgaaccaaggaagtggaggttgcagtgcgccaagattgcgccactgcactccagcctgggcaacagagcaagactccatctcaaaacaaataaataaataaaataaacatctgtgttgttttaagcccctgagctttggggcgatctgttctgcagcagtagataacggacagtgatgctgcccctgaaacaaggaagcaaggctgccacccaaggccagcacctcgtggggagggccaggctgggggctcacagcgacctcgggaggtcggctgggtgggccgtcaaccaccagggagcctctccgcagaccaatcacgttggagctcctgggagagggcaggccctcgacaatagcagccccaggggccgggcgctgagcagggtccatgtgcgtggaacgctgggagaatttgtgtggaacgctgtgttcctggatggagaggctcaacaccacacaaagacgtgagttcctcctaaactaacctgcagtcgcatggtggacacactgactttcaagtccatttggaaaagcatcacatcaccaagaaaggctggacagggctttttttttttttgagactgagtctccttccattgccccggcgggagtgcagtgatgcaatcacagttcactgcagcctcgacctctggctcagacagtcttcccccctcagcctcctgagtcgctgggactacaggcacacaccaccacagtacaggtgcacaccaccacagttaactattttggagttttttctatgtttttcagagatggggtttctcaatgttgcccaggctgctcttgaactcctgggctcaagcaaaccccccacctcggcctccttgagtgccgggattagattacaggcttgaatcccaacacccagcccaggatgatgactaaaaaggattcccagcgggtgctggcatgacttactaaacacataacacactgcaaagccactgaacccggtgtggacacacagttccaaggcagaacagagagtccagaaatagagtcacactcaggagtctggggtgggatgaaagattggctctcggccaggcgcactggctcacgcctgtaatcccagcactttgggaggccaaggtgggcagatcacctgaggtcaggagttcgagaccagcctggccaacatagtgaaaccccatctcttctaaaaatacaaaaaaaaaaaaaaaaaatagctgggcgtggtggcaggtgcctgtagtcccagcta

SEQ ID NO: 1561863 - DNA, 4001 bp, Homo sapiens
ccgcagcctccgtctgcgctgtggttgccgtgatgtcacgggatgctgggctcagagcctcatctcccggctctgccttcaccatggccgtcaccacagccgcctgctcctcggccaggtcccctactggctctggggcagcctcccagttccccgctgccccagcctgtgtgcctcggggaggccagcgccgtctctgcgccacaccctgctcgacctgctccatggacaggccctcggggcagacactgtgccgctccacgcactcacggatgaagctctcccagagcttgccgcaggccccgaaggagcagagggccacggcgtcccccactaccaccagctgggactgggcgcgggtcaggacggtgttgagcacgcgggcgtcggtgaagaactcaggggccagtgccccagggctgagcaggctctggcaggtgtgcacagtgctgagcaccacgacccggaactgccgccctgcagggggcacgcagtcaggtcaggctgggtgcgcaagacggtgggaccagccccacccctgccgatgccaggctgaggagtgggccgagccacccggggtatcctggggcagctggcagcacctggccccgctggtcacccacctggcaggatctcaaaactgccgacagacacctggcctaggtcccgcctcctcagctcctgcctcagtgcactgacctgaagacgcagcagggccggggatgagtgctggacgcagtgaggactcggccacccccgacaaggagagggcacccccaccaagctcggggatgagcgcaggacgcagtgaggactgggccacccccgacaaggagagggcacccccaccaagctcggggatgagcgcaggacgcagtgaggactgggccacccccgacaaggagacggcacccccaccaagctccagacacctcaggggccgagccccacctcagccctgggaggcaaatactgcagccccctcttacagatggggaaactgaggcgggggctcgtccatcagccggagagctccccctcccccagcaggggtgcggtcgggggctgtcccgggctggccgggctcacctgggcaccgtgggaaacgacacagatgcacctctgctcgcggccgccccagcagctgggccaggtgttgtaggcctcctgcaccttctcgacgacctgcgcaatctcagccagattcagccaggacgccatggacatgtcccggtctgggctgcccgccacgtggcagaacatgagcgggtagtgccgggggtggggcggaaccttgcccctggcgtggatggggttgcccttggccacgtagaagtgccgcgagatgaagctgacaatggcgtccgtgcagcggtagttctcgtggaagaccaggcggctctgccgcgccacctcgtgagtctcctgctggtagcacaggaagaggcggtgcagcagcgtgtgctcggccgcccgggccctggccacactgaacagccggggtgtgacctgcatgtggtcgcccgccagcacgaggcgggtgccgtgcgaggcataggccagcggggtgagggcctcgcactccagcatctgggccgcctcatcgatgagaatgtgggagaagaagccgaccggcaccctgagctcacgggcctgggaggtggtggtgaccaccacgcggtgccgcgccagctctgcccgtgtgggcgggcggaaagcctggcggtcgtcggtcaggcaacagtactgcagcgtgactgggtccgtctggctcagcggccggtccgtgtacatcacacggagaggagtggcctcggggtggccgccgctgacgtggctgtggaaatactcccggatgtagatgtcggcggcactgcgggagggggaggagctcatgggcttcttgctgggggcctcagtgctgtccgctaaagcacctactgtgtgcccagccgagctgcccctgagcacagcccttgtctggctgtcagaggtgagcagcaaacactggtgtccctcctgtcaggagtccaaggggcaagaggccacggagggcttcaggcaacacctgggcgagcccagcggctcctctgacactgcagacacctgcacctccctggtccccagaacccccaatccagaaatcagcccgggacgtatggccactgtcccaggctcttcctcccactccccactgggcagggatgggaaggccccggcctggggaggtggtggtggcaggaaccagaggaaaccacataaaccaaaggggaaccttgtggttaggacaaagatctgtgtttctataaaaacgaaaaacaagactcatccccagaagtcctgggtgggccatgctgcagccttccccgtgacactctccttgggccagggccccggcagaggcacccagctcctcacctgacagcagacccggccaccctcggtgccctgagctgggcctgataaagccaaagcccaaagctggtcggctacagggagtgcagaatcagaggactggagcacatccagggggtgaccgcctgcccggtgtagacttgggccgggcgtcaggtgaggtgggggcaggccaggctcgggcttacctgttggtgtgtgtgcagatgagcaccttggtttcaggcctccggatgacctccagggaggccatggccagcgtgtaggtcttgccggtgccaaaggggccatagatgagtagcggggggacacgcctcccatccccagggccccagcccgcgatgagcgccacggccagctcctgcttgcggttgccacgccgcaagggtgggacagaccaaggtctgggcagggcgcaggtgggcaagtcgggcaccaccagctgctcctcaggcagtgtgtccactgcctggtgccagaggcggaaggtcatcgggtcaatctggaactgcacctccaggaccaggcgggcctcaggctgcagccccagggccaagcagcagcgggccggaagcagcagccacagcgcctgctctgagctggcccgcctctccagccgcacctcgaacaccgtattgtcgggtgcaggtacaggggccaccagggctgtgctgaccgcccggcccagcaggaagccctggtctgtgtctggcatcagggaggaggggacggggacctctgcgtacagtgctcccggaggcgcgaagagcatgttcagcgctggcgtctgcaatgccgtcttcaggaacacctggccccgcagggtcagcctggcaggatggcctgggtcagctcatggggccacagctgccagccccgctgccaagtccacgcccccatccgctcccgttgccccagccgctcccattgccccagctgctcctgctaccccagctgctcctgttgcccccagctcacttggccaccagctgctgctgagccgcctcctcctcatagagaaactggtgcatcctctgccgatagttggttggtgagatggggcccgaggccacgctgctgcggttgaactccagggccagggcagggcccttgtacttggccatcagggccgtctgctcggccgtccgctccacgccaggcaccacgtggcggttgccagtgtgccagcgctccatctcctcagggtggccgagcgccagattcctgcagggtcctgggcgacgcccctggcccagctgcagccccagcttttgtagcagcaccggccggcggccaaagtcgaagaccacccattgctcaaaggtgccgaacgaggcagcctgcacacgcactcccacctggaagtcggcagtggagctgggcacacggaagcgctcaccccgtgcgtagagccggcctggcgggaggccgggagccaccagagagaagtcggctcctggctcctgcttcagcagggccacgtgtagcaggggctcctggagaggaggccagacggtgaggggggcccagggctccccccaaccctcccgagaggcagcctggccagcgtagcccaagtgcagggt

SEQ ID NO: 1561864 - DNA, 4001 bp, Homo sapiens
gctctgacctactcatctttgcagcaatcctcccttacccctgacagtggtggaagttcaggaaatactgttgcctggaaggtgttttctgcagagattagtgatccatgtacagaaggtgccagggagaattactcagtttggagagcagctcagatcaagctgcctagccttatgccagctgtccttcgcctcctctgtcctgggttatctcagaactgctctctacactaagtgtctacctgacaggcatagtagagaggcttaatatcacctgaactcagcttagaaaaagccaaataaaaaggaaaatggagtcatgtttgagtctctcagcctaagccccgcctaactactttcctttgcatctgatcgcatacagagccagtagtgagttctctgctcctggggaaggaagatggcaggcctcagctactgctcaagttgggtagtgttttgagaacctcagcttcagcagtttcaaaagtggcagctgctttgtgggcctgccctctttgggcaagacttccacttaggtccatcctcaggtctgggtgggggaggagcatcgggaaggtgcagattaagaggttgtggaggaagggagagggtgccaggaagtgaaaagtcattggtacaacgggctagaaagggcttaatatagggaagaagtggggcagggaagggggagggagaagcagaaggtgaaatgtgctggagtcctcctagttatccaataggacagatgttgaggaaggccagggatggagtctggcccagtctcacaagaggggccaacagtggcccagcagacaggcccagtttggtggggggattgtcttgggggtatggggagaagggctactttgagatagggtcaaaggctgggtgggaaaagggttacaggttaggaacaaggtctaggttttgactaggccatgtccaaggttggatggtagttaagagaggaaaccaggaaaataagacgtccatgcctagttggaaagtagaggcaccaagatgccagcttctgaggagccagctgactgggatggttccagaaagtgatgtgaaaaactgggctctaagagatcattgtttttgaggcaggggcaagggccaggtgtgggggatctaggtgagcacataaggtgccatagattccagtgagacaggagtcagagtctagggatgggtctggatggtagaaagggccctgcggtgggctgaggcagggttcctaacagggaatgacacgaaattgtaccattcagtaagttgtgaggaccagtatccatcaggtatacatgatggggctgatctgcctgggcccaacaggctcagaacaatcagtgcccgagtcgcagtgggggacgggctgacagcgttcccagccgcggcatgatgcacagggagggaagtgtcagggtccgggtcgggagcagaagcaagttcctattggggaaggtatcataccctggtcgggggtcggtgcccagatcccggggtaggaaatgccagccccggaatgtgggcccgagacagagggaacggtggtgatcagggctgggaagagtcagtgtccggggagaggtgtctgtcccgcctaggaagggtccatgtcggccgtgttcggtatgggggtggaaagtgcccggttttcccgctgaccctaccttgccgcgggcgcagcgtacggagcgcagggcgccgaagaagatgggcagcagcgccatgagcaggaggctgccgtaggccagcgcgatgccctcgggcgtggaaggcggccgcgtagtgctgttggtggggccgcctgcctcggcactgccgttatgcggatcgctgagggccgagtccatggcgagggtgcgttcgggatccgactccagctccggttgctgcagcagggacgcaggcggagacaccggctctgcagggaaagccacgttcccctaaggcaacaggaagtgacgtgctccctcccaagcccgcgccgcgcacgcgcgcacacacgcttgcacgcacgcgcgcgcgcgtgcacgtctccccgcccgctcgccctctagcggtggccgagggccgggcggcgggttgctaagcaacttgttagcggtccggacaggggctctgggccactgcggtgggcatgcgacccgaatgcccatttcccagtcccagccggtctcctcaatcccctgctgtccactctccgcaaatcctcatattccgaataactaagaatgtgtttattcatacatgcatttattgggtatccaattgtttattcactccttaaatatttattgaatgtccctcaatatgccaacaactgacctaggctctggggacactgaggtgaacaatacaggcaaaagttcctccttgccttcgtgaagtttgcattttagtgcagtgtgtgtggggggacgttgggaagacaataaagaaactgaacaaaataaaagtctgtaaaatgggctgggcgcagtggctcacgcctgtaatcccagcactctaggaggccgaggcgggtggatcacctgacgtcacgagttcgagaccagcctgaccaatatggtgaaaccccgtctgcactaaaaatacaaacaattagccgggcgtggtggcacgcacctgtaatcccagctactcgggaggctgaggcaggagaatcgcctgaacccgggaggcggaggttgcagtgagccaagactgagccattgcactccagcctgggcaacaagagcgaaactccgtctgaaaaaaaaaaaaaaaaaaaaaaaaaaaaaggccaggcgcggtggctcacgcctgtaatcccagcactttgggaggccgaggtgggcagattgcgaggtcaggagatcgagaccatcctggctaacacggtgaaaccccgtctgtactaaaaatataaaaaattagccgggcgtggtggcgggcgcctacaatcccagctacttgggaggctgaggcaggagactggcttgaacctgggaggcggaggttgcagtgagcccactgcactccagcctgggcgacagagtgagactctgtctcaaaaaaaaaaaaaaaaaaaacaagaaaaatttgtaatttgtaaaacgttaatgtatagttatgtgttacatagcatgttaatgcagataaatagagaaaaataaagcaaaagaaagtaaggtgtgtgtggagtttgcaaatgtattgagagcctactatgtgccaggcaattataataccttacgagttcatgcccctgtacaatttataaagctttgtggctcttttcagaatttgaagaatctgtttatttatgtgattcttatttttgatattgttaaaaaagttaaaaatatatattttcttagacatggggttttgccatgttggccaggctggtctcaaactcctaggttcaagtgatcctcctgcctcagcctcctaaagtgttgggattacaggtatgagccactgcttgcagcctactgtggctatattagatactggaacatctaagcatcactgtgtgactgtgcaaacaaaaaacttcaaggagggcctattattattattattattattattattttgagacagggtctcactctgtcacccaggctggagtgcagtggcatgatcacagctcactgcagcctctaccttctgggcttgggtgattctcccacctcagcctccccagtagctgggaccacaggtgtgtgccaccacgcccggctaactttttgtgtttttagtagagatggggtttcggcatgttgcccaggctggtctcaaactcctgggctcaagcaatctgcccacttcggcctcccaaagttctgcaattataggcatgagctgccacctcccgcaagagtgcctattttattttattttatttattttttatttttttttttgagatggagtcttgctatgtcacccaggctggagtgcagtggcacgatttcggctcactgcaacctccagcttccgggttc

SEQ ID NO: 1561865 - DNA, 4001 bp, Homo sapiens
tctttctggttccagagctggaggtggtcttgtctttgggactcccagttcaggggcttggcctctgcctcaggagcacacagttcctgggcttggaaaaagtgatgggggcggggagcagcccagggcagggcagtggtcctcgtggggccacacaacactccacctagtgcagcagcagcttgtttgctatctctggtgtgtttttgccttgcgctcctggcgtggtcctcagacaggcctaaaagccgtccagccagcaggcctgggggaatgaagcctgttttgtagaagatacagaagccaggataggggaggtgacatgcccaaggtcacacgtgactggacggcaggggcaggtgagcacctgctgagctgacaacaagcagtgcccagcagctgcctcctcaccctagctgagctgaccacaagattccagacctcagctggagctgcagcctcatactggctgagtggctccaagacacagaaggaagcagggtggcaggctgacctcagccagctgcctgccccctctcctctgaggctggcctgggaccgatggggctcttccctccaggaggggtttccgggcctcctcttttcccctacctccctgtggagaactgtccacccctccagatatgctccagtgatgtcggaggggatgcctcaatctggcgagacgcagcggcaacaaaatctgctcagagacaaacggacatgttgctgatatgaatctcacttggtgagtggcaacaacagagtcctgcatttgggtctgtgcagtcgtgcacaccagagaccgctgacccccgcccgcagcacagggaactgcatatatacacagcaggtacaaatatgggcacacgacaaaacgcccatacaggataaagatgcaggaagaacagggcactccaacaggtccgcatgcacaaacgcatgtgctctatgacccgcacacacagcacacatgtacaaacatccacagacacaagtacacacacatacacacttacatacataagcaagatcaacacgggcaactcctaagacacaaacacagacccactcaatgaatacaaaggaaaatagacccagaactcacacacagagacaaatgaacacacatatgcaaatgggttcctgaaggcatcaccccacccatacaacctacatggaaactcactatcacacacgaacgcacacacaacacacacagtgctgagttggcttcgtagttagcaaaacttccctgagagctccattttccctaagtgccaatttcatttccctaggaaagtcccaaagacaccgagaaatgcggttatgtctccaaccaccatctccagggatacaacatcccttgccgtctctctgaacctaggcccaaggggttcacgaaggggccgtgctgggctgaatcgctggagctgggcaccaagggggagctcaccatcacgtcactgtgccaagcgccaagcagagccactgtgaggcagtgaggactggaagggcctgggaggaatagccgggatcgacttttgctggaaattggcccttgcaggcctcccttcacccagaatgcctgtgatcactgtgcctgggcacatgggcttcacttggcaacacctgtgctggcctgtaggaccaacctaccattttgtatcattctcctcccaccccaaagttgagtgccaaagatctgctcctggacccaggcacacctgcccccactggcacacctgggcacatctgcccccacctaccattgcccatcgtcaacacctgcacattctcaaattccagggtggtgtaggctgggtccagtgcagcactgtagtcggccatgtccatgtcgacgagggttttggagagtcgcattctccctgcctccacgccgcggccacctgccctaccctgggcgcccaccccgaaggcccccgccctccgccctcccactgcctcctcccagtgccctctctgccttcctttcaaaccgtcctctgggaagatctgctgggagtcttggcctagcctctgtgaaggggtggaggctctgccggggaggggtgggggttaatggttaatcggtcccccgccggtggataggctgggcggggctgcagggatttggctgtttgttggtttctggctgacacccggggtgctaattacaactgctggggccctaactcaccgatgttcagttatcaattgtacaaggcaggcatcatgactcacgggcactcatttgacccttgactcacccacccctccaagccattgtcaccccaagtcaggcattctaactgatactatcaggcactgacagcctacctccgagatcccctaattcaataacttcccaaatcattgacttctaccctcaatgcttttgcagagataaggctgccccatggcccacgatttagaaacctaaatcccaggccccagatgccaatcttctggatccttgttctgggagctcccttccagttcccccgcagtttcccggttcccctgggagcagaatggactggaagtttgggagggccagattcacctccaattccccgctcctgctccctgtgatcccaccctgcccctctccgtctcccacagctcccagtgtttctggcccaggctggctccatctcggattttcccatcacattctcctgtttccctcacccccaccccctcccggagcaggcagagacctggatttacattcaggcacctaccgtctactaactgggaccttgggtaaatgattctcctctccgagcctcagtttccttttctgtaaaatgtacaatcaacttcaaagggtggtttgagaaggaaatgagatggcataaatcaagcaccaagtggggcctggtagacgtccatcctcttccccctcctccctctccctgtttcgtatcccccttgccatccccctgtttctctccacccgtctcctaccttcagagtgggctttgtgggggtatcgccagtgcagtcacaggcaacccaacccttagaaagtcctggttcctggttcagtgctctgctgtggttgtcctaaaattcatcatgacttttgaacaagggattgtgcatttttgttttggacggggccctgaaaattacacagctggtcctggctgtctgaagctcatggtgcactctgttcttctcactccctccagccctcattgccttctgtgcagacattttcaagggctgccaatcaatctggggaagtaaagtcttgatgtagaaggcagagagtgagggcagaggaagaaaagcctgagacttgggaggcctgggagcctgtcctccactgctggctggaagggcaggttggagggcctcggtgacacctgtgagcaagagtgggcgaattagtgggagcaccaattaatgagtgagtgtgtgggggaattgatgagtgggtgaattaggagtgagtgaattagagacagggagaattaatgagtgagttgagtgaatgcatgaatgagtgagtgaatgaacgaatgagggtaaattactgagtaagtgagcaaatgggtgggtgaattaatgagtgaatgggtgggtgaattaatgagtgagtgaatgagtgaatgtgtgggtggattaatgagtgagcaaatcgggagtcagggcatgtgtgttcgagtggtatgaggaggcatcttcatgttctttccactgctagaagccctttctctgccctgcttagctttattctgtccacttgatctgacctctgaagctgagatgactggggagtgctattgcctgtagggaaaggggagagggagcaactgttgtggaggacaagagaggctagatttgatgtcaggagacctggggttaggaactagctcagtcactattccgataactttatttacatcgtctcttctcagggcttcaatttctccctctgtaaaatagaaagatgatcctggctcagttttctgttagccaggacaaga

SEQ ID NO: 1561866 - DNA, 4001 bp, Homo sapiens
caatattatttatctcagacagccgtttggaaaatgaaacagctgtctgagagataatagtagaacattcactaacccattcatccatccattcacccacctacctgtcgatagaagcaaccattctaataattgctgaatgtttgctatataatgagtatgacacaggagcagagatgaagagacatgaggacatcctacaaggtgcagagacgtgggagacagtgaaaggctgtcaggttatattattgtatcatcctttaagagacactgtggggccttctgttcacccctagcttagccttatgacctgggctgtccttccccagaagctgtctggcccctttgagagacaatgtcttcccctagccacaggttcaaccaagtcatccattggcatctatactccaggtcttaaaattgtggattaagggtggcctcacccttaatctcctctatgctatctcctctaatctccccgctctctgggagataggtcctgttgttatcttcattttacagatgaggaaataggttcagagaggggaaatgtcttgcccaaggtcacacagctggtgtgtgggatgggttcccaggctgttggtttcttcagcctctgccatttccagtgcatcacatattcctgtttgatgggggtcaaagcaaagaagattcttcctgactagagtcaggagatcaggccctgattctgtcattccctggccctctgtcctcagcaattgatgacataaatgttgattgtgtctttgcaatgcacgtggtatcaagggctttacatccttgttccccacggcatccaccatgatcttaagacacatcctagtcctgtctccacttcagaaagaaagcaagaggcacgtgaatgttgagccgtgtgacagagtcacaactagaccccgaggtctgctggattccagagaccaagttctgtgcgggtgtgtgatttgaacaggtttataaaaggcacccaacttttaaaaaatccaaaatgtgtccccaaaagataaaacattctcttgaatttccctcctcagaaacaaacctgtcaccaattttattgtgtcattccacgaattttctatgcgtggaatgtacacgtatacgcgtgtgtacatatatacatctatatccgtttcgctatcagcaactacacagttcttcagtgtaccgttttcacttaatttaactgagaggttcttccctgtcacacacagatgtgcgttgtttccttgaacaatgggatagcattccactgtaaagacgtctcacgctttatttacccgtcttccctctgctgagggacattgggttgcttccaatgtgggggtcaccctaaggagtgagcctgagcctttcactctcagtaacacatgctttctagccctgcatctgagtttcacacgtccgcacaagatattctcattttccaacgctccaccctgcgcggcgctttctacctcctccccattatccagagccaacggaggtgcggagcgaccgagctgcccggtcccacgcccagcttgataatgcaccagcaacgtgacctaggcccagcaagcctctcctggtggacctcaatttgccccgcatcgaaacaggacggtgcttccaagccccaccctctgtggggttttggaaagacccctgagatgcattcccaggaaggcctctggacagacaaaatgagccaagcctctgccccagggcttctcggcccctcccagcacttctcgcaccaagcaggccatgccccggcttgagagcttagggaagcggtcacattgcctccgtggggcttcctgcccttccagaggagctccaggaggagctttgggcccgtaagaaacacacggggaggtgtcccatggcctcccaaagctgaccgcagtcccgccctgtccagtcttcccccagccccacttaccgtaagaactctccactggagccccgaggggcgcgttcacgctgaccatggccaagcccacccagccggagagctgggggcatggaggagcaggggcccgctcacagcagcagcacagccaccaggagcccgtccaccaggaaggcggtgagtgcggccagctgccaccgcccggttatcttattgattcttctaatcacccaaggtgggtggatacgttaaagagtaaccagtcacttagggaacccgcggctggggactgttgctgtctccatggcaatggcgacctggccagacctgaggtccactcgggtcctagtcctgcactctggggttaggggaacccagagccaggtgtatggggacatcagccccccaatttgaggacagggccggagcagaaggggctggagaggtgagagtccaacctgggttgggttttatggctccaaactatgggtgtgtcaccatgcaggaagtagtgggaaaaccgagggaggggcagaggaaaaaaggagggtggagaactgtgtttagtgagtgcctactggatgctgggagttgcatacaggcgttaccatatttaaattaaaccttgagatgaagggactgaaggacagagagaaattgcatgcctggagtctcactgctagtacatagaggtgttatcttcctttcatctaacatatttattgagcacctactatgtaccaggccttgtgctagactctggggatatggaaatgagcaaagtagatgtacccccgaaacttgtggactaatggaggagacggaccttaatcagatcgtcattcaaagatactattacaaactggtgagtgatatgaggggtggagaaacatggggctgcctccaggccaatgggacaaagtcatcctgtctggcgtctcctctggtctccttccccattctaaattcaacctgctgctgaaactcacacactctgttttagctccctggcatgttagacacctgccacctagctttttttttggaacagccccgtttcttttgtctcagttttggatctcaccacctgcttggggattctgaaatcaaggtcattcatcctgttagagagagctgaaatgagaacagtgaaacaaattctggactcagaaaaatcagaaaactccagctctattattttcttgctgtatgttttttagtaaattatttcatttccttataggaatacctagctcatagtttgccctgcttctaaaatagctaattgataatattcctcttctcttcccatagtctcttttttcagctttatcaatcacctcagagggaccttcagcccctacagatgggcatgggttgcattaaaatgtcctttcttttctaaaacaacagtgataacaaacgttagattttggggccgggtgcagtggctcacgcctgtaaccccagcattttgggaggccgaggcgcaccgatcacgaggtcaggagtttgaggccagcctgaccaacatggtgaaaccccgtctctaccaaaaataaaaaaattagccgggcatggtggcaaacgggaggctgaggcaagagaatcgtttgaaccagggggacagaggttgcagtgagccaagatcgtgccactgcactccagcctgggcaacagagagagactccatctcaaaataaataaataaataaataaataaataaataaataaataacttcgatattttttaaaaaaaagtattaatattcttggtcgggtgtagtggctcatgcctgtaatcccagcagtttgggaggctgaggcaggtggatcacttgaggtcaggagtttgagaccaggctggccaacacggtgtaatcccatctctactaaaaatacaaaaattagctgggtgtggcagcgagcacctgtaatctcagctactcgggaggctgaaggaggagaatcgtttcaacctaggaggcaaatgttgcagtgagccaagattgcactactgcactgcagccttggcgacagagccagactccatctcagaaaaaaaaaaagtattaatatttt

SEQ ID NO: 1561867 - DNA, 4001 bp, Homo sapiens
tccagattccccgtctcctgcctgggccaggtcagtctggctgcagccatggccccgagtgggcagctggccgtcgagtggcccatgtgtcagcagcaaagccagtgggaccaagcccacttctgcccacaactcagaagtggccgtccccacccaggtgcctcccatgggcgtcccgactgtccctgcggagtgaacaggagctccgcagcccaggactcaccgctcgggtgaccgacaggaagcggtcgtagctgatgagcacgatgttgaaggcagaggaggtgcacagcaggtagtccactaccagccacagcttgcagaggccccggccgaaggtccagcggcctgtcagcacgtagggtacatacagtgggatgcagaaggcgcctgtggggagtagggccacagtgggaccatgcagccaggggccaggggacagacggacctaagcgcagacaccggcgggacctggggtcacatggtggctgcttttctggaactagccatcctcatcttaccacccctccacctggtgtcagccacaaactctgccctgccgccagccttcacccccacatagctcccagcactatctgtgtcccctgggcctgggggcaggagggatgatccaggcatggggaactctggccaccacaagacccccgagagcctggagtcgggattccctggacttctgtccagccctcccagccctcaaaggaggaaagaagacaatttccttctcccctcccccgctggactccagcccctaccctggcgctggacaaccctcggtctcagcttagacaaggagaaagcctttctcctggctgaaagggcacttggttgcagccgccagccgccagccgctactactactgccaagcgggcttggagcgtctgggagacgcacctcacagccccaacaggtgtctggcgctccagccccctccgcgtgccccgccccccagccggcagcagagcctggacacgtgagagcacgctcctccgagcgtctcccccaacccccaccttccccaccgtcccttcccccaacacagctctaaaaatcccccttccatgtcccctcccccagaccttctctaaaccgccccactgcgccctccgcgcgtcctaagtccgcagcagcctttgtttggctacagcgcaggagccagagctgcacccgctgcctttgcgccttgcgcctcgcccagtgcccgtgtcccttcccggggacatctctccccagcccctgtcccgaggcctgagtggcaaggaacttcgcctgtgccccccaccccatgggctccggacgcccccttcccaggccgggtcccctggtggggcgtgtgcctgcgggagccacccaggtccgtgttccagtccccgctggcccggccacgctgggcgcccctgggtccccagcggccaggggctggggatttaccgacgaggaagtcggagatggcgaggttgagcaggaagaagttgttctgggtgcggaggctcgagtcggccacgaaggcgagcatgaccagcgcgttgcccagcaccgtggccacgatgagcagcgccatgagcgcggccagcaccgcggtccaggctgccgagaagccgcgcgccccgcccgccgccgccgcctcgcccgccagcgcccccgaagcgttcagcggcccgtcgggcggcgcgcgctccatggccccgcaggctcacgcggctccgggacgcggggcagggcgccggccgagagctgggcggccgggaggggccccggcccgggagcctcgtctttgcgggcccttggccgggtcgggttcccctgggggcgcccagcgcatggtccgcggggccggggccggggccagagcaggcggtgccgagggggccggggccggatccgagcccagtggggccggcagcgcggctgctgcagcgggagaggagccggagcctgagccgctgccggtgcgaccgtgcagccggagcgcaacgcgcagccgagtgcgccccgcgcccagcccaccgccccgcgcgccccgcgcagcgcccccgccattggctgccgccctcgccccgccccctccccgcccccgccccgcccggcgccggcagcaccacggacagcgccgcgtgcccgccaggctgcctggagcccagcccctgcgctcacagcagctggctgggagcccggccggggcttgaccgggtctgggggctcgcctgcggtcagtcagcccgcgcactcggagccggggtctgggttgctcggcctttcccgtgccctcggccctggtgacccctgcccggtcatcatggagagccctggcgcctgtggggacccggggtgggggtgggggaaacgcctgcacccgcgctccggggacttgccctgcggggcatttcctcggtgcatgttttgggaatgtgggtctccggggcaaggaacgtctggaggagaagggatggggaggagggggtcttggaaagccggtgcccagaccaggggtccgctccacctcccgtttgcacggaccctgggtgccagcctccgtgtggacagggcccagtgcagggtccagggtgacccgcaaggcgcaggcagatgtggagttacataagggaagatgaggcgccgggcggacccagccggaggggagcgcgtctagcctgggctccggcggcctcaggctgaggagggagcagcaagccgctcggagcccagccacggacccctgtggacagaggggcagtcgccactgcagcggacagacgaggtcactgcgctcagggcgcaggtggtggctgtgttagcgcctgtgggaggggacgggggaggagaggagaggtggcaggagggagcgcccccaccaccagacacatgcgctcagatacaccgggtcaaggacagattcctcctgaaacactgagggcagacagacagacatgcccacactcagatacacagacacccacaggccagggaagcagccaccagcgccaggctgaggacccaccaagagcgagacacacatcagacagcaggcagggagggagccgcgccccaggagaaggaagcagcaactccgctcacaggagaaggaagcagccgaaggcatccctggtgcctcaaagaggccagagtgcgcgtgtctgggggaggggctgcagaggggaccccgggcgctgacatgcaccgtcactcccctacttatagcagcttccccatactgtggggacctgccccttcccctcgccccccgtggcgcttcagaaactttggggaaggaggagctgggattcctctgctgccacctcagggctgactgcagaaaggaacccccagacccgtggccccagtcagcccactatttcacggcttctaggagtctgctcttgggggaggggttcggcttccctctctgactgcttggttgtactcatcccactccacctgcaaaccctactcctcatacaggctcccccacgttccctgcaccccaccccaactcacccagtgtggagggactctgcctggaccagggaaaagttttcaaggggaaaagttccatggagctgggcagcaaggggctgtggggccatcagagctgccacccatgcctgctgcagctcttgactcactgtccccacccaaaccagaactccttgttgagaggactcctccccaggcccttctcctccccaaatacccactgaggctgcaggagatggcattgggtgggggttaagagggggccctggctctctccttcactggctggagcctcagtgtccccatcttggaatggggaatataaattggaatcccaagcagaaccaaggatgaaggggtctggaggcccgcccagccattctccctccccacccctcctcccctgtcatccacagctgcccaggcttccccgtgaactgaccagccccggagagcctgggcagtgctggcctgagccagacgacccagacagagggagctttcc

SEQ ID NO: 1561868 - DNA, 4001 bp, Homo sapiens
gccaagcgagcacacacacccagggacacttaaggagagtgctgaccacagaacacgggacaagcccagctcccgaaagctaggtctgggcagagtccacagctgaaaatgaggggaggctgagccccgcttcaggggcctactaatttcagactggtggtgcctatgggtttgagagtaattgagtgggacagtttgatttacacagaaaggaactccatttcctggctacaagcacatgccaaactctggccccagcctgatccctaaccctgcccatggactgacccctaactcttggcttcatattgacctctagtcatcagcttcaccctgacccctggccctgacttctacccaataggcagggccgattagtcactggggaccaggatagggtgtggcccagcaggaactcacaaccagagactcccatcccagagtatcccctggtcttacaatagcctaggacgaaccctgcccccactcccgctcctttttttgagacagggtcttgctctgttgcctaggctggagtgcagtggcacgatcacggctcactgcagcctcgaccacctggcctcaagcgatcctcccacttcatcctcccaaagtgctgggattacaggcgtgagccaccttgcaggggcccaaccctttgcctgacagaatcctcggaggatctcttcctgtgtggggtgtttcagctgggcgctcatgtccccaggagcactatgggaatgcagtgttctgggtttcagggctccacacgatgcctgtgtagacaaagagcccacccaggtcattccagctcccctcctcactaggaccctgcctcttccgcctgctgctctctgctcagcacccagccagccctgtaatggaacaggactccgtcagcgggctaagtgaggccacaggcgtttcttccaagccacagactgggccaaccagggcccaaagcacagatcagaaacggcacccaaagggctgccccactctgttctggagaggagcccttaagaagatgggaccatgtgtggctgagtgaggtggctgccccatcctgcgctggggcagggagtgacagaaatggcctcccatggcccctccctgtcctcatctttgctttccatacatcctgccgcacccccttgggtcctcatcatgggagcagccagttcacaaacaacagagcccctcccatgctctgcccacagccccccattacccctctggcctgggattcctgcgctgcgtctgctctccggagggtccctagtttcgtgatcactcccttccagtctctctcatcaacacacgctaacctcacagataggctccactgccctagcgggaacctggaccccaccccacctggacctcaagctggcccggaagaccaggtcccagcctcagaccctggcacctgggccactcagtactctgttgcgcttcgggaccacagggcctgggacccctgaggcaccccccaacacacacacatacactcaactcccaggtttccacctcagacctaggcaccgggtccctcagtttggctccctggagcaggccccagcccacaccagtcctgccagcccctaagacacaggagtttctccagcctaagcctctgagcagctgtgcgagggacaggggaggtggtcccccgaagcccaggtgggagaccaaggtcgctgccccaagtgccttcccgagcccgcagccacgctgcagagaggggcttgcagatctgtccccaccagacaaagtctggaggtttttggtggggtctcagccgacagcccgggacggcaaacctcctcgcctttctccactcggggcgcccggcagcccccgccccagaactcacctccgccctcccgacagctccagccccgtccagccgccgcgatcccgggcccgcagctcgttggccgtgcccgctgcggcggccgcagccctcgacgtgcgcccggccctgaggcctcccgcctcctcgcgccgcccaccccgcccgccgccccctcccccaggccggatggccgcgccgcctgcgccgccgggtcggcccgcgctcccggcccagatgtgcgaggccggggcggggcctgcctgcgcgggcctccgccgaggggcccagcctggtcccgcgtccagggcccctccctgagcccctcctgcgcctcccccgctcccctagcagcccagggggtgggagaagggagagggggcggcggagggaggggaagaggagttccagaccctggtcggcctcctgcggtccagctgctgaggggctcccccgccccgcccccacaggcccaccttggggctcagcctcggccccttcagcgagggcccaacagcggagggggaagggcccgccctagacccctccacttccctgccccagacccctccagtcccttgacccggaaccctctctcctcccacccctactgcccctacagcttccctagcccggtcctcagtggccagaaaagaggcagaattgcggatgagggcaggccctcgggtccccaggctaggcctagctctgtctttgctcaagttcagacgacggaggcgcggagtctcacagactgaggccccatgcccggcaaggggaccactccgcaccagggggcacccagcctctcctccgaggcacacagcctttttcttgtcctaaccggggcccttctggggatgctgggacttggcctccagacagggggtttgtggggtgaaggtctctttctgggctgggaacccgtggctcatgcctgtaatccagcgctttgggagtctgaggtgggaggatggcttgaagctggctgggcaacaaagaccagcctgggcaacaaagggagaccctgtctctaaaaagttttaaaaattagccaggtgtagtagctcacgtctgtagtcctaggtactcaggaggctggggtggaggattgcttgagcccaagagtttgaggctgcagtaagtgtgatcacaccaccgcactccagcttgggtgacagagagagaacctgtcataaataaatgaatgaacggatgaatgaatgaatttctgctaggtccctcgtggagctttcaaaggcagctgactcgttctgcctgttccccttcccctctgccccatgtgcccccacagaagttccagatgcttctcagtccacctccctttgtgcctgggaaggctgcccgtcagagaagggccccacagccccatcaaatgaggcacagttcttgggacatcccttttgctcttccactccaaacctttgcaagggctattttccctccctgaaatgctctccttcctcctctctgcccagccaaaatgctccccagctacagtgtcacctccctaggcttgctgcctttcttctcagagccactgccccagagggcctccttaatgaggtcaggcatggtgagtgcgctgcaccaacaattctggataccaagccaacatggtatccaatcagcagtctccacaggccgcctcccagtgtgcgtctatgtgtgtccgtctgtgcatctgttggtgtgtttgtgtctgtgcttaagtgtgtctttgtatgtgtaagactttgcttatatgtctgttcatgtgtgagtgtgtttcttggattgtctgactgtgtctgtgtgtgcgctagtgtgtgactgtgtttctgtattacgtgtgtgtgttgctgcatcttgtgtctttgtgtctgtgtgtaacaggggtccttggttggggcctgcaggcctgcacctcgtttgaggctgagcagagccaggagggattggagtgtgtgtctgctgtgcatgtcctggggtctgcagggtctggcccctcacactcatgcctgccccttttttctttttcccttccacctggtttccctgtccccaactccagctccaaagatgggctcgtctctgagggccacggcagcaggctctgagcaggggtgaagactcatggggggcg

SEQ ID NO: 1561869 - DNA, 4001 bp, Homo sapiens
catgtccaggaagattcttagacccttgccaatgacatatttttcctgctcaggagctgggtaatgagactcgtccactcctcagatcctacgcaggagccccggggttggtgggggagatttgtttgaactgccgacagagccaggccagagtgaggaggccgagtctggacccagagcaggtgtctcggcagctgtgcccagcctggccctgccaacttgctcacccacttggatgagccaggagccccagggctgcctgctggaacccagaggtaggctgttgggggaggcacctccaactggggaatggggtgatagaatcactgcctctcacaagctatggccctaagcaagtccctttccactgggtctcactttatccacatcttggcaaggaagtgggtggtccagcggccaggttctccaacttaaatggcttgctcaatactcccaatacagagggggccctggcaggttcatctgcattttaacaacctccccaggtgatctagatggcccaatgatcactgtgagaaaccccagaggtctggagtatttagttttataacactggggagcagggaaatgggcagggatggtgggggaagaatagactttaaagacaccggaaacactcattcaggccggtaagagcaacaatccagatgtagccctccaattctcctcccagaaccagctgtgaagagggtcaggggtcaacccccagcccaggcccctcccctcaacccaagaagtcactacaactttaccaccatctaaattatttgtttaataacaaaaaaacagccccacagaactattgtaaaacaatattttcagtcggtgatcattgtaatatacaatacaaagcaatttcctcagaaatctgagaagcaccaaacgtgaccattttttaaaatgtctgcttttcaaaaaatagaaacacacgagtggaatcccaccccctaaagtctctggtgactagtaggtgtgcagagaggagcgccctctcctcgccagtgcctcagcctcagccccaggctggatgcagttaagggcgcagtggccgccgatcggtcttgttctccctcagatccggcgaggcgcgttgggggagacccacagagcacgtaattcctcttgccccctggatggctggggtccgccggtccctgggggaggcgcttcagcgacacaagatgcgatcgtccgcaggaacgcatgccgcctgtgaaaacgagaagaaatgagaccggcgggttggaagggacgccgctccgagcgcagcgaacgcccccttccccaggaagcacgacgggggagcgctttttccaggctccttaggcacccccgcatagccaggtacccgcaaggatgggacggaagtggtgcaagcgcccacgccctctctggcctccgtttccccgtcggtataaggatgatctagtggtcggatctggatctcacctcggccgtcagggcgctgatctcgccgttgagggtgctgagcggagcccggaccggcagccctcggcccccgggggttccaacttcggattccgagttcagctccaactgaaggtccctgatgtagtcgatgacgtgctggagaatctccaccttgctcaccttgcggttctggggcagggtgggcaccagctccttgaggcgtgagtaacagccgttcatgtcgtagagcagcacgtttacctgctgctcgtccagcagggcaggcaggcgcgccccggcgcccccggcgcagcgcgagatggccacgctctgctcagacagacagcgcaccacctcgcccgcaccgctcgctgtcttgccggccttcagcgcgcagctggggcccgcggcggcggtggcggtgctgccactggcgactttcatgattcttggcgactggctgaaacagaatgggcaaagcgaaaaaaatgaggtggaagcccgaagcagatacggaaaatggaacagttaagaacgtggaatgagagtgcggagccacagcttgtcttttataaacacgccacggcccccggaggggcgggctcagaacgttcaaaagcagccaatgggcggcatgggggcgtgacccgcgctcctaggtccagcctcctgctcgtctagtgcctgctcgcagtgtggaaagacgacccgggtttcagaacagcaagggtgggtcggtggcagggcaccgggcagggcagcgggtagaggcgagggccgcactgggctcctctggaaggaggcaaggaagctaagcaggcattgccttataatgaaaagacctcaggaatcagtttttcccatattcactttctcacttctccagctccatttcacagatgagagaaattgaggcccgaacggagaagcggctggctctggatagcccagagagcctgggtttccggaccctcttggaagatgcttctcggaccctgatctacaaatatcaggaccgaaatttaaagcgggcgctcctttacatctgctcccctgggctttctcaattcctaaataatgttgctgttcgtgttcctgagacccggagggcctacccagatccctcccgggtgggagcaattaattcgggaaagtctagtaagtttggggctgggtggctgggaagtgaactagatagagcgcagtggagtgaggctgcattcgattccaccttgaatttgcagctccttgcaaaaatttcctgaacctgcaacagttcgtgattttttaatgttttttcccatttttggctgctttttaaattttcttctcaaagacctcagagcagggtctccctcccacggcgcggcagctgcggagctacagtctcccccctcccttcccgggccggtctgtgtcagcgtctgaaccagcggctcagaccgttagacgccaggcctgtgacgtcacccattcataaaacccggacggactgtcaggctggcgccgcgcgggcggtcgccatggagacgacaaactggtctagctagttcccgtgctccccccagcccgtcacctgcagaccccgggcgggaggcctgggaatgcgtttcttgcgggcgcggtcgctgagcaagggtcaccttacctccccgccccacacctgcgagtctcccaacccagacccacagcttgggccgcttggggtttcttcaccgctccccccacctctccgccccagctaccccttccagcgtggggaaaaaggcctgagttctctttccagctctgcagctgagtgaattcaggcgggtcgcatgccctctctgagccctaatatttaatatctgcttggtgtttaaataataatcacaaacgtgaccattattaatttcttactttgtacagcgggcactgtatgaagagtttgtcttgatcatcttttttcatttatttcttattttaaaaaatgaagggctgcgcggtggctcacgcctgtaatcccaacaatttggaaggccgaggcgggtggattgcctgaggtcaggagttcgagaccagcctgaccaatatggtgaaaccccatctctactaaaaatacaaaaattagccgggcatggtagcgttcgcctgtaatcccagctactcgggaggctgagacaggagaattgcttgaacctgggaggcggaggttgcagtgagccgagatcgcaccactgcactcaagcctggcgacagagtgagactcgtctcaaaaaaaaaaaaaaaaaaaaggatacagggggccgggcgcagtggctcacgcctgtaatcccagcactttgggaggccgtggtgggcagatcacgaggtcaggagttcgagaccagcctgaccaacatggtgaaatcccgtctctactaaaaatgaaaaattagccaggtgtggtggcgcgcacctgtaataccccagctactcaggaggctgaggcaggagactcgctggaacccaggaggcggaggttgtagtgagccgagattatgccactgcactccagcctgggcgacaga

SEQ ID NO: 1561870 - DNA, 4001 bp, Homo sapiens
tgagtgagaaggactctaacaggtagcaccaaagaaagaacgttctgggtggagggaacaatataagtcaggtagtacatatttggaatctaacacacaatctagtgtgattgaagcacagaacaagagttgtggaaccaaggcagaaaattaagggccaacttataaagtactgactttcctatggtaaggctgggcctggaaaatcaggctgttctttccaagaagagatatggaagatgaactataggggcagaactagaagccaaaaaaatcaaatgaggagattaaagcgcggaagacaaaagaaaaggggcagctaggcacggtggctcacgcctataatcgcagcagtttgggatgcagaggtgggtggatcacttgaggtcaagagttcgagaccagcctggccaacatggtaaaaccctctctctactaaaaatacaaaaattagcctgggcatggtggctcacacttgtaatcccagcactgtgggaggccaaggcgggcagatcacaaggtcaggagttcgagaccagcctgaccaacatggtgaaaccccatctctactaaaaatacaaaaattagccaggcatggtggcacgctcctgtaataccagccagctactcaggaggctgaggcaggagaatcacttgaacccgggaggcagaggttgcagtgagctgagatggcaacattgcactccagcctgggcgacagagcgagactctgtcttaaaacaaaacaaacacaaaaattagctgggtgtggtggtgcacacctgtagtcgcagctactcaggaggctgaggcaggagaattgcttgaaccagggacggggaggttgcagtgagccgagatcgcgccactgcactccagcctgggcgacagagcaagaagaaacaaagaggaaggaagggaggggaaaaaaaaaaaaagaaaaggggcagctaaaagtggtattccagaaatgcaatgaataagatttgatgacagttgatgtagcctcaggacagactcagaacccctggaacttttctgcatagacagctgacatgatctctcaactcctgggctcccaatgggaaggaacaaatgtccaaataccaatggtggttgccctggagttaatataattgcatagcatgtggggagaagggcttaataaacatttggtcatttgattttaaatggcacatggacaagtggcaagagggcacacataccaatgatggccactttgttctccttcatggaactcagcacctgctccagcttctcctcagatgccatattctgcacctcactcaggtggtgctcctggaactccactgggacagcggcagccttcagagacaggttcccaaaacatcacagtcaaggccaagtcctttccaacacactactgtcctctactgtctgatccccgaggccactcaccttgaacacctccttgacggcgtgcatcagctcaggccccacaccgtctcccggaagcatggtcacgggaaaggagccctccaccctcacgtcctcggcctcaattgggggaagaggggagaagtaaagatagagctggggcgggagcacggatcctgggagtagagaagtagggagacccgggaggggtggggaaaagccaggggagggagcagcgaggaagggacagggtcgtaagagagaccccagccagattcgtgcatacctggctccgcgatgcagcgtgcgccgcggccgaggtactcagacctctccatgccccagggttcccggcggagaccagcgcctgcaacagggacacacaagcctgtaaggtcagctttgagacatccagaccccgaacactacagttgactttgccctgtttaggaaaccctaggacaaactctccgctccttcgcccgcccctgcccgacatgtcccggggcctcactcgggtcagccagcggactccgctcaatgccgccatgtttcccgcaggaagtcgcgtgggaagtgacgcctgaagctggcgcggccccgtaccccgacttccggcctgtactgagttcctggtatttctctctctgcgccaaccagcactgcttgctcacgcctgtttctccttttccttgccggtggggaggtcatgggatgcgcaagcactttgtctcttgctttgttttcagtcgccatatttaatctacgtcgaaacttcaaaataacattagggggaaaaatgtagcgtcatgtttatcagacgaggacctgagcttaacaagcgattgagagaaaatccttgggaagctgttaaaatttgtgtgtcaatgcgtttgttattcttttaaccagtactcactgaatacctgtatgtcaggctctcgaggaatacagtacagacatgggaggtgtgtgtcgggtttctccgccagtctccgagagtgcccaggacctctgtattacccgtcgcctcgtagttttttcttacagggttttgttctttgctctgacagttatttccctaatagtgtgtcccggacttgaactccccaggacaggcccataactagtgtcagaaatgagttcaagcgtgtaagtgtgactaaagggaatttcagactgatccttaaagtaacaatcataaaaactaaaaaaagcctggacaacatagggagacctcgactctacaaaaaatttaaaaattagccaggcgtggtgacacacctgtagtcccagctacttaggaggctgaggtgggaggatcacttaagcccgggaggtggaagccgtagtgagccgtgatggcaccactgcactccagcctgggagacggggcgagacccgtctcaaaacaattacagtcacgatttttttttttttttttttgagacagagtctcgctctgtcgcccaggctggagtgcggtggtgcgatctcggctcactgcaagctccgcctcctgggttcaccccattctcctgcctcagcctcccgagtagcgcccgccatcacacctggctaatttttttttttttttttttttttttttgtatttttagtggagacggggtttcaccgtggtctcgatctcctgacgtcgtgatccgcccgcctcggcctcccaaagtgctgggattacaggcgtgagccaccaagcccggcctccagtcacgattttaggtgtgtacaattgacacacctaaagacaaactggtacaggaagatttgcctcacccgctcttctggaagtatggttttggatcacctatccagatggaccagagctcttgttaaaagtgcaggcttgtgagtcatacttcatttgctgaatccaaatctcagtgatgggggcccagaaaatatatctctaacaggctccccgttaatacacactgaaatttaagaaccactagctaggttctctgtgataagttcctccttcgtatatacctcaaccagccaaaaaggtggcaacgcaaaggcattcccagtgcttctattcttggggaatatgcataggctttgtgcctcctctgcaatcctttaggtgcgacattctcctatatagtagtaggatgagaagattaaactaggtaatgtgtaagagttttgaacaaatgaaaagtactgggtaaatatagagctgttattatagctaatataatattagtataacacactcctctatttccattcatatatcccatgaaaccaaccaaaaccagagagcaccaccgtcttgctcccatagactccctcgtcccagcttccacatcactattaatattcgtcactatttttcttctccaaatatttctccttctgactaagaaaaaaatggaagatttataacctctgcctcccgggttcaagcgattttcctgcctccgcctccctggtagctgggattacaggcacgcgccaccacacccggctaatttttgtatttttattagagacagggtttcaccatgttggccaggctggtcttgagctcctgacctcaggtgatctgccaccct

SEQ ID NO: 1561871 - DNA, 4001 bp, Homo sapiens
ttgtagaagcaaggtctcgctatgttgcccttgaactcctgacctcaagtgatcctcctacctcaacctcccaaagtgctggtttactggcatgagccactgcacccagtcgggtttcataattttctaattgatcattaaacaaacattttcataagtttatttggcttctggtagtttttttggtttggttgaattttgcaggccatatagattttaaattttatagagttaaaagtatgaatcttttccttcctggcttctggatgacatgaaacacttagaagagttttttgtcattctaagattataaataaattcaacaatgctttacttcagtacttcatgatgtaatttttttttttttttgagagagtctgctctgtggcctaagctggagtgcagtggcacgatctcggctcaccacaacctctgcctcccagattcaagagattctcgtgcctcagcctcccaagcggctgggactacaggcgcccaaacacacccggctaattcgtgatgtaattttttaacatttaaattttagtccatttggaaattattgtggtgctcaaaatgggcttcattccttttttttttccttctttttcaaagcatagtcttgctctgtcacccaggctggagtgcagtggtgcaatctcggctcgctgcaacctccgcctcccaagttcaagcaattctcctgcctcagcctccccagtagctgggattacaggcgcgcgccatagtagagacggtgtttcaccaggttggccaggctggtctggaactcctgacctcaagtgatccacccgctttggcctcccaaagtgctgggattacaggtgtgagccacctcgctcgactggtttaattattttctaaattgctaaaaaagctgcctgaccccaattcatctcttcaatgctgatttgaaatacagtaccacctcgcctatataataaatccctatatataaatcgctcttattctgagttctaatatattttatctacctgtaagctcctgctgagtcccaaactttttaaattaatttatttattttcagagacagggtttccttttgatacccatgctggtctctgactcctgggctcaagggatcctgccgcctcagcctaccaagtagccaggactacgggcccacactgctgcacccatcttctatgctagtttaattgctatacctttatgttataatatctggtggttctggagagctaatctcccttattagcattaattttagaattttcctggctactttcacatatttatccttctttaagcactttaacatcattttgtccagttgaaaaactgccccctccatggtcccaccaccgtgatacatctatctttttttgttctgttagttcagcccctggtgagagtagcaggtctgcgttcctgtactgtcagacttagccagaaatgcatttccttaataatagtataaggcctttaaaactataaaaataacaaatatttgggtaacgctgccaaaccattctctcgctttctcttcaataacattaccagtcaaatcagtattttcccacatgaataccgaggggtcgcagccacgacagaagagagattaagactgtacgattcctcgtcccatgctctttcatagtcagcggaacgactaaacacctgcaccacccgaggccgtggagatgggcgcccagccggggcgccaggaacccgggctacgtccgcgcccacagtttacttcaccccgggggaccctggatgttctatgaccggcccagcggcctcgaagagtgcggcgagtccctcgccagctcccaggccgcaccaacgccccagccggcccaccactgttggcgccctttacctgaggcccagcgaccaccgctcacctgacgccgcccagcatcccgcggccaggtatccaaggccgcttagtaaccggagaggcgcgtcggtgcgccgggaggcgtggcccaggacgcagcgctagctccggccgacgtgatgacgacagcacggaaggcgcctctccgtcgcaggcgtcaggggtaggcagcctgactgatgtggggctgtaccatttggtgcatgaggggcaaatccaaacataaggagaattaacttttcaccaaaaataaacccatttaattttgttctttagtatcaattacgagtaaagactaataacaacggtaggacccaagtgcccaaacttcgctccacccacagggaggagaatagtgaaggcttccagcgcgggggggttggagaacgccccagcttcgattcccaaagcgcaggagcagagtggagccaggcgagggcggggccgggcggaaggctgtgctggactattaggaactacttaacggaaaagggtgcgcaggtttagtgttgagaatgataaaccgtataattctgttttattaactccgcatctttgcttgccatggtactaggcttgagcgccggcgagcatggcggggagttagaacttgaatagattctacaaaaatgtgaaaactatgaactgtattagggagtctaacgactaagctggtcaaaaaggcgcccctgttgagcagagatttgaagagagagtggtattcattaaggcaaaggctggggaagggcgttcccggcagaaagaactgcttgtgcaaaagcaccaccaatacaggttgccctgccatcgccattaagatgggaaaccagaagcctgcaactaccaacaggccacccgactacccaggaaagcgctctgtgcctgcctttagaggtgtgtggatttgtgaacaacgctgcagcagcctggaagacccaaactgaagattgcagagagctctgacagtttttatttacatttatgtttgtcttcgaatctaggatattaaaacacatacaactcgtgttgctttccacaatttctgtcactggaaattttaaaagtggagacgggccgggcgcagcggctctctcctgtaatcccagcactttgggaggccgaggcaggtggatctctttagcccaggagtttgaggccagcctaggcaacatggcgaaacccggtatctactaaaaataggaaaaattacctgggcgtggtggcgcgcgcctgtagtcccagctgcttgggagactgaggtgggaggattgattgattgatcctaggaggttgaggctgcagtgagccgtcatggtgccgccgcactctagcctaggcaacacagtgagaccttgtctcaaaaagaaagtggagaacagggtgatttgagaattctctttggtcagatgaagtggcttctgcctgtaatcccagcattttgggaggccaaggtgggaggactgcttgaggccaggagtctgggacctgggtaacagtaacaccttttctctccaataataatagtaataataaataaaaaaagaaaattagccaggcatggtggcacacacctgtagtcttagctacttgggaggctgaggtgggaagatcgctggaacccaggagttcgggctgcagtgagccatgatcgctccactgcaccccagcctgggcaacagagtgagactctgtctcttaaaaaaaaaaagttctcttcttggggatgctgtattttggtgcagaattgggtgaatacagtttgcagttagggtaataatggaaatgaagtattctcactgaagagagagtaggccgtcccatttgaaggctgggacaaatcttgggatctttctgcctgatatgcagtcagtgtttgctacagcacctgcccagagcatttctcccactgttagagattgcagaaagagtaagagttttggccgggtgcagtggcccacgcctgtaatcccagcactttgggaggccaaggcaggtggatcacttgaggtcaagagctcgagaccagcctgaccaacatggtgaaaccccgtctctataaaaaataaaataaaaataaaaatacaaaaaattagcc

SEQ ID NO: 1561872 - DNA, 4001 bp, Homo sapiens
ctccccgccaaggggaggcttccaaccacgagacaaacgcgtacagcttttctcccttgtacagaaagagactgactcctgttgcgccatgggggaggcggagggacacaacgtaaaagtgggggttccaaaaggagtcaaaaggagagtatggggttaccgtcacgccacaccgagagaagcggagacgacactttcacccggtgggggcgggggcgaggctcccccagcgcggactcgggttcggggagtgcagggcgcactctctttgtgggtctccaagcgaaggcacagttcgggggccggggtggagggcgcgctctagcaggccgggcgcacgggcacctgcaggaggatcacctgtctgttttcggatgggtggcacttgttgatgtgccgcgtaaggccgggcgagctgtagaaggtggccgggcagtacttgcaggggaacacctgggcggcgtgcagcaggcgcaggtggcgctcctgagcgcccttgctggcgaacgactctccgcacactgggcacaggtggcactcggcggacgcactcaggcccagcacgccggccccctcgccgtcgccggccgcctcctggggcgccttctcgtcgggcccggggtacaaggccagtaggtcctcggccgggggcgctagcggcgcgcccttggcctgcagcgcctggtggtgcgccagcaggtgcttgcgtaggtaggcctggcggcggaacttcttggcgcagtgatggcactcgtagagcccgtcctcggagcccgactcggacacgccgccggggctcggcgtgtcccggtcgctgccgccgccgggtgcctcccgcgcctcagccctggctgctgcttctggctccggcgcgcgggcggcggcgggcgcgggccgcggtttgtgccagcggcggtgcgaggccaggttggccgggcagctgaagaccttggcgcactcgggacagcggtactccacacgcacgatgcgcgagcatttgtgctgcgccagcgcgaacgggtcggcgtactcctccttgcacagctggcagatgaactcgcccagcggccgcgccgcgccccccgcgcggccccgcggcgcctccaccgggccctccttgatcttgagccccagcacgggcgacgtggtcacctcgtcctcgaagtgcagcttgcggatggccttgggcttcttggcgcccggggccttgactgccttggcgggcggctccgcggcggtagggggcgggggccgctttcccgggggccgcagggcggcggcagggggcagtggggggccggggcccgggccgcgggccgcctcggcgccagccgagaacgccgtgcccatcttgagctcggcgggcgcgaagagcagcgggtcgccgccgcaggtgccgcctccgccagctccgctcgcgccgccgccgccgccccctccgagcagcgcggcgggcgtggggaaggactcggccgagaccggcgagcccaggttgaagctgcgttcgaagtacttgtgcttctcgtgctcgcggctcacgggccgcgtgggactgtagagcggcgcggggtgcgcagcctcggggttgccgaagtgcgcggcccgcgggccctgcgggggtggctgcggcccaggcgcgcaggcaagcgcggcggcgagcgctgcatgggcgcgctccgcgggcggcggcggcggcagcggcccggggaccgggctcggcgccgggggctcggcgcgggcgcccccgcagctgggcgagagcagcagtgcgcggtcgccgtcctcgccgccgcggacccggtaggaaacgggcgtggacttcttgctgcgcttcaccaggaagccgcggggcatgttggcgcggcccgagggcacggcactggctcggtcccccctccgcgctcggccccggcggccctcagtgcccccggcccattgcccgggcgcggcggctgcgggactcgcgtggcgccggcgacggctcggcccagctctgcgccctgcacgcgcgtccctgtccccgggcccggcagccgctcccttttaacggggggagggggccattgttctcgcctcccgcttcccctggagccaatcagcgcgtccgcagctcctcagcctggcagggtgggagggcgatggggcggccaaaagggggccgggactcgggggtcgcccggtaggtgcggcagatgtacctgagggcgcggggcccccgcgcgcgcccctggtcgccccgcccggcgccgccgccccgcccggtccaggcacacgcccggccccgcctcccttcacggtctgctgcttctctatggggaggcgcacgtgcctgggctttgtgtctctcctccggggggcgcggagccgccaaatgggcccgtccatcagcgcgacaatgcacgcccccctcccgcgcggggattacccgcgggtcgctagcaaaatagcaacaaaggagaagaatggccccaaatatgtcaggagggttcaatccgcgagccggagccgagggggaagttgtgcgcgctgattgggtgggggcgggggcgcgccggggcggtgcgggggagatcgttgcggaggcgcagtggctccgcgtggtgtttgggaaataaacaagaatccgagagagcagcagggtccggacggcctccgcccggaccttggacggatgggccgctggacccaagaggccaagcaaaagggttccccggggttccaagtgtggacagggggcccggccttctggcagtggccgagggcgatgtttgtgctcgcagcctccgcgcgcccacggggctagagaaggtttctttcgagtttgagaaggaattggcacggccttctcagtctcccgaaagcgcgggattggagcgcgggcgggctgggctgggttcccagaggaacgtgaatttctgaacttttgggttcttggaggcttgggaatggcatctttggcggggcccgacccaggccgcccggagcttccgcgtggtccaaggctcggttaatccgggtcgagttggccgaagcccgaaacgcgcggtcggcctcgtgcgccccagtgaagttggctttctcctccccgcgcggcctcatgcattttcattccgagcgggcattttgtttgccggttgacatcagatgctaaatcaagggctccaatcaaggcgctgcgaaataaaggggctgcctgtctgggcgcagcccccacggagccgtgcccccttcacctttgtgaaggaaattaacctcctgctattgagctccggtcgcggccaatctggacgcaaaagagacgcgtgctggacggggggagggggggcaatctgtactctgaggcaggctgaggcctccgagaggacaagccgcctcccctgtgccaccaggaagagacaacagcgaagattccccccgcccccacccccacccccacctccgctgccgttccgtttggacccagactgggccgcctgcctccatcctctgtccagcccagccccgaggaaacacaaaaggcagaatcttcgggggacagggcagagaaccccacgagtgcgtagtggccctgatcgtccaacactggggaacaaatagccaagccacataaaatgtcatatgctgtgaggaaaatgtcactttattgaaagagaaggaaacatttttctgcaaagctttgtataccagacagattttgctgagttttacttacgcttaattccactgaaggtatttaattgttttggattttccctctgaaaataccctggcgtagaaattaaacatgtaaaaatagagtccacatgagtcataagttgtgatggggacagttgttaggcttaattaattaaggggttaatcaggttggttaatcaagggaaagatatttgataattttatgtttgtaatattttaactcacacactgaaaagggaagaatgcatatagtgaaatatattttgaaaagtctcaccctagttttaaaaatgctgtggtgagtg

SEQ ID NO: 1561873 - DNA, 4001 bp, Homo sapiens
gtgttagattggtgggtgccccagtctataggatggtggcatcttcaacttccgcatagaaattccctcagtctgtcactgtacttatctacccacgggagaaggtgagagaacccacaaagttaggacatttttagaaatgtctcaaagttaaaacaactttaagctttggggtgtgtacttttctactgttttgtaattgcgtgcaataatcaccttgctttagtctatcctggtagagacaaaatttggtgtaatcaagagtttggaatgtctgaactttgacaagttttttaacctctctgtacctcagtttttgcatctgtaaatgaggctatattaacagtaccatgtcttgtaagattatggttaaattaagtgagttaaattctgtaaagtacttaaaacggtggcacgtagtaaacacaatggaagtgttttattagttttctctttacggtaaagtttttcgcaataaattgtataaagatgtaaaaagtgaattatcaaagacaatgaatataaaggcctttgggaacaatgaataatgcttatttcattttatttatttatttatttattttattttattttattttattttattttttttttgagacggagtctcgctctgtcgcccaggctggagtgcagtggcgcgatctcagctcactacaacctcccgggttcaagcaattctcctgcctcagcctcccgagtaactgggactacaggcgtgcgccaccacgcccagctaatttttgtatttttagtagagacggggtttcaccatgtcggccaggatagtctccaacacctggcctgaggtgatccacccgcctctgcctgctaaagtgctgggatcacaggcgtgagccaccgcgcctggtttgagcagattttaggagccagagaatcccctctgcctcctgggaaaatccctgcttgcttttgcctatgctccaagtttacagttgtcccacccctagactcaaggaaaggcgctaacatagcggcaggaaatgcctagctgggcaattctattcctaagtcagaactcacattatgtctgaccgtccactacgccctctccttgccctgaagttgaaatggataaacagaatcccattgctaaagcgaccttcaacggggaagatccttgggagaaagactttgctacaagtttaaaagccccaggtaaccctggcccaaatcactaccggtgccttcactctgcaccttccccatgaccaagggggcacaaggggggaggggggaacctcaggcgaggctcccggaggaagaggaacactggaagcaagggaaccctgagggtgaggaggggatgcctggctattctccttgggaaattatgtcctgacctttggcattgcttcctaaaggggtagactcccggagttctttctcccaaagacttcagggatatcatcctataaagtctccttgcgtccctccagcctcgagtaacattactcagcctccgaagggcaacgaaagactggtagcacccccaagcaagcacattctccacacttcctctgctcatcccaaacctcgctccttcccacctccccaccaaccccgcacctgacccgtgacagacagaactgaaggagcgcagcccgcagacctggaagccgggtgcagcctccaggcacgtgcccccgctccgcctctgcctaagtcaagtggcccgggcaaaactactgccaaaacagttgctcttaggtggggcaggggacctgcctccctgcatccacccggcactagctcagcacccccgccccacaaaccgtccccgcagccgcgcacggccctctccggcggcgcactcacctgcagctgggcttggctggcgttgcccgcggccgcgtcgggcccgtcggcggctcccgagccgcgcagcacggtgatgtgcagcgtgagcagcagcagccccagcagcagcagcagctcggccgccaggcgcaccatccttttgagacgcgcggctttaggacccggcgcggcggccggcggcggcggcggtgacgccgggggaggaggagtaggagcccgggagcccggcagcgcggctcccgcctcggctcccgccagggctccgcttcccgggcccgcggggctggcgctgggcgcggcggggtgtgcggggccgggggagcaggagctgccggcgccgccgccgccgccgccgccgcaccacggcggagccaccgcgaggccgggggtgtccaagccggctgcggagcaagccccggcgctgcctggcggcggcggcggcggagacggagactgggtcccgggacagcccgggacccgggccgggccggaggccaccctgctggcagggggctgcggggtcggcggcggggcgggcgcagccgagcccccgagcgcacatgggcgccccagatgtggccgcggcgccgcagctggagcgggagcggccgccagagaagcgcggggaggaggaggaggagaaggagaaggaggaggaggaggaggaggaggaggaggaggaggaggaggagtaggagggcttcagctgcggccgggagttacctccacgcttggcgcccccgccctcgccgccccgagccactcacccggcaagccacctccactactctccgcgctcctcggggccgcctgccgcgccgccccgcactcggagtcccggggagggccggttccagatgggggccccgggcacaccgaggttgtcacggtttggcggtagccggggcgccctcggcggcagcgtcagcctgccgggctgtaccaagtgcccgctgccgaggtcgctgtgacgggcgcgggtagagcccttgtgcacactgaggctcggggctgtgggtgggtggggtggtgcctgggctgctttagaaacctttattggcaaactggagctggagttgcagtgatggaaaacggagggggcgccggacaagccatgcgtctgcctgcgacccctgcctgaagcagtcgggggagaggaggagtgccaaagtgtcgttccgaagggtcttgacacttgctgggccgcccgctagccgggcacggctgttcgcggatccgcggcgccccgtagagcctgggaagggaggggagtccgactctctaggcgttcgtctggtcacgggcgcaggtgttggctggaagctgcagagacgcagtgcccgcggctcaggcgctcaggaactcggagtgaatctcagctctagtgggcttgcctctgtggggggctcatcccgggggtgccgcgcccagaggggatttgggggctggcgtcgcgcagctgtcgatcccgggccaccgcctcatgaccgcgctgcagcctcgggctcccgcgtgcggctcatgccttgcagtgggcggttggcgaatggaagggctctgggatccggctgagggcgcggagtccgagcgtcagatgctagagcgaactgtgtcggtccgtggcaccgcgcacttccctccttgaccttgctcgggctcccgccttaccgaagtgactcggagtagcggacgctcagtccggccgggacttttatactgcgcttcccctcctcctacccgttccctcccttcctcctccccagcgccggcccagcccttccctcccagcgagccaagacctagtccacgcgttcgcacacagccgcgtcgcacatttccaagcctttcccgcgtcccggaccccagtgcctccgggatggagcctccgaattctcccttggtgaatgaaattaaataaataatcaactctttcttgacggcacgcctccctttccccctccccaatttcctaccttccttctccgcgtcctagaaagatttaagattcttaattcaactgctttcgagttctcgcaaggcatctcaaccaagtattaaccaaattaaggcaaacccttgcgcctttgcgaaggttcctccggtcaccgcggtactttgcagaatttaaatagcggtagtta

SEQ ID NO: 1561874 - DNA, 4001 bp, Homo sapiens
ccaccttcatttctaaatttttttttttattttttgagacagggtctcactctgtcacccaggctggaatgcagtggcaacggtaacagctcaccgcagcctcgaccccccggaatcaggtgattcccccacctcagcctcctgagtatctgggaccacaggcgcctgccaccacacccggcaaatctttgtattttttgtagagacggggtttcacgatgttgcccaggctgatctccaattcctgggctcacgtaatccgcccacctcggcctcccaaattgctgggattacaggcgtgagccaccacacccatcccattgctttttttttttttttttttttgaggcggagtctcgctctgtcgcccaggctggagtgcagcagcgagatctcggctcactgcagcctccacctcccgggttcaagccattctcctgcctcagcctccctagtagctgggactacaggcgcgcgccaccacgcccaggatttttttttttttttttttgtatttttagtagagacggggtttcaccatgttggtcaggatggtctcgaactcctgacctcatgatctgcccgcctcggcctcccaaagtgctaggattacaggcgtgagccacacacagcacccggcccatttcttaattttaaaaataaatcgtagcttaaataaacctgtaaatacacatagcaagctctcagcagatctgccatgagaacttcacctcaactgataaaccattccttagccgattttgagaatggaaatacactgcctttacatacttcctgaagatcgaattctatcaggaaaagatgcaggagaacccacctaagtgggtggctggctccagggtcttactaattttcaaggcaaaaatcccacaattccccatcccccactccaaaccaagtatactgtagctgtggaagaatggcagaaaatgtaataagattaggatacgaatacaaccaagaaaacaaggttgcgttgttattggggataatgaattcctggccctttacaagttcacctggttacatgtccaactaactttaggcccagcgtctacttcgggcgcacaaattctgcgattctcttttctgtcgcggacgggaactgtcttggaaaacttgagttctccacttaaaagtcatgtcatcatgcttcgacccttagaatacgttcaacggctacttttttcttttctctgctaaagaaaagggcactctccggaggaagggcagtgacagctccacgtctgcaaaagtcggcgccgccacgacggtggcggacgtcggggagggcgccggagccgggaccaccacgccggggggacaatggaaggaggaggcgagtgggagagagaaggggaggcagccgctgtgctgggcccttctagcgactgggggctcggaaaagtctcgagaaggccagctgggtggcgggggacccggccgccgcccctcacagggccacgtcgcccgcgccggccccgccgccgggccccgcgcgtaggccgaaccgctggagagtggccccaggcggggctgaggggcgaggggccggacggtacccacgcccgtcgtggcccagccctttcacaacttggagcccgcgaggcgaaggcctccggaagcctgtgccagacactgatccctccgaacgtccagacagcccacccccaccgcccggcccgggccagtagcccgagctccccgcgcccccgacagacaccggctctggaagaaggagcagccgcggctctggggtcccgaaccgcgcgtcccactcctctacccttgttctccccgaacattctcatccggactccctccctctcccgagaactgccccgagttcgcccacgggggtttaccgggactcggggcggcggcgactcctcagtccctagactaagatggcagccggtcccgagccccgaccacagctactagagcgagttagcagctaaagcgcaggcgcctgagcgcggaagtggtctagactacaagccccagcaggccttgcgcgccagccgtccggcccgcccctggcttgaagagctggctgcggtggtaaatcagttaaatcccagttttcctcagctccaggtgagatgggcgcgagcggctcccagcacctccaggcttttttttttttttaacaccccgcccaccagagcctataaggactgtgattctcaaactatggtgtgcatcagaatcacctagagagcttattaaaacttacactgctgacccccacccccagagtttctgatcagaagatctggcataggaggatagggtctgataatttgcatgtccaacaagctgtctagtgatactgctagtgagtgaaatcataatttgagaaccaatgggctatatagcttagtttataacttagttgttcttttttctttttcttttccttttctttttttttcttctttttgagataaggtctcacccttcacccaggctggagtgcagtggtgcagtcatagctcactacagcctcacactcctgggctcaagcgagcctcccacctgggcttcctgagtagctgggacagcagttgagcaccaccacacccgactaattttgttctattctttgtagagatggggatggggtggagtgcggatgggatggggcgggaatagggccacggtgtcgccatgttgcccaggctggtctccagctcctgggctcaagcgatactccctcctcgggcctcccaatcgctgagattacagatgtgagccactgcacctggcctggcttagcctttaacaatgtacattaaagggcgtggttaaaaagaaaataaaagaaaaaaaatgtacacttgagagttacactgaccggattcaaatcctcccttttctaccttttaactgggtgcccttagggatgatgacaacagcttagtggagccaacgtggcctgtccggtattctaagagctgataccaagctccctttattctcacaacaaacctattacagaaataccattattatccccattttacaaatatataaactaagtcacatacttgataagaacccaggcagtctggcgtgaaagtccgttgtcttaaccttcttcatggattgcttgtgagaaataataggctatgcaggcagagactcagaggtatgactaagtgctcaatacttagtgacctttgctattactgtttagcctgtttcctcctaatgaaaatagtattttgccatctggaaagtcacatttttcaaagtgactttttttttttttttttttttgagacagagtcttgctctgtcacccaacctggagtgcagcggtgcaatcatagctcactgcagccaacctcctgggctcaagtgatcctctcacctcagcttcctgagtagctgggactccaggctcaagccaccacactatcctaattgtttttatttttgtagagacgtggactccctgtgttgcccaggctgttctcagactcctaggcttggctagggtcagtggcttacacctgtaatcccaggagttagggaggccaaggcaggcaaatcacttgaggtcaggagtttgagaccagtctggccaacatggtgaaaccccgtctctttttttttttttttttttttttgagacagagtattgctctgtcgcccaggctggagtgcagtggcgcaatcttggctcactgcaacctccgctcgcctcctgggttcaagtgattctcctgtctcagcctcctaagtagctgggactacaagcgcatgccatcacgcctggctaatttttgtatttttagtagagttgggtgagccaccacgcctagccttgtgaaaccccttccctactaaaaacacaaaaattagccaggtgtggtggcgggtgcctgtaatcccagctacttgggaggctgaagcacgataattgattgaacccaggagggggaggttgcagtgacccaagatcacgccat

SEQ ID NO: 1561875 - DNA, 4001 bp, Homo sapiens
aatcccgtttctactaaaaatacaaaaattaaccaggcgtggtgatacatgcctgcaatcccagatactcgggaggctgaggcaggagaattgcttgaacccaggaggcggaggttgcagtcagcagagatcgcaccactgcactccagcctgggcgacagagtgagactctgtctcaaagaaaaaaaaaaaaagactacctgttctaggccaagtgttcaagtccatgttctccaaggagtctcccttggctactctagtgccttcttcttcttcttcttctttttttttttttatttgagacagagtctcactctgtcactcaactcttacccaggctggagtacagtggcgtcatctcagctcactgtaacctccgcttcctaggttcaagcgattctcctgtctcagcctcccgagtagctgggactacaggcacgtgtcaccatgcccagttaatttttgtatttttagtagagatgaagtttcatgatgttggccaggctggtcttgaactcctgacctcagatgttctgcccacctcagcctcccaaagtgctgggattacaggcgtgaggcactgcactcgggttccagctccttctttaagtgagggcaatattctcagccagaggtttggggtctcatgcccactgtcctgcatgggctctgttcagggtggactgcctgactggtctggcctcaggatcccaaaccttttttcggcaaaaggctctggttcctgagaaggccactcagtcctggcaccaaagtgacatcagtccctccctacactacaggcaaatgtaggtgtccctagtgattacaccccactggtctgcctcagacatatccagtgggtgtcatcctgatcccccacacatgacccccactccatggctatggctgattgaacaggggcaaactcttgattcaagcaaagccagtcggagctgatatctggtagaagcctcattgttccatcccccagcagggaagaaaggggaaagatatgaacaggaatagggatcagcatccagagagaacaaggacaagtcagcttcttgagagaacttcaggtcctgtgggacacgataacactatattcccacaggagtcatctggtggcttacatgagctccctgtgtgtttctgttacttgctagccacaaagtccctgcaaacagaaactttagatccactgcctcctttactcctcctctctatagcgctgtgaagcaaatgtcctgcatcatccccatttcacacacgcgaaaagaggttagaacatttcaggacggtggtgaggcacggactgctcagtgtggaactccgtcccacgccctctctgggtcctgctagccctggcccagcagcgggatgtggataagtcccagaagagtgtcgggacactgggttggggtctacttcaataggtgaccttcggggcggttgttaagagccccgctactcctccgggtcccgcagtcgctgaccacacaagccctgtgtcgggatctgtcgagaccctcgttccctcgccaaccccggggcgccccgattctgcagccactcccttcttgcgccccagcttttccacacagccgggtcaggacccattcttccgggctgaattctgttctctctccatgcctcctcccacgtgcttccctcctcccggaagccccttctccgccctattcccagccgcctcccagttagcccccaacaccctcccggcacctcctccagcttcttggcgttccccgttacaaacacgatcttcttccccaccaatgaggccgccatggtgatccccggttacccagctgagccaccgaaaactccttggcgtccagtgacagaaaacttccggctggtggcggaagtgaacggctcagtttccggccaggggtcccggggaaagccgacccggaccccaaggcgcgtatcgggcgagtgggctcgcggtggcggcctagcccacagcgtccgatttgctgggggcctcccgagcctggagactgagtgacccacccctcctgcctaagggacgctatcttcaagaaccggaagagaccactcccacccccaccccgcccctgctttcgctcttctctgcaatggggtctccgaaaggagaagactgcagccctgtgaccctggaggtttgcgctctcctatgctgtctcaaaaaactgcctccttctaggcaagggcttccaaaccctcatcctgatctcaccttcagccttacccgccagctatgatccactcgactgtgaacttaaactcggcatagcctaaaacaagcccaaacttctcacccgttttcactcctaggcttgagagctcagtatgtagagttcctcacttcctcatccctccagcctctcaaatctatcaccccttctccgtggccaccgtttcagccagatctttgcattccaaacacaacagaaagtaggaagtgccctctcaaaggtgggtctgctgaacctctgctgatactctctttgcagcaagtcatctgacctccctcctccagagactcagccctctgccccccgcctggacccctgtgtcagtacctcttgaatggccacttctgcccatggacaagaaagggagggagtctgagttcttaccaagctcctcaggccattctgatgctcatcaaagtgtgggaaagcccggtggctcacgcctgtaatcccagcactttgggaggctgaggcgagtggatcacccgaggtcaggagtttgaaaccagcctgaccaacatggagaaaccccatctctaccaaaaagtacaaaattagctgggcatggtggtgcatgcctgtaatcccagttcagagaattcaggattcaggagaatcgcctgaattcgggaggtgggggttgcagtgagcggagatcgtgccatcggactccagcctgggcaacaagagcaaaactgcgtctgaaaaagaaaaaaaatgtgtgggaaccactgctttgggtggtgacctgttttcttttattgaagtagaaacactaaccattatgcagagtccctagaggagtggccatggggatttgggggcagaggagggcttgggggacatcagttaccccgaggagcctgaaaagaagaaaaacagcccaccttacatggatgcctttcttggatcttagccagctcaagccccagctcaggaaaaccttccctgagctccctttcatctgcttgcatagcactgacctctgcactgcaaatagatattcatttgtgtgattctgttttctcttctaaaaatcctaatggtaaaaaccatatctgtttttgctcacctctctttttcttttttttttttttttttgagacggagtcttgctctagtcacctggcctggagtgcaatggcatgatcttggctcactgcaacctctgtctcctgggttgaagcgattctcctgcctcagcctcctgagtagctgggactacaagcaccccccacgacgcccagctaatttctgcatttttagtagagacggggtttcaccatgttggccaggctggtctcgaactcctgacgtcgtgatatgcccacctcggcctccctaagtgctgggattacaggcatcagccactgtgttttgttgttgttgttgttgttgttttgagatggagtcttgctcttgtcgcccaggcttgagtgcagtggcacgatctcggctcacttcaacctccgactcccgggttcaagggattctcctgcctcagcctcctgagtagctgggattacagacatgcaccaccacacccagtgaatttttgtacttttagtagaggtggggtttcaccatattgaccaggctggtctcaaactcctgacctcaggagatccctccacctcagcctcccaaagtgctgagattacaggcttgagccacggtgcccagcctcacctctcattcttaaatcccagctcctggtacatagtaggtgttctgtaa

SEQ ID NO: 1561876 - DNA, 4001 bp, Homo sapiens
aacaaaacaaaaacacagctgggctaggtggttcatgcctgtaattctagcactttgaaaggccgaaatgggtggagggtggatcacttgaggtcaggggttagagaccagtctggccaacatgacgaaatcccgtttctactaaaaatacaaaaattaaccaggcgtggtgatacatgcctgcaatcccagatactcgggaggctgaggcaggagaattgcttgaacccaggaggcggaggttgcagtcagcagagatcgcaccactgcactccagcctgggcgacagagtgagactctgtctcaaagaaaaaaaaaaaaagactacctgttctaggccaagtgttcaagtccatgttctccaaggagtctcccttggctactctagtgccttcttcttcttcttcttctttttttttttttatttgagacagagtctcactctgtcactcaactcttacccaggctggagtacagtggcgtcatctcagctcactgtaacctccgcttcctaggttcaagcgattctcctgtctcagcctcccgagtagctgggactacaggcacgtgtcaccatgcccagttaatttttgtatttttagtagagatgaagtttcatgatgttggccaggctggtcttgaactcctgacctcagatgttctgcccacctcagcctcccaaagtgctgggattacaggcgtgaggcactgcactcgggttccagctccttctttaagtgagggcaatattctcagccagaggtttggggtctcatgcccactgtcctgcatgggctctgttcagggtggactgcctgactggtctggcctcaggatcccaaaccttttttcggcaaaaggctctggttcctgagaaggccactcagtcctggcaccaaagtgacatcagtccctccctacactacaggcaaatgtaggtgtccctagtgattacaccccactggtctgcctcagacatatccagtgggtgtcatcctgatcccccacacatgacccccactccatggctatggctgattgaacaggggcaaactcttgattcaagcaaagccagtcggagctgatatctggtagaagcctcattgttccatcccccagcagggaagaaaggggaaagatatgaacaggaatagggatcagcatccagagagaacaaggacaagtcagcttcttgagagaacttcaggtcctgtgggacacgataacactatattcccacaggagtcatctggtggcttacatgagctccctgtgtgtttctgttacttgctagccacaaagtccctgcaaacagaaactttagatccactgcctcctttactcctcctctctatagcgctgtgaagcaaatgtcctgcatcatccccatttcacacacgcgaaaagaggttagaacatttcaggacggtggtgaggcacggactgctcagtgtggaactccgtcccacgccctctctgggtcctgctagccctggcccagcagcgggatgtggataagtcccagaagagtgtcgggacactgggttggggtctacttcaataggtgaccttcggggcggttgttaagagccccgctactcctccgggtcccgcagtcgctgaccacacaagccctgtgtcgggatctgtcgagaccctcgttccctcgccaaccccggggcgccccgattctgcagccactcccttcttgcgccccagcttttccacacagccgggtcaggacccattcttccgggctgaattctgttctctctccatgcctcctcccacgtgcttccctcctcccggaagccccttctccgccctattcccagccgcctcccagttagcccccaacaccctcccggcacctcctccagcttcttggcgttccccgttacaaacacgatcttcttccccaccaatgaggccgccatggtgatccccggttacccagctgagccaccgaaaactccttggcgtccagtgacagaaaacttccggctggtggcggaagtgaacggctcagtttccggccaggggtcccggggaaagccgacccggaccccaaggcgcgtatcgggcgagtgggctcgcggtggcggcctagcccacagcgtccgatttgctgggggcctcccgagcctggagactgagtgacccacccctcctgcctaagggacgctatcttcaagaaccggaagagaccactcccacccccaccccgcccctgctttcgctcttctctgcaatggggtctccgaaaggagaagactgcagccctgtgaccctggaggtttgcgctctcctatgctgtctcaaaaaactgcctccttctaggcaagggcttccaaaccctcatcctgatctcaccttcagccttacccgccagctatgatccactcgactgtgaacttaaactcggcatagcctaaaacaagcccaaacttctcacccgttttcactcctaggcttgagagctcagtatgtagagttcctcacttcctcatccctccagcctctcaaatctatcaccccttctccgtggccaccgtttcagccagatctttgcattccaaacacaacagaaagtaggaagtgccctctcaaaggtgggtctgctgaacctctgctgatactctctttgcagcaagtcatctgacctccctcctccagagactcagccctctgccccccgcctggacccctgtgtcagtacctcttgaatggccacttctgcccatggacaagaaagggagggagtctgagttcttaccaagctcctcaggccattctgatgctcatcaaagtgtgggaaagcccggtggctcacgcctgtaatcccagcactttgggaggctgaggcgagtggatcacccgaggtcaggagtttgaaaccagcctgaccaacatggagaaaccccatctctaccaaaaagtacaaaattagctgggcatggtggtgcatgcctgtaatcccagttcagagaattcaggattcaggagaatcgcctgaattcgggaggtgggggttgcagtgagcggagatcgtgccatcggactccagcctgggcaacaagagcaaaactgcgtctgaaaaagaaaaaaaatgtgtgggaaccactgctttgggtggtgacctgttttcttttattgaagtagaaacactaaccattatgcagagtccctagaggagtggccatggggatttgggggcagaggagggcttgggggacatcagttaccccgaggagcctgaaaagaagaaaaacagcccaccttacatggatgcctttcttggatcttagccagctcaagccccagctcaggaaaaccttccctgagctccctttcatctgcttgcatagcactgacctctgcactgcaaatagatattcatttgtgtgattctgttttctcttctaaaaatcctaatggtaaaaaccatatctgtttttgctcacctctctttttcttttttttttttttttttgagacggagtcttgctctagtcacctggcctggagtgcaatggcatgatcttggctcactgcaacctctgtctcctgggttgaagcgattctcctgcctcagcctcctgagtagctgggactacaagcaccccccacgacgcccagctaatttctgcatttttagtagagacggggtttcaccatgttggccaggctggtctcgaactcctgacgtcgtgatatgcccacctcggcctccctaagtgctgggattacaggcatcagccactgtgttttgttgttgttgttgttgttgttttgagatggagtcttgctcttgtcgcccaggcttgagtgcagtggcacgatctcggctcacttcaacctccgactcccgggttcaagggattctcctgcctcagcctcctgagtagctgggattacagacatgcaccaccacacccagtgaatttttgtacttttagtagaggtggggtttcaccatattgaccaggctggtctcaaac

SEQ ID NO: 1561877 - DNA, 4001 bp, Homo sapiens
cgggggcaggaaggggccagcagcgggcgggggttcccaggtctacagctcctgtgagggccccaagaacctcctcctgcggcggccgcccccggcccttaagccgaacctggagagcgcccccgcacacactaaaatctcccggggagcagcgggaaacggactcccccacaccctccaggaaggacacacccgccctcccggccgttcacgggaaaggggaggttgccaatttggacggcgttcgcaggccagaactgcgccgagtcgccttccacggcgcaccaggtttaattagttaagcaaagagatcagctacaacgatctcttggcttggggccgggagagttactctgggaacttcaagttgcaagtttacaccggccttcctaggagcctggtcccataaaccctctgggatccccacttttgtgcactaagcaaatagcagcaggaatgggacccacctcgactaccccagccgagatctaactatagtgtcccggctccctcacccgccacccctagagatttccccagttagcgcctagtttcaagccaaagccctttaaatccctctcgcaagggataacagggctcggccaggcgcgggtgtgaggctccgcccggcctccttcccgagtagtcactcaccggccaggcgaaactgaaaggcagcacgatgcggttgcggtcgttgccgcggctggccttgaggttgaaggtgttgcccccgatgacaggcgtggaccctgagccgaagctgcagggccccccggccgtgacgcgggactgatactccttgaggcacactttgaagtatgtgtcacactcgtcgcgggtgcacttgcggtctcccgggttccgggcgccgccgcagcagttcccgttctgcagctccccgttcacgttctgcatggacaggatctccaactcgaactgacccgaggccccacacacctgccggcgagggaaggaggtaggtcagcgcgggagaaagctgttttcttcgagtatagaggtggcgactccctcccactccccgccccgacgagccctcctcgccgagtgaaaataattttgcgaaactacgttcaaggactcaacatgattccggggcaaaaaaaaaaaaaaatgcacgagtgcggaagaaatccgacgacttcccggggggcaacagcggagcgaacgcgcccctgtccggcctggaggggtcaccctcaggaggcaggggctcccgtgggggagttggcgcgctcagcccaggtgcagccgctcgggcgcaggggcgaggagtcgggcgctcgagggctgccgagcctgctcgcggggctcaaccgcccagggcgccgcgaggggagggagaggacggctgggagggaggcccggagaagggctcctaccttggctcgcagggcacagagcagggcgagcaggaggcttagggggcgcccggaccggccgcgcgtccgtggggaacgcatcgctgcgccgcgcgccgcgggcactcgggacgccgccgctgctgttcgcgctggtgctgccgccggtgctgccgtcgccgctgcccctgcggccgccgcgtcccggctctaatatactccgccgattggagcatgcacgactggaaaacaacaccacttttcaaaagccctttcaagagcggcccgttccagaaggcaaagagcccggcctccttttattattctgatcgcttctttgagacgctccccctcctcttccacctcccggctttctttccttctctcgcgctccccttcttttattattatgattatgcgcagccttttattcccttttagatcagctgcatggaaaaaggggggagggaggggagaaaaaaaaaaaccagcctagctcgcgggccggccgcaggtaacacaatgacgcgtgcccgcccggctctcggagaaggacccggagagcccgtctggcagcagcggccggggctggccacctctacccagcacgccgggcagggcgcatgcgcgcttattaatattcatgagagggcgtgctcaccctgggcacgcccctccccttcacgttgctggggagggggtagtgcgaggaggaacttggaaggggttgggggcagcgggatgctcagggcggcgtagaagaaccagggccccacaccaacccccgccctcgggagcttcgggccaggagggaagggagagtgcggggaggtacttggaagggatcgttgctcagggacgcctggaggcccccagcggggaccgccccctcgggcgccccgggccgtgcgcctttgcccgcgcgtcggggccccaggtgtaggcgccgcggcgctgactgagcggtcggagcggggcagcttccgccttccgaaccgcctgcgtcagctgcggctttcgccccgggaggagggcctgcctgcccgccgggagttcggcccgcttcccgcgagcgagccgcccagagcgctctgctggcggcagaggcggcggcgaggctggcgcgcttgccgccgtctgctcgccccgcggaggcgacctgggcagacgctgctgggaactttgaaaaactttcctggagccaggcttgccgcagattcgaggggaagcctcggccgcgtcccaccccctcccaaatccgagtctgcggagcctgggagggctcccagcttcctatccaaaccgcgccggggcagaggcgcggggaaaccgggggtagaaggcggcgggcacgccggggccctgttcaggctttgggaagggccggcggagatgctggtgggcttggacgccctccccggcccgacgccccggccgcagtgccgggattgcacctgtaggcggcctccgagcagctctctgggtggcaagagatgggcctgggagggaccgtgtccccagcaccgccagccgcggaacttgccttctctggggtggcagtggaaaccgatactgttttccaccttgaggcaagcctcgcaattaacagctacactcctggtcataatcaaggtcgaagaaagcccgtgggctggccgtagcctctgctaacccctctcccacgggcttgctgttgcatttgaggggacctttatatggaaacatcgacttcctttgaagggtggacaaagttttggccctaatagtaggtatgtcctgcagaaaagcgtgactattcagcggccggtttggggcttgagttctcctgggtgtggggcgtgatgggctggcaataggtcaagggaaaatagtttccaacatgctgagttatgagcataaaagggtgggtatttgtggttatctacttattgcatttgatgggaggctcagtatgaacaatattttcagtgccaaatctcatcattctgaggaataaactagggcagctaactgacctctttacataggttcaaagctaccaaggatggttaggagtcttggcattttaacagcctaagaaatgctcctaagaaaagtgcttacttagtggtaatgtgtcccatcttgagcactggcgggagaatccatgttttggaagggaggtttctaagaacagagcaagtttacagctggtcatgttagcagctggggtaggcagcgacaacctgggtgtttcaatgtgccccagcctccctttccccaattatcctaaatcaaggcaaccagttgtcaactgtaatcccatctacacttttctcactgaggtttccatcaacaccagtctccccacttatctgtcccgttctaatttctactcccaagtatccctgagtttgggtgctaaataacggtttaaaagtaaaatgggccgcgagctgtgggtcacgcctgcaatcccagcactctgggaggccgaggcgggtggatcacgaggtcaagagattgagaccatcctggtcaacatggtgaaacccggtctctactacaaatacaaaaattagctgggcgtggtggcacatacctgtagtcccagctactcgggaggctgagagaggagaa

SEQ ID NO: 1561878 - DNA, 4001 bp, Homo sapiens
gagccgagatcatgccacaacactccagcctgggcaacagaacgagaacttgtcttggaaaaaaaaaaaaagaatccatggatggatcatagatggatggatggatggatggatggatggatggatggaaagatggatgggtggatgggcaggtagatgtatgaatggctggatgggtagatgaatggttgggtggaagcatgaatgcgtgggtgggtagatggatggatgggcaggcaggtgggtggatggatgaatggatggatggacgggtgggtggattggtgtgtggatagatgatgagtggatagttggatgggtggatggatggatgggtgggtggatgaatactcctcatgatctattgcttgaaaataattttcatggcaaagttaagactagaccctaattctgctagagtatattccatggctgtttatgttggggcataccgaacatgctaatggtagtagttatattttattgtgtgttgagtgtgcacttacatggcaggctttgtactaagcactgccactaatcctctcaataacccctttattagctccatctttactacaagaaaatggaagctcagaaaggtagagcagcttgcccaaaaccacacagcaaatcacttcctagcccatctgattctgtgccaattgccggtcgcctttcccaccctccaccagggtttctcaccctccctggctccaccccacctctgcgggcccccagctggcctcacctccatcagcataggtctcggtgccatagccgtcttgcaggccattgttccaggtgccctcatacttggcaccgctgcttgagctctgccggattccgtagcgtcccttgaagccatgtgtccactcgcccttgtagagccagcgccccttggtctctatgcccagcccatgccgtttgccctggctccagtatccctcaaaggtgtttccgctgggccaggtgtagacacctgccacctcaaagccaaagttccaggagccagagtattcgccctggcccttggggcctgtgcacagtccatgcccatgggcctttcccccctcccagcccccgcagtacgcccctccatcatcaaagtcgaagcggcccccactcatctcatcatagcccctgacaacctccccgtcctccagcgtgggtgcagagggcgtgggtgatgcctgcaacactcctccagtgccctcgggggcaggcccccagactcaccactgcaccccaggaggggggaagcaggatgccagcagaggctgaaagagccccggcgccaagtcagcaccgggtcggctagtcagtgccatgcccgggagccccgactccaccagccagagcaaggctgcctgctggaaagaaagcaggaaggaaaggttcaaagtccccacaaagcgtcccaagtctgccttccaagaagtccaagggaaaacggtgtgatctctttaagaagcccagtgaaagggtggggtggaggggtccccagccttttcaaagaggggaaattcccctcggtggcagcccccgccggaggctgaattcccgcagcccgctggcccccttctccaccccagtgggtgtgcggggctgtcggtctccccgccgctgccccgcccccttctccaatcctgccctccttctgggacggaaaggtcagtgttgccctaacaaggccattggatctcagaagctgctcccaaaataacccccagccagcccagccttcttcaaagcgggaaggaggggtatttcaaatcgcgcccgtgccgcagacccgggcagtggctggaggcatgaggaaggaggctgagaactgagtgcaggcagcccagggaacctggtgtcttttcctcccgggaatgagagctcccttccattctcagagtcccctgggtctgcgcgcagggagggcaccggggaatcggggaagggaggggagagggagaccagcagaacacccagtcctggaacactgaaaatcccccagagcgaggaggttggcagatctcagccccatcaccactcacatgccctaaggggacctggggttacagcaccactgccagccccatcaaggaatccagtgacctaaagagaaaggaatggagacagtttcacatgtgcttccgaaagcagaggagggaagtcagaaagagaggggaggctgtggaaacagggtctggaagatacacagaatctcagtccagtgctcactcaccaccctgagctccctccacccctggaagccggggagaacttggtgcaagaagcaaccatctattccctttctctttctcctgaagggcaaagagaagggagaggagcctgccctcctctctgcctgagacacagactgggcgtcccgctagcttcctctccccaccccttgatgcctcggcgccctccctgccccctgccgcagacccagcagaccctgaaggtcaaaggagtccccttcctgtcaacacagggttgtgttgtaatgaggtcctctcagaaattctcaagggtcatgattttttaaaatttccctttctgagctgtcttttgctctagtgtcctaggagcctgtgaggccagacttcagaaagctcttggggcagggccaggagagaagggcctgggtggattcccagccactcaggttcccaccaaactccagtaaaaagaacaaataaatctccatggcaagaagctgtggccagagctaatgattgtaaatcccagctaagcccaaggttaatgggagtatagaggaattctgggaaaggtaagagccaccaagactaggaagatctgtgtgtgtgtgtgtctgtgcgtgtgtgtgaacgtgtgtctgtgagagtgtgagagagtgtgtgtgagtgtatgtgagtgtgtgtggtaagagtgtgtgtgtttgtgtgtgtgtggtaagtgtgtgtttgtgtgagtgtgtgtggtaagagtgtgtgtgtttgtatgtgtgtgtggtaagagtgtgtgtgtttccatgtgtgagtgtgtgtgtgtgagtgtgtgtgtgaagatggggacagaagagaaagagagaactaagcacagaaggtactagagaacattagacaattatctgactttgaacttatctgacatatttccaaaccccatgataacttaggccacgtgaagtcactgcggaagtcttgttcctgtttggggagtgggtaaaaagtgttccctgctttccttccagtgggttacctgttcttaggacttggttccatccttggtcacagccgctgaccttcaagagccccttctatatctgcgtttcaccaccaggtagaggcacccagcctcttgggctcactgtcaccgtctgtttgccaagctgacagggagcacgtagtggataaaaactgtttcctctgggtggttaggtgtgagccctggccaggctgactgacagcctgcttgcacaattcacttctaagaacatctcagggctactcccagggagttctgctttcgccacttctcactaggtctttggagaatcacaaacttctttctagctctgctgtcaagggaagagcatctcaaactggaagctaggggagtttgagctgcagattcaataccgtaatcatatgtttatgccaggcagccattgctacatcttagcagggtgttctacctatgggaatttaaccactgttcatccatagcagctccctagggtagctgtctacccagggttactacacataagaatcacttacagacttaaaaacataaagagatccgagagccccacccgagacctacagaattagattgtcctgggagaagacttgggcagtcgaattcttttaaaagctcctcagatgaatctgattttcatctctggttaaaaacactgtaagtgcttgttatagtggctcacacctgtaatcccagcactttgggaggccaaggctggaggattgcttgagcccaggtgtttgagaccagcctggaca

SEQ ID NO: 1561879 - DNA, 4001 bp, Homo sapiens
agtctcccttcagactgggacctgcaggtgggccttcagtgagaactgagccggagaccccacaatgaaaggctgggctggacaggagtcagccctagctagtaagatatggctggatatttaggcttcctcctctcctctttcttttaccacaaatctacttacctgacccctttttttaggccccacactcagttacattctccccatgtttcccaagttggtcttgctggatttcaacatcaacatctctcttttctgggttctccgtgaacctcacagaacctcttttatagccttgcacacactgttttgtcatttgctcccagcacccagcacttcgggcacatgaagacaggccccatctttcccaggcaaccccaaatcccagcctgacgtagagaagttgctgatcaaccagtgccctcctgccctgccttggctcccaccccaagccttcctcagtcccctacagcccctgccattacccagcagcaccaaagactctctggcccactctttgtgttcaaactcattcctgcctcctcctcctcctcctcctttatttttcacattgcctcatttttctctcctattttgaaatttacatcttgttccaagagctgaaacatctttacaagctgcaccaaaccattctggaaataaactcaccaaataaataagtaaccagggggtgacccctcacccgcaagcatccacaaccaactgcatgtgtcgtgtgggtccacacccacccctcggggtcccttcttacttatgtttaaactatctgacagtatctcaatgtcctgtaagcatgtctgtaagctgcttttttcccttgctggggcagagtgaggttataaatatggagatattaaaatcacagggtgatccaatccagcctaggtctgggacttcacagggaagcaaaccctactccaccccagcaagccactgttgtctctctgtgctctctctcttattcgtcagtgtccatcttcttgctgtggctttttatgggtccctgtgaaacctctccaaccaagtaggggtataacgtcttggataataaaaagatggagtgaccagtgccacatgggaaaagtctgagggggttggtcctcacctctggggactcagtcctagcccctccccattactaatcttcatcgttgggaacaaagccagagtcctccagcagtggtcctcaatatggggatgcaagcagatccccccagaccagcagcccccagatcccagactcaccttggcagccacagaggaattgggcttctccagtaggtcccagagttttttcctcttctctgcgcagcacgtgttatcgaactcctcgccttcccgctcccgtagggtctcggcctcacgcttgagctcctcgttcatctgctctttcttctggtggtagcgggcctggcagcaggactccaggtagatctcgtcgatgccccagtagtcgagctcttggctgaagctgagcgcgcacatctcctccatcatgtgcagtcgcccagtgcggtagaagttgaggatggaggtgaaggcgcccgggtggcggtcaaagaagtactcgttgtcgtcgaggctgtagtcatcgcacacctcgagcagcgagtcgtgcgtgttgcagtcgcggagcttgcccagccgcgtgcggggcaggcggtccagggtacgccagagtacctcgtgcgccagccccccgacgttgaggcggacccgccgagagcacgccttgctgcgcacgatctccatgggctcgggcggcagcgagctggtggagcgggagccatgcttcgtcatgcccgccggcatcgctgatccggccgcccccgccccccctgcccccccaggccgctgtcactcgacggcaaggcccgctgctgcgggggaggggggcagggagcgctgtgggctgctgggggtgcagggggccccgcgggcgcgcgtcacggccgtcttctcacctccatcccgacggctgcgaggcagaaagcgaaagcggacgcgggtcagcaaacggggagctgggcatgctgtccccccgccccccacctctccaccaggctcccagccggccttgaccttcccccgcgcttaagcggctcagtggggtaggacggatggtcgctgtccctcccgccggtgctgaagtccgccgcaccccatggatggagggaggggccgcccctcggggcggggagagggccccaagagatgcccctggagcccgggaggccccaccctgggcttctgcggcccaggcgcgacccagccgcccggggcgctgtccgccccttagagtgctgaaactctcttcattatgggtctcccgatcgagtcccgaacctggccccgccatggggagagagggggagctgcatgaaaactttctttctttatctttttctttctttcttcttcttctttccttcttttttttttttttaacgagttctcttcttttccttccccttctcgagataatcaagattttgggggtgggggaatggcagcgggcttttttccaaatcttaaaagatttgggggaattccgggggttccaggtgcccacctgtccgaggtcacaacagacggggtgtgcacaacagcccctctgtcctggagcgacccctcttcccaaacactggagcatctcctgagattgctccagcgacaaggtgagccgcgaggaggaaaagcccgctctcgcctctccctctgagcccccaaccctaccgcaggaggggcgggcagagtcctcgggatccgcctgctccgtcctcccctcgctccttccccgcccccttctcctccttctcctccccctcctcttccttctccccctcctcctcctcttcctcctcctcctcctcctcctcctactcctcctcctcgttcctctcccgcgatggctttttataactccgggttctgcgcctttccccgggcttggaagggaaggggtgggggaggtgggaggcggggaaatgagctaaattttctggccttttcaaaaggtgccatcctcctaccgcgcactagtgatttcggggggttcccctgagcaccccctgcatgtagggctcacgccttagccccagaatggggattgcgcgtcccctcaggcctcagcccttgcctgcctcccaccccgctcccctccagcctggagctgcggagcccgagcagaccaacaggccgagctgcggcaggcaaaccccctgtccgtgtccccatgcacccccacggaaggccgtacgccccaacactcacccccagggcggccgcctcctggggccagggaccgcgcatcgtcccggccgcccgggcgcccccgcccgtgggcagcggcggtcccggggccgggctgagccgggcctaccccggccgggcaggcaactcgcccgggctgcaggcgccgcggggccggggcgcgctctccgaggcggggggcgccggcgggcgccgggggcgcgggggcaggaccgcggccgcgcggcacctcctccacctcctcctcctcctgctcccgcggcggcggcggcggcggctgcctgggcgagatcaacaagtcggggctgagcttcggctccgcgctcgctgctattctgtcccgcacttcggagcgcccggagccgggcaccaaggcaggacggcgccacctgcgggtcggaagcgagcgcggcttaactcctgcctgcccggcccagcctgccggggaggccgggggcgggctccgggatcgggccaaggagacgcgcgtggccgtgcatccctctccacccaggccacctgcacagctggcctcgcgatcccgccttccttcgtcccgtcaacaacgtgtgttgaacgcctcctgtgcgcgagccgcggtgcagggcacggtgacaggcgtctgagatacagctgtgaatcaaacacaaacatccggccctcgtggagctggttggaaacagatcataaacaaaaaagcgaaa

SEQ ID NO: 1561880 - DNA, 4001 bp, Homo sapiens
ctaggttgcctcgtttccagtgtgcttgcagttccctgcaggttaggagtgtgtcccaggacagacatctttcccgtggaacgggctggcttcgagaatgactgaggagggtgatccccaggggccagcgcttgcctgtttttcaaacacaccttccctccttcccctcctatcaggcgactctgcagggctccaaaagccgggggaggcacaaatagagctcaggtctggcagagcctgaaaaatcccccaaagaaggacagcatgccctagccacagtgccgaccgcaaggccccaatcagcagtgccaaacttttcttggagatgtgctgccggtgaggctcttcatagggactctgccatcatgggtatgggggtatcaaacacacactaatgaataaacctctgctcagattcatagggcaggaacttcccccaccccacaatgaatcagaccagttcctgctccctcctcttacttccccctgtacttatctcagggagtcagcaaagggggtgggggcgtctgtgtctgtctccctcttctatgtgtctgtcatttacctgggtaactttggtgcctggcaccctttaagtgcttaataacagcgagtgcttaagaaaatgcctgctgaatggacaacctaactcataaaccccattggtgggaacctgcattcctcagtaatgtcggatcagtgtttctcaactcctccccaccctaccccatcacccgcccctaaggagctttgaaaagatcttttcttcctattctagaaccaattccagcttccacacctcccaccttgagaaggaatgcattagatgaaccaagacttctgcctatatacatgggctgctacagttggccaccccggcagtctgcggcctcccaagcgggggcctgggtcttaatccttacttctctctaagctgcatgaagggtgcccccattccatccctcttcacttctccccagcatagcgcctccataaatgtttgtgaactggatgaatgactgttgagcgcttggtatgatgagctgcttacaataggtgctcaaccaatctttgtccaatctatgaatgaatgaatgaacttcacccttttccttccatacctccgggctgagcctctctcccacatggaaaccctaaggctgagaccaccaccttcctaccagttcctgggggtgcccagtgaactgtctcagtatccccagtgcctagcacacagtaggcgctcaataaacgcttgctgtgttcataatgaatgactcaatcaggcccacggtgggggtgaaggggggctccatactgtgcctaaggatacagtgaatgagcaagtgacacacactcccccaccccaatccctaactctccttcctcccaggatcgggggagaaacctcggcccacagccgggatgcgcccccgccggggtcaccgcggcggcgaacgtcccggacttcgcatcccggtgaccccttgggatgaaccgaagccggacccgcaccttggccgtaacaagcgcgctccacgccgccacgcaccagcggtgactcccgagtcctctgtcgccctggcctccccgcaggcgggtttcgaggcccccgcagggagttcagggccacggccacgtgcagccgcccccgagcccgagtttgcaggctcggggtccggttcgcgcttcggtggcgcccggcgaggctgcagcgcgcaaagttcccacctcaagttcccgtcgcggcgtccccgcctcggagttggcccggccgcggcttccgttccccccggctgcccacgggtccggggcgaggacgcgagaggggcctggaagtcgcccggggagcccgctctgcctcccggagccgccgccaaacttcggtcccggggcccggctcagctcccgccctcggagccacggccgccccgtctctgcctcccggtccccgccgggctccgagtgcgccgggagcgcggcgcagcagccgccgagggagggagcgaggcaggaggcgggacggagggaggggactgagcgcggggcggggagaaggggcgggcagccgaaagcgcagcgcctggcctcgcctcgcttcgggacagtggcagcggcgccaccgtcacggggcgtccaggcgcccaatcgggaccccgcaccttggatccgggggccctggcgcgcctgctggattgcgctcctcgcggccagttcctgagcccgcgtccgggactgctcgcgctacgccctccctcccgttgccttcttccccgtctgctctcccaggagcgaccaccctgcggccccttcgcctgcacgcgacagccttcaaggtccccgcgctccgctgccctggagcttcacgcaccaggcggcgcggcagcctcctagggtcgcgcgccctgtcagctttccccgcggtgcaagtgctccggtggtcccgggtccgcgcccctagcagcaccgccccagggtctacatgtgctagatattaaaaccccactctccgctgccccggggccgcgctccacgcgcttacacatcctgggaaccacatgcgccatgtctcctgcctttccctggaagtcctggaagtccaagtgcactgctgcctctgggtccctcgcccccctaccccgggcaaatactgcatccttgaggccctccacgcgctgctgccctggagccgaacgctccaagcaagcttccacatcctgggggccatatatcgcgcgccttttctcgacctcctagaccaatgttgcccttgggcccttcctgccaccgccacccagggactgccagcatcttgctgtgccaaattcctagggccagtacgtaccgtgccaggtgttttcccttccagtcccgcggggccgaggccccagagccctcccgggctagcagagccgcacttcgtcgtccactcccctggccggtgcagggcacttggaccaggtcctggggtcttgctcccagtgtggccgcctagcctcggagttggtaggatgctgcacagatgctggaggttgggttggagggatctattgggttggaggaatctactgagttggagggacctattggtttggagggatctgtgctgctggcagggctggcctcttagggtggcttgccttgcactccgttcctcttctcctttctgtctcttgcactccgttcctcttctcctttctgtctcttgcactccgttcctcttttcctttctgtctctactgcctttgcctatcatcagagaaccaagaaaggacatgaagaaaccctgctgccgaccagcctgaggccttctgcttgagtggggctcgggttggggagtcgtgggtgctcattaagtgggttagggttaaccctaagaaatgagcgcagggcacactagcctgcgcggcagtcccagccgggtggagcataggagttccaggttatagtgcactatgatggcaccactgcaatccagcctgcgtgactgagcgagatccagcctctaaaacaacaagaataaaaacactggcttactggtgaggtggaggcctggacagacaaggatctgcctaaggacctgtttccaagagctcaccttctactgggggcttggcagaattgggaaactgctgaaatacgtgattgcagaatgaagccagagaggccactttagatagaataatgggggagggctcctgtggaggtgatggttacatggagccctgagccagaaggagcccatctggcaagatgggaagagagctttctaggtggacagaacatcaaaggcactggccttcaagcaggagagaaggaggcatgtctgagaaacatcaaagagaccaaccagcagtgtgggggaggggcctgagtggggtggggtgggcttttgttgtcagagggtccctggattacatattgagaaacactcctcttgtggtggatcaggcttctgccttcctttcccatctgaaattttttttttttttttttttttt

SEQ ID NO: 1561881 - DNA, 4001 bp, Homo sapiens
cagcaccctccacaggcctgagctattaaccagcaccctccattgcttcagtgcctctctcccatccaagcaaagcccaaattcctggggcctggcacctggctctctgcaaggctggcttcagcggactagaccacagagggtggtggtgcccccaagtggccagaaaaggcaaaattcctcctgtttccacttgagtctcttacatcagcctcccagacgtacctcagaggtaaagaaccagggtaagaggccaaaaccacatggcaagcctccaaagaatgtagataaaggcagagagaacaagttgatggcatcccagaccagtgggcacggtaaccaggagggtctcaggtgtaccaagataggaagcaggggtgtccatgtggacaggagggggcaaaagagctgaataagagctggagccacgttggcaaataatgaattattacaaatgaatagtgcctacttggcttcaggcactgtgccaagcatgttacatgcttgacctcactgaaacctggcagtcacccagtgaggtaggaacaattgcattttgcctttggggaaaccagggcttggacaggtggaatcaattgccagagaaggcaggtggcaatagagatgagaccagaactccagtctctgtgattccagaactcatacttttaactccactgcaaaaaccacagctcatattcacttgcaagagcattatggggaaactttctccaaggcactggctttcggactggtgatccaagccccagggggggtgccgggacgttcacagctggagcctggggagtggctggcaccaagcctggagccctgcagagcccacttctctccttcctgttcccccaggtttaggctcagcaggtaccagccagatggtagtcatggcaacagctggtggtccagatgctccaaaggaactgctctgcatccctgagggcagagtccagagcctgtggttatcagtcattcctttaacaagtatttattgatcatctactgcatgctaggcacgggtcatacagcagtccctaagacagactgggtccccattctcatggggtaacaataacaattgcaataataaaaaaatgatcttttctttgtagtgctctgtatgtgtcatgttttagcacaggccttgtctgtgcatagtctgtctcctgaataataactctcaccacagccctgagataaggccgattagcgacactattttacagaagagaaaactctggctcagagaggttgagcaactcgtctaaggtcacacagcaagtgtgaggcaaccaggcaaggaaaagcaaatccagccacttggtctcccagccccgcttcacctatctccaagccccttggacgttttctgagcactcctgggtcagccttttggcaaactcgatttactgattcctcccgtccctgcctgcgtgggctgacagctccattcagcagaggggggcaaaggagaccagggagacgagggaggcgaaggagatgagggaggctcggtgagccgaaatgacccgtccaaagtagctcagctgggcgggggcagaggtgggaccgaaacccagaggcgccccgggacggctggggctggagcgggcgcggagggaggctccgggcggctcaccgatggtagtgatgacggtgatggcgaagtagaaggagccggggaacttccactggcggccggcgcggtggggctcagcctggagcgccaggcgctccagctcgcggtagtcctcggccgagaagccgaacttcctccggagagcgccccgcttctggaccagcagtcgctggcggccgctttccgcctcggactcgagcgcgtcgaagacagcagcgcccaccagcaggtaacacagggtgcacaggaccagcccggccgcgcgcacgctcggcctccgcatggcgccccggccccggtacccgccgcggtcccaacctgctccgtgtgcccggaccgcgcgctccgccccctccaaccccggccccacgcggcagggttgtgacgggcgaggcggggcgactgccgggaacctggaggctgggatcgccacgggtgggggccggaagaaccgctcccctgtccgcctcccactcgcctgcccggggttcatgtgtctgtgaatagtgagatctgaagcaaaggcccaaaccccgggcctgcagaagtcctgttcccgccactaactcatgttgtgacctcgtgccagtcttccgtccttccttccgtccttccttccttcctttttccctccctcccctcccccctcccctcccttcctccctccctccctcctttccttccttccttcctttcactcctttccccatccctccctcccttcttccctcccatccttcctccctccgtccctcccttcctccctccgtccctcccttcctccctccgtccctcccttcctcccttcgtcccttcatctcttcttcccttccttctctccttccttccttctttcattcagtcagtcaatcctctgacaaatatttaccaagcacctactggtgcaaacaacattcctgttgtaagtaaaagtgatatcctagtgaggagggccagctaacaaacaagaaactaatttaagacaggagtgagaaagaaggaaaagggatagtttcttggggaaggtgaaccccaccatctaaggtggtgcttaaaacagaactgagcatgacttggcagccagaatagcagaggagccggtgtcgctggagcccagagaactggggggcagatactttgggggagcagaaggaaggcaaagaggcaacttcacacagggtcttacaagcccttatgtgggtttattgaaagccatggaaaggctgtattacaaacacaggcaaacaaacacacacgcaacaccaccacaatgatctgattcatattttttaaagagcccctggctgtcatggggaaaagggatggtggctaggagtggaggccagttcgaaggctagtgtagtccaaatgtgtgaagatggagagaaatgaggggatccgggatgcaccggggaggtggagttgggcgcccagctggccacattgcccagcctttcttgcacttagcagggtctatgtgaccaagctttagctcatggaacatgggcagaagtgacatatgccacttccaggcctggcccataaaaccctgccctacacgtgctccatctctttcccccaccagacggctgaatgcagagaactaaagtctttagaagagagggagcccacaaggtgggaaaaacctggggctgaatgacacattgcaaggttgtcccccaacccccaatcaggagccccagttttgagcttctgttgtattaagtcgctgacgtatgttaagcccctgaggcccagcctgccgcctaggccctccaggtcccagaggaggacatacttccatatggaagccgctagaaaggaactcagtcctgccaataccttgatttgagcccagtgagacctgtgtagccctccaccctacagaactagaagataatacatttgccttaagccactaagtttgtaataacttattgcagtggcaacagggaactaatacagtgggtgtgaggattaaatgaaccagtagatgtggagccggagagctgagcttggccctgaggatttgtttagaagtgtgagccactgttacagatatcacaagtgagcagacgcccgggcctgtagggatgtccaacccagtgcctgtccgactcagttcccaggcagaattgggccccagtacctggtagagagggcctggaccccttcttctcccgagaagcaggatgaagctcagtgggctggaagcagcgtgctggtgccactacctcagcctgatttttagcaacagcatcagtaagtttaatattccgatttctgctcagacttcagaggagcagaaacctgggctgaagtctcagagtcggagtgagtggggctc

SEQ ID NO: 1561882 - DNA, 4001 bp, Homo sapiens
gcgctggccaggctgtcagggcaggagggttgtgggggtgggttctatcctaccctcctccggggagtcaccttgggcagggacctggctgaccagtaccggcccaccaagagcccctttggcccccagccaggtgggggccatcaggggaggccattcctgagaacacagaagctcatctggggattcgggaatgaaccctggactggaaaagctagactcacctcctgggggccacagggcttccaggacccaggaggtcggagaagcttctgcttggggagtcccaggctgggtgcccaggggccctccacggagacaccctccctgtaagcggcctggcatttccctctgggatcttctccctaccccagaaccctctcatatcacagtccacggagggtctgctaagggcacactcaaggccacacgcaggctggggcacactcgtggggcacacacccctctcggcccaggtgggcgcccgaccagcttgtgaccagtctgcccctcactcccatcccaaaatgcctctcacacaaaatggccggtcccggagctcagcgggtcccttgttcagctgggatgggagagcaagcgccctggcgcggggaggctgtgcacaccggccgcacaggccgcacacgcagcgggccgtgcaattccacatgcgaacacccaggtgcacacggacgcaggcttcggccgccccccgccagccctgccccaggaggcagccgttccctgagcctcgcccgggaagaggggacagccccttccaggcccagggctgggggtcccaggtctgccgcagcccctcccccgggcctcgctctgccaaggaggggtcctgagcccgggatgtgcacgggggcggccggcggctgcagagatgggacagcgcaggagctgagcgcaggagctgagggggttcgcggggccagggaggggcgtcggcgccgagggggcaggacagacagctgcgctcagcccgggctggggtgggggggtcatgggagggcccctcccccatctcaggaacccagaagctcaccctagtctgagggagagcggctcgggaggatggcggaggacaggccagacccctcccccccgccctcgcttggtcgggcggccccagccccgcgggtccccgagagtcccggagagtccagacccagcgctgccgccgtccctccccggccggccctttgttcggcgcagaggccgcggggaggggcctcccaggctgaggagggggctggggcggccgcacgtctctgtcctgcgggcctggagcccccaccccgacctgagcggccccgaccccggaatccttcctgcccgcgcgctgtacaatcgctctccggtctcggcccagcactcccgccggggagcgccggccccggacccagacccaggggcagggagccaaacccgccgcagccagcctggccggggtcgccgatggggtcgccgatgggggtcgccatgggggtcgccacgggggccccgccggccactcacacgtaggcgtggtagatgaacgcccagccgcgcggccgctccagcacgttgtagaggaaattctgcagcttgcggtagaaggcgttgcgcttggggggcttcccggcgcccgcgccgcccgcgcgaggtttgctgaggatgctgccgcgcttgggggcctcggagccggcgatcagcagcgccccgtcccgggtggagtcgggcgcgccggggtccagccccacgaagcccaccttcagcttcttctccccgctcgggccggggtatacgccgccgttgcgcgacttctgcaccatggtgcctggcgggaggcgccccgggtcgggctcaggctcagcgggggcggagcgcggggggcggcgcgggccccagcccaggccccccggccgggagccgcatggccgaggcggcggttccgcactcctgccgggcttgggccgcgcgcggagacgctgcggccacctcgctccgcgcgcacctcggcgcctggcccgcggccgcgccggctccgcccgccgcctcgccccgccccgcgttaacccccgcgacgccagtcgaaggagaggggaggagaagagagggaggggaagggaggggagagggagggacggggaggggaggggaggggggaaggagaggagaggggaggagagaagagggaaagggaggggaggggagggagaggggacggggagaggggagacaggaggggagggggaggggaggagaggggaatgggaggggaggagagtggcggggacggggagaggggagacaggagtggaggggggagacaggagtggagggggaggggaggggggagaggagggggagtgggggagggggaggggagggcagggggagaggagggggaggcagaagggaccaaggcccgcgggaccagagctctgggctgagcctgcccaatcccccggccatgtgcacactgaccctgcggtcacctttgagtccggtagtactaaccaagtggacctgcctggtggccccagcgctcctggggtcccagagcggtgcccagccgcctgagcaggactggagtcttctcagctgggccctgggagtggacgcctccgggaagggatgggggtaggggctctccccaagactctgttagggctcagcccatggtgacctcatgctctcggtgtcagggttgcccaggcagtaggaccccctagaccccagggtgtgtgcagggagggtctgtggaggctggaggcaccctgcaaggaaagcagcccaggggaaagggggtggccacagaggccgggaggcaagaagaggagcaagggccatggggtgggggatgggagagagtcactcctagagggccttgaagccccccaaggggcctggacttagttatgcagaccccagaaggggcctgtggcaggggcagggactggagggtggccccagggcagcagacaggccagcaggaagcccagtgccacacctcgggacaaaggaggcagatctgtgcctcctggacacagatgggacggtgtttccttgggggcaagtgcgcggaggtggcctcccccctgccggcagccatgtgtcctgggaggggtccctctggagctgctgctgggagaccaagggacccctgcggctcagtgctgcccgccctgtgaggtgccccgccactgggccttcctctgcacatccaggaggggtgtcatcttcgagtgcgtctctgactacatccagcctgtttgcacgttcgcctggcaccatgggttctacccagagaaaggccctctgctgaatcgctggcgccgtcctcgcaggtgacctgctcataaaacagccctaaccctggtgcagagtgagctcttgagttgtgtttgccctttggtttccagagctagtggccacggggcctgtttttgttgttgttgttttgtttttaactaggctgaatacagaagggtcggtgcaggcagaatgctaacctgtacgttatccaggacgttggggatagacggcaacttacacaagcttgtgcacatccaggggtactttctggatccccgcctccctgcctctgtgcccacgcattggctgtgattaccagcatgaagtgggcttgccccaagcggctgcggtttctctcgattgttaagggaggaggcaccagcctggtgctttcaggggagggagaggacttcagtatgcagaaggaagagagcaccgtggcatctccctgcacacgctggctggtgccgctggtctttcccactcaccagaagacccgagggagcagccgtagctcaaaatgtaaaccctgcagggctggggcccctcatcctgtggggggaagccccagactatccggtgcccctcggcagtgcccgggctacacgtgacctctcctgggcaagcagtcatctcaggtttgatgtcagagcccagtgggacccaaggtcagggctgatccacagaggatg

SEQ ID NO: 1561883 - DNA, 4001 bp, Homo sapiens
agccctctgaacctgtttcttctgcaaaatgaggatagtaacacttacctcctaggggtgttggcagcaccactttagaccggaggttctcatagtgtgttccccggaccagcagcatcagcatcacctgggaatttgtcaaagatgcaaattctcagcctgccatcgatttactgaatcgggaactctaagggtggggtctagcactttgtgttctaacaagattggaaagtgattcggctacatagtcaagtttgagagctcctgctttagattatgtaaagcatctgtagagtcagccagacctgaccttgaatcttgactctcttgtgtcaccttaggcaagtaacatcacctctctgagcctctgtgaaatggaaataaaaatattcacctcaaagtgtggttatgaagattaaatgacctagtgtctttcttgggcttggctcacagaaggaatttaataaattattcactggtgtcactatcttctggagtcaggcaaacctgggtttatctccacccctgacgcacctggggccttgaggaagctatttgtcctccaggtctcaatttcctgcacaacgtagataatagcacctacctccagggatgactggaggattaaggtagattatagaaagtgctcagccttagtggatactcaggaaggatttaggttcttccactacccactgactcctgactctgctggaattgggggctagtgacacctcctcaccactggcaatctcatttgcactgtgggttcagtaatgcctagactagggattaagtgtgtgtaaagcacctgggcttggcattaaatggatttggggttccacccttagctctatcacttgtgtgacctcaggccagtctccttcccactctgggctttagctcttttacctctagaatggggataatgttgctttggatgcatcattattgtggtatatgtcaaagccctgggaaaacagtagatgctcaataaatgttaatcctgtgtacttccctgtggtcagacctgagtctaccacttactagctgctgtccttgagtgcattcgtcgccctctctgggcttgtttccctgtctgtggaaccgggtagcatcatactttccaggagaggctcagagaattaaatgatgcaaggtgtttatcggcagcatggtccctggcacataatcaatgcacaataaacgtgtgatgtagctccgctcccacctccacttggatctccacctgcatttggcatcaaaaaatgaaatttctaatccagttccatcacccattagaagcataatattgggcaaatcccttcatccatcaggagctcactttcctgctctatgaaacaggataattaattcaacaaacattttctgacaagaacctgaatatcagtaagaaagaccaagtgacttgttcaaaatcacccagctagtccatggcacagctaaggttggagaccaggtttttttatttcattctctctccacacacttattttgagcacctcctatctgctagtcactcctctgggctccatgcacacctcactcggtttaatccctacaccaaccctgccagggaggttttctaatcccattttacagatgagcaaactgtaccagccagggtctccaaagcgcggccaccccacactgcttcctccttggcggggggtggggggtctcttagagggggtaagagcaccaggagccccaggcagccccgcctcccactctggctgcccgggaccgtcccggagccacgtccctccccaaaggaggccccttacctgtggtggcacctcccgggcgcctcgcgtgtctgtcccaaagccaccgaggctgggagccgctggctatactcggtctcgcctctgccccgccggccccgccgagcctcctgctgcaggcggccccgctgccctctccttccttcttccttgcctagtcccccgcggctgaaggccgcatcgatcgctgccggaggagggagtgaggccgctggcggccggaggcggcggtttctattcctgactcggctggggggtggtggtgtctggagactgggcctacctgcaggggcatcctccggagttacgggccgggaaggaggggtcatttagggcgtgaggattccccgtagagagggatttcagcagaagcttctctggcaaaggaacaacagtaatcatgatttacttaattgagtgtttagtatgtgccagggtacttcagctgctgcaagtgattgatctcagttattcctggcacacacacttgacagggccaggatcttatgtcgcccattttaggggtgagctccagtcattttctcagaccgtgggcatctgagttagggagctgtagaaggtggcctcatctcccttggagccccaggttcttcctaggtgagttgtgaagcttgaaacgatcattttacccctgaggcgcagtgtccttacctgcccacgggttcctgattcccacctgccaagtgggttgtgagggcagagaacatgtgccaaagagctttgtagaggttgtgaaatccccacacatgtacctgttgtgtggctgctgtgtgcctggttggggagaggctcctggagactagggcctggatatgagcctttgcacatattgttattaataataatgataattaccaacgtttattgagtacttaccttgggtcaagcacagacctcaatctcactcaaactgcaaatttatctgtggggtaagtgctactattattcctatctcacagataagaactgctttgagaggtgtggtgacttgccggaggtcccatggctgacttctgagtcctctaggccagcacagtccaacacctataatgtgagccacatatataattttattttattttatttttgattttttgagatagagtctcactcactctgttgcaggctggagtgcagtggcacaatcttggctcactgcaacctccgcctcctgggttcaagcgattctcctgcctcagcctcctgagtagctgggattacaggcatgcaccaccatgcccagctaatttttgtatttttagtacagaaggggtttcaccatgttggccaggctggtcttgaactcctggcctcaaatgatccacctgccttggcctcacaaaatgctgagattacaggcatgagccaccgcgtccggcccacatatgtccttttacatttctgattgcaacattttaaagaagtaaaaaacaggcgaaattacagttaccccttaaacagtgggggttagggaaaccactcctccatgcctagaaaattagaatataacttttgactcccctgaaacttaactagtaataacttactgttcgccagaaaccttaccaataatataaacagtcgattgacacataaatagtatctacatatatcttaggcattcacgacatatctaacttattcttaaggcttttgatatttctagtctacatggttcatctgtaagttttttcaaattgtcacaaatctccaaaaattttccaatgtatttattggaaaaaaatctgcatgtaagtggacactagcagttcaaactcgtgttgtttcaggatcaactgtatttttagtgatatattttattaaatctaaaatattatgatttcaacattggaatcagtaaagaaattattgagatattttacattttcttttttttgtactaagtctctaaaatccagtactaatttttcttattgctacataacaaattaccacaatttagtagcttaaaacaatacaaatttatgatctcatggtttctgtaggtcagaagtctgggcatggcctggctggaccctcagggtctcaccaggttgaagccaaggtgttggccagggttgaggttctcatgtgagcttcagagttttcttccaagctcacagattgttggcagaattcatttccttgtggttataggactgaggtctctct

SEQ ID NO: 1561884 - DNA, 4001 bp, Homo sapiens
ggctggcaacaacctttattctttaaaaaacaggcaagggaaggaaatctgcacattgttcccaatctggaaagagttgctcaccctttgacagggggcagaccagtgcctgacccttgatctgaggatctggggttcaatgaggggtttctaatgactaggttaggtgtgaaagcaggagaggcttggcaaacaccaggtgcacgctgtggccctggagtgaccatgaccgccgagtgcaggctcagaattcagactgtcctaacttgcactttctgggtggggtgaccttgggcagctacttaagttcccagagcctgaggtccccatctgttggagatagccgcaggtctaatcttagagttggtatgagttactgactcctggatgtaaatcacctagcacagggccttgcctgtagggagaggtgaataaccactggcttatgagagtattttcaaacagctccaagagccatgtgtgtgtacacctgtccccgcagtgcatggatgtaggtgcccggttttgcaatatgtctgtggtgtgtatgccaatgtatgcccatagtttagcagtatgggggagcaggtgcagaaggcatgggtgtatgagagggtgtgaacatgtgttcagctgtgtgagtcagtgggagcattcaggtgtgctctgtgcgtgcatgtgtatgtgtgtgtgcatgtgtacgtgtgtgtgcatgtgtacgtgtgtgtgagtgcctgcgtgtgtgtgtgtgtgtgtgtgagagagagagagagagagtatgaacacctctatatggaattcttctgcttgtggagatgcatttgctgtgagtgaaaacccacacaaattcaacatggttggtcacagtcacagggttaaagccttggcctgtcttcacagcttttttcaaaatccttacagcccctgtgaatctgcctggggctcttgtatctgtctggagctgggctgaaatcctccaaaaacagacttttctttcattccctgttgccagatactggcacaaacgcatccctgccaccaccaccaccacacacacacacacacacacacacacacacacattctcccagaatgtctcaacttttttcaaggttccagctccaaaagtcccttcctcttccctctccccagccaattcccatggaagcaccctgggtttcaatgtgtatatctgactttccatagctgagtctaaaacagcaaaagcatcccaagttttggtaagcagttctctccttttcaccctggacccttaaccctcctcgccctgcactgcctggctggcctgggaggggactttaacccccaccaccactcttccccatccaaactccctgccgggacaatgtgcatatcacagtcagttccaaaacaaacatgcaaaaccaccccgtttcagccctcagcctcagggctgagattcaggctcaggtctaggggttggggaatattaaagtttacaagtacaatcttactccatccatacacacacatggagaagccaggagaggacgcggccagagatgggctcctgcccttgaacccctgctggggtggaagcaggtaagcacaaccctgccaaggcactgagggtcgtctcagtgtaaaaggccagggccacccggggctgttctgcagggaatggggagggctgtgcccactgaaagggggcagagcgaggtggtccaggccttggcgcgttaccatggtgacgggctgccagcggcgggcggcgcggctcctctcctgggcgcggggtctgtgggtccgcgggtccgtctgtctggggcagccctcggtcccgcctagccctggagccaggggatagggcaggcccggggcaccgaccccggcgtcatctcggaggagcggccggggaggacagggagagagactgagagagagacagagagggactgaggctggagacggcgagagacataagggagccgcgggcggcgcgggtcgggccaccagacggggggcggcagcagaggcggggcggggcggggcgcggcgggacagcggcccctttgtgcctgagccctttgtgcccagcccgcgcgccccgcccccaccgcccccccttccctccgtccaccccctcagcagccagctggaacccgaggaacccgagtccgccccgccaagttttcctccccgctcctcgctcttcccacggcgcacccggcccggacagccccattgtacagacccgcagagcgaggcctcgagccgcagcagccgggttaagcgcccgcggacctcgctggcaggcccaagttcgagtctcctcctcctacacttcccagggagtcacagactctcttaagcttcgatttcttcatctgtaaaatggggtgggaggaggatgatgatgatgatgatgatgatgatgatgatgatgatagtgcctgctgcttagatttggtgatgaggagtaagcatctgtcccagcgcccttgaattctcccacattatgccccatcatgacggcctaattcaaggctttgaggtgatgatggctgtgtgcgagttctgttcttgactctcagataatgaccttggccaagtcggtatttcctactgagcctcagctttggagtgagactaagaaactagatgaccgctagggtctatatgtgtgtgtcccctcccaaattcgtatgtccagacctaatcctcagtatgatggcattaggaggtggggcctttggaaagtgattgggtcatgagaggacagagccctcacgaatgggattagtgcctctctctatatatatatatacacctacatatatatacctatatatatacatatatacacctatatatatacatatatacacctatatatatacatatataggcactaatatgtataggcatatatacacacacatatatatacacacacatatatatacacacatatatacatatatatacacacacacgcacacacatatatatttgagatggagtctcactctgttgcccacccaagctggagtgcagtggcatgatctcagctcactgcaacctctacctcccaggttcaagcaattttcctgcctcagcctcccgagcagctgggattttaggcacccgccaccacacctggccaatttttgtatttttagtagagactgcatttcgccatgttggccaggctggtctcgaactcctgacctcaggtgatctgcccacctcaccctcctaaagtgctgggattacaggcgtgagccaccatgcccagcttagtgcccaagaggccccagagagctagctgccttgccccttccaccatggaaggacacagcgagaaggggctgtctatgaaccagaaaggcccagaaacataaggtccagaaagaaggctcttaccaaacacccaacttgcttgtgccttgatctagggcttcccagcctccagaactgtgagaagagaatttctgttgtgtataagcccctcagtctaaggtatgttgttatagcagcccagactaaaacagtgaccaaagttattcctggttagatggctcagggttttgtccatttatttatcaaacactgtgcactgagtcagcctgtctcccccactagactatacattacttgagagtcccggccctcaagtaatgtacagtctagtgggggagacaggcaaggagcagataaacaggaaaaataaaaaaataataactgtggtaactgctaagaaggaaacaaacaaatgttgacattgggaacagtagagggatcaacttatagctggtggtctaggaagcctgggtctgaaagcctagatctgaaaggggaggaattagaagagtggagatggggagacgcagaggaaccaagttctaagcagagagaaccgcatatgcaaaggctctgaggcaatattaagcttaaaggagctggggagtaagtgaagaactgaaaaagacgagtgtagttgtaagggttagagttca

SEQ ID NO: 1561885 - DNA, 4001 bp, Homo sapiens
ctccatgtacctgggctccaggcctacactggcaaggcactgaactcacagttcctgtcccagcaggcccaatacttcacaagattcatgccagtacataatccctctctcaccatggctcaccaggtctcattccccttgtatcccagacagcaccctgaggaatgctatgtgtttggtaggtgcttaacaaatacttttttttttttttttgagagggagtctcgctctgtcactgatgctggagtgcagaggcacggtgtcggctcactgccagctctgcctcctgggttcacaccattctcctgcctcaacctcacgagtagctgggactacaggcgtccaccaccacgcccggctaattttttgtagttttagtagagaaggggtttcaccgtgttagccaggatggtctccatctcttgaccttgtgatccgcccgcctcggcctcccaaagtggctcccaggcatgagccaccgcgcccagcctaacaaatactttctaaagttacacaatacaattttctagcatgtgttcacctttttccaaaaaagaaaaagaacttctatacacatgaaaatccataataaagaaaaatcgttctaaagtttatcttctatgatggaatgtacacagaaacaaaaatattcccttagagcaaaaaagtcaaactcttactctaaacagctttagaaataactcaaaagtcacaaaaagcagattctgaaaacactgggttttaatgattacaaaccaaaataatgattccctacttgccaagagaagaaacagatttagatgagtcaaataaggttctggaaatcttttgattttatggccttcggctgccccaatcaggcatcagaactaccaaacattaacctccacaagttgatatgacaaaagcaaaaaggccctatggtaagtcaaatatccaccaacttggtagagaagtcaataaaatcaaatggctctgtgtgaaccttgcctgtcaccttggaggacacatcccatttctacctcattctttgaagtcaaaccaatttaaaaagtaacttttccaaagaaactttctaaacggattaaaaagaggtcattgaaaagggagcacaggctatttttcagtgaatgaagagaaggattctgaaaaagcattacttcgtagaaatatataacaagattaaattttgtgtgtaacactcttcctctctcttaatatcagagtatttcaaacacgtgtaaagcgtccctgacttttttctaggagtcaggactttgtcaaagttttcccatccactctctaacatgaagttaggaactgctaagttatcgattagacattcagggaatcaaaatcatctctaactgaaagattaaaaagtagcatggttaattgttaagagaacttctgagttggtagaaatgaggggttcacctgacagttcgtggtgccccccctcagcactctcaccttccccccaactattttacatcttcatggtaacgttcccttgatgcttttttaaagggggaacaagaacatctcaagttaatacgatggagagagttaatagaatcttctcctttaccaccagggtcctctccagggcaatgtgaacgggacagcagtgcacgaagtcctccaggcccccagaggccacagcctgggcccggtgggccagggaccagccggtgacacttttaagtccaggctggctttgggggagctggaaacaggcttcctctgggtgggggcgcgacgagggggcggggcgcgggcggccccactcacctgcgattcatgggccggaccctcacggccaccttgaccgatgccatcgctcatcccgaaccagcccgcgcggggtcccactagcccagaactccgcggtcgccggcgacgctggctactcagatcgcggctcccgcccacttccctctcgcccccgcccctctgctcccggccggacctggagttccgcggcagccccacctgccaggccactgagcatgcccagaacggctccggcccgcgtgatccatgcgccacggtttggcggcggccgggcggtgcagaggggcggggccgcggggcctggaagcagcctccgggatctgcaagtctggaaaggccacgttgtggaccttggcgcagaggttatgggggcgacccggagcggatggtttcaggaaaactagaacccaccctcatggcctgaacaactggagagaagaggatcgcagcaatttaaagccagcggcaaggatcacagtcctggggtcaggtgaccaaagccagtttttcagcccttaacaagaacctggcttcacccagccaaacatgagttaacgtatccattttacacacgaacaaactgaggcgcagagatgatcacagcttgttggtggcaaactccgctagggccttctctgctaccctaaggaggtccgaccgtatgttttggaccccttaactcgggataccgataaacgaaaattaatagggtgttggatgttttaaatgtgtgcgggaatgtcattatattggctagaatcaaaccttatttagacttgttttgcacttttgtacactttagtaatttttagttttaatcataagggagttaaaggcgaacacaactggtatttttttttttttttttttttttttgagacagggtctcgctcggtcacccaggctggagtgtaatgctgcgatctcggctcactgcaacgtccgcctcccgggttcaagagattctcctgcctcagcctcccgaatagctgggcgtgccaccacgcccggctgatttttgtatttttagtagagacggggtttcaccatgttggccaggttggtctcgaactcctgacctcaaatgatccgcccgccttggcctcccagaatgctgggattacaggcgtgagccaccgcgccaggccgacaactggtatcttaaggcttagggcctctggtagaagtgagctccacctcccttcctgtgtagaaggtaaatgcattcattcattcagtgaatcgagcatgcatgaaatcgtttgcgcacacccagaagcccacctgcgagccacaggagcagccattccaggaagccaagctataatgggagacgcaaggaatggaggcggaactcctgtttttaagtcctagctccaacactagccttgtcagcctgtaattctgaattactgggcgcctctgaggcttcttgtctcatctgcaaatcaggaacaacggcatagagtggtgaatgcatcaagtgggatgatgtctgcaagtacgcaacccgcttacacaaagaattatctttccataaccttccctggacccctagggccagcagggaatcatagcctccctttgtttctagagcccggaaatcactgggttttccctctgtctggagcagagctgggtgcgaatttgaccaacgggtggcaggaacagccggagcaggatattaaggagcgggcgagcttgccaagcatgcgcagtagcggcgggttggtttgagaagccgccagggagccagcgcggcgacctagctggctggggcaggggaggggcccgccttatatgggagctgcgtggggacaaactgttcgggcccaacgcgcgggtctgagagacagccacgcctgctccgggtcactccggccacctggggggcgtcggcgcgcagactctggccagttcagtattcaaactcttcaggagtgctaacttactcatgacagcgattttctgtatcggggtttcattggtcggtggtttagaaggttttgctcattcattcgttaatgtaattccaacaacctacacgtgtttataagccccctttccatccacgactttgctgtctgacacaaaacggaccatcgcagcccggcagacgctttagacaacaaacagcatgcctggagcttttcaataggaagcagtaaggcttgatcatcacagacgatacggaacgggcactt

SEQ ID NO: 1561886 - DNA, 4001 bp, Homo sapiens
ctctactaaaaatacaaaattagccgggcatggtggcacatgcctgtaatcccagctacttgggaggctgaggcaggagaactgcttgaaccagggaggcggaggttgcagtgagctgagatggcaccattgcactccagcctgggcaacaacagcaaaactccgtctcaaaaaaaaaaaaaaagattccaactattttctgagatcctcactttgggtggtatctatttaaataaagctttacctgagatcttgtttccttgccttttaacttctagccagttaaaagtaacaaaagaatacccctgtggccttataatagcaactgttgcaaaatcagaggcaacagtgaatgggggataaaatacaggatttacctagaaacacgtccacttccatcacttaatagatacaagattcttaggcaatgactgggtgtggtggctcacgcatgtaatcctagcactttgggaggccgaggcaggtatatcacttgaggccaggagttcgagaccagccaggccaacatggtgaaaccttgtctctactaaaactacaaaaattagtggacgaggtggtgaacatctgtagtcccagctactcgggaggctgaggcaggagaatcgcttgaacacacgaggcggaggttgcagtgagctgagatcgcgccactgcactccagcctgggcaacagactaagactctgtctcaaaaaaaaaaaaaaaaaaaaggattcttaagcaggtccttccctttacttttctgaacctcagtttcctcatcggcaaaatgaggatgacatcaccaggcacctggcaaagtctacataaagattaaatgaaataatatgcctggtaaagtgcttcttaatcatatgcttgtaaatagttattactgctttaagcacttcccaaaggacacaaagatgccttttttcttctggaagggtcaacgaagcccaggtagaaaatgagaccatgaccccagctatctacaaggggttgacctcaaagagtttcccaggactacttgtagaagtacctcccttgctctgagcagaatggagaagtaaaaccggggttgggggttggcattgcagtaggactacccatatgagctggcactctacacacctacaccttacctgtcccaaagtcatctcctcctggaagtcttgccctcctaccctggacgcctcataatagctggttgagcacttactatgtgccaagctacttgacatacccagtctcactgatttccacagtagtctattacctcatttcacagataaggaaaagaagactcagagaaattaacttgcccagggccacacagttactaagtggaaatgccacgtctctaactcgctcagacttcaaactgccctcttggtctcccatctagggtgccctaagaattctccctctccccatttagggcactttcacatacacttctcattatctttaccactctgagcagcaatgttaggaccccattgaataaacaggtcagctaaggccagggaggtgaaaagacttgcccaaggtcacacagcaagcccagcacagcgccgaggttcggaccccaggctctcgcttccccgccctcctcccaaactggggccctgaccaccgcctcagggcccccaggtgggctgcgacccaaggtggccgtgtctgggggtcgggccgcgaccctgccaggggaaggaggggcaaggccgtccggactaccaaaggatgcctaggaggcagggcagaggatgctccggctcgcgggacagcaaagccaggcagaggcgcgggcgcaggtcgcagggaaaaccccaggcggccacaggattagccctgctcggtgggcgcccggcccctccgactcacctgaggcccgagccgaaagcgggcggcggcggcggcggcggcggcggcggcggcggcgggggcggcgaacccctggctcagccattccccgctgccccggatggggagagacagtggccgctcacttccttagcaacctggctcggcgacccacttccttagcaaccggtgtcaatttcaataactttattggcacacgagcagaggacagggaaagccggctggaggggtctgggcggggctcaggtcggtgctggtgtttagcgggggcccaacacacctcggtctcctcacccacctaagcggggagagtggcgcacaacgtggcctgactccatcctctggtatctcgtgcctcagtttcccatctgtaaatggaacacacgcgatttcagccgccgttcaacctttctaaaagctttcacatccattatctgactggtgtctcaaactgctactgaggtaactcccatttagggtgcccccagtgactcaatacgaacacctataggcacccttgttgtagctttcctgtccttcacccaatccagtcagtcacaaccgccccaggcaaggccaggccacgctcatctctagcctgcctgaaatatctggtctgtttccattcttttgtccagctctgtccgaacaatccattttccataaggtggccagagtaattatttaaaacagatcatgcggccaggtgcggtggctcccgctgtaatcccagcactttgggaggctgaggcaggtgaatcacctgaggtcaggagttcgagaccagcttggccaacatggcgaaaccccgtctctaataaaaatacaaaaaattagccgggcgtggtggcgcatgcctgtagtcccagctactcgggaggctgaggcaggagaatcgcttgaacccgggaggcaggggttgcagtgagagagatggcaccactgcactccagcctgggcgacaacagcgaaactccgtctcagatataaagattaaaataaataaataaataaataaataaataaaacagatcatgccactttctgattaatactcgatttaatggagtctcattgctcttagaatcaaatatgaagtccttattacttcctgcaaaattcgttaaaactctattccaaccacactggcctagaagggcaggttccaacccccatggaacttacacctgctgttccccactaaatagaaactgcataagagcagtcttttatttgttcactcttgtatccaccatgcctggaaccaagcttagtcaatagtagttgctgaacaaatatgttttgctccttgaataaatgaatacctgagatggtcttcttcatctgcctacaactactttttgcctgttgtggcagatattgctacttcctctcaaaaacgttatttcttcctgctcctggacacacaactagacagtatttcccagccttccttacagttcagaccaagttctggccaattaaatgtgatgtgtgctattctcaggcctggcccattaaaactcccacataatttgatttacactttctctacagtgaagaagtttatttttaaataaaataataaaggaaataccaaaagagactgcacccagcctcttttggtatttcctgaagctaataattgcctcattttttcccccctttcattagctttctttgcagatattgttaattttttcctatgtggttaataaattagacaaaataatcagcagtgatttttccagatgtgtaacataacaattcggctaggcatggtggctcatgcccataatcccagcaccttgggaggctgaggcaggcagatcaccctgaggtcaggagttcaagaccagcctggccaacatggagaaaccacgtctctactaaaaatacaaaaatcagccaggagtggtggcaggcacctgtaatccccactactttggaggctgaggcaggagaattgcttgaacctaggaggtggaggttgcagtgacccgaaataaccctattgcactctagcttgggtgacaagagcaaaactccatctcacaaaaacaacaacaacttaaaaaaaaaaaaaaagttcatgagttctcttttgtttttttc

SEQ ID NO: 1561887 - DNA, 4001 bp, Homo sapiens
ggatacagacaataatattctttacacattgctttgcaaaactacagctttcagcttttttttctttttttactttaaggcccattattctagcaaagagagaaagaaaaaaatctgtggccttactttgcatattagtcaagccccctcattcctggtaaagaaccaaggttcagagaggtggaacaacctgctcaaggtcacacaattgttcgtggactagaatccaggttttgatatttctactgcagccttttctgtatctagaattatttgcctctataactgtgtccagtgtgcattaatttgagttagttataaattcttaaaatgaaaaatgaacacacacagcaacagatttgtactgacttaaaaataaaacaaatctcgaaatgcagaaccgtgaacaggctataaaatttgattcacattccttatatattttcaacagcctcaccttgtttaataattaaataagtgttaatcataaagtacataattattatacagttattgtgccataaggactataaacagccaggtgttcctagcacaggaaacaaaaataacttacaattaatagttcaaaaagaatgccatttatgagtgctgtaagaatgccaagagtcacaaaagttagggaatgggttgaaacagggaaggctctacaggaagagatttctttttaaagtcagaaattaagaggtcactgatatgggtgagcggtgacatgtcagaaagaaaataggacgtagaaaaggagtacaaggtaaaaaaaatgctaacgacaattaaggaagcctgttgtagatgctctataaatatctgacaagaattaaatctagcgtaagataaatgtaattccttttcaaaatcgctcacttctgcctttattttccatgtaattattgttatcattttagcactgtcacgcacacagctctcctgttcactagaatgattttgtaacttttaacactcattaaatgttttgtttatcaagagatccaaaaatgtatttcctttcttgtcaactaatgagagttacaactccaattaacttagcagctaaataagaggtccagcaatttatcttttacgtggttattcatagtacattgcggtataattttctctctatatgcactcttagatctagctgttttcagtggttcccatctttcatatcttaatcaaaggcatcatgaaccctctggaagctggacttctctagctggaaatttcatcccttcgctggaaatctagccagccctcgctacccctaaaagtctcctgagtttaaacgggggcacatgtttgacacacacacacacaaccgtctgcgttccaggacttgtcatcattgatgcagtgcagctgtcacggcgggatggcaatttgaagagagtggggagggggcgtgtaaaaggggacaagagaaactcacaaggcttgatggagagtgacaggcagaagaactcccaccttcacttctgggcaaattctgtgacgcggccgcatcctcaaaccgtagaccaggctttagctgctattgacggggcgggggcggtctctcacctctctccgctcccacccccaatacagggggtggctctagtaaacactgtcctccaggccccactgggagcctggggggcgttgcgcgcgggcctgggccccggggaacctcggacgggggagcgggaaggaaaatggggcagggcacgcggaagacccccggcgcgggccgactccccacccccgccccagtgcccttacctgtcccgcagcccgtgctggagttggcccagcctctcgtagtagtcgggactcgacaggggcacggccgatgcgagggtccggctcatgctgctgccgctgcgccagctcagcacagcctctgggtggccgttcggccggggttgccgaaggagaccgccccaccatgcaccgcgggtaaacaccgcgccgggccgcctgcaggaggcggggcaagacgccgtgggggcggggcgccgctgagggacggggcggaagccggctttgtggggggcgggacgaagacctgcatggggcggggaagaggcgtggcagaggcggggcgtcgtgaggccggggcggaccacgtcggaggggcgggcgctcggtgccctctcctctctcccttgacgcggtgtctcctttcccctcaccttccaggattcgcacaagctacgttaatgttacaaggcgcattccctccctttctttcgtctctcgcttgcttcttttcctcgatctcctttcttgccaggatttgttgagtgccaggcactgtactaagcttgttctattatatcagcactcaaaagcgacacaaaacaccaagtaaaaaaagacaaaccctcaaatgctaaacagccgtgctcagccccgacagtggaccaaccccttactcgaaaatccgtgctgaatctaaggattgttccaggtgccagtatcgttggcgagagggaaaagttgataactagttgcttgggaagcagacgtttgtgcagacagctctaagggacaatgctcctaatgtcctgtaggatcctctagcaggagcccgggagccagactgcctgggtgtacattccctatccacgtcccagctgccaagccgtgtgcaagtcaccccaggtttcctcatatgtaaagtgggaggctgttaacacaggattagtttaggattcgattgttaatatgtgttagtgtttataagtgggcccagcacatagaaagcatcaggttttattatcatcaccaacgtcgggaaaaagcttcctgaaggaagccaaccatatttcaaaacccactgggcagaaaaattaagccttagcctgcttctctgccttcctttccttttttttttttttttttttgagacagagtctcactctgttgcccaggctggagtgcagtggcgtgatctcggctcactgcaagctctgcctcccgggttcaaaagattctcgtgcctcagcctcctgaataactgggattacaggtgtgcgctaccacacccagataatttttgttttttttggtattttttatattttaaggagagacggggtttcaccatgttggccaggctggtcttgaactcccaacctcaggtgatccacccaccttggcctcccaaagtgttaggattacttgcatgagccaccatgcccggcctgtagagtttctttagtctcttattgttcacttcttttggtttctttcctatgccattaattttacttacacatacaaggtgcaaggtgtgacaaactaaaattgtaagagagatggaacactcaaaggccaacaacacaaaactatgattttactcagccttccattcacatttgccagttccagggcaagagtgtgaatggaggccctcataccatccgcctaaatattgaattataattcaagataacaaacttaggtaaaatacgtgttctcctctccactttgaccaatatgccttcttaagaacctggacaaccagggtggaatttagtttgcctgcttctccagctccccccaactccatttcccaccccaggctcagtcttgctttgtgagggggtctcatacactagcagggatgtgtgtgccctgcctcttctcctcctcttctccagccagcaagtcccaactctgcctacatccccacctcagcctcctcttggccgggcagtgagcatgccagtgatggtcacccttgcaggaaagacccagccaagaggccttttaaagccttagaaagcagcttgggcccctttgagcagggaaggtaagggtgttgggtacttagaacgtgttctagaagagcatgtgtgtgtatgtgtgtgagcaccccaggtgggcctgtcatctggccctgggacctccttgccttgcgtggagcagcatgggcagagaagggctagaacagaacctctaatacacagaagccagggcagaggccttcttgccct

SEQ ID NO: 1561888 - DNA, 4001 bp, Homo sapiens
ctccctggcactggggcctagtcatgactggataatagaggataaacaaacacatcatataactcccaagaaaatacatacactaatacacaaacccaaaatagtctctcactgtctctctctctttcacacacactaactcatgctcatttatgcatgtacaacctaccatcacaatcataacccacattctcagcctcacacctccaaaggtatatacacacctcacacgaatatatatacacacaagccaccgtaccaggctggctgctgctccactcctcactctctggggtgctagcagtgggttgtccctctgggtcctttccttcttcttgcttctcctgtagaaggcaagcctgatcccagcttcttctcctcatggtttgggatgaagccctagggtctgatcctggcccctacctggctctctggccatgtggtgttctgccccaaacaggcagaatttcttctaggccgccagcaggagtgcagctccagcagacatccccctatcacttgagcacagactcacatgagcatgcacatcctaattaaacagcctgactacaactctccttattatctggtagagaaactgagtacacaaaaacttcctttgtgatgctcttacacgcccagtagaattcatgctctgtcccttccagcttctgcagctagagccctgggtgttccctggcctttggcctaggcactggactccagtgatggagttttccagctgcctgcacatgtactttgggtgctagttcacctgactatgtcttaaccttgacactaaactgagatgggagctctggaaaatcaagagagtgattaattcatttccctttaaccaggtataggacctaactcaggatgggaccccaaaatatgatgagtgagtcattatgcgtgtcttctctggcccagctccataatctggattgatggaggggacagtgggaattgaggcataggctatagcttccccctcccttccccactgccctcttcctaccatggcctctggctccgactcctcctctgatgggctctggtattccctgcgcttcctcttcttcatgggtttgaggagctcagaagcgctggtagagcctgaggagttctccactatgactgacctgaggaagggccagccttagggaaagaaccacccgccctgcaccacccagcccctctcctaacccctgaacaggaatgaggctttgggggctgaaggtagagcaagtagggctgcgacctcctccccttaccgctcctggaacagctgagggcagccatcattagaggaaccaagatctggacccgcggcttggtgaggcccgcacgcctggcactgacaggtgctatcatcctctggggggtcctgattgggatcttctggaggattctgggggtggtcctctgcgggggccaaatgggcctcaggcctccctccccatcgcagccacactcaggctccgcccacgccccctcaggccctgcctccgcctcggtccatctccgcatcggatggcctcctccagccttctccaccccaggaccaccccgggccccgcccccgaaccttctggggctcaggcctcgccccacccgcacagggcccagctcagggcctggggagcggggctcctacccgcctgttgggggcccgcctcgccatctcccgccggggccccgccatcttcgtattcggtcacgccttcctgccgcagctcggggctcgggggctgctccactcccgccatgttcagcggcttatactcgcttatccggaactggagcgcgggagggtctgaggattgcgactcccgtacgggtccttgacccatctcggagtcggtgccatggccctctcttcgcctcatgccagctcacgccctcagcaggcctcaagactccacgccagggggcctcactccaagctacaccagccaaaccctcactccaggctacgcccccaagcacctgcggggtccagtcccagggtgccccactctaagccacgcccccaggctcccacaggcccagtcccacggtaccccactctaagccacgcccccaaactaacacaggcccactcagggtgccccagtctaagccacgcccccagacacccacaggcccagtcccagagtgcctcactccaagccacgcccccatagtccccagggcctaggagtgcttcaactcaagccacgccccgagagtccctcactcaaagcccacccctagggcccatcatctgagccagcttcccccacttccgtctcaggtccagcctccgggcctgcaagccccgccccatggctgcggtttacgaggcttagccaatccccacagacactgacccgcaggccgccccctgggggcggggccgcggcctctgtccattccagaagccgcactgtgctggtgctggagctggccggcccggcgctaagctgcggcaggacggtggcagaaactggttcgcagccggccacttgctccggggcacccacatggattggctcccggggaaagcaagacacatccagggcactgctgggcaggccgagggtggccgaactggctgtaaacagatatacaaatagacacgacacaggtgagtctagtggccctacctcaatccggccatgcatgtgtaggcatgtgaaggaaggcaggtggaggacagtgaaaacggtcatcccctctccaggatccacacttgcttgagcaggtacagagatgctcttccttcccagactcctaccctagcttgactcacctggaatgatgaaggcagttgcgggcaggtgaggaccagaaccggggctgtctccggccaccaagtgcatgctgacctcccctgtggaaggccccttcagtgtcctcagcatctccatttcagcatgcccctccatcccagcatgcccctccatcctggcaggcctacaagccaaacatagcccccagggtgatcaggtggggacctttgttacagcagcaatggagatgtgaagggatggggcttctttgagaagctagccaccttcaaacccgtgacctgcagagaaaggcctcagtcctgtggggagtagggtgtcttcagagaccagcatcaggtctggctcctgttctggccaggccctgcacctccccagtctctgtaaggatggtaaggatgggtagggtggcatgtgtgagggtactttgtaaactgtgatgtacaaaactgactctggggagcatgactcaggtcaaggttctgtgtggccagttgtctccaggacatagcccaggccacatccaaactcacctttttcttgaccccacctctatccccactggaatcactccctcctccctctggggattcagagacctcaagtaccaggttttccttcacccatacagggttcatcttcctgggaggtgggatctttcctgatcatgttcttttatggccctgtccaccactccctccaaccccaagcacagggtgggcactcaagcatctgctgaacaaatgtatgcatctgaagagcagagacatagtgtacgaagacgcagtcaagtcagtacgtgattttgttttaataacgcaaaggcagtagaagcatttcacagagttcattcaacaggtaaagacataaagaaaaagacctagagatacaaagaatatacttaatatctatttactcagcacctaaaatgtactgaccactgtcctacttgccttaccagcactgtccagtagaattttctgtgataatgagaatgtccaatacttaaactgtccaacaccgtagccactagccacatgtggctattgagcacttgaaatgggctactatgactgaggaactgaattttttattttatttaattttaattaaatttaaatagtgaccagaaggtaggtacagtggtgcatgcctgtagtcccaagttctctggagactgacacgggaggatggcttgagcccagg

SEQ ID NO: 1561889 - DNA, 4001 bp, Homo sapiens
tgtcaccaccattctgtgctctggggttacagtcacaaacatgacaaaatgctctcatgaagcttatattctggagataatggatgaggttggggctggaggtataaatttgaagaccagcatgtgtagatggcatttaaaaccacagaactggggcgaggcctggtggctcatgcctgtaatcctagcactttgggaggccaaggtgggaggatcacttgagcccaggagtttgagaccagcatggccaacatagtgaggcctcagcctcaacaaaagattttaaaaattagctgaacatggtggtgcacccctgtggtcccagctactggggaggctgaggtgggagggttgcttgagcctgggaggtaaaggctgcagtgagctatgatcacaccactacactcgagcctgggcgacagagcaagaccctgtcagagagaaaggggaggggaggggaggaaggaaggaaggagagagagagaaagaaagaaaaaagaaaaaaccacataactgagtataaagaaaaaagtgggaactttggagcacacccacatttataggttgggaagaggaaaagggtctagcaaaagggactgagaaggagtctgccatgaagtgaggggggactcagaagagtctgggtttctggtggacactgaagaaagttttcagccttctgccgtcagcctctcttggaactgctctgagcctagggagctacctcacttgaaggctctcctagaagccgccagccaatgacgagttgctatgaggtgtaaagaccccacccccttgccttactttggaacacctctgcagggccatctcagttccagagcttccattaggtcaggctgaggcctctgttgagactacatcagcagttcagcttcttcttccgcccaacccgtcattcccctactggtgatattcgcaagagcactccgataaacctacactcaaatcttgctatcggagtctgtttcgggggacccgacctaaaacaaccattgtagccccagcccagagccgtgcacatagcagatgctcaataaatatctgttggctgaatgtgtccatgggtattttctcttgatgtctgacaaggttttctcaatcccttgccttccaaggccttgtatacaaaaacgaccaataaatgtccttactataggtgttgggtggggagtagagccctcgacagctacccagaaaacaacacacagcaaggctgagcgctacaaacttggggcctcggccccgcccctcgccgcagctgcttcccggactcgggaggggacggaagcggccctgagcgcagggttccaggatcgggacccgccaccagcctcccgggactggtataggcaaaggcgggcggggcggtcactgatccgacagttccgcagaacggttactttttaaaacgctaaaatggcggaattctttttattctttctctttatggccaaaaaaaaaaaaagagagagaaacaaaaaaaattccatattccattataaaaatccaaaattaatggtaggaaagtttgccaaatgactcattcatttcccaagaaaaccaaaaccccgccctccacacctttccattaataaaaaaactcttaattgattgcgtatctccaaacacgcagcctccaccctcctcgcccctcctgatcgcagcccgaagccacgccgcagggtcggctgggcctggagtcccgcacccgcctggccccctgcgcgctccgcccagaccgctttccccggcgttttcccgaacctcctccccagcccgcgccccccgccggaggcgctcggaaggagcgagacgccggggccgcagacctgagccctcgccgccctggacggagcggggtggcgcggcgcccaggggacgcaaggtctgagcccacgcaccgctggttgcttacctgcctggccagccggtggccgcccagcgcctagctacggtccgagccgggcgccgcgcgcctgcgcgttcggggggcgggtccgcctccctgcaggacgcagagcgcggggcccgagcgccgggcacatctgcccggcccaggcgcaggcccaggcttctgtggcgcccgcgccctcttgcctgccttcgaggccctggttgtgcgcgcctcatgccccctcaacctaggacaggtttgccgcacgggcgtggcgggtcgagatttttcctgcccccgaacccctgcatcacagctagcagagcgcagcgggggcgcagggaccgcggagctcgaagagagagcctggagggctaccgagctgagtggttagtgacaaaagacgaggctgcacccaggcatgcaccccagccgagtgtctgctctgtccaacgccttcccaccgcgcctgccctcaccctggaggggagctcaggagcgtcagaaaacggcctcaggaagggtgaagggcacgtgcgaccggagagaggaaccctcgtgcggggactctggtcctggccctgccgggcataaagagcggcattagccgcgtctacttttgggtgaccccactgcgaagggctgggtaacatcagtatcccccaggtcctccatttcgacattggtaaagactatcacccacttcatggcgtatggtcgttttcagtttgggttcctgtggtggtgtagcaatcactgcccctctctgcttcactttgactgatctcttcgcctccacctgatctctctaattaatcaaatctccttgttattggttctggtaacacaagatacctgtctcgcttacacataccacagctggcacttcacatagatttgagtaattccagaggctaagaggtttcaagctccaagagggtaggaaatattagtttttgtattcctagtacctagcccagagcggggcacagagtgggtgcttaataaatatctgttgagtgactaaatgatgtagggtatgcagatgaaaacagggtaacttttggtacagtccaccatccagcccctctcccacaccaatgatttaatttaatcccttgattttacttggccttaagtcatggccacatgtcagaccaccaggctcctgattccctcccaggccagatgagaaaagggttcctaatgaaatgtaggcaaattctccaaattgctgtgatcgacaggtttaaatttatgcagaatttaactattccggttgccacgccaacgcattgcatgtgttcttccttgctgcaatgtcaatttttaatcacatctcatattattgggaacaggattgcatcagttaaggatgctggttgccataacgatggatgcctttttctacacattgatacatacacaaccatccgctcagtattctctcatctcaacctagactgtgcgtgatctagatttcaaaggtttattttaggtattcagaagattaaaagaaagtggtgaacctacacaaacacatggattctcaaaaacaaaggcatcttttagatggtgattaagacggataagtggaatttgagctagcaagacctagaaacaaacaactaacatggatgtgagttgctaagacattatttttctggctatcgacagtatttttgtgcctcacgcctgtaatcccggcactttgggaggctgaggtgggaggattgcttgagcccaggagtttgagaccagcctgggcaacatggcaaaatcctgtctctacaaaaaaaaaaaaaaaaaaattagctgggtgtggtggcgcataactgtagtcctccctagctactagggaggctgaggtgagagggtcgcttgagtccaggagctcaaggctgaagtgggccatgagtgagccactgcactccagcctgggcaacagagagaaatcctgtctaaacaaacaaaaaatctctctcctcacccaagaaaaaaactgtatttttgtggtcttgatacctggcttgttggcttgaacaggggtcaaacaaacaaaccaggtatcaagatcaccaaatcc

SEQ ID NO: 1561890 - DNA, 4001 bp, Homo sapiens
ggccagcacgctgtgcccattttaaagacagcttgaggctgacagagggaagccacacagctgaggcagaggagaggggcgttgactacaggctggccctttactcacgagacgggggtaataagcccccacagaggagacagatctgagagggggcctgtggcccccagccacgcagcatgggcaggctgtgggggggtggtctgaggttcacagggcacctggagcctcccctgccagaacggcaaaatctcagctggggacactcagccaggccctctgtggtgaggtgtggcagcaggtaaggagacagtcacaggccctccgtcctgagacccggcccctctgagttgaccagataagggggcagccaggaggcacccaggttcccacagctaacccccgctggaccctgttctggctggggggctccaagcaggtgtcagcagctttccagggctcagatcccccatctgaagtgtgggcttgagacctcctatctcagaggactgtgctgggcttaaggagagaacggtgagcccagaagcctggggaggctccttccccctccaccagggccaagggggtggggcaggcagagggggcgggcccagcccaggctcctccattcatccccataacgtcttgctccagggccctctgcccccacccagcaaatctccagctactcgcccctgccccagcctctccttccgggaaggcagaggtaccagggaggagacagctcaggttacacaggccctcagggcccctagactctccctaaggtggggctgaggtggggaatgggcctagagcggccggttgggagccgttggagctgactttgctgctcctcacccaaggctgaccccaggcccaacctaagtctacagggccccaagagccttggttttcaggtgaggtgtccatgcatggagtccaccaacagaacccgcctacaggtttaaggcttgttggggaggggacatgcaccccagggggtcttcagggcctgaacccacatctcccagggagactgaagcccccggaccctaccacctgctgggcagagatgctgcccctcctgggagccacgtgttcccagccccagtcaaaacttcgcagctggccctcccctactttggaggtctcctcgagtccctagactcctccgagaggggctagtgggagcctcaggtggctggcccctcccaccccatccagaggccaacaggttccagcctgtcccgggtagggcggagctgcgccccctccccaccggcagcaggcggcggaggccaagtcccgccctccccgggatcccggacttggggccgccagggactgggcccggcccccctcccgccccggtcaccgcagtcgaactggaccggcgcccagccgcccccgggtccatgccggggactttaattccgccttcccggagggacgcgaagtttcccggccgagacggagcggccgggtcggggtgccttcttgggcccccaaaatgcggaaccagagagtccgcacctggactcgccccgggccacggcgctccccctggggtcgggccggtgttccgggtccgagtgccccgggaggaagccccacggcccgcccctgcgctcacccggatggtctggttggggtcgccgccggccacggggccccctaccagcttgcagtaaaggtcctcggtggggcgcggggagccgcgcgccggggcctcctctccgcaggtcgcggaggcggcgatgcgggcgccctcggccaggttgaagtagggcgggtgcaggctgaagccgccgcccgcctcctcccgcgcccgcgccgcgcccagcagcgccagcccgaccagcagcagcggcgcggggccccgggggccgcgaacacacagtgcgctccccgcgcagagccgcttcgccatcttcccggctccgggccgcgtccccgagctccagggacagcgcgcgcggcgggagcccggcgggtctgaagccaggcggccggcagggctcgctccgcccgcggacgtcaggccccgccccggcccgcccgagcgcccgagccccgagccccggggagaggtccggggaggcggggtgggggggggaaggagagaggagggggaggggcggccgggcggccttaacccttcggaccccggcccggccgcctcccggaaggggcacctgctggcctcgggccaggccgtgggacgacggcgccgccgggcccccagcccaggtcgtagctccgggtcccgggtgggaccctagcgctccccacgacgccctggcccccagagcgcccaccagctcctcccagcccaggggcccactctttgttcccctaacttgggtgcaccactcggctgcccccgctcctcccccaacagcgtccgtcctgctggctgcgggaaggtgccctctgcacccgcgaatgaccatctgcagaggaacggggcagcctaggtgggaaccccctgcttcctggggcagccaggtcaggttcaactcggcctggctcccgcctgccccagcagggcttaaaaatactctcagatagggaaataggggcaggagggactggcctgcagctgcagccccctttagaggacgggggcggtgctcatggccccacagccgccaaattggctcttaaggaggtcgggggctctggtcacagctgctgagcacctgctgggtgcctggaagcacctgtgctccggggcccggtggactccaccagctctctcggcctggcctccaacccgctgcacagccgcgcacgcgttcctgccacgatcggcggctcgaggacgcctggcaaacagcacaggacctagaggccgagatcaggtcttcgtctgcctttgggtggctgcggccctgggtctcctacttcccttgggctccggggccaaatctgcctccagggaagccccgagggggtggcggcggggtggggctgcagctgccgagctggcagcaaacccccatccctgagccaggccagctgggcgggccatggtcccagatgggctgtggggctcatctctcgctgggttccctggacagtcccggggggctgggtgggtttgtggggcactggccagccggttctggtgggggttctgagctagcagctgtccctggagggtgcacctccttgcacaccttcctggcgccctggcctcctgcaaatctcaaatcccaagagggtgtatggccctttctctacggagtcgggagggcgatgggaccctctctccctcctcctactttccggcccggcaattcttccataacttcactattagttctcccacctgggggaggggggagaggaggcggctccccttggcaggagaagctccaagtgggggaggggctggctggagagggggcggagacatcaaggaatctgcagtccaggcgcagagtccggctctgagctgctttagatcccgtgtgaggcagagagtggcctctgggcagtagcgggtccccaggtgggggcttggccccaggcagtgtgctctggctctgggctcccccttgacagcttggggctctgacagcctgggggactggaggtggagactcctgagaccctgagggcttcttgggatccctggagggtcgggtggttggaggggtgggattgcgagtggcggggcagggggagaggtgggggtggggagagcactttaagcctcctagcggccagatcaggccaagctgccaggcctccgctgtcccccggcactggccaggaggggagcgggggccggccctgagaatgcgctgtgtcagccggagctgccagcaccagcagggttaatcaccgggctcactgcttcccggcagacagctgccccgggagcaactggcaggcaggcgggcagcgcagtggacaagagaatgtggcccaggggctgggtaaagagcccacactctgcccccaccctgtgtctgctggtgcacggactg

SEQ ID NO: 1561891 - DNA, 4001 bp, Homo sapiens
tgactgcgtctttgaagtgggttttctccgaggagtcgtagacaaactgcactttgctcagcctccaagtcgcctcaggtcccttggacatgttgtggctttcctgttgagccggggaggtgcgcttcaatcgtccccgcagcgtctgggttcttaaacctaggggccgccacttcccacacccacgcggagcctgcggcccctctgcccgctgggctcggagttacctttacaaagagcattttgagtgcatatgcgcgatccacccagaacacttgcagctccgactggctgtggccacagcggcccttcacctcagctccccgggtcaatgcgatatcggcctgttctgtgatcagctgggaacacagacgccccgcgccccctcagctcgcccggccccggggcgggggctgtaaagggcggcgcgtccaaactctgggttgcacgcttgggcgctcctttgcgcgcgcgcatcccaggttccgggaacatgcggttagatgctctacgtgcagccccgatagggaagcggagagaagggggtttactttcaaagcaggcaggggaacagaaggcattacaagctggaatccccatgcagcattcgggagcagcctgccggggtgtgggaaagaaggcgggcaacccaggtcttcgaagagccttgaggaagggtgcccttcgccctggagccctaggagcaagctgaggggggggaaagattccttacatctacgtagttgctggcccacacatcataaggtacaataaatttggctgcaaactctgccatgagacacgtcgtcccattttcccgcaccacaaatatatctttttcagggttagtggaaaggcctgagagattttccacttcttgttctgccatgatttgagccattgtatctgcggaacaaacaaaacaattccatcagttcagggctcagcccacgcgtctcgggcgctagggtggggagacagtgctctgcaggctttggagtgacaaagttctctgccagcagctgtgcgctctacgagccgtttctctaacccgggtctaacaagcctcattccttcgctgttaatttataatgaaaatacagttaaaaaaattaaaaatcctgactttgtttgtaatatagctggctgttttctacatcttgggattttaaagtaaatatttcttgccaatgctctgacctcacgaagctggcctgtctaggctctgtctggaatatgccacagaggtgtatggctctcaggggaattccctgccaccggcgaggaaggccctccctcctcccctaaaagaaaaaaagaaaaaacaccgcaaaacattaagggccatattttttatctcaagctaattgactttactttgccggctctgttctctgcaaagagtgcccgtcctctctcccagtcgccaaatcgctactcacggaacaacatcaggagaactcgaagtctgtcgatgctggggacccctcttccttggagatccatactcgcagtgccccgaatgaggccggctgtgctgctgcagaggccgccagagagggaatccctcaaagtcgccgctggagtgggccggggtgagcgagaggcgggggacagagaagggggagggagggagcgcgtattctgtgagcgcctagctaggactcggtgtcgagcgcggcaccgacagctgctggcagagcaaatcggctcactgcggaggaaaggaccgcacggcggtccacggctgcgagtgctgaaagcaatccgattgtgtggcaggagtggctgtggcttggcttgtgcggagggccaatgagatctggggggactaaacttctccctgggtctgtttcctgttctgcaactgcatccgcaaagatgagtctgttctgagaaacttaataccaccctcagccttattaaatctccttaccaggtacagttattaagtggtgtagataccttatcactggagtactgtcttctgaaaacgcatctggttcccgaaagaaaacggtggagcaaaaattgttgctgattcgggggaggagggctatgcaggaatagagaagggaaaatgctatggcaacagtttcctgaatttggagacatccccttctctcccctgctctcaatgagctcatgggtttaaagttaaattgacgcctcctcgaacgaggccatcagacaatgcagtagctccatgtgggcttattttcctgtgaattttgctcccgggtgcatgaggactctgaactctggggtcacctaccctcccgcattatactgtgaccactctgccaaaaagggatgcaagcaaatcagaagtttttgagagttatctagtgtctcctaggacagaaattttagaattatgccctaagtaatgtcacatagttatgtaagaaaaacacacactgatattactctaaagcctgtagtggaacagaagaacaaatactactgggctaattcctgtatttacatatttggtagcttgcttattttttatttttgctctgtaaatcagaatacagctttcaaaaatacacatgcagtcctcatcaattgtagtgatgtccaaatattttattccttagaagatatttcataatgcaaataaatgttgcatcagtaatataatgttataaaacaatgtcatattaaagggaaaattgcaaagtatttcacctgcattatctaatttgattctccccaatcttagagggtaggcaaggaaagatatgagttactgtggttttacataccccaaaactgaggctcaaataaattaaatgaccttcccaaatgtcacatggtcagttagaattaaaatacaaaaatcacatgctttaactctgtgagattatcttcatttctccttatataatatttttactccatattttgacttccataaaaatctatattcaatatcaaataataatctgaaatctgaaatctctatcattaattcacattcttcaaatttatagaatgctgttttaagtataatcacattctgacatatctgccacaaagtatctatataatgtttttggctttcaaacatattcctatatcaatcattagatcactagcaattcaaagtataaagtaatattaaaattgacattatattttgacatcttgacttttatgtttgtagttcagtatttcatccaaacatttctcaagaactttacaaagatgattatatatagaagaattgatgcaaattttacagaacttaacagaaatgattttatacagaagattgataaaacgtcagttctcatcagttgaaagtggaagagataacatttgtatgtgttacattttttcatgttagcaattattattaaacacttattttcctgtagtactgtaaaactggaaaacaatgagacatgtaataaagtatttattctctctctctctctctctctccagtattttatgaggacagaaatgagtagatttcagtccaggattcactacttattatttttgtgaccttctgaagattttatttgttctcatctgaaaaattgggaaaataactcaggggatggctagttaaaccaaatgggccaatgagtataaataaacaaagtacaaatagatccataaacattaaccgaatacttactacttccagtatgcttgatgctttgaaaaccaaaagatatttatcattacacaagtaggagagacacctataaaagattttgacaatttctcttgcagtatgttattgcagatatcttcactatataagttgttaaaagatcaactgaattaattcatgattatctgccttaataataaaagattaggtgagtagtagcattggtcattgatcttaaaatgtagtagttgatttacaaatgagatggttgttcctttgaaaattatacctgatataaatgatctctttgttgacactggagagtgtaccctagagtactcaaatgggttgaaagaagaaagaaagc

SEQ ID NO: 1561892 - DNA, 4001 bp, Homo sapiens
gaaccagggagtcggaggttgcagtgagctgagattgtgccattgcactccagcctggcaacagagtgagactccgtttcaaaaaaaaaaaaaatatggaaaggaccaaaatgtccaacctcagaggactggttacataaacatggtgtgtgtgcacagtgcaaaggaacaaaagagaaacttccctgatttacagtttcaatgcaagtagcagttaccaggtcccactgttccgagatctgaggggcccaggtttctgtccccaaggcagacatgggtacacagatgaccagcagcctcccctttcacctctttccaatttgctcttctccctctagcaaacgcacatgttggggtccttccgcctggaacgctaccccttgtccctgggtaattcccactgtcttttccattttactatatcctggaatccttccctgatttccctctgcctgtctcgagccagtctgggctcccaacaaccctatctaagggaatgttgttatctcatttaataggtaaggcaattgaggctctagggatgtgagaagacatgtggtcagtgcctgtccatatccttgagtctttccagtgagtgacagttgactcccagctgccaatgtctgcctccctgagcctgtatgtcccgaggctttttgtcctggaactgcagaaagcaggtacatgcaacaggacagaagtgctggggagttgacaaacccccggcccagaagccctcaatcaatcactgtggtgtataaatatcccagttcccatgccacctggatagtcgggaggctttgtttcagtatttaaaaaaaaatactcctacttttgctcattctttgttttatttttatttatttttttgagacagtctccctctgttgcccaggctgcaatgcagcagcatgatctcggctcactgcaacctctgcctcccgggttcaagcgattctcctgcctcagcctcccaagtagctgggattacagttggctgccaccaagactggctaatttttgtatttttaggagaggcgaggcttcaccatgttggccaggcttgcctcgaactcctggcctgaagctatccacccacctcggcctcccaaagtgctgggattacaggcgtgagccactgtgcctggcctgcccattctttaaaattgaggaataatatacataaagtacctaacgggcacaaattttaaaggtattgctaaataatttttaatgtttatacaggaatgtgatcaccacctggatcaagatatggcaacttccagcaccccggcagacctccctcatgcccttcagggtctctgcctgcctctagaggtgaccacaattctgacttccagttcagaggcatgtgtttccaaactttacgcagaattttcccagctgagtggttcccatcatcagaggtggtggctggtttaattgcacactctctcctggctgccctcccttcctcatctcagtaccgattccctacagtgtttcctggaatcatttcccaaatcaactacttgcacgcaaagctgtgttctgttggctggtggaggacctcactaccacaaataacatgcccagggcactcagctggtgggcagtaaggccagaataggagccagagccacctgacccagaaggtggcactgccccagggagagggtccggtctgtgtccccactccctgtccccactgtacccagagcagcctggagcgtgggtttgccaagtccagccagcagatgtggcttcttaccatactgcagtcccttgtcggtgatcctggcgaccaagccggggttggcacccagagcctctggggtggacgtaagcagcaatgccagcagtatggacggcagggctctggccaaggcccccatcctagattcccagtgcagtgggccaggactgtcccagctgtggattgggcccaggtcccttaagtagccaaggctcgatggctgggggcagttcctgaggctggatgggttcctgggagcgggaaggggaggcacagggactggaacctgcttgcgacatcactgaagtcataaggtcatacttagaagccagttttcactgcccagatcagtggatgaggaagcctgactcctatgatcatccctgtccaccctccccacagaaagaccccatattcatcactgttcatcttgcctcatctcagccagtctcttaagagctcggctaggaaggcctggtttagcagatgaggaaactgaggttcaaaaaagccacatagctcccttgagatctcacccccagcagagggcagggttgagagtgaagctacatctggcaccaaccaaactctcttttttaaaatatattggctcgtttatttaaaaaataaatgtttcccccaatgggaaaacagtgtttctcaaaccttgctggtggtgaaattttctggaaggcaattggcaaatgtttaaacagttgcatgccctgtgacccaggaattcaatttcagggacttgcccttaaatacataattgagtcagtgtgccagtaaatcactgctccaagataccactgctatgctgtgggaaacaggacaggagaagtgagacccaacctcatgtatccaccagaagggcattggttaaatgaattatgacatgccccttaaagtgaggctgcagaaataaaggtatttcttggcaaggaaagggatgtcatgaggcatccgtttccgatggcaccatagagtaaggttctattttggggggttcaaaataggcttctatgttcaacaatctggaaaatatttagcaaggagtcatgaggcattgtctctggttgtgggggtagaattataagtgttaaaaaagtttttgcttgttgatacgtacaatttttttttcttttttcattttttgagacaaagtctactctgttgctcaagcaggagtccagtggcatgaacatcgctcgctgcaacctcaacttcctgggctcaagtgatcctcccaccacagccccctaagtagctgggactacaggtgtgagccaccatgtccagctaattttttgtattttagtagggacgaggtcttgctatgttgcccaggctggtgtcgaactcctgagctcaagtaagcctcccgcttggccttccaaaatactgggattatagacttgggccaccatgcccagcctctaaaatttttattttcttgggggtatggtcccgggcatatattcgcagtaagtaaagatagtaaaatttcattctggaaaacaaaatttatagtacagactgtgtttaatttttagagttttgccccagccctgcttacatttgtgagttctgctttgccctcacccccaggaagccttccctgaccactcccatgcttctctggattctagaaagggtcccctctgaggtcccagaaccctttgcgctttccccaccacagcattaaccactctgctttttgataattgtggtcctttaaaaatatgcccacgaattctttgatattccttccatcaaaaggtaatgtttctgcccccttcccttgaaattgggcaggttttcatgatggcctcaaccaactgaatgtggtgggattaacagggtgactcccaataggtcacaaacagcactggcaggcactgaggttaagatcagaatgtcccacgttaagcacagggaaccccacagtccaggcctctctgctcctctgtaccgtgttgctcctgtcactggggctgaggtttgttgggatcctcatccgtccctcccctcagtccccacaccaccagtctgatggctccttgcaggcacggctgagtcttccatttcctgagatccttgcagcacccagcagaaattggaaagaaactgatatttattgagcacctactatgtgcaggcgctgtgctggttaagctgcacgtctcctctcatccttgcatcagcaaccccaggtggatattttagtcttgtcttgagatga

SEQ ID NO: 1561893 - DNA, 4001 bp, Homo sapiens
ttgcagaccctggagtacaggacgtccacctggagacaggaagccaacccgaggaggggtcagcaccatccaacctgctgaggatctgccggccccacccacagcgccctaccctggcccacgttacctgagcggccggggtcacctcagtcttcccctgctgtggctcttggggactgcgatgggtccctttgcgcttctggacgcgggcatactcggccaccacagggctggccgccaggctgaccccgggaagggccgccagccccacgttggaataggtggcctcgaggccagcgcaccctgcggtggctgcagctgccggcagagcccggggcagctcctggtgtgggaaggcagagggggctgcctgcggtccggtgatgtccctggacacctccagccagtgtgggcgcaggagatccatgctggcaggccgcagggctgggggtggggtcagggcagagttcactccgggcagggggcaggagcgggtctggcccaggggttggcacgcgctgcacagtaagccccgcccggccgcccccgccccgccctctgctcacccctgctgctgcgcgggccccggtgcagctcgtgcagtctggtgtccgacttgctgagggagcagaggtgggtccgcctcagtagggactgggggcgaggaaggctggtcggtgccctgcggaccccaccctggtccccgggacagcctggcactcaccgcttccgccgccgtcgcactgccctgcagcctcgcccgctgcctccgcgccctcttcctgggggctacagcgtcctcgggccttgggggtagaggtggggggcggggggcggggtcgtcagcctcgggtccaaggcccggtgcaggcgcgcgtgccgagctgggtgcgcggacctgcctccagccccttcccgcgctgggctgtgaatggcagccgcagcgaggccccagacagaacgcggctgagggacctacctgcggcaggctgtgcacagcgcccacagcgagaggagcagggcgcagcaccctagaacccagagggcaggaggggcccaggacactggcagccccatcctgtgaagccgaggccctggggacagaagaaaggggcgctgggggctggccaaggggacctggcgccacctggcagccccaaatctgcacctcccgcggctgcggggctcctgcgtctcccgttccagctctgactcagcacaggaagccccaaggcctggcagtccctccctcccagaggtgcccaccttctggcgggggctcccggtgaggtgaactagggctgctctgcctggcccctccgtgtccctgcgggtgaccacggtaacacccagcacggccgtgaggaggggcaagacagctgtggccaccatagcccagatagtaaccagcatcgggggagcccctgggtgtgcgccacaggccacagactccacctgcagccaccctctgcccagacatggtctcctgtgtcaggtagtgcccccaagccgctcgctgcggagcccagaactgggaagagctggaggctggtcagcaggagggaccctgcacccggaggagctggaggctgggtcagcaggcagcagcagctgctgggggtgctgatgcccccaccccacttctctctggctcttcttgtctgccagtgtctctgccagagaggatctgtccccttcttggggatcttagcagaacttctcggggtgggggatgccttacaaacagcacagtccagcagcagagacagaagctggggggtgaggggtggtctctggagtttggggccagtctgctcagacccagggagtgggcttcagcctggctgactgacccagctgcagccacatcccaaggcctcccagaccccagctgccccccaggagggcacttaccaagcccacggccaggggtcctcagctctgtctggggcaggccaggaaggtctttgtgcagccctcggctgagctccccacctcatcacttcctgctcctgtcgccaagcgcctcccctgagcctcccaccctgggcagcagccaccaccgcagcctcacccacctgctgcgccccgcccgaagcctagatgaaacgtgtgcgcctctagcccgcactgttctgacagcctaactcacaacccctccacacacgaagacgtgagcagagctggcacagaacccccaaacccacagggccaggtccgcctgcctcaccaagagtgccccacgtggtgggccacagtcctctcccgcccgtctcgcccgctggagcagcactgagctccacccatctgtgggtgtcaggcagcctggcgggcaccctggcctccgatctgccttggtcagagaagggtaagaagggagaatgccggcctcctaggcccctccagcccagcccgtctctcaccacagccctgcacagacccttctctccccagagaccctgcagccagctgatctccactgaatgacactgtgatgaaatcactttaatgtccttgccaaggaaatgcccaagacactggcaggtgggcaagtaagtgtccagatgggaccccgcagctctgtctccactcagcagtgtctgcacgccccaggccagcaggccggcccctcctcgggcaacactggtcttcctgagggcagcccgtgctggggtcccacgcttcgtccatagtgcttgtggggtctctagaactcagtcatcttcttgtgggtgtctgccttcctctgctcctgctgcaggccggcttcctgagcccggagctgccccagctggcgctgggctcctgccagcttctcctgcagctgggctgacgccacgctatgcctgcggaggggctcactagtcagcgtggggtcctgggccatgccaccaaccccagtctgccgtacccactgcctgtgtgcccgctgcccgtcctccaacatgcagacccctcctggactcagcccgctatgcttgggtcaggtgacctccagcatgtatcccgggggcagggccaccctgggtcgccctttgccctgagctgggccccacacgtaccggccagcgttgcgggcgagagcctcctggatgctcctgatgtcccgctgggttcgctcgatcttctcctcagtctggaagagccgcaggctcagggcccgcttggcactcttgctggcatggtacatgtccttgctcctcctccccgctggggccgccccggcttctagggccccaggagcctgaccttgcagcttttcattgaggaagtcaaacacattccgaggagctgggcggcccccaggcctggcccctcttccccggcacctggggggcttgttggtgccagccttgccaaccctggtctgcttctgcagggtctccacacactggtccagcgacttccctcgaggcaacaccacagcatggatgggctccacccggccttccgcgtgtcggcccaaacctgcggaggcacggggatggcagtgctgtggctgcgggaccccgggaatctgaggagcacggggatggcagtgctgtggccacgggaccccgggaatctgaggagcacggagatggcagtgctgtggccgtaggaccctgggaatctgaggagcacggggatggcagtgctgtggccgcgggaccccgggaatctgaggagcacggggatggcagtgctgtggctgcgggaccctgggaacccgatggctgcgggaccccgggaacctgatggctgctggacctgggctatgctgcagcagcctgcccacttctccagggcagcttgtactcacccttgccaaactcatagcccatcttggtgaggagtctggagcctatacctcgcgtgtgcacctcccagccagcaaaggcagagctgcaggtcccagagtccacagcatctgaccccaccactgcaagagacggacagagggcagaggactgtgcagagtccacggcgtccgaccccaccactgcaagagatggacagag

SEQ ID NO: 1561894 - DNA, 4001 bp, Homo sapiens
tcagatgaaggcaggagaggggtcgttttcaaggcccaaggaggaacgggcagggaagtaagaggagaaccagcgagaccagcaagccgccatcaagaggctggggaagactgtgctcaaggagggggcagttacccagggggcagacgctgccaagaggaccagccagagaaggccgagcaaacccaggcccactgtgccacttaggccgtcagtgagactccagctggtggccagcccagccgtgcccccatcaccttcggagcccacatctctttggagcagccagacaggctgaaccctaattggcctgagtcagccacgggaattcctttctggttcaaatgtggacatgtgagcccatcattccatgagacaccaggggacatccactgggacatgtaagaaaaattgttggctgggcacggtggctcacgcctgtaatcctagcacttttgggaggctgaggtgggtggatcacctgaagtcaggagtttgagaccagcctggccaacatggtgaaaattcatctctactaaaaatacaaaaaattagctgggagtggtggcccacgcctgtaatcccagctatgtgggaggctgaggtaggagaatcgcttgaacccaggaggcggaggttgcagtaagccgagatcgtgccattgcactccagcctgggcaacagagcaagactctgtctcaaaaaaaaaaaaaaaaaaaaaagtgagatcctggaggagaaagtccccttttctgttcatctcttcctagttaggatgtgatcatgtgggacgtgatgtcttgagccacagcaggcactggggcccatgaagaaagagaagtgaagagatgcctacctagagcgcagggagcctgccctggaacactggaatggccccacgttagacttcatgttataagatttaattaatatttttactgttgcagtcatagaagatggcctaattggggcaagaggaaacataggaatgaacctgagacaggggagaaaatggagagaggagggatgagagctggaagggggtcagaaacacccaagcacggggttcagatgcacagcaggctccctaagtgtgagttgctgtttctgcaaacaggagttgttccctgagcacctactctctaccaggtacatttccaagccctgggtgtccatcaagtcctttaatcctcccagcagtgccagggaggcttcatctgctccccacatctctgcttcccccgccccatgttcagattctaaaaaaccaaaagggctccctctaattcatctcgcccccagagagcactgactccccacggtgtcccactgagccccactgagtccagtccacctcaactttcctgcctctgggaacagggtacccaccctctgagggccccacttcccaaagttctttgtcctggcacagcaggtgctgagtagctccctggacctctgtttccgcatctgtaaaaagccactaatcctaattgcacctcctaggctgattgtgatgacccaggaaggacccttgacccagtgtctggcctgtagtagggctcggtaagcgtgaaatctgattattgcccattatatttatggttatacacagggctggccctgcctcctgctggagccgtgggtctgtccaggttgagaagctgaggtgcttggagcgtccccagatcccaaacagggagctggagtaggaggcgggagcatgaagtctcctgggccccgcccgccacctcgccctgccgcccctgctcagcagccgccccgccctgccaccttggtctctgagaacccattgttcctacctggctctgctccagggtcctggccttgccactttcctctaggatcccccgccacccccggggcttgggcctccccgcggggtcctaaattgggtgccagatgtggcagctgtccagcaatgggaacaggagctggaaccccagctctgccacatcccagctgtgtgaccttgggcgcttcccctctctgagcctcagcttccttgttggttaaatgggatgacgggacctcacagggctgtcatgagggtttcgtgagcccaggatggcagagtgcccagcatgtggtagggctcgggaacattcatcctaatttctctgctcctcacgggcctagaggaagagccaggaacatcagaggcagtggccagagtgggtagagcactggaaggggagtctaaggccagggtcccggctccaaccctgctgtgtgacctcgggcaggctgtgggtatctctgggccccagaatgagggaaagaagtagctgggatcctccttcctccccaggaagcaaagcagaggggtggtgccaagttttcttttcattttttttattttcagcacaaagggctcaaatggaaagcagctgcagagacagagaatccgattgtgaaggcacccgagactccaggcaggcggaagaggcagcgtcttgggtgctgggctgggtaacagaggccagggtattgaccagaaactccaacaagcaggggacagcttggggggtggggggttgtctcccaccccttcttcagggtgctggcctaggagacagggaccccgcctcgggcatctcctgcttaacctcagtttctgtgtccagacatgggcaggccatcctgactctcttagccttggtttccatctccaaaatgtgtccagtagtggcaccttccttctagggaggggttgtgtggttaaggtctcggggcgggctcctcagtcaaacaggcttggctttgatcctgcctctgcctctcactaactgtgtgacctggagtaagccacctcccctccctgtgccttgattttcccatctgtgaaatggaaacaataatagaactaatctgctggggagatgaactgagaagactcagcctggtgcctggagcagagtaaagactaatgattattgttgtctttctttttggaggcagagtctcactgtgttgcccagcctggagtgcagtggcagtggcgcgatctcggctcactacaagctccacctcccaggttcaatcattgaccctccagcctcagcctcccgagaagctaggactataggctcacaccaccaggcccagctaattttttgtatttttagtagagaccaggtttcaccatgttgaccaggctggtcttgaactcctggcctgaagtgatctgcctgccttagcctcccaaattgctgggattccaggtgtgagtcaccgcgtccaggcatctttcttattattattatcccaggagctccacctgctaaggccccagcctcagaaagcctcccttcccctgagtgctggttcatctcaacaatttcctcacatatttcttgagcagcaactataccggtcttggcaaagccaaggttctatctaggagaagaaagacattaaatgaaggacccgtgtgtgaagggcttggtgagtagcaggggctcattgacactgttcaccagcacctgccccctcagctgctctgtgctggactctttctgggctctggggacacagtcttcaggggagtcccaatcagagggtctgggtggaggtgagaagctggtgtgtggatgaggcagtttctcacactgtggcaaggtctgtgatggaggaagtccaggtgactttgggagctagaggtcaggatgggcttcctggaggaagtggttaggaatgaaaataacatctattcagcattattattatgatgtgtcaggcactgttctctcctcaacaccccgctccagaaggttttcttctcacacacccattctacaggtgagtctgggatcaaagaggcccagtagggtgtcagaggtcacgtagccaagacatggcagagctgagatgaaaccccgcagtgggacactgccccacttgccccccgacagcgctctccagcctccaggcctttgctccagctcttccttctgcccagacattccagaccctgcacc

SEQ ID NO: 1561895 - DNA, 4001 bp, Homo sapiens
ggcagcaacagcccagaaagagtaaagtgctcggtgcacggggagaagggctggctgaggggcgagtgcgcagggctccaccccctggccggggctggggagaaacactggctgccatggagcaggatcccttctggaccccagttctgacctctgcccctccttccagtcagctggagccccctagcaggaggagcggtttgtctgagttcctgcggtcccgcttctgtgcagcctgctgggcagggggctgggagggaggaaaaggaagcgggggcctagggaagccccagcgtctgcaaagagctcacgtcggggagaaaagtaaggtctgcccagaaacctcggggcttttcagagtccagggattttgtaggtcgtgggcctgtttgtcagaatgggacaggggtggcttccttttgtactgcatgcgtgagtgtgtgtggggtgtgtgtgtgtgggggggtgggtgtgggggtgtggcatggggcattaaaggggtcacaggaggctattcaggatggaaaggaaggccagagggtgggatttttgtctgggggccgcaggggttccccttgcccagtctcttggtcctcttgggcacagctgctgcttcttcaaaggccagcttaggtcacttccgctgcccacagcactgccctctccctggccccctggtgggatgactcgcactcgagaccactgcagcctgaggctacccttacatctgggggtgacttctgctgaaacaggctctttctccgtcctccccaagactgggggcctcccatagacccacagaacgccaggttgccagtggggggcagatcgggattaggggtaggcgtgtccctgacctgttactttcacacccacccacttgcgtctccccacttttttgggagaggccccactctctgtaccctgatgtctgtgaggtgcatgggagaggcagcgtccatactccccgcttccctcggggtcctggggagtggcagcaaaaagaccagcgagccttcggagaattataactttatgtgggaggctggggcgcgtcgcacactctcagtcgccgtcaccgcgggaagatggtgccatccacgttctcctccaggatggtctccacgcgcctccgctgccggggagagaggctggggtccggcgtgtgcggaggcgggcagggcccctcccctttccccgcccctaccggggcttgtctgcacctcttggcggtccagggggtccgggatccgcgcgggcttcagctgcggcggcaggaacagctccagccggatggcggcgcgcgcggacttctgccgctggatgagcagcgcgatctcctcggcctgcggggcccgggtagctgagcgcgcgccgagccccgccccgccccgccccggccggctccgctcaacgctcccggtgcgccccctctgccctccgaccccctcgcctcacccgcatgcgggtgtagcgcagccgcagggcgcggactcgcccgcgggcctccgctgccttgaggacgccgaggagccggttctggcgctcggcgggcagctcgagcgactgcgtccacgggcgcgggtcgggcatgcggtaccccggttccaccgacccgcacgggaaggtggaggccgccgcgcccacgtcctccagcaggtcgccgaagagcagatggcggtggcgctgcgcagggagcatggccgccagtccctgcggcgtcagggcccagcccggcttggggggctctgtcgcgggcgcccccttggcacgctcctcaccctgcgccgtgcctggcgcgctcttcccgcttcgctcccgcgggcccttgcgcccgccctccttcgctggcggcggcatcctcccgccctgcggagggaggagggcgtcccgtcggtgccggggctggcaccgggccctgcccgcccctcggcagggccccaacgtgcgccccagctcccgcccgctgggctctccgcagtcggttttgagttccgcacccccagcctctgagctttgcccaggcgctctccctctcccaagcgcacgtccccagcagctctgccatcggctgatcctgctcagtcctgcagtcaactaggactttctgatcaactcagttgtaggaaatatctttcctacccgatggactgttctgtttgaattgagaaaatgctgagaccccactgggttgatctcaggccctgccacatggagagctctaggtgacgcctgggggaccttcgttgtgcccctatgtctgcggtccccgacagtcagggtctcccaccagacagctcgctcttgcccttcgaggcctagatggttgtggggagcagagcctagagggcaggtgacagaggagggagggtccaaaagcccagctggctcctcccttcccggccccagcctacagctgccaccttgtccagccagggctgggctcgctgtgccagaggcagagccacggccagccccagcggcggctaacgcccccgcccctccttagctcctgcagccgaggcccagcccccacctcttggtccctacaccccctgcttgctgccttctctggtcggaagaacctccgccgtagcccagactctttgggcttgttgacgcggttgcccagcaaccgggagtcctgcccctccctcgaccaggtggggcgggtcgtggcggggggcagggtcccctccggagggccctgggttagagtctgggcgtggacgcgcccctcataggggtcattggggcatagaggcatagagccggcttctccagcttgggtgagcgtcctttccaggcggccgcagacgcgccatcctaggggttgtgggcccaggttcctggcttgaggggtctttggggttagttttgtgggtggggccctcggctatgaggagacctttgtggttaaggcccattcccttctgatggccagggggctctggccccagccactggtgttcacagaaagggataatggggcagaactcaggacccctcacctcttctagggcaagtttggggtctcaggggtcctggtgtccccaggactagagctgggttttgctgaacactgtgtcttgggatcttgggtcctagatactagattttggaaatctatttgtgcattcctttgttttgtaactaattctcaattaactacttaatcattttataatttcttcaggcactcataagtgtgttctagaatttcctaattcacgtgcttattccacagtttaaattaggcaaaaattagtgcaaaaagtccaatctgttacgtatctattacttccacgagatgtctgtactctctctatattcacagacctgccgctgggacaccttgctgggagtttggaacctgtgagtttgggagtagggctgtcccagctgaggagcagggtcttagctgagcttctggccttttggcaggaggctgttgggtgttcccattgtttttgggagactgccctggcctctcagtaagagggtaaattttgacattcagccctatgtcccagagccggcaccccatcccacagctaggcccatccttccagccctcaagcttttgctgctccccaggaaggcccttcctggtgctgttccctcccctcctgcaggtgcctttggggtcctgcctgggctgcagcaccagcttggcttgaggaaggtccctggtctccagaagcagcagtgactgcttagggatgctcacccagcagccgctttctctgggcagcctttgtgctcccataggggtgagtcctttgagacagggacctgggccatcctctcagcttccctgggtccaggccagggggacacatgggtggggcactttctggctcttggcgtttgtgggggagtcacgcagggagtaggggaatattcttctgttctgcaagaaggggcttgtaacctctttttataggactggaaaaccttgacaccccctagtccataatttgcagcaggtactcccaggg

SEQ ID NO: 1561896 - DNA, 4001 bp, Homo sapiens
aggacacgatcctgcctcttctacagaaccatgtaagacgctgaaaaactttgggaaataaaaggagaaatgcaggcaaatgtttctgtaatccagccagagactaagagtccttgtagcaggacaagtgcaatcctttccaacctcacaaggcaaacagacgataatagttgtcaaaagacaaaaattacaagaaatttagtttaaaatcttaattggcttatatttgcattctagaatcagccgatgcctcgttctataaaacagaatgagtgctctgatgagctgagctgaggaggctggctttatagacagaaaagggctgaagaaagcagaaacacagaacaaaaagcgaattggttgtttcaaagttattttccttgtaaaggttaaagcagagaggacttcctcatcatgccagctaaagctggtttacttgggcatttggctatattaactgtctctctctcctaatttctaggaaagtcaaataagcaacttagtttcagcttggtggcacggaacttcagcataagtgactccatgttgggttgatctgttgggcatagtgcaggagctcagtccaaaccaatagcctcttataaattttatttaacatagtgataacaacaatatgaccatggtaataatagaggcagcttactatgtgcctggcaccattctagggacttcacaatcttttttttaatgtcctaagttcttgaaggcaaggggctttacaaatattaactactgtaattattataacggtattaagtgggtactattattatccccactttttaatgaggcaaggttgagaggtcaactaacttgccccaggcaagcccatgagcacttcccacgtgctagaaactaagtccagaaattgtactaagtacgattaactcgtttaatactcaaagcaatcccaagatacctgctatcattatcagcactttcagagggaaccaacagagctcaaggcagcctgaacccggagcccgcgcttagccaccagctgcgtggctgcgggcagggcgagctgacccaggctgggtgcgcgtggggcgggggctgggtagagatctgttcgctcgagtcctcagcaagggccgcactggacgtcagctctgagtgtgaccaaggcccccggcttctccagatctggacgccccagcccgggagctccgtgccagcgagcctctgagcatcgcgggccgctactgccccctgccgccgcccgggccttgcagggagagcttgcccggagcagaggcgcacggccaccgggccccggcagctcccagccacgaccacccagagaccccgcagaggaagcggaagccgccgcccggcactttctgaattcccctctccgccctcaggtccctgcggcctcccgtcacctgcgtcacttctcgtgggctggcggatagagcccggcggctcccccacccactcggctcgcagcccacgctcccgacgcccgagttgccatggtgaaggacgcgggagaaacgccggaaggggcacggaccccagggagagcgcggaggcggccacgcgggtccttcctccacctgggcccaggcacttccggtctcgtaggcgtcggggaaagctctttgcggacttcgctgcgggcttaggacctccgacatgaagggaagcgggggctggaggacgcagagactctccctgggctgctcgaaggccaaggctgtaacgcggctccggtcctcgttttcccgccgtcggtgctggctgcctgcagttgccatggtgacgcgggccgcggggcagggcaaggtcccaagtcgcgtgcagttgctcctcgccgtcgccactctcctgccccaggctgtgggtagcagacgtcaaaagagatacaccagagcgcgacccggactcaggaccgcccgggtgggggctgcttcgggcattggacacacttcccgggcgcctcgtgaccgcacactcctggcctcacacctcggggtgggtttgcacgagggggggccgagccctgtcgctgagcgacactgaccttcttaaggccacctagctttgggtacaatggatgtctcatactgaattttaatcagcttcttactggaggacattaatgtttgttcaatcttcgttactacaaaaaatactagagtggagtggtaatatccttgtatgtacgtgcacacgtgcaactttctctgtaaatttccagaagtaaaatttctatgtcaaaggccacatgcaattttaattttcatgaatatgactaaattgctcttcaaagacactagcaaatttacatctccaccaaaactggagtccgataattttaattaggattatatcaacagcgatgaactgttgcaaaagaattttccagagcattttccattaaaccaattctttgatcagttttttttaatacaacatagttaaatagtatccatatccatttttattttatggaaattgtctttactgagtgattcttttacatataaatttcatgataaagattttacttctttaaaatttgtatgtcgaattttactttggtttccatcattgtgatattttgtatttcatgcttattttattgaaaaagaaaaaaaaaagggaaccccgacattcagaagctagcctggcatcacaggtccaccatgttatcctcctattgtacgtagcgtcacaaaataacaacctcagatatggttacagagagcctgataaagtgagacatagcaaatctactttgaaattttgtctaagcacagacaaaaacacagtcactgtgccactcacaaaataccaaacacccgtcttggagaaaatgagtgactgctacttcttttttttttctctctctttttttttttttttttttttgagtcagagtctcgctctgtcgcccaggctggagtgcagtggcaggatctcggctcactgcaagctccgcctcccaggttcatgccattctcctgcctcagactcccaagtagctgggactacaggagcccgccaccacgcccagctaattttttgtatttttagtagagatggggtttcactgtgttagccaggatggtctcgatttcctgacctcgtgatctgcctgcctcagcctcccaaagtgctgggattacaggcgtgagccaccgtgcccggccccctgctaactaattacagttttatctttcttctagtttgccttctctatagattagatttattgagatacccaatcatggaattggctcctgcttcctgaccacttccaatctagggcgaatccaacttccataggccctccttaaattacccataaaagctcaaatccagtaataggttctttataacacctcttttcgaagatacccccccatagttctgtcatggtatgtactctccctcagtgcaacccaacttgttcaactataggtgtgtcctggtggtctttggctaaaaggcattgacactagcaagttctattttcttttctttctgagacacggtctcaccctcttgcccaagctggagtgcagtggcgccatcagggctcactgcagcgtcaaccttcaggctcaagcaatcttcccacctcagcctcccaactagctgggactactggcatgcaccaccacgcctggttgattttcatttttggagacaggctttcactatgttgcccaggctggtctcgaactcctgggctcaagggatctgcctgccttggcctcccaaagtgctgggattacaggcatgagccaccatgcccagccgccatagttccatttcctttggcaaaattttgtgggtccaaaaatctgtcaatggcagtcctctacaaatgtttagtaaggagcaaattttacgtgggcagtctgttttagtttgcattgattatttcaaccagatctgatttcctttgcttcttgtaatttccagtgttacctttaagatgtgagtcttctgagttcataacaaat

SEQ ID NO: 1561897 - DNA, 4001 bp, Homo sapiens
tcagttttttagacccatctccctcagatctaatgtcacgggagtccagaattctctcctctctctgttccccccacttcaccaatggatgtcccccacatctgcctgctcggcattttgggggccttctgtgagccccccacatctgcctgctcagcattttgggggcttccagtgagcccccccacatctgcctgctcagcattttgggggccttctgtgagcccgcctctgtcttcacctatcccttaggcacccccttttcccaggacccagctctacctccttgttcttttccagacagaggagagctctgcttggctcccctctatcaccctccacccacaaactaacatgtctaaaatcagccacttcactcctcacaccttcccaggaagccgaataccccttaggactagtcactacccctctctccctccctagccctctgaatcttctcccccaatttcctgctcatccagcccctcctttctccagctgtcctaggttaagactttataaccagatgcccagatcacgggtggccacaggacattaggagaaaaggcaccagattatctgggtgctgatccccactccgccatttgctagctgtgaccatgggcaagtgacttcatctctctgaccctcagtctcagcctccaaaatgggaataacatcaggcacgtgtgagtaactaatgactttgtgtaaagccctggaatgcaataaaaacctgtatgtacacctatcagcagcagcatcatgacagccccactcatgcaggctggtcctgtgggcactgcaggtcatactctgatgaactgcccctgccagcagttgagagtttggacttcttttatttatttatttttttgagatggagtcttgccctgtcacccagactggagtgcggtggcatgattttggctcactgcaagctccgcctgctgggttcaagcaattctcctgcctcagcctcccgagtagctgggactacaggcgtgtgccaccacacccggctaattttttgtatttttagtggagacggggtttcaccgtgttaggatggtctcgatctcctgacctcatgatccacccgcctcagtctccaaagtgctgggattacaggcgtgagccaccgcgcccagcggagtttggacttcttaacttggcactcaaggccatgcacaatggtggcaccactatttgcaaaacgagcatgtgcactccacgtaggcctcacaccccaccttggggatgttcacaggccttccaggctagactacaactctagcacagggaagccagagcaagctgccctaggactaggctctcagccctcggggctcccaggtttgggtggatgaagggtgtggctctccaccgaggaccagagggagcaggagagtaagcactcctagtgccccagtagagagaaagcgccaccccagcccccagcagctacagcatctgatctgcccagtctcagggcaagcagggcaagggccagtcactgttttgcaactgaggacactgggtaccagagaaagtggctgtcctcctcaaggtcacacagtcaggctggggtaaagctgggccagcctcccctgggaggtttcgacgtctcctctccagactctacgttctgggtgtccagggggcctgcagccgctgggccagggaaaaagggacaaaatgaggccagtccctccacccctgcgtccccatcttacagctaggggtggacccaggcccgcggacaggaaggaaggaatgtaggatggcaggacagatgggcagggcgggaggggagagggtcatctcttctccccccgagttgggccctacctggggagctgcccactggagctcctggactcagagccgccgcctctacctacgtgcacaggctccacaggtgagtgtcttcggccctcagtcacttggcgcttccgggtcctctaagacagggtgagagcacggctccactccttctacgatcctagtgcggcctccacaggccccaatctgcccaggctccactccctggaaagaccccgcccctgctccgatccccgcccagggcgccctttggcctcggaggcgggggcggggccagacttcatgccccgcccaccagaccccgccccaagtccctgtgccaccgcctgccccacctccagaaaagtgtggatttcggaacggggcggacctagctcctcccagatttgcttccagcttgctgtgtgatcttgggtgaattccttcctcaatttgatcccatttcctgttttgtcaagggggaaagccgccttgcaggattttagagatgacatgaaatgactttgcgcggctcctggcgctcaaacgtcccctcctgggggcagcttttcctgaacccacccgtatctcccagactggacaggcccctcgcgtcatctgttcgcatagcccacagttgtaatttcatatttgcttgaatgactacttgattaatgtatatctcttcatttaaatttgaactctgagagcaggtcacgtacatccttacactccagcgcttatcagtacctcgcctgacaaacagcaggcgctccataaatgcccgcaccttcattccatccctgggacgttctggtcgagcggcagcgggctcaatactgacactggccagcagggggcaggcggtgatcagccttctggcccagccgcgctccctccctgtctgcaggcactgcgggaggggacaggtgagcccaggtgcgccgaggcacgcggaaggtgcatttactctcgtgccttgggcaaggcccgggccgggaacggctttttcctcttggatctgtggctcgcggctttcctggaccaaagacctttccgacgccctatggcccctgcaaagaagctgccctgagaagggcctggagatgaagtaatttgttctaaaagagagagggcaccgaggaaaggcttggcggagcagcaacggcgacgagccaggcttagaaacgactgggcggtgaggaggagaggtagctgccattattctgactcagggtgacagaacctgtttggaagtgactggcctcagttgtcctcattttggcagaagtcatttagtatcagtcctgatcccaggtagtgtctggctgctatctcagaagagccctgttgggagcagagctatgtcaaggtggccaggagggcagcgtcatacataccattttctgtaacatcaggaaatccctgaagggagcccgagaaggaaggaaggagaggtcacaggttggggctacagatgccgaaatcaatttacctctttgagcctcaatttcatcggcaaaggtggtgataaaagctaccttgcaggattctattgtgaggatttacaggatgaattaaataagtggttctcaaccttgactgtgtgttagaatcactgtgccctagacgaatactgatgccccggatactgggagtttaaaaacctctccagttggttgtaatgtacaaacaaggctgagaactgctgatccaaattaaatgcagagcacagcgccagggcacacactaggcattcaggaatgtttatcacatatttatttttatttaaaaaatttttgtgtcacacatttttaaagatggagcacaaattgttttcattgttcattgttagaggaaaaaaagttgatataaaggttgttgcagaaattgcatttgcggctggggtgaggtggcttacgcctgcaatcccagcactttgggaggcagaggtgggcggatcgtctgaggtcaggagttggagaccagcctggccaacacggtgaaaccccatctctgtttttttgtttttgtttttgttttgagatgaagtctcgctctgtcactcaggctggagtgcagtggcaccatctctgctcactgcaagctccactttccgggttcacgccattctcctgcctcagcctcctgagtagctgggactacaggggcccatc

SEQ ID NO: 1561898 - DNA, 4001 bp, Homo sapiens
ggagcgcacgcgcagcctggctctgcgctcaggccggctgaaaacgcggggcgcccggactcaccccgttcaaggaacgtgccgctgagatccaggacttcgagcgtgaccaggggcgcgccatcctctccagcgaacgccgcctcggcgatgcccccctgggctccgcgacccagcgcggtgcaggagaggttgaggagctgcagcgcggggaagcaggcgaaggcccggggctgcagcgcccgcagcggattcccggcgagcgccagggcgcggaggctgctcagcgcgggcccggtgcacggcggcagagcggccagctggttgtagctgaggtccagggtgtgcagccccgccggcccacccgggccccagcgcagcgcggcgatgcggttgtggcgcagggtcagcacctgcagctgctccaggtggccgagctcggaagtgctcagggcgcgcagcaggttgtggctggcgtcgaggctgcgcagtgtgcgcggtaggcagccgggcaggcgctccaggttgcggttcgccagggtcaaggccgtcgcatccgcggcgggcagcccctcgcagggcgagtcggtggcgttgctgccactgctcccccaggggccctgctgagtgacccggaagagcgggaccttctcctggggagggtctgcccagctggggcgcagcaccgtcagcagcagcagcggtagggtttgccgcatggcgtctggggagagaacagcaggacgcccatcaaatccacaggaacccccgcacaaagagtcagatgcgcgtcccaaccctacctccagggctctgaggaggagcacaggcgctggatgttccctgcagggcggggagacgttcccagagtcgcctagtgtgcagtgacctctcccctgtctgcttttgccctgtcgtctcccctaggagcacggtgataccccctgctcttcctcccctcaaggatgccttttcctcttctcgtgagagggaggccttcttcatctgtccaatctgggcctgaatctctcaataactccctccgtttatgtacccccatcctgtgagcttctacaggaaagggatgtcccctttattgctgcaaactctccccaggtaaacagtcactgctccataaacgtgaatgccctcaggaggctagaaacatgaggaagattttgtccgttcagcaactctcagttaccccgcttttccccattagaactgcccagccgcaggggaatcctagtttgcctaaaataagtcttggagtcagtttcttggcagcatgctcagggttgccttcagcagaagaacaaagccctgtgaaccctggagtcaaacatttgctggtcccatgtgggttccaacaaaagccagagcccccagtattagccctgcccaggagggatggctgagagctgctagttgtggaatttctggactacctagggttgcacaggtcagctaggagatcaagcagaggaagatccggcagccatgggctagcttgggagtggcaaagataccgttaaccatgccctggccatgaggtcactgctccatatccctcatcactgcagatgtgtattcctgccccagctctctgtgctgaccagtagatctccgagtcaccacccaggctccaggggaagggtctccctattactagctggggatgaaggcagtgagaaagatcctggaacctgaagccaggagcgtgtgcacccagcagtgtgtcatgcttacctggaagtggtccttttggagtgtggcttctctggatgcacctctgaagttctcagctttgttttatagattctagggaccactgatttggacagcaactcagctatgaactccagagggaggcctgtctcccagctgcctctctcccacaacccccatccactgagagggactgagatactccagtctttcccattgctcctcctttcccatcaagacgctgttgtctttagccaacaccctcattgctcagctccctcctctcccgctagggcctgcccctggccctttccaggcctggcacctcctcctagccctccccatctttacctctcggaacactacctttcccaggctggagaaatgaaaggagtagcggtgagggctagtggagtgcagtgaggcagagcagcgctgtcacctcttaggaatttgatccttcctgccaggtggctcccattttctgggatggctggaagccaattctcccaaaggagggaaggcatccgagtctagaggaagcttgcagggatttccaggaaaaagtggcaggagagaggatcctcagaagggtctggggcagagcaggctcaaaccagacccaagaggccccgaggacagtttgtttggtggctctgggcccccgctcagtgacagtgtggacgtttgtctctcgtaaggagtgagaataaacagaggacagaaatgcagaaagaacattcccgctgcatgcctgggaggatgggtcctgactaccagccccaggtctcccgaagatgtgatgcttgagtgagctttgtttagagaccttttttttttttttttttagtttttaaataaaaatattcatttttatcttacacctattgatatggtttggctgtgtctccgccaaaatctcaacttgaattgtatctcccagaattcctgtgtgttgtgggagggacccagaggaaggcaattgaatcatgggggccagtctttcccatgctgttctcctgatagtgaataagtctcacaagatctgatgagtttatcaggggtttccgcttttgcttcttcctcattgtctttcgctgccaccatgtaagaagagtcttttgcctcccgtcatgattctgagggctccccaactacatagaactgtaagtccaattaaacctctttttcttcccagtttcttcccagtttctttcccagtttcagcatgaaaagagactaacacacctatatataataaatgttcacttattatactctatgttgtagtcataatgaaaggaaatactaaataacaaaatgtttagaagtgattatctctagatggtgggatgacgggatttaggtggctttattttctttttctttttttttttttgtttagagcagacagcacctctctctcccagagtcccaaggcagagctcggtcatttcctctgagggcctttgatctgcatcctcccccaatcccgcctagccccatctgagagttcatcagggttaatgagccacagctttgcgtgacagacactgagaccagaactttcctcctgtcagtccttatctggacagccctgaggaactccaggatacctcagaaactggcctattagggttgattggttaattggaaattcccgaggatctccattgaggccttctccacccacagcctgaagatctttccagtctcagtgccagctaggaccctgctgctcacaagcgttgctcctctgcccgagcggggcagggagaggccgctctgtgctccccagcctggggctcatgcagtcacctcccagggagcctgggcccaggccccagaggtataaacacatgccatggagacataggaggccaggtgggaagaagtcagagagaggtgggttcagcttagaggtggggtcagcacgcagaccagtgggcagcctgcttcctctttgcctttgcacggacagctccacgcccaataattaaaacattaagccaggcatggtggcttatgcctgtaatcccagcatgttgggaggctgaggcaggaaggcaggagttcaagacaggcctgggcgacatagcaagacctcgtctctatcaaacaaacaaacaaaaagaattagaacatcatgtttccctcagagttaaaccagccaggtccacccatgtaaggcgactgaccatgctgaggccagcaggggtttggggagtccaggcagggctttcccagatgagagggagccaaatccatggaaa

SEQ ID NO: 1561899 - DNA, 4001 bp, Homo sapiens
gattttcaatggacagtgctgataatgcaccaattggtgaagctccagacaacagacagctctagatcacaaagatgacaaggaacaatttcacagactgacagtctgatgtgcgaaggcaccaacgtacagagctctcagcaaaacaaggcttgcttcgtaaggcctccctgttcacgtttgactctgtagatccaacagccagccggctgctttatgcccaaagcctcaccgcacattgcgcctgaggaggcagttttctcacaaaggaatctagacgagtgttgcccttacccttctatccataacaaaccttggaacagctgtaacagaaaacaaagggagacagggtcccaggattatggacctctgaccccggcttccgcatctataaggaattgagtctactaacccctaaccagcaggcttccaggagcgcccaagtctctttctagcaagcctctaggggcagaggtgggtgggacagcagcctctaactggtaagacacaactcctgctaactcctgggcctactctgggcctcagcttctctaactgggctctcctgtaataagtgtagtgaggttccatggctgcaagtgagtgcatagccctggcatactcaacaagctcctgaagccacgcaggagacgggcttcaaaaggagacactccctgtttggaatgagtgcgttcttctacacatgaagttccctgtgacctaagcagcgtttcagacgcgtctagacacttcaagaacccctgggagcctagcgccagatccagcacacacacgggcttaggcagacgtggctccacgggcacttttctctgagaggcaggggaagtgcactccccgtcttctctgggtgatgaagacaaagaaactctggaccacccgctgcctcaacaacctcagagattctgactctaaagagcccccctcctgtaagtcctccagcggccacagccggttacgagcacccacaggcggctgtcaccaaaaggtaagccccacagtgggaaggtcaggatagagcaggagaaccgtttaaaccggggcatctggctgccaacggatgcttctgccttggcaggaggccgcattaggacgcggtatttgttcaggatcaaggccccagctgtctaataagttccagaaaggcttgcaggattcgcgtgttgtgaccccacccccagccttcgggagacgccgggacactggccccgccacccgacctcgaggctcccccgcagggatccccccaggctggcggggaggaggcccgctgacgggagccgccctgctcctcggagctggcacctgcagaggtgggctgggcggccgagggggcggcaccgcgggggccgggcccgcccctcaccaaacaccgccgggcgcccgcgcacaatcccgccgccctgggagcccagggagaccattgtgcggccggctacgctgggggagggtggcgcgcgggaagggggcgcctcgggggcgtccggggtgaaggcgcgggcaggggatctcgggccgggtgtgccctgggtgggttctgggcggggtctgggcgccaggctccggggcgccccggggcggggagggcaccgcaggccggggctgttggcggacgggggtcagcgggctcgggcgggcggcggccgctacctttggcgagcgccacggtggagttgtcggtgtcgatggtgtagagaatgccctcgtagcggatctgcgccttggagatgaggctgatcttgctgcccagatacggggtgcctgaggagccgctcatggcggcggccggggtgcgtcgggccgcggtggggaaggagcgccgggccgcggcccgctccgccgccgcgcggtggcctggccgcccgctcctgcgctcctccgcccgccgccgcctccgcctgggcgcctcctcgccaccgcccgaggggcctgcgcgggcaccgagcgaaccaagaaggggcgcgcgactggggctctgagaggagcgcgggggaggaggggccgccgcagccacatccggggcctcgcgccgccacgcaccgccacgcaccgccccttcacgctcgccgcccattggctcgccgcgcccgccgtcctttaaatatggccgggccgccagctggggggcgggccctcgcgtcgttcctgcgcagcaaggcgccgctggccgggggcgggtctccccggcgatccgccccaccctcggccggctcccggcgggcccctcgcggagctgggagcacgagactgagcgggcggggggaggggtgggaagcggcccgggaggagcgcgcgtgcgcgtgggcgggcggctgcggtttgcacgctcagtgggcgggaccggggaggagcgccaggccccgcccgcgcgcgtgccggcgccgccccggaccctgggcgccgcgaacacgggggctttgcccccttggcctcagtttcccctcctacagaagtggggtccggacgactcccctatcttgggccagatgcgcctatagccctcaccctcatgggggaccggggagtggcggaggccctgggcgccgggtgttcccgggcagccccgggactcccgccccagtgcccaggtgccggcggggggcgggcgcggcggcagctcccgggaaggcggcgcttccggcgtggcagcctctaaatataacatgctgagcacactttctcttttaatcctgcccctcctcccaaagcctgccgcagctttccatttcccttaaaataaattctgactggctaccgggggcctcggagcctccgctcgtacccggggctgcggcccggaggccttgcccacctccccggccgtggaggaagctcggccgcccgccgtcgcttagctgcgggccctcctcgcgtatactccgcgtgattagtgaccgagggcgcgcggtgtgtgctttttttgcttccgtcttgaccgtgaacatcatcagatcacggaccaatattgggtcctggaaaaaaaaagtagtgggtggtgactataaaaatgcaataggctgggcgcggtggctcacgcctgtaatcccaacactttgggaggcggaggcgggcggatcacttgaggtgaggagttcaagaccagcctgggcaaaatggtgaaaccctgtctctactctaaaaatacaaaaaaactagccgggcgtggtgacagacacgtgtaatccccagctactcgggagtctgaggcaggagaatcgcttgagcctgagacgtgaagattgcagtcagcagagatctcaccactgcattccagcctgggcgacagagctagaccccgtctcaagaaaaataataataaaaatgaaatagaataagctagaagatatcagatggcgtggtgggtggctcatgcctgtaatctcagcactctgggaggccgaagcgggaagatcactggaggccaggagtttgagatcagcctgggcgacatatggagaccccatctctacaaaaaaaaaaaaaactttaaaaaaaattgggcgagtgtgggggcacatacttgtagttccagctcctggggaggtggaggcagaggcgggaggatcacttgagcccaggagttggaggctgcaatgagctgtgattggactactgcacgcaggggtggcagcaagaccctatttctaaaggaaaaaaagaaaataatagtatctcgcatggtgaaagtaagtattattttgtgaaatatttaattcacctgtttgtgtaagtgtggacttggtaaggacctagaatgtgtttctgactataataagaagatcttacctgccctgcagggtagacgctgtgactccccatttgacagaaggggaaacagaggcccagcacgggggagtcacgcagagaagttgcagtctggcctggtggcatcctccacaggcttggggccgcatcacactgtctcttgtctcttcacaaaggtgaagccaacctgctcccaccagagcccggcaatggccagt

SEQ ID NO: 1561900 - DNA, 4001 bp, Homo sapiens
aggtggaggttgcagtgatattgcgccactgcactccagcagcctgggcaacggagtgagataccccctcaaaaaaaaaaaaaaaaaaatcccagcaggacaccggcaggacaaggaaggggatgtttccctggtaagcaggaactgaactgagaggaaaggtcacggtcctgaactagtccaggtaactgagcatggtctgcaaaggcagcctcctggcatcagtgcaccaccctgagatgacagcctgttgcctgactgcctcgatctctgtcacctcagccctcagtgcctggggcattatacacagtattagcgtcatgagggggccaaacggactctacctgacagttacatgtacaggtacctccaacccacccctcaacctgtgtctctcccaaagctaggaacacttggggtctcagaggccccaaccccagcccattctatctcctaaaaatctctagccagcccctccatccagcacccctgctgggggctcctcaatggactttcttctcctgcactccctcccccaggcagctgccaggggattccttctaaagggcaaagctgatcttgcccctgctctgtccaaatccttccatgagcaagaccaagtgcagtagacagagttctggcagcatcagctccaagtgtaaatcccagcttgactgattaggggtgcaacctcatgcaggttatttcacctcgggttctcacacctacattgcaggcattttaagaagtaaatgtatgatgggtgaaatgcctggtattcctcttggtccccagaaccagagcagagcttgcagcagggtccccaaggactctcctgatgcccctcctctatctaccctgacctgagcccctctctacttcacacacaagctcttgccagctctctgtgcccatcctacatgcttctagaccagttcaaaggctggcctcaggacagcatccctgatctccaccccccagagggggcatcttggagcacttggctgaggacaccccagggagatttcactctgaggcctccccagggctggcctataggtttcccaggagcacagagggcagagtcctgggggtctctgggccctgcaccaaggaaatgcagggcaaatgcctgtgggaatgctagttatgggcaatgcaaagaggcagtgaatccgggcagggagagcaggaggggtttccaggaagcaggactgagggaggaaagggatctgggggcactgcagggcttttggggtgcagagatatccagaacttcttggttgggatgagtgaggggagatccgtcttccctcggtggcctaagcactggcagcggaatgggcccatcacctagctactggctctgatgaagccagtgtttcaggactgagggggccgagagcgccccctccaccccgagcacacacacgcgcgcacacacgagcttctgctgggggtgggagggggggtcgccattcaccagcagcccacggcccgcagagccaactgatagagaccccagccacaggccacaggacctgggagtccctgcgatgggggaaaccccgcccgcacctccccaggctccccaccaacgcgtgtggccccggggggcggggcgcagagggaagaggtgacataatccgagccgcaccccctctggccgccacctccccccaggccgggcgaagcatccatgacatcatccgcctcctctccgctcccctcccccttgggaccctagcagcgggacgcgccccctacccagtccgggtcaggtcagacatgccgcgcagtgcagcaggcacggcggcaggtcggagccgggagggatgccacgatgggcctgcctcacttactcgctgcctcagggtccggcgcggggtctccgacacgggcgccaccggccccgcttgctggcgcagcccgaagcacgcccggcggggcgcgctgcgcgggcccggctccgctccgcgcccctcctgctccccgcccgagccccgcccaccagcggctgcggcaaacgcgagcccgccctccggccacgccccccagggcagccaatgcccgggctggggcggggtgaggcgccttaaccccttcgtcgctgcgccccgcccgcgcgtgggacccctcagcctcaccctctctagggcgcagcaagtccgccgcgagcccctctgctcatcgctcgttaccccccaggcccttgggcttgggctcaggcccagtcgttcctctgcaacaaatccaatggaaccgcgccctccctgaatcccacgtctaggaagaggaggaggagcccctcttgcttgggggaaggggctcccgactcggagccccgagccccattcctctcccgcgccagctcttcgggacgcggcctcccagcggacgccctgagaccttgcaagtccgctagggaggggtcgggacgagccgtcgcgggtggatccgcccggccgagcaacgacccgcccgggcgcgaggaccacgggctgtcgtgcgggaggcgtcgaggggcagtaaactccgttcgtgaccaaacggagacgatttgaaacttgctgctcacactggatcaccgtctggaaggtgcgacggggaaaaaatacacattacactccagcaggattgaacgctttcaccctgtgccccgcgcctggcgtaacgcgtggccccagaccacacgctgtaacccggggtgagagggagtgaggtgggacttcgtaccggacccggagcgccggcctcgcccgcgcgggcagcgttcactgtggggagtgctcactcagcctagggcggcccgggaggactgccgggaggagggagtcggccttgaattgaggcctcagccttgaatagggtagggaggcaagcctagccgagagtttagcactagcaaaagcctggaggcaccagggtctgccctaagaactgcagcgcctctgctctggctgggatttaacgcattacgtctctgctgtttataggtgttgtgtttggtcttacgacttcgtattctatagtttttatttattcctgttttctgaattttcccacatttgcttttatcttctatcgtgattttcaaggcagaaagtatttttaattcttctcgcggctgcctttagatttatcaaatgaaaatagtttacatttcacacattagtaaagtcagtgacaaataattcgtttttatattcccccatgagaaattttgtgtgcttttctgcctcctacctgccgccctcactacttatatttgtccacttaatcaggacgacagacctaacttttgtttacactttttttttaagccacaacattctttttcaatccttgtttttggcttttgccaactctgtttaattggtttcaatgttactgccggttttttgtgctctaatttttctattcctcatttggacccatctctcacatgactggtgatttcagggaggactctggaatgttgtatttcctaagcctttgccttaggtgagaatgcctttataatgatttcctgtttataggattcttgagtctcaagctttccccctcaaaactcttgtctttatttcattgtcttctggcactgaaaatgcaaagctgggtttgtctgtttaaggtcagcagtttgcttggtgcttgcaagggtttttctttaccctcaaaagtcaaacattttgccagtataaatcaatatgggccttatctattaattttccagaaacaaaagaggtcttctttgtagcttagaaaagttttcttcctgtccattctgtgaaaagatttgggtttttttctttcctctcctctaaaactatcacattggatcaccaatgtcaaataaatctgtttgttttctctgcaccctgggagactatatcaagtttttcttcaccattacggatttaattttcttcagagccaagagtactgtttattttctccaataagacatttgattctgcttgttttatttttctttcagc

SEQ ID NO: 1561901 - DNA, 4001 bp, Homo sapiens
actggtggagtcacatgtcaagagcctttgatatgcttctagttcccagcagattgctacactctacggagtctcttctatggaaataactttgtaaatgtaaattgtggggttcataaaaattgccctcacaggattctatacaaaagagaaattgggaaaaaataaactgccaaccacaagggagcagtgaaatgaattatagtccattaacccaaaggaatattataccattattaaataataattatgagaaagtttacacaggataatactaatgatatagtattttattgaaaacatgaagacgctcagttgtatatccagtgatctctagtatacaaatgtaaataaataggtataaaaaataataaaaatgccaagtgtcaaatgtaagcaataattatctctgagcagtaaatttatgacgaatttttgctttttattatgccttctaataaacatattcacttagaactgacgcgttggcaatgcttataattagaaaattaagaactaccttaacttttaaaaattggaaacttctggccaggcacagtggctcacaccttgtaatcccagcacttaaggaggctgagaggctgggtgcgttggctcatgcctgtaattcaaacactctgggaggctgaggcgggtggatcacgaggtcaggagttcgagacctgtctggccaacatagtgaaaccccgtctctactgaaaatacagaaattagccggtgtggtggtacacgcctgtagtctcagctactcaggaggctgaagcaggagaatcgcttgaacctgggaggtggagtttacagtaagctgagactgaaccattgcactccagcctgggtgacagagcaagactccgtctcaaaaaaaaaaaaaaaaaaaggaggccaggccaaggcaggaaaattgcttgagtccaggagttcaagaccaggctgggcaacatggcaaaaacccgtctctacaaaaaatataaaaattagccagatgtgatggtgtgcacctctagtcccagctactcaggagggtgagatgggaggattacttgagcccagaaggcagaggctgcaataagccatgatcatgccactgcactccagcctgggcaatagagaaagaccctgtctcaaaaataaagtaaaataaaataaagattggaaacttctcaaaataatcacagaaaaagtaaatatcaaaaaactaatttgggggacttagggaaattaaaaagaataatcacttaaaaaaagtgataagcattaaatctaaactctgtaaaatttggctgtaggccagagattcaattgtctagtgggtagtcttattcctgttcccctaaattaagaaaggcttatatgtctcgatacaactaaaatacaatactttaaaaatattttaaacatttcattgttgcctaatggtaacacacaataatgagatataatctgtttaaaacgctaagaatatcattcaatgtttaaaaatctataaaactatgaaaacacatatatatatatactattttaattattagcaatatttactagtattctctttttgtgtaaaatatagaaaagtaaattttctcctttgggatgtcatttttatgatgaacattgaaaccaaactttgagcaaaaagcccttcatggttaactgacaaactaaatgaagaaaagattaaaggtaccttaaaaaagagtcactcatatatggggaacagggaaactcaccagggcatgaaaaggagaaccaaaccagacatgaagaggaccttataaggaccttataagagtgagcaaaatactcacctgcataaactggctctatgcgaccttcctgagtgttgagtttccaaaaaatgtgctctttggatacctgaggcccaaagggctccaatttttaaaggttttttatgtagtctttccaaaatgtggcaagtgcatccctggtaaggcctgagcctgtcatctgcttctcgatagtggcatatctggtatggataagactcaggcacttcaaggcagaagggaggggtagagaaatattatggggtggctgaagtgggtacttcctgatttcaagtacatattgtaccttcttcacagttttccctctgctcagtcctggccaacaatgaaacataatttaaaaaccactgtcaaaaacatatccaaaacctggaacaggtgaaagtgtttttgcagagtagtgtttggcttggcttactactgattggactactttacaactcttagaatgcagacgttaacccatagatttttgtccagtagagatgtaaattatttcttttcaatggaaggtataatcccaaggattatggtttatggtcctctaagacattcaccaattttgtatctaagccagaaatcttattctaacatctcgggtaaaattgccatatatcttagctcctcaaatgctccttaagactgattttaacatcttactagtttccttattaattaatgaattaaataatgcatttgttgtatgttcttgttatatttgtatgttatatttttagtttttttgaaatcaattcttttttttttcattttttaatcttcaacttctattttaagttcaggggtacacatgcaggatatgcaggtttgttacataggtaaacatgtgcgatgatggttttgctgcacagatcatccaatcacctaatcacctagctattaaactcggcatccattagctattcctcctgatgctctccctttccctgctccactcttaagggccccagtgtgtgtcgttcccccgtgtgtccatgtgttttcattattcagctcccacttataagtgagaacatgcagtgtttggttttctgttcttgcattagtttgttgaagataacagtttccagctccatctatatccctgcaacagacaagatctcgttcctttttatggctgtgtcatattccatggtgtatatgtaccacattttctttatccagtctatcattgatggccatttgggttgattccatatctttgctgttgtgaatagtgatgcaatgaacatatgcatgcatgcatctttataatagaataatttacattcctttgggtatatatccagtaatgggtttgctcggccaaatggtatttctgcatctaatctttaaaggatcgccacactgtcttccacaatggttgaactaatttatactccgaccaacagtgtaacagcgttcctttttctctgcaaccttaccaacatctgttgttttttgactttttaacaatgaccattctgactggcatcagatggtatctcactgtggttttgatttgcatttttctaatgaccagtcatgttgaacttttttttcatgtttgttggctgcaagtatgtcttcttttgagaggtgtctgttcatgtcctttgcccactttttaatggagttgttttatttcctgtaaatttgtttaagtttcttatagaatctggatattagaactttgtcatatggataaattgcaaaaattttcgtccattctgcaggttgtctgttcactctgatcatagtttcttttgctgtgcagaagctctttagtttacttagaccccatttgtcaatttttgcttttgctgaaattgcttctggtgtttttgccacaaaatctttgcctatgcctatgtcctgaatggtatcacctaggttttcttctagggatttcacagttttgggttttacatttaagtctttaatcaatattgagttaatttttgtataagatgtaaagaaggggtccactttaaattttctgcatatggctagccagttctcccagcaccacttattaaatagggaatcctttccccattgcttagaaaacgattctttaataccacaaaagttaaaactgaaagacttcttacaaaataatttgcctatactcttaaaaatttcaagattatgaaagaaaaaaggattaggaaccac

SEQ ID NO: 1561902 - DNA, 4001 bp, Homo sapiens
taagtactcactataatttcatcaatgattcatgttactgaaaacaatgtctatgtcttccactgttttgccctcattatcatcaattatacaaagcgaacatttcagcatcatcaataaacatgggcataaatgatttttcagtgctcacaaggcaaatccttgttgaaagtgtgttgaaactaaagtaactactactgaaaaaaacaaagcaaaattattttacactactttatctatcaggctattactctcgacagcatttgatttataacaccagaagtgttagctctctataaacccataattattaaaacataattaaatgactaaactttcaacatttttaaagatcattttaattgtgttgttcggttctattattaaatcttcctgcagtaaatttgaaaaaaaaaattccctcctcacgcctttgttcgtgcattgtggaagccgatcctatatagtggattctttttccacattaattccctttcttacctccactgttttgccttcgtgttcataaaggccgggacttgcaataaaaatctacaggttttaacgaactattaacaaggaaatcaacttgatacctagtcacccctatatccttttgtaaagatgaggtaccaggagaaatgcgcactaccctcaatagacctcacccttgctatacaggttttagtttattttagcaataggagtgcaagaagtttttgctacatttctgtaaatagctaaagaatgaaaaggaaagaggtgtgaaaaggagggtgaaaaacgccagagacactcaagttagaatattaccaaactgtgatgggataagcgggagatcttggtgggagacgctggatcgtacacttgtgtttcttaaagaatcagtgccactgtcaatctagctgatttagataaaccttatacgcacaaaattcagagatgggttcatacagagtgacattagtcacaaaatcttactctgagcaacttcagcccatgaatggggatggaatacagagaaacacactgttgggagaacagcccattcagacttctctgaaggcacttatcctcacggacaacacgctcgttttagggctcccctagagttccaggtttcaaaagtcacgctgcggcagcgaaggaaggaaacctagacaaggggtaaacacccgatggtgggtacgctttgccattcgggggctggggggacaggggcgagaaggaaagaaatgagggtgcacggagcgcggaggcacagcggcagctgcagcctgagcgcccgccgacgggcacctgtccgcgggacacccaggccggcagtgcccaagtcccagctgcggtgcagaggaacttgtgccgcgcccggggctgccgcctgggggtccccgccgcaagcgaggcgaacgcagcaccgcctcgggagaaggtgacggggtgccgagggcaacagagaggggcgtgcgcccacacgtgcgcgagctgcaggtgcccaggggcggcgcgtgcacgccggagtgcgcgcgagtgtgcgcgtgtgtacacacggacaccggagggaggcggcaccggccgggagggcgcgaggcgggagctcgggcggagggcgccgcggcacacacagcctgacccccgcccccaccctaacccccaccgcccgcacccccaggactcgacgggccggttacctttctcctctctccacacctttttcttcttgttgctggggtacatgttgccgtgggggtggctggctttaagctgcaagttccccaggctcacgggcaaacagggtgtgtgtggagtgggaggggtgggagggggcactcagcagggaaaaagtgaaagaggctctgcgtcctgcgctgctcgccgctcgccgctctccagtcgccgccctcctccctcagcccgcgctcggctccggctcccacccgcctcagccccgcggacgccgccacagcagcacctcagagcctgtcaactaggtcacgcctcgcgctaacctaacacccgcgcaggcaccgcctaccagccgctaggcagcgccgcctcccattggctgcactgcccgccgctctccgtgttctagccacggcgcgccccaacttgggccccagggcgcacgcgcaggcgcaggctcgggctcgacgccgacgacgctagggagctggagggggcggagccagggagcgagggggcggagccagggagcgagggggctggagctgtcctcgagacgtgggcgcggcgtgaagccgacgcctagtgggagagggaggtggaccgcgcttaccgctggcctcttggaagacttgagggcgtggcctgtagagccaggtgcgccaagtgacaggcgagctagcggaaagccgcctcagggacttggaggatgtagaagtgggaggagaccgagggtcaacacgaattgtccgtgctcactccaactgccctgttgaggaggattttcaccaggtaatctgatgctttcctctgggtgggcaactaaaaaagaccaaaagaaatgaaagtattggcaaatggttccacatcgtatgcagttggctcctcaaacctgtagtgaaaattacaaatttcattggaatttggtgaagtttagaaagaacaaatgtagactgcgatactcaagacggttttaagaaccaagaagttgcggacaaccaaaatgttatattgaaaacacgtcttacgtcaaaacaaatccagatgcctgttaaccagagccgagtggtcttactttattctaccaattgcttaatgttaagacgcaggtccaaaaagctggcttgattctggataatactcacctggcgggttctgaaaatccagtttcactaaagtccgccacatgagtagggtgacctataatttagaagtttggtaccctccccccaaatttgttgtgtttctatatatcagatcatcttcaaggctaattgagtggatgttgtaaatccacatttatttggcagtttgggtacttgttatatatattgggcaaataattatttggaacacatttttaaaaaataatagaagagaaaaggaagaaaggggggaggccccaaaaagaattgtaaagaatggaatatttttagtagtaggacactctcataaggatgattcacaacatggtaaggtaatttttgttttgtctttttttttttttttttttttttttgaggcagagtttcactcttgtcccccagctggagggcaatggctccatctcagctcactgcaacctctttctgccaggttcaagcaattctcctgcctcagcctctggagtagctgagattacaggcatgcgccaccatgcctggctaattttgtatttttttagtaaacatgggttttcaccgtgttggccaggctggtcttgacctcctgacctcaagtgatcccaaagtgctgggattacaggcgtgagccaccgtgcccagcctgtttttcttttaatgctgtgaaatacgaaaaaaaatagatttgggataaataaagaaggcttcaagaaggaagtgacatttgagctagtaataaaaatatgtacttatttattggcactagaaatagaaagaggtctttgattagagacattaccagggaagaataaataaaacctgataatgcaatagattttgaaagaaaggtgaggaagaaaagaaaaacatttcataggatgggtaagggggcaaaatagcaatgctaatattaagcaatatgggaacagttgcagattttgtagaaaagatattgacttcttatgtagaaatgtgaaaggtaagacaagtacatcatactagacaccttcccttcaacagagaagctgtttgcactccagcctccagccagtccttccacatgtgctttcttaggaacattacactattgattatcttttctttcatgtcagctcaaagaactggaacttttattgtgtgaaagcacattaaaagtatgtagagggcatttgt

SEQ ID NO: 1561903 - DNA, 4001 bp, Homo sapiens
tttttaatgcagattttttgtatttttctatataatcgagcaggcaataaaactgatgagatttgggcgccgagcgtcctaactgaggcctgtgtctcagggctgagagccagtgttctccgaactctgacagacaggtccgtctgtccttccttctttcgctcagcctcgcctctcgcctgccgggacgccagagtccctctcctttcctcgttgctctcttcctggcgcggactactctccgggcagcaaagcagctgtcccggcttaacgcgcaaagttcagaaagccaggagtctccagatggccttggtgacttctcgggactatgcctcgccgcccttcagcctggagagaagttactccgggacctcccaccctctcgtctctctctccggctctgctcgagtctaggaggcggcgctggcgtgcgctactctcgccttagccaaggtcccctgcccgcccgcgcacccgcccgtcgcccgcggcccgcgcgcccttcctccctctcgctcaagtcaaacaggtcaaggctggggccgcggcagggacagggtccggggtagtctgggactagggacgtgggacagggagtccgggccggggcaagggcgggggccaggaccggccacgactcacagaaagaactcgggagaggaggggctgtcgctggtggagcccgcctccctgaagccggagttggcgagtttctcgcacttgaccttgtaggcgtctctctcgcgggccagccgggacacctcctgcttaagctgctccacctgctgaatgagctgcgtcttctcattctccaggtggtgcttctgctggacgcgtttatacctgcaagactgggcgtagccccggttcttcagggtccgccgcttctgcttcaggcggatcacctcgtccttggtgaagccccgcaggtggcggttcagctcgcgcacggacatggacacgagctggtcgtcggagaagcggtcctccacgctgccgttgccgcccgccgccgtcgccgaggccgtcgcgtgcggcccgggcccggggtggctagtgggcagctgttgcgccgggctagcggcgctggacggcggcggcgacgcttggtgatgatggtgatggtgcgggtgagcgtgcgggcccagctcgtcgtgggccacgccggcgcccgggtacgcgtggtgcgggtgagggtggtggtgatggtggtggtggtgagcgccgcgaaagctgtcgaagctttgcagcggctgtggcactgggtgcgagccgatgagcgcttccaccgcgtcctcgggcgtcaggttgagcgcctcggggttcatctgctggtagttgctcgccatccagtacagatcctcgaggtgtgtcttctgttcggtcgggctgaagctgggcgacgagggcacggagctacacggagtgctgagcggtgtggaggacaccgagccggctggctgcaggcgtgtgcagggcctgcccggacgctccgcgcgccccagtggctccttcttcacgtcgaacttgagcaggtcgaagtcgttgacatactccatggccagcgggctggtgggcagctctggccccatgctcagctccgcggccatcgctgaagcgaggcgcagccgccgctgccgcccgggaaactttgcggccggccggagcgcgccgagccaagcgcgggggggaagagcggagaagagctggggaggcggggagcgagggcgcagcgggccggggccgccggccaagcctttgtctggggacgcggcggcgcgccggagagtcccgaggctgcctgcaccgccccagagctctgggctgtgcccgcgcagggaccgggccgggtagagtcgggcggggtggagaggcaagcggagcgcgcggtggggctgaggggaggcgtggggcgagtgcccgttgctcgctctctagctctcttgctcttacgctctctcgctcgcagccgctcgcagctcggcggtgcagctgtgctggatccggcggcgccgcagccttttatcgcctcctgatgtcactggggtgcgggggcccgggcggcccggtgcgcgggccaatagctgcacggcctccgcggcccagcggcgcagggcggggcgcgcctgacagctcccccgccccccgcgtcagctgactggcggcccgagcggccccggagcggcggaggcctggcggagcgctggagcggagtgggacggccagcctgggcccacccccgtaccctgcaggtcccggcccacgcacgctcgcctggagtgcgcgccccacctctaggccaaatcaccgctttcccctcctcgcgcactctcctccctcagttccctttgcaccccacccccatcccgtgtcacccccaaggaggctcagaatgagcgccgggacaacgcctcctgggccctttgttcccaagcggcccccgcccagtgggcgacgctctgtgtgtcctcgcggcttctggccgtgtgtgtcgtgcgttcctgtttctggagatctgcgcgtatttgtatgttggggagggcgggctcgaggctccgagagttgtgttcagacccaactcttaacctcaggggacctttctcaggccaagcgagggcccctcctggcgggtgcagtcgcagagccctgaggttcgactccactggccccgccgctccccgcgttcaccccaccgcacaatgttcacagtgaaggcgacgggaaaagcagcagcccaaaggctctgaattcctcttccccgccacacgcacggaatcctgagcccccggagcctcggggccgaggccggcccgggacggtgctccgagtagctctccactgctggggagccggccctgtttttgtttgaacgttttgtaacgattaagcagatcccggcgtcagcccgccgcggagaggctcaaacaggcataaagtgcgaccccaagtggccactgtgcgcaaaggcgccgcgaccgcccggcccacggccggaaggcttggacggcgcctcgtacccagccaggtctcccctacctggcccaacccaagccagcccagaacgcatactatgtgtgcaccagagcccaggacaggttcccctcgagcgatgtacaggtcctcgggtcccgtcttcgtactcagccgcgagcctcgagccgcgagctccgctctggtcgccccgttgaaattccgtgccccagcgttcgggggtgcccgtcggctgctccctgggccggaaggtcctgggcggaggaaggccggtagccaaaagtggaagcgccacagtgaagcggcccagggccaccgggtgagaaacctccccggagggcagacggggagaccgaagcacaccgcactaggcatccagactgggcttgggagccgcgcaccctccctacccagatccaggatggctagaattaacgggttctttctgagacctcggctcaggcgccgaaaccggatagatcgcgaattcgctggacccggagacccgacccgcctcccgcgtcaccttcttctttctagctttgggcgcgcgcagcgaaaggcaggagaggcgcgcactgggtgagtgagtcccggccgctgtctgcgctggaccagcccgactgacctcgcgcgtaggggtcgcgtgagccacaccggtgcagacgcgcctagattatttttaaatgttagaaggtaaaatatttgcctccaattaatctgaaaactctctattctcttgcgccctcggagaggctggggtacggcgtggtattgggccgcctatttttaataaaatgagtgtattttaactaaaacttaactcaatcttgtggggtggcaaattaaatgctggaagagcgcgtctacaaccctcttcgagaagcgtgctctccgcagaaatgagtcggccgcctggagagagagcctgggcggtgccgctgcgcagcccctgccagtagctgggggttggggactcgcaccttgtaaatgtcctcgtcttgtttgaa

SEQ ID NO: 1561904 - DNA, 4001 bp, Homo sapiens
attcaagatgagatttgggtggggacacagccgaaccctatcagtggtcctcctccccaaaaacccattaccctgatcttactcatgtcaaaaacaggcaaatcctaattaaaggtccttctgcaaaatatctgaccagtcagtactatcttcaaaaccctcaagttcatctaaaacaagggaagtctgagaaacgatcacagagatgatgagcctaaagagatatgatgactaaatgtaatagggtgccctggataataccaggacagaaaaaggacattagggaaaaactaaggaaatgtgaataaagtacagattagagttaataataatgtatcaatattggttcagtaattgtgacatttcagatattagtaataggggaaacgtgggctatatgggcactcactgaagtatctttgcgataactttgtaaatctaaaattattctaaaacaaaaaggttattggggaaaaaaagaatgggtcaacatttcaaaacaaataaataaaaaaccactgagacaagtatagctctcaagacttagcaaatactaaatcttctcttaagactgaaaaactcagatttcacgactgccacaggccttcatctcccaatgttgtgtactgtgctggtaggccattcttggcttctaatgaagtaactttaaattctattgtgaaaattcagctgaaaacagactggggaatagaaaccagtgtcagaagttactgttttaggccaggcacagtggctcttgccagtaatcccaaacactttgggaggtccaggaggaaggatatcttgcctccaggagttcaagaccaggcaggaaaacatagtgagactccatctctatttcaacttttttttaattaaaaagaaaaaaaagccgggtgtggtggctcccgcctataatcccaacactctgggaggccgaggcgggtggatcacctgaggtcgggagtttgagaccagcctggccaacatggtgaaaccctgtctttactaaagatacaaaaattagccgggcgtggtggcacacgtctgtaatcccagctattcggaaagctgaggcaggagaatcgcttgaacccaagaagcggaggttgcagtgagccaagatcccgccactgcccttcagcgtggacgagagagagactccgtctctaaataaataaatagaatggctttaaaaaaaaaaaaaggaaagaaaaagaagttaccgctttatggcaatgggttgtacagcctggcccgtcccattaaaacaaattcctaagaaccacgcaaaactagattagaatgcaaagctaagccacctctctgggcaaagtcacactggtagccggtgggctgaaactggtgtgcagatgccctgcaaaatataattattaatctaaatgtgttgtcaccattttaaaaatgtttctcatattcatttctcgcttctcttagaattcgtacaacaaacatggactgtgcacctactaagggctttacattcaccacctcggtttaccccgcagtacaagcgtgtatgtccattttagaagacgaaactgagggccagagaggaaccgtgacttgcccacggtaagagagccatacggattcgaaccctggccagattcactctggagctcagggttctcctactgctccacccgtgggaggaaaggcccggaccaggccatgaggagccctgggttctggcccagcctccgcacgaaagcgcagggctgccccaggcgaggccctccgcctcccggggggctcaaattcccctccggaagtaactttcgaacaaccgccgagggaacgtattcaggccctgagcggagcgacagccgggcccaccaagcggcgccgctggagacaggccggccgggaaagccaggccaccgcaccgaggacggctctctctcggttcccaccccaccgcaaagctgcggcactcacctcccgcgccgccgcgccgctcccccggaagtagttccctgcgaccctgagtcccggaagtgacgcgcactgagcaaccaaccggctctgttccgcccgcgttgccaggtttctgggtgaggcaccgctgggttttgtcgacttttgtccctgttctgtgggttcgagctggacaaagaggtttggggaaatgaaatctagagcttgtcaattctttaagctcctatatcactcagctcgtttcagcaacatttttgtttaattaaaaagaaaacaaaagaaattacttctcggggctgggcacggtggctcacgcctgtaatcccagcactttgggaggccgaggcggacggatcacttgaggtcaggagttcgagaccagcctggtcaacatggtgaaaccccgtctctaccaaaaatacaaaaattagccgggcgtggtggcgggcgcctgtaatcccagctgcttgggaggctgaggcaagagaatctcttgaatcccgggaggcagaagttgcagtgagccgagatcgcgccactgcactccagcctgggcgacagaatgagactcttcctcaaaaaaaaaaaaaaaaaaaaaaaaaagttacttattcatcgcaatgggctgtatagcttggcccgtctcattgtaacaaattcgtaagaactgcgcgaaactagattagaattttgtcctatgcaaagctaagccatctcccagagcagagcacagtcacaactggtagctggtgagctaaaacgggtgtgtagctgtcctgcaaaatgttcatctggatgtgttgtcactatttcaaaagtgtttctcacgttcatttccttaattttatgccaggtcctgagctaggagcctacaatgcagagaggagacaaacagaaacacctcttgtaattcagacagaagcaaatcattataattcattcaaaaagcattcactgagcgcgtactctatgctttgtccttgtaactgaggacacagtgctaaagcagacacatacagtctctgcccttgtggtgcttacagtccgttggagggagacagactaattaaatgaatgtgtaatcatataacaggataagttttttgaaggcaaagaacagtgttccatgattaagaaggggtggggggcaagtagtaggagaaaaagaaacctagatgagagtgtgataaccagcctccaccataaaccctgacgattcttggctcctgatatccatacccctctgtagtcacctcccaccaagaataagactgacctgtataacccataggatattgcggaaatcttggagcacgagttccaagataaagtcataaaagacattgcaacttcctctttcctctgtcttgattgctcatggggaatccatgttgtgaagacactcaagcagtcctatggagaggctcgcatggggagtaactgagctgcctgccaacaaccagctccaacttgccagccatgtgtatgagccaagtggctccagcagtcctagtcaagctttcaaatgactgtggcctggccaaaatcttcagtgtaaactcaagagcaaccttgagccagaaataccttgcaatgccacttgaatgcctgcctcacagaaattgtgaaatactaaatgttattgttttaagctcctaagttttaggataattggttatgcagcctagataacatacatagaggatcaaggaacagaggttagataccagagactccaaaaaaaaaaaagagagagagagagacctatcttgccctaaaggaattcagtctcttagaagacaaataatacactcaacattcactaatcccatactatgtgaggtggcatgggggacccaaaatgcataatttattcatttaaaaaatatttatggagtttctactctggatcatgcactatgaaactgggaagacaatggtgagtaggtgggatcctaccctgactgtgcttatagactaggggtcaatgtctgtcacccccactaatcaatcacacagataaatgtacacttaaaaac

SEQ ID NO: 1561905 - DNA, 4001 bp, Homo sapiens
gcctatggggaagaactgggagctccccaacttggacccccaccttgtggctctgcacaccaaggagccccctcccagacaggaaggagaagaggcaggtgagcagggcttgttagattgtggctacttaataaatgttttttgttatgaagtctaccctgagaccacatctgcattgcactcctagagggggtggcccctaataatgttctggaacactacacacaggtgtgggtttccagagcgagcaccgcggccacagaacacaagtctgtgcgccagagcccggggatggtgcgggcagccccaccagcaccctccccactcccaagcaagcggctggaggcacagggccaggcaggcctgagcaatctttattctgcagagggacaatgaccacagatccatacaccacgtggagaccgaggggcggggagccaggggccagtctttcaggggtgggcaggtccaggcggtgggcagagcctcgggtgggtgaggggcagatgggcagacaggcaggggcctaaaaaaaagatgaaccacacagcaggggtgctgggagctgctccccaccctcccccatcccaccagccagcacccagagggacaaccctaacacgaccggcccaggatccacccaggggcagagtaggtgggttggtgccctctgactaggggggcacatgcctgcccagcccaccacggtagaggcagctcagttcaggaaccaggagctctctgggcagggcctgaccggggccgcccgactcccaggccgagcccccctactgctggctcagaagccgaaggtttcctgggaggcgtagaccatatagaggaagccgtcctcgtctttctcctgctcgtagatgtccgcgatgggcgtggacacactcaccatgctgtgctggttcaccagcaggaagaaggcctgcgtggggttcagctgcaggcggcgcctgcagccggcgggagagtatgcagctgtgaggggcttggctgcgggacggacatagccctgacccccagaatgattcccagcctttcacacccattctcaccccagctgtcacctctgacccaacaccgactgcagccccgaccttgacctttccagccaccccagaacaggggcccaccgcccggtcccatcacccctgaccccactcccaccccttctcggcgggaacccggctcccctcccgaccctagccacctcctggcggcggctgcccacgcaccggatgatcttgaccaactcgctcatgttgacatggtccgggaccaaaaacttggtcttgtccaggacgggcagctgcttctcacccttgtagcgctcgatgatcacctgggagcagggcgggcgggcagggggtcgtgtcgggaacgcgcgaggcgggggcggggcagggctgggggtgcgggactcaccgggattttgctggggtgctggtcgcggatctgctgtacctccttacagcggtcggctgcggacagcggccagaccgtgaggccgggtcgggccggcccaggtccgccccgcctgtcccggaggggcggcccccggccacgccccagctccagcccccacccccggggccatcaggccccacagcccctggcacctatcgcggtggggaagcgggcagcccccgcccaggccggagctggtcccagcccgagggtccagccagagcctgacgtcacggggctgacgtcacctgcggcagtcggggtcggccggcacccctgccccagagctcgcagctcgcctgccgggcctcaccgaagctccgccgctgcttgaaaggccggtctgagggcatcgcgcgggcccggctgggcgcgcaggccggggctctggggcgcggggatgtgtctgcggtttgggggctccgggggctccgcgcctcgcgctcaagggctccggggctcgcgctgagcacggcggctgcggctgcgggaggtaactcgcccggtgacgtcaggtcacaacattccttaaaggggaggccagtgcgccgctcccattgggccgacgcacaacccgcccgcccggacccgtgacgtcacggcgcagagagcctgggtccgcggaccgggacgcgaggggcggggcttctgggcgcgtcacagtcccgtgacgtcatgggcagcgcgggagcttctcccgcagcccgaactcaaggtaaggcccggagggcggtggggccgccctaggccgatggagcgggcgggccaggctgcagccccacggcaccacttcccgccctcaccgagtctgtgtcaggactgacgcggttctgggcgccgtgggaaacagccggagccaaaggcccggcgccttcacggggcttagggcgagagaagggagaaggtgcgggaggcacagtcagacacaggatagaacaggatgctagaaatgaacgcccaggtttgaaaaagaataatataattgaaaagtagagccatcgaaattcaggtctcagaggatgaggtgagaaggcagaaaaggacaacagaagagaaatcgtggacctggaggctgatcggaagcagctcaccagagagacaggtgatggggaataaggaaaagggcacagatggcaacgccaggagaactcgcgggcccgagcagagctccagaggcgaacactgaaagacctgcagagacagttcctgaaaaagagctgccagaaatgatgcttaaaatccagagcagaatgcgcagactgaagatcaacatttttttgggggaggggggagggggacgaagtctcgttctgtcgccaggctggggtgcagtggtgcgatctcagctcactgcaacctctgcctcccgggttcaagcgattctcctgcctcagtcagcctcctcagtagctgggattacaggcgcctgccaccacccccagctaattattgtatttttagtagagatggagtttcaccatgttggccaggatggtctcgatctcctgacctcgtgatccactcgcctcggcctcccaaagtgctgggattacaggtgtgagccaccacgcctggccgccgaaataatttttaaagaatgtagtttagtaacaaggacatggaacccaaaaggaagaaattagatggaaaaatggtgagcaaattggtaaacatgtgaatctaaacaagcatttaatatgcaatatgaataataatgattaatttgtgggccacagaaacaagatgcatgagacacaagaacatggaagactgagagggcaatttgagagggggttaaagagactgagcattgtctggctttgtaaagtcaggtgtgtatttcagatatttaagaggatcaccaaaagaatacaaacggaactataactgccaatgcagagaaaagggtagtgatgggtattaaaactataatggaaggcagaaagggagaaaaaggaagcaaagtaaaagggatggtaaatatatagtacaaaaccagaggtagaaaatgtggtttacattcacctcttaaaacacagatgaccagattggccaagaaaaaataagatgcagctctatgctatttacaagaggaaatttaaaacctaagggcaccaaaaagtaaaacgatgggaaaaggtgtactagagaaaaactaaccaaaagatgtacctatagaaaactcagacaaaataggccttcaggcagaagacactggggataagaggatcaacatgaaatgatgcgaggaggaactctgtgaagagaggaaagttctgaacttctatgttccagggtttttgtttttaaggctgaaaataggccaggcgcagtggctcatgccagtaatcccagcactttgggaggccgaggtgggtggatcactagaggctgggaattcaagaccagcctggccaacatggcaaaactctgtctctactaaaaatacaaagattagctagctgggcgtggtggtgcacgcctgtcatcccaactactcaggtggctgaggcacaagaattgct

SEQ ID NO: 1561906 - DNA, 4001 bp, Homo sapiens
aaaacacaaaaattagctgggcatggtggcgggcgcctgtagtctcagctactcgggagactgaggcaggagaattgcttgaacccgggaggcggaggttttagtgagtcgagattgtgccattgcactccagcctgggagacaagagcaagactccatctttaaaaaaaaaaaaaaaaggcagcgaaggggaacactccaaagattgtagggactgagacccactcaggggtcctccggcctcgagctcacactgccccaccttgctccccacagatcctctgctttcactggaaaagtggaggctgagaacaccaaccccacagcccatgcagggcctcagacctggccattcccttcctccgggcctcacccgcatatctgtcctcctcttgagccaggggcgtgctcaggcctctccagctctaactccacctccctgagtgagagggccggggctgccacccttctccctccgtgacctcaagcccttggagcggtctggtcacctggggaggttggctccccgcggccttcgcagcctccagccactcatggggtcctgggttctctccacacccaccagtgcctccactatgagtgacgtacaatccccacctccagtttggcttccagctgtcaggtccaggctctgtctctggaacaaaggctgcctccgaactcaacacgtccaaaggaagtcatctctttccccaagcctgtgcctctagctaatcgccccctcccttctcatcccatcacctggtccaggcccaggtggactccccctcacctgccattgcagtcctgagtcctctcaagcccatctgtgtcgtcccacctgtctccaccgtcactgctccgggaacccccctccctcgtctgccctagagggcacctcaccagtgtgcctcccctgcagaagcaaggccgagcacactgacccccgcctatctgaacaatcagccccttccaaagtttcattctggccaggtgcggtggctcacacctgcaatcccagcgtttagggaggccgcaggagctcaagaccagcctgggaaactatttgtccattctcacactgctgtgaagaactgcccgagcctgagtaatttacaaagaaaagaggtttaactgaggcacagttctgcatggctggggaggcctcaggaaactcacaatcctggaggaaggtgacggggaagcaggcaccttcttcgctaggcgacaggagagagaatgaacgcaggaggacctaccaaaccatcagctcttgtgagaactatcacgggaagagcatgggggaaccgcccccatgattcaatcacctccacctgggctctcccttgacacctggggattatggggattataattcaagatgagattttgggtggggcagagccagaccatatcagcaacataaccagaccctgtctctatttaaaaaaaaaaaaaaaaaaaaaaggtggggagcggttggggaagaaaaaaattttaattaaaaaaaaaattccactgccaccctctatccagtcacttcccttcctcacccagcacagactccacagccatcataattacttccaaaagtcccaactccctctttcttctgccgccttaacctggccgagttcagctgtatggtgactgctgcacccccggctgaaaaagatgctgcaaaagggccacctgccgaacccgtcaaactccccgcccgcgtccccagggaagtgtatgttttctctcctctcctgcgaggcaccttccctgctgccctcactccacagagaccttgccctgccatctgggccgctccctggctatgctgagtggaatcactgtccctgttcctaaggccagtccttccactgtgcgcaggacgccagccctcctcacgccccatggacttgctccgaggccccttacgatctctccgcagcaaacaaatgtgttctggtgactcacccctcctcaaaatcctttctccttgcacctggcttccatgcagtcaggagtggcaggtggctgaacttcagttaattaggcctaagtaggaagtgccctatgggactcctgggaaattgccttaaagggaaaaggtacatcctttgccatccccatcctccatcagctgccatctggaacttgaacgtgataactggggctccagaagctttttttgttttgttttgagacggagtttcgctcttgttgcccaggctggagtgcaatggcacgatcttgactcacagcaacctccatctcccaggttcaagcgattctcctgcctcagcttcccgagtagttgggattacaggcatgtgcaccacgcctggctacttttgtatttttagtagacatggggtttctccatgttggtcaggctgatctcgaactcctgacctcaggtgatctgcccgcctcggcctcccaaaatgctgggattacaggcgtgagccaccatgcccagcctccacaacctttttttttggagacacggtctcactctgttggccaggctggagtgcagtggcgcaatgcagccttgacctgccaggctcaagcaatcctctcatctcagcctcccaagtagctgggactacaggtactcaccatcgcacccggctgtcttttgtatttttagtagaaatggggtttcaccacgttacccaggctggtctcgaactcctgggctcaagagaatctcccgccttggcctctcaaagtgctgggattacaggcatgagccactgcacctaaccttcttggctttaaataccagtaacaggctgatagctccatatccttatgtctagcaaggcctggcagagttgggtattcaacagtccatccgacattctttctaaacacatgggtatctcacaggctcagattaagccatttccaaattgctggtgctctttccccacaaaggtccccagtcagcctcctctcagtaaatggcagcacctggttgcccaagcaggcatggaggagtctcctttgatgtctcatttccttactttccaaccctccccagcaagtcctggcgttctcccttcagaatccccccttccgaccccatgaaaccgcccttgcccaagccaccatcagttctcccctggctgcctgcgctcctgactccactcggctccacattctccccggagccaccgggacgcaaacctgtgtacatttctagagagcaggttcatgtttgcagggggctgtctttggttgactctggcagattcgccctgacttctagataacgctcctcattcttcagttacttcattagaaaagggctgggaagcccctggcttatcatattatagcctgttgttaggttattgcaaactttttaaatttaatttttacccaaatacttgtagtatttaaaaatcaaatatgccaggcgtggtggcttgcacctgtaatcccagcagtttgggaggctgaggtgggagaattgcttgagcccaggagttggatcccagctttagcaacatggtgaaaccctgtctctactaaaaatacagaaaaattacccaggtgtggtggcgcacacctgcaatcccagctccttgggaggctgaggcagaattgcttgaacctgggaggcagaggttgcagtgagctgagatcaggccactcactgcactccagcctgggtgaaaagagggagattgtgtaccccccctgccccccacaaaaaatcatgaaattccctatttcacctagccttttttagggaaaacagctaacgtatttcttgtgaactagggagttgaagttgaattaccttcatcttagtttctgctgagaccccccaaggcatattctctgggccgattgccacgtagaggagcaggaccagcagcagcctggactgtgacaccaggtggtcccaagcgagctcacacttctgctgggaatgtggtctataaaggagctggaagttcgaggaagatttttagaggccaccgagaggctat

SEQ ID NO: 1561907 - DNA, 4001 bp, Homo sapiens
aggcttcctgatccaggtttccaccaccaccatgaaaaagctccctcaaacctacccaggaatctctcttccttcagcagctctcctagcaagatcccaaacctatacaaattcaacgctggctctaaagcactctattactttcaaggcaccacaataagccctatgtaaagtgggggaaggaggtgccaccagaaaggacctatgtgaccgtgggcaagtcacttaatcttcctgcatcacaaatggctcatcctgtaaaatgggtaaaacagtatctctgcacaaagtggtggtaaggattaaacaaaaatctacatgaaaacacttaagcaaaaggcacatcacgtcctaagcttccctctgtgccaaaaactgtgctaggcactttgacgcaccaccacaaagggcacatctggatgtgtagctctggacctcagggagaaagtgtaataaagaggttaagagcctagacactgaagtcccaggtgggggttcagccacttgctgggctgcataagacactccgcctctcagagtctcagaccccttatttgtaaaatgaaagtaatctctcttgccaggcgcggtggctcacacctgtaatcccaacactttggaggccgaggcggacagatcacttgaggtcaggagttcgacaacagcctggccaacatggcgaaacctcgtctctactaaaaaatacaacaattagccgggcttggtggcgcgcgcctgtaatcccgactactcgggaggctgaggcacgagaatcgcttgaacccgggaggcggaggttgcagtgagcgatggtgccactgcacgcctgggcaacagaataaaactctgtctcaaaaaaaaaaaaaaaaggaagaagagaatctctcttaaagacagtgttagtattaaaagacacaaagccacatggagcacttaacagtgcttgacacaaaacaagtgcccaactaacaaagagctgctattatcattactactgttagagacatgccatcggagaagcggatgcccggcctagcataacctccctcaatgggccccaggatcctcatccccaaaatggggcagaggtcaagctctgccctgcagcatccgagggcaactgtgaagtagggactgaactagcactgttgataccatcccgttatactgtcctcctgctcatcataatgtggattcctggagagcaaatctttgttcccgggaaaacagccagggtttagcacggtgcccaacacctagtgggcattcaataaacacacactgaagaaaggagggagtccaagagctggcttactttctgccatacatcgcgctaagagtttaatgtgggtagtattactgtccccgttttacagatgaggaagctgagatccacagcggttaaagcacctgtccaaggtcacaccgcacggaacccaacccaggtctgactccaccacccgatctctcggccctcaggcaacacggcctcccacaatgtgcgtccccagagctcccaggacggcccacctcgcccacaccctcccagggcccaaccaccctgggacctccagtcgctgcagcgcagggaccacacctcagcggcggcccagaaacccccaccccgcgtagcagcagcccacttccggcccgagaccccgccccctgagcagagcgcagcgcgcgcccccaggcccagcccgcgcgcgccgggtgacggccccgcccttcccccacccggctcgaacagcaccgccgtgtggaacggccctggcgctgcccgtagggcctgcccgcgcacgcccggccttggcccacgcggccgcccccccagccgcaccccccgggcccgctagccggctcaccggctctcggcagaaccgcgtccactgcccgcaaccggctccggttccgtcttcgtctcgttcaaaccgccagaccccgcccgcccgcccgcgcgatgacctcacacgcaccccctcgttacgcgccgacgtaaaggctcgccatcctccgccggctccttttatagagagggtctcagccgcgcgccgggggcggagctcggcccctgatccacagaacggtagccgaggggcggggccccgaccgccggggcgactgcggcacgtggtcggtcgcagccaatgaggtcccgcctcggcccggtgtgactcagttacaaaatccctatggcagtaaccaaaaagaaaattgcttttacaatgaatttttttttttttttgcttagagatgtatggaggtctcgctgtgttgcccagggtggtctcgaactcttggcctcaagcgatcctcccgccttagcctcccaaagcgctgggataacaggcgtgagccaccgctcccaggcttacaattaatttctgtaagaatgggttattgaatcataaagatacctaatagacactttggggaaacgcttagaagtcaactttctgggccgggtgcagtggctcacgcctttaatcccagcactttgggaggcccaggtgggaggatcacctgaggtcaggagtttgagaccagcctggccaacatagtgaaaccccatctctactaaaaatacaaaaattagcctggcgtggtggtgggcgcctgtaattccagctacttgggaagctgaggcaggagaatcacttgaacccaggagacggaggtggcagtgaggcgagactgcaccactgcactccagtctgggcgacagagcaagactctgtctcaaaaaaaaaaaaaaaaagtcacgttctgtgacgcccccgcccccccatctgcaatatcatgcggcatattttcttcttagtaccataagaaggcatcttgtgcctttactgtctgtctcctgtaaagtccacaggagcaaggacctcctgagtcctgttccgggttgtttcccaatggctgtacatacattctctcttgcccactccctcttttttttttttttttttttaagagatggggtcttgccatgttgcccaggctgggctggtctcctgggctcgagagatccacccgcatcggcctcccaaagtgctgggattacaggcgtgagccaccacacctggcccttacattctcaagagagccttggctgaaggaggaactgggctgggcgtggtggctcacacctgtaatcccaacactttgggaggccaaggcggatgaattacctgaggtcaggagttggaaaccagcctgtccaacatggcgaaaccccatctctactaaaaatgcaaaacttagccgggcatggtggtgggcgcctgtaatcccagctacttgggaggctgaggcaggagaatcacttgaacctgggaggcagaggttgcagtcagacttcgtctaaaaaagaaaaaaagaggaactgcaccactttacagcagaaagaaactgagggacaaagaggccaattgactcactcagtgtcagaggtagatccagatttcaagctgactttttttgtctgggtatcatttattcaagtattcaacaaatattttccctgaccaatcaggccctggtgaaaaaaagacacaatctgatcatggtggtacgtgcctttagttccagctactgggaaggctggggcaggaggatcgcttgagcccaggagttcgaggctgcagtgagcaaagatcacgccactgcactccaggcctgggaaacagagtgaaactccatctctaagagataaaaacgaaaactagacacagcttctgacctcttaaagtttccagactggcaggggaggcaaaggggacacaactaatgacacaaatccttgttaaattacaaatcaggctcaatgctaggcagggacattatgtggtgggctgatggtacttccactgtgtggagcaggggcctagaggtccctctaggccaaatctcacccagttagttgctgaaacccagtaagacgttcagggaagaatgggtggggaagctggggcaggagctgtttatcagcaggtctagag

SEQ ID NO: 1561908 - DNA, 4001 bp, Homo sapiens
acacacaaacacagacatgcactgcccaaccgcaggcggcagggaggggctgcgccctgttgcggggctgagcgtggtggcgtggcagcgagtggaccaaaacccactgcgcacgagaacgcgcggcttggcgcctgtttcccgcctgctctcaggagcgaccgccagggggcgcccgagatggcagggggcgtgggaagcccacatctgcccagcaggtgcgcccaccccgagcaaacagggggccggggcccggggccttggagataaggcctggacaggatataacccgcgcaagagccgaggagcaggggtgtgcagggttccagcgacagcagcactggactcgtccagagggcggcgggtgagcggctggggccccgtggagccaccatggaccccgcaggggcagcaggtgagcgcttaccctcccgaggccccggagacgccccgtgagaactacgaaggaccacccccccaccccctccccactatacaaataggaaaactaagccccaaggaggcagcccgccgaactgcaaaagcaggattagaacctagggctcctggttccccttctctctcttgaggccccctggcgcctagaattcactaaacctcatttccttccagctcctaccccaccgccgcgccccatgctgaagctgtgttagccatttttctgttgctgtttcttggcagagagggccagctgcccctaacccaacagcagctccgcccccgccccccaattccgtgaatgcgcctattctgagcgaggccagtgcctgcttctcactccaggcgaccttctcatcccggattcttctcccttttcccctcccaggcctggtagaagaacataaatcctctggcagggcccgtcgtgggagggtgaccaagcaagatgtggcagcgctggtggaagtgggagggcggggaacccttgtcaagcttgggccacaggcaaagccaacatccctggacagcatgagggctaaggcacaaggggcctctgccacctcccatactttcctacccggagatgcctctgggcccctaaatcttggttaaggttcccctcatcccattcttggtctgagccaacttctcacctggcaccctgcctccaccccaggaatcctagaaagtcaaaatagcaaatgcctcaaagttcatcacctttccaaacccctcattctacaaagaaaggaactaggtccagagagggtagtgtcttgctgaagggtacatggcgatgtcgtggcaggactgatactagaacctgggattcctctgaggagttaatccttgcattaaaaaaagaaagattcagagatgccctgaggtgaggttgagggagtggagcagcaagggaggagaggcctgtaaataaattctcaaaagtcccttagggacatttcagggggttcctggagggatgagagtagaaaagggatgatcctattttgatggctttgagggtgggggctcgatttggaaaggaccctgcagaagtggggaagggcactgcaaatcagatagggcaccctaggcagcgtctctgctaaaatacactcgcctgacctggcttgatgcctactcccctgcagacccctcagtgcctcccaatcctttgactcacctgagcctgcaggacagatcagagatgcagctgcagagcgaagccgacaggcggagcctcccgggcacttggaccaggtaacggcggcgtggcagcgtgccctaggtggggactgccaggcagctggagcacacagaggcaacggccgcatttaacccagggctggcgggtggggaggggaagtgcaggctgcaacccctcccactggcagggagggatccccccttcctcctgagggggggcaaacccagcaccccctgctcctaccacgcttggagctgcagacagggctagctgcgggccaggctggaattcagctacagcgggagactggggagaccggggcagccacactccacagccggaattcattggaagcttagaaggcacttccctgaggagagccccaaggggtggagcggtcctggctgtggctgctgcctgtctggcctggctttcgagggtgcggtcttgcgctgtcccctccaggagtgaggagagactctggtcctgccaagaggaataagggctcagaaggacagcctcagttttcatggctctccttgggcctcaacctgctaaccccccaaatctctcccacctcccctcctctacttgctccctgcaattgctcgggcctacccacccacaccgctcaagacccccaggttaagaagccaccagacctctaggctctaacctggctcactctgcaggaccaatgtcatctgccttgactcctgtaatcaagggtaggaaagcccacacagcaacaggccacttctcatgggagaaagggaagaatatggctttggccccagaaaggctcagattcccccaggccatcccccatcctgaggacaaggttttgggcccttttctgtttgcaggcaggaggctagagagcgctccaggccaggagcccaggaaaggctctcccttcccctccctcctcaccccccaccctgccttccccagggtggggaagcttcatctctaccaattccatcagccctaaaatactcttctccatcccaaggccagtataagtgcagcctttgtgtcacagccacgtgtccctatggccctgggctccaatgggcatgatgccagacccacagagtggaacctgggtggtcccatgggttccatgcaggcttcgttgagcaccttgcagcctaaatatttagcctacaatttgcagccaagtctcctccttacctaatgcttcctcttcctgaccccacaggggcaggatatagagcagccccaccctcccactcactctaaccccctgctcacttcattttactcaacctgagtgcttggaccctgtgccaccttgacccttctccctcctgtggctggtcgacctgcctgccctactcccaggtcatccccagagcacaccaccattctgaggggaggcgtgcgcaggtgcctgcagcaacagtgtgaacagactgtgcggatcctgcatgccaaggtggcccagaaatcatacggaaatgagaagcggtaggtgcctccgcagcccctcccaggtctctgcaactgtcagccctatgcacctcctccatccacccattgggcctcttttagacgcagagcaggcctcagggctgagatctcagctattggtcgaccagggccttgaccctcagccaccattagcccccactttggtctatagttctacagcaggagattccctgtgaatctcctgtctccattcattcactcattctcccattgattcacttattcattcattcaacaactacttactgagtgtttgtcatgtatgcaccaggctctgtgggtactgctgggcactgggcatacagctgaacaagacagaaacagcccctgctctgtagcccacactctcactcaagtgtggaagagacagacagtaaactccccacaagtcaggaaacaagatacttgcagattatgatgagcactagaaggaaaactgaacgaggccatttgacggaaactgaaggcaggggggacattagctagaaaggtcaaggaggttgagagaccttttgggaggtaacattggaactgaaacttgaatgctgaaatggagccagacaggagaatatctggggaaagcgtgctacaattagaaggaacagaagggccgggcgcgatggctcacacctgtaatcccagcactttgggaggccgaggcgggcggatcacctgaggtcaggagttcgagaccagcctggccaatacagtgaaaccccctctctaccaaaaaatacaaaattagctgggcatggtggcgggcacctgtaatcccagctgctcaggaggctgaggcaggataattggttgaacc

SEQ ID NO: 1561909 - DNA, 4001 bp, Homo sapiens
attcggccaaaaagtggctgcggcaggatacaatcccacgcctgctagtttctgtgagccagcctgggcgtttggtgcctctcctcctgccaggcgaacctctgcagacagaagcccttccccacctcggcccactcccctacgcacacaggcttctgtgtggctgtctttgcaactcgccaacccccccagacccctccacacacacaaacacagacatgcactgcccaaccgcaggcggcagggaggggctgcgccctgttgcggggctgagcgtggtggcgtggcagcgagtggaccaaaacccactgcgcacgagaacgcgcggcttggcgcctgtttcccgcctgctctcaggagcgaccgccagggggcgcccgagatggcagggggcgtgggaagcccacatctgcccagcaggtgcgcccaccccgagcaaacagggggccggggcccggggccttggagataaggcctggacaggatataacccgcgcaagagccgaggagcaggggtgtgcagggttccagcgacagcagcactggactcgtccagagggcggcgggtgagcggctggggccccgtggagccaccatggaccccgcaggggcagcaggtgagcgcttaccctcccgaggccccggagacgccccgtgagaactacgaaggaccacccccccaccccctccccactatacaaataggaaaactaagccccaaggaggcagcccgccgaactgcaaaagcaggattagaacctagggctcctggttccccttctctctcttgaggccccctggcgcctagaattcactaaacctcatttccttccagctcctaccccaccgccgcgccccatgctgaagctgtgttagccatttttctgttgctgtttcttggcagagagggccagctgcccctaacccaacagcagctccgcccccgccccccaattccgtgaatgcgcctattctgagcgaggccagtgcctgcttctcactccaggcgaccttctcatcccggattcttctcccttttcccctcccaggcctggtagaagaacataaatcctctggcagggcccgtcgtgggagggtgaccaagcaagatgtggcagcgctggtggaagtgggagggcggggaacccttgtcaagcttgggccacaggcaaagccaacatccctggacagcatgagggctaaggcacaaggggcctctgccacctcccatactttcctacccggagatgcctctgggcccctaaatcttggttaaggttcccctcatcccattcttggtctgagccaacttctcacctggcaccctgcctccaccccaggaatcctagaaagtcaaaatagcaaatgcctcaaagttcatcacctttccaaacccctcattctacaaagaaaggaactaggtccagagagggtagtgtcttgctgaagggtacatggcgatgtcgtggcaggactgatactagaacctgggattcctctgaggagttaatccttgcattaaaaaaagaaagattcagagatgccctgaggtgaggttgagggagtggagcagcaagggaggagaggcctgtaaataaattctcaaaagtcccttagggacatttcagggggttcctggagggatgagagtagaaaagggatgatcctattttgatggctttgagggtgggggctcgatttggaaaggaccctgcagaagtggggaagggcactgcaaatcagatagggcaccctaggcagcgtctctgctaaaatacactcgcctgacctggcttgatgcctactcccctgcagacccctcagtgcctcccaatcctttgactcacctgagcctgcaggacagatcagagatgcagctgcagagcgaagccgacaggcggagcctcccgggcacttggaccaggtaacggcggcgtggcagcgtgccctaggtggggactgccaggcagctggagcacacagaggcaacggccgcatttaacccagggctggcgggtggggaggggaagtgcaggctgcaacccctcccactggcagggagggatccccccttcctcctgagggggggcaaacccagcaccccctgctcctaccacgcttggagctgcagacagggctagctgcgggccaggctggaattcagctacagcgggagactggggagaccggggcagccacactccacagccggaattcattggaagcttagaaggcacttccctgaggagagccccaaggggtggagcggtcctggctgtggctgctgcctgtctggcctggctttcgagggtgcggtcttgcgctgtcccctccaggagtgaggagagactctggtcctgccaagaggaataagggctcagaaggacagcctcagttttcatggctctccttgggcctcaacctgctaaccccccaaatctctcccacctcccctcctctacttgctccctgcaattgctcgggcctacccacccacaccgctcaagacccccaggttaagaagccaccagacctctaggctctaacctggctcactctgcaggaccaatgtcatctgccttgactcctgtaatcaagggtaggaaagcccacacagcaacaggccacttctcatgggagaaagggaagaatatggctttggccccagaaaggctcagattcccccaggccatcccccatcctgaggacaaggttttgggcccttttctgtttgcaggcaggaggctagagagcgctccaggccaggagcccaggaaaggctctcccttcccctccctcctcaccccccaccctgccttccccagggtggggaagcttcatctctaccaattccatcagccctaaaatactcttctccatcccaaggccagtataagtgcagcctttgtgtcacagccacgtgtccctatggccctgggctccaatgggcatgatgccagacccacagagtggaacctgggtggtcccatgggttccatgcaggcttcgttgagcaccttgcagcctaaatatttagcctacaatttgcagccaagtctcctccttacctaatgcttcctcttcctgaccccacaggggcaggatatagagcagccccaccctcccactcactctaaccccctgctcacttcattttactcaacctgagtgcttggaccctgtgccaccttgacccttctccctcctgtggctggtcgacctgcctgccctactcccaggtcatccccagagcacaccaccattctgaggggaggcgtgcgcaggtgcctgcagcaacagtgtgaacagactgtgcggatcctgcatgccaaggtggcccagaaatcatacggaaatgagaagcggtaggtgcctccgcagcccctcccaggtctctgcaactgtcagccctatgcacctcctccatccacccattgggcctcttttagacgcagagcaggcctcagggctgagatctcagctattggtcgaccagggccttgaccctcagccaccattagcccccactttggtctatagttctacagcaggagattccctgtgaatctcctgtctccattcattcactcattctcccattgattcacttattcattcattcaacaactacttactgagtgtttgtcatgtatgcaccaggctctgtgggtactgctgggcactgggcatacagctgaacaagacagaaacagcccctgctctgtagcccacactctcactcaagtgtggaagagacagacagtaaactccccacaagtcaggaaacaagatacttgcagattatgatgagcactagaaggaaaactgaacgaggccatttgacggaaactgaaggcaggggggacattagctagaaaggtcaaggaggttgagagaccttttgggaggtaacattggaactgaaacttgaatgctgaaatggagccagacaggagaatatctggggaaagcgtgctacaattagaaggaacagaagggcc

SEQ ID NO: 1561910 - DNA, 4001 bp, Homo sapiens
cagaaaagttaagcgctggtacccaaagtcattcggccaaaaagtggctgcggcaggatacaatcccacgcctgctagtttctgtgagccagcctgggcgtttggtgcctctcctcctgccaggcgaacctctgcagacagaagcccttccccacctcggcccactcccctacgcacacaggcttctgtgtggctgtctttgcaactcgccaacccccccagacccctccacacacacaaacacagacatgcactgcccaaccgcaggcggcagggaggggctgcgccctgttgcggggctgagcgtggtggcgtggcagcgagtggaccaaaacccactgcgcacgagaacgcgcggcttggcgcctgtttcccgcctgctctcaggagcgaccgccagggggcgcccgagatggcagggggcgtgggaagcccacatctgcccagcaggtgcgcccaccccgagcaaacagggggccggggcccggggccttggagataaggcctggacaggatataacccgcgcaagagccgaggagcaggggtgtgcagggttccagcgacagcagcactggactcgtccagagggcggcgggtgagcggctggggccccgtggagccaccatggaccccgcaggggcagcaggtgagcgcttaccctcccgaggccccggagacgccccgtgagaactacgaaggaccacccccccaccccctccccactatacaaataggaaaactaagccccaaggaggcagcccgccgaactgcaaaagcaggattagaacctagggctcctggttccccttctctctcttgaggccccctggcgcctagaattcactaaacctcatttccttccagctcctaccccaccgccgcgccccatgctgaagctgtgttagccatttttctgttgctgtttcttggcagagagggccagctgcccctaacccaacagcagctccgcccccgccccccaattccgtgaatgcgcctattctgagcgaggccagtgcctgcttctcactccaggcgaccttctcatcccggattcttctcccttttcccctcccaggcctggtagaagaacataaatcctctggcagggcccgtcgtgggagggtgaccaagcaagatgtggcagcgctggtggaagtgggagggcggggaacccttgtcaagcttgggccacaggcaaagccaacatccctggacagcatgagggctaaggcacaaggggcctctgccacctcccatactttcctacccggagatgcctctgggcccctaaatcttggttaaggttcccctcatcccattcttggtctgagccaacttctcacctggcaccctgcctccaccccaggaatcctagaaagtcaaaatagcaaatgcctcaaagttcatcacctttccaaacccctcattctacaaagaaaggaactaggtccagagagggtagtgtcttgctgaagggtacatggcgatgtcgtggcaggactgatactagaacctgggattcctctgaggagttaatccttgcattaaaaaaagaaagattcagagatgccctgaggtgaggttgagggagtggagcagcaagggaggagaggcctgtaaataaattctcaaaagtcccttagggacatttcagggggttcctggagggatgagagtagaaaagggatgatcctattttgatggctttgagggtgggggctcgatttggaaaggaccctgcagaagtggggaagggcactgcaaatcagatagggcaccctaggcagcgtctctgctaaaatacactcgcctgacctggcttgatgcctactcccctgcagacccctcagtgcctcccaatcctttgactcacctgagcctgcaggacagatcagagatgcagctgcagagcgaagccgacaggcggagcctcccgggcacttggaccaggtaacggcggcgtggcagcgtgccctaggtggggactgccaggcagctggagcacacagaggcaacggccgcatttaacccagggctggcgggtggggaggggaagtgcaggctgcaacccctcccactggcagggagggatccccccttcctcctgagggggggcaaacccagcaccccctgctcctaccacgcttggagctgcagacagggctagctgcgggccaggctggaattcagctacagcgggagactggggagaccggggcagccacactccacagccggaattcattggaagcttagaaggcacttccctgaggagagccccaaggggtggagcggtcctggctgtggctgctgcctgtctggcctggctttcgagggtgcggtcttgcgctgtcccctccaggagtgaggagagactctggtcctgccaagaggaataagggctcagaaggacagcctcagttttcatggctctccttgggcctcaacctgctaaccccccaaatctctcccacctcccctcctctacttgctccctgcaattgctcgggcctacccacccacaccgctcaagacccccaggttaagaagccaccagacctctaggctctaacctggctcactctgcaggaccaatgtcatctgccttgactcctgtaatcaagggtaggaaagcccacacagcaacaggccacttctcatgggagaaagggaagaatatggctttggccccagaaaggctcagattcccccaggccatcccccatcctgaggacaaggttttgggcccttttctgtttgcaggcaggaggctagagagcgctccaggccaggagcccaggaaaggctctcccttcccctccctcctcaccccccaccctgccttccccagggtggggaagcttcatctctaccaattccatcagccctaaaatactcttctccatcccaaggccagtataagtgcagcctttgtgtcacagccacgtgtccctatggccctgggctccaatgggcatgatgccagacccacagagtggaacctgggtggtcccatgggttccatgcaggcttcgttgagcaccttgcagcctaaatatttagcctacaatttgcagccaagtctcctccttacctaatgcttcctcttcctgaccccacaggggcaggatatagagcagccccaccctcccactcactctaaccccctgctcacttcattttactcaacctgagtgcttggaccctgtgccaccttgacccttctccctcctgtggctggtcgacctgcctgccctactcccaggtcatccccagagcacaccaccattctgaggggaggcgtgcgcaggtgcctgcagcaacagtgtgaacagactgtgcggatcctgcatgccaaggtggcccagaaatcatacggaaatgagaagcggtaggtgcctccgcagcccctcccaggtctctgcaactgtcagccctatgcacctcctccatccacccattgggcctcttttagacgcagagcaggcctcagggctgagatctcagctattggtcgaccagggccttgaccctcagccaccattagcccccactttggtctatagttctacagcaggagattccctgtgaatctcctgtctccattcattcactcattctcccattgattcacttattcattcattcaacaactacttactgagtgtttgtcatgtatgcaccaggctctgtgggtactgctgggcactgggcatacagctgaacaagacagaaacagcccctgctctgtagcccacactctcactcaagtgtggaagagacagacagtaaactccccacaagtcaggaaacaagatacttgcagattatgatgagcactagaaggaaaactgaacgaggccatttgacggaaactgaaggcaggggggacattagctagaaaggtcaaggaggttgagagaccttttgggaggtaacattggaactgaaacttgaatgctgaaatggagccagacaggagaatatctggggaaag

SEQ ID NO: 1561911 - DNA, 4001 bp, Homo sapiens
gagcagtggctcagaagggactccagaactcagttcggaacaagtgaagtttgagatgctattggattccaagtgggttgtcagggagggaaggaggcaggagaggaccaagtgggcatcaggcaggcatgagacctctctcaggaggcagtgctgtagagcagacagcacctaaaagctgttgggccaccagaccttcctcacaggggaagcagtcctgtcactggcctcagagcctcacatgcatgagttgctttgccagccagcaggccctgctacattcctcgtggggcaagtactaatgacaggtcaggagaatcaggaaggtgaggcgggggtcctctgagccttcaagaaattagcaaagaacaactctatgggagttaatagatccctttctcggccgggcgcggtggctcacgcctggaatcccagcactttgggaggccgaggcaggcagatcacttgaggtcaggagtttgagaccagcctggccaacatggtgaaaccccgtctctactaaaaatgcaaaaattagccaggcatggtggcacacacctgtagtcccagctactcaggaggctgaggcaggagaatctctagacccaggaggcagaggttgcagtgagccaagattggaccactgcgctccagcctgggcaagagagtgagactccatttcaaaaaaaaaaagacccctttctccttcctttctcatggcatcagccaggtaccagaaggcagtcagatgaggcactcttctgcattccagcttcagccacagatggaggggaagggatgatgtggcccaaacaaaaggaaaggaagcccacatttgttcacatttatggagggcccattgtagacaggcacatcctaaggttctttcagttaatccttccccaatcccgtgacagggaaagtgttgccaaggtgcacagctggccagaggctagcacaggatttgaacccaaaacctgctgcctcactgcaactggtcatacaccttgcagggcacagagacccctgcagcgagacccacacagccacctgccttcaagcccaaagaggacccaaggtcacttggcgggagggaggctgagggtgcacttaggtggaagcaacatttagtccagacattaaccctgctttcacatggctgccacaggtcccaggtcgctggctgtcctcctagatatttttgaggcttcacggcttccatacagagaatccctttttcgtgtttttggtttgtttcatgttttcttggcacttccttcccaactgagaaggaagtaggtgacagagtgttcccaatacagcaaagtttccgacctgactgtccagaggctctgagtgcatcccggaaataaacacccacccttcccaaagggacaggcctcacagccttggatcggattcctgggcgcgacccaggtccgcggagggcggggaggccgttttgagctggtgtcgccgccgagaactgtccagacccagcggagggcggcagcactcgacctctaggcgcacccggtcgaggctcggccccaccttagcgtcaccctgggcccgcgggcggcaggaggaggtcagcggccgctgcccgtccccttctggccctacctttcccccagcctgagcagacgcccagcgccacctacccccttttccccggatgctggatgcggcgcctggagccctcagtgttcccgaaactcttgcgacagggcccgctcttccggatccccgcgcgtcctgtcccctcctgggccccccgcgcaccccagacccagggcgtcccggcggactccgtcctgccgctgcagccaccttccctaaaggcgtccgtgcgtgctgagccgaaaggacccaacgcccgggaagcgatcttacctcgggtacccccggccctgagacctggcgaccgccgcccggggcccaggacccttcccgcagcgaggaggcggggcgggcagagcgcgcggccattggccatgtggaggggcggggctactcggccgcgcgtggttggctggcgacgcaggcggctgcgcagcggggacggtcactgggccttggtttgcgggtcgggaagcgctagactgggctcggagaaccgacctgattttttgctgggggcgcgcagtctcgagcaacttccaggggaagtccggtgtccggccagaaaccaggcaggtggccggcctcggagtcatcggggggctgagaattccatccccacgcttcccaagtgaagcagcccctcctccccctgggaactttgaggggtgagggtcttcgtgtcgttctctccggcacccccatggcctggcatacagttagtgcccaataaacgttgggtgccgctgaagtcacaggggcaaggatgcctatcctggagacgtgcacgctgggcctgtgggagtgggagcgggcgggggactgctgggtaggtaggcgcaaggcagggacgccaaggttggctggcgggcaggctgggtatgggttgggtgctgcgtgggagaggcctcttacgcccaagggcctgggacaggtacctcccgcagttcctgccatctgcctcgcccttccccttctggggcagaggccagcacttactgagcacctacgatcttccaggcacagggtcttctattctttttttttttttttttttttgagacagagtcatgctctgtcgcccaggctggagtacaatggcgcgatctcggctcactgcaacctccacctcctgggttcaagcaattctcctgcctcagcctcccaagtagctgagattacaggcacatgccactgcgcccggctaatttttgtatttttagtagagacggagtttcaccatgttggccaggctggtctcaaactcctgacctcaggtgatcctcccacctcggcctcccaaagtgctgggattacaggcgtgagccactacgcccagcctcaagtgaggttttattactgtactttatatccctgtgaatatttcacaaccttcagcatttacaaagtatgcttaatcacacctgaactgtaataaaaccagctctgcctagtttagccaagagggcataaatgttgattagttcaagaatcaatcctgcctgctccccaccggagcagctctagcagcttcatatctaattctttcaggaagaacattgaaagtgtaggagcgggcttccaagtgcagctatcactcctgtctttgctggacctcaaagagcattcaaacaatcccactgcctgactaggtggttccctgccacctatcaacagcttttataaagatttagacaaagaagaacacaacaacatgcttatggtattcctatcaaaagctcatgatctgaaactaatcatagggaaacagtaagcaaacccaaaacgagagacatttgacagctgtcctatccaatacaatggctactagccacatgtagctattttaattaaaattaaataatacttagaagccagttcctgagacccacgagccacatttctcttttttttttttttttttttttttgaaacagaatctcactctttcacccaggctggagtgcagtggcccaatctcggctcactgcaacctccgcctcccgggttcaagtgattctcctgcctcagcctcacgagtagctgggactacaggcgcatgtcaccacgcccggccaatttttgtatttttagtagagacgaggtttcaccatatgggccaggcaggtctcaaactcctgacctcaagtgatccacccaccttggcctcccaaagtgctgggattacaggcgtgagccactgcacctggcccatgagccacatttcaaatgctattttcatgtagctaatggcttcatactcggtgacacagagcatttctattttttttgtttgttttgttttgagacagagtttcactcttgttgttgaggttggagtacaatggcgtgatctcggctcaccacaacctctgcct

SEQ ID NO: 1561912 - DNA, 4001 bp, Homo sapiens
cacacacacacacacacacacacacacacgtatatacatgtaccccaacccatgatttcctttcttgttttaaaggctaaaagtaaatgatagaaaaaaagaagttattttaaaaagattaatctataccttaaaatagcaaggtatcaaaatacacgtacacaagtatattctgattgtccaaagcactttctctctttcgttagagttttgaaggttgtcttagatttaatccataaaaacaaaacaacaacacacaccaacacaacaacagaaaaatagaagtgggttacatcctcatgctacctttgggggtggggacaactgaagggatatgggggtaagaaaaggggaaaacggcatagcattgctcctttcacaaagagacaattgtctaactgtaaatagaataatagagtagaactcagtctcctacggagttataagtgcaaagctatctctccgtgtagctggcagcaggaggtcgtagctgtaacaggtttgcttgcaagagatctgaaccacccttattgttcatgagaatccttcagtctggtctggcctggagcatgaagacgtgggtgtggagcagatgagcagacaggcgtcgcacaccctgggtgtttggaaatgagtgcagagagcatgcagagaagccttcgctgatttctcccagtgactatttgggaaatcagagtttgtgacttacccatcttggaatcctttcagagaatctgttgttcaccaattttcccctttaaaaggctttgtaaacttaaaaacaaacgacaagtacaatcatggctgttaacacatttttatattttctaagtatatatatttttctttctaaacacctcacgtggatggaaagtcaaaagtgacccgactgatgatcatttccatggccctgcatcctatcccaagttcatgccgttgcagccacagagaatctccctaaaggtgttgcgcaattccaggctccggaaagcgtagatgagtgggtcgatgacggagttgcacatgatgaggaccaggtaggtgttgaagtgggcagtgtagcagatgcagtaggggttggtggggcaggtgatgatgaggaccaggtggaggaagaagggggcccagcagaagatgaacacgcccaggagaatggtgatggtgactgcccccttcatgcatgagtgttgctgtggggccaccccgtcggcaggtggcagtgctgctatgcgcttgacgtgcagccgcgcaaagaggaacatgtgcacgtagagggtgcccatgaggagcatcatggcgaagaacatggtgatgaggcacacaatgaccattttgctctccgagtagacgatgaacaccacgccacagacgccgcagcagacccagatggccacgatcaaggtgagggccttcctcacggtcatgatgctgtggtagcggagcgcgtaaaagatggtgacgtacctgtcgacggcgatggccaggaggttgcagatggaggccaccagggagatgcagatcatggagtcgaagatgttgtccatgtgctggataaactggtcctcgaaggtcaggtagtcgctgtggacgatggcgatcatgatggtctccagggcattggacacacttaccagcatgtcggccaccgccaggctgcagagaaagaagtacatcggggagtgcaggttgccgttcctgaccacggccaggataaccaggatgttttccagcagactgacgatgcccagagacaggaaaacctcgggcttgatgaagacctgctcacagaaggcgctgctgctctggttgctgaagaaaggggcttggaggtgctccgagccattaggcagtgttggctgaacagagggcaggcagcacgaagcattcattgctgtcagaagggctgatccgagctggggctccagcagggtccgtaggaagctgctgctgctcacaggaaagacaaaatctccctccagatacgtcttttggatgctcattcaatctggccttagagtttattctcctctagaataaaaggatggggagggtagagagacagatagtgagagagggtggaggaagagacagagagagagagagacatacacacagagagaaagagcgaagggggaagagagagagagagggagagtagctagttagtagctagcatgcaagtttgtagcttggagacatagggagaactttgctgttccaggaggagcagtttttatcttgtttacatagaaaaaatacaccatagggtctcttaccagctgtcttccttctgtctccctctcacccctctgtttgtctctcctcacttccccacctgggaacagaaaacctgccaccggctgctacagttacagctcttttcatggcaagacaggggatgtgttacttgtcgctagaagtgaagggagaacactcaggtttttcatattggccaagggcaaacaactcctacttaatcttcagcgcagcagaatgaccactgagcatcgggcacctctctgactgacagcaggtacctggccctgaggattctgcagggagattaagaagcagactagtgccctctgcaggccgcacggctgtctgcttgctggcttggcttagccctttgtgtttgtcatggaaactgccacaggcatccactcatctgttcatttgtttgtttatttgttagttcattcatttgttgttgttgtttagcaaacatttattgagcgcctactatgtgtcaggtctctgctgagtgcaggaaatacagtggtgagcaagacaacagccactatctcaggcttccccgaactcagagtctggggtggaagaagaggaatcaataaatgcttgaatcaggaaagtccaggaaaccagggatgcaaagaggaagagccctaacccggactgtcaaagttcctggaggaaggagcacctatgctttgacttcaaggaggaagaggtcatatccagtttggggtgggtggtggggtgggggctggagctggaggaggtagaagaggactccaggcagagggaatcacacgtctgcagcctggaggcagagagcaccctggccatagaagtcatcacagattgtggatgtggagatcccatttgacccgcggagtcagaatcacccaggtgtaagacctgaacaagtgtgtttgcaatttttgacaggtgagctggggcatagtcacagttgagctccactgaaaaagaatcttgggcttttgaaagtgctgaaagtagtctgctctggtcagagcatggaaataggagacacaatctgagaaatgaggctgcacagtttcttaaaaagttgagaggtgcctgaatcctgaaggacagcctcagccagatgtgagaatttggacagtaccttgacagcaatggggactgtggaagaaacataggtagggcaggaatgagatggggtctgcattttagaaatattcctggttgcagggtggagaatgaattagacagactgagcatgtaggccagggagtccggggcagagggtgttgcaaagacccagggtgagatgatggtggcctggagcaagggagtggccatggggacttggaagacttggagggtggtcagagagattcagaaggttggataatgcagcttcagaactgatgggttatgggatcatgggagagggagcagtcagaaacacctgtacttctttcttacataatggggaggatggagatgttttaagctggaaaatgtgaaaggcagaagttagcaggtggcctactaatgtagtgttgttcttggaagtatggtttaacacttggtccatgttagatctgattccccatgtagatcatatgaactcagaaaacactgagtcttctcatccctacacacacacacacacacacacacacacacacacacgcacattctaggtgaattaatgatccatctctccatgtaactatgtatgtgtgtgtaggtgtgagaaatattaa

SEQ ID NO: 1561913 - DNA, 4001 bp, Homo sapiens
gggtgaactaagattaaagcaggtatatgttagtaaatgaattacagtaatacaagatgtagcatccaaagacaagttaagaaaatatgatttatggtgcttttttgtactttttaaaccctaccttcagagaaataaagcttccagcctttatatggtatgaatcgatccaatgttgactgcattgactgtggggtctttgttgaaagcaaaaactgtggggtttgttctgaaaaaaataaaatactaggttagtagaaacagagtgaacatttttccaatatgcttctctttccaaatgagactctcattaatagagtatccaaattaggggttttagtaaaaatctgggacatcaatgttcaaatacttactaaggagtagcatgaaataaaagacaaactgaagtatgagataaaccgccttgtatgatagacgtgaattgcttccttaagtgaaaaaaattgaacaatcattgacctcacctaccagaagtacgttttcctgtggttttactcagatcaggtctgtgttctctttctctccattttcctgagaagttcccaccacctcttccccttttccagctttgaaatcttcctcgtccaaatcctctgcctctatactctccattcatctctcctaaaagatagatattaaaaaggtcttcaccaaaactgtaaggaaaatagtgctcttaaaaatgtattaataaaaagggaaaaattaatgtattctaggttcaagagtagcaaacaggcttgcaaagttgtacagctatgatacaagacccaaatattctgcagttaagtttctaatctctatcgctttttaaggtataccataatagtttaataactattaaatatggtttacgtatactagacgctcacaggttaaaaataaggacaggtactgtacctgtttacaagtccccattacagaaatgaaaataggacaggtaattaactctatgaaaacttatttgcagtatttgagacttcttattatagggcaggacaggatgaacataattctggcctgtgagacactagggatacatcatcatagcttcttacatacagtcaatcctgcagtgtcacatccattttttgtgcagtttttctgtaaatccaaaactgttcttataaaatacacgtctacttaaaaatgattcatatcctaagtatacaagtaaataaagatatacctgtacgctgcagtgcaattcattatcaaatactctacccaaatccttacttaaaaggggtttagttaataaaacaagatagtaactagaaagttcacgatttaacggcatgacagggctccaataattaggcattacacattatgaaactgatgctcaaagaaattaagcaaaccgatcaagatcaaagttgtttgtcgacagtacagagataaaactttcagcctcccaagctgaggcgctccttcaacaacgctgcgtgccatacccttctcaaacgagacaatatgctgagaacagtaacaaattcaaaaaaacgttaagaagtaggactggagaaagagtaaaaagaaacagttgggtacctgtgcttcttcaaatactactttatttacatctcctaaggctaaagttcttacttgcttgggacagaggtcccaaagctctcctagttcacaactgggccggctccaggatacgcgcagatctgtccggccggattctccctccctccctcccgtagagaagcaccacggggctaagagtctccgggatcttagctcctcaggcgactcctgccaagtccgcagttctcttcagccgcagctttcctgtcgtccccgcgcggtgctgaaccccatctgtctcaacggctcgggaaactcagtttccccaccgcagcttccagaaggtgtctgtagcgcacagcgccgcaaaaatgcctcaagcgaaaatcaggtcttcccctaaattcttttttggcgcttcagtgatccaacttccgctcaaagaagcggcaagacgagaggggcggggcggagtgcagccaatcaaggagtttggccagacggaagccgagaggcttccggaagcggtcttgaggtctgggccggaaagcggaagcggcgtgcaacacgtgggggcggtgccggtcggagggctcctagtgcgccaggttgtgggaagtgaggctggcggtggcgacaaccgaggaggaggggcgggacgccgtggagcacggcgaccggctgagcgtcatggagggctcaggggagcagccgggcccacaaccacagcatcccggagaccaccgcatccgcgacggcgacttcgtggtgctgaaacgtgaagatgtgtttaaagcagtacaagtccagcggagaaagtaagtcagatcgctgattttaggggtctcccgcccccaccttgtagataccccctccctccaggtttctccacagaattcttccgccagggtgccattcttggctctctcggtccccattccccgccctcgttgtctcctcgggtctttctgtcacagaaggcttttccaccaggatcccgtcttcgaacctcataatctcccttaaccctcctgtttttcccggagccccctccatgatttcatatctggccgtccaccttcagcatccttttcagtctttccacagagttccttccccagaattccattcttggccctagggtgccaatgcctccctctccacaccctaatcacctgtcctgaagttctttccctaggaccttgggatcttcactgtctttccagagacaccccctcctttcttcactttaggatctcatccttgtctccagagtctccttcaggttccccctttttttccaccatagatcctccttcttccctaatcccccagtcaggatctatcccacaaaaaatgaaacgtctcctacctagtctggctttctatcctcttctctacccaagcaggatacacagaatagatgaaggagacaattcaccacagagtgtggaatcactttgagtttccctcgttttactcaccaaaggattcaacgctgggaaaattgctaaaaagcaatttgctcaaggcctcagaactccaaattaggtttggtttgtgcacctgctggctagtatcgctctgttttatagaagtaaagaagtgggattttgataactttctggaagggctggtgaggttgttaagtcctaagagcttattaatggtgaaaatttattgggatatttggattaatttatctgagaaatacaaccacagtgtttttgtttttgagacggagtcttgctttgtcacccaggctttagggcagtagtgcaatctcggctcattgcagcctctgcctccgaggttcaagcgattctcctgcctcagcctccctagtggctgggactctggcaccatcacactcggctaatcttttttttttttttttgtatttttagtagagacggggtttcaccatgttggccaggctgatctcgaactcctgacctcaggtgatccacccgcctcggcctcccaaagtgctgggattacaggtgtgagccaccgcacctggccacagtttcttttgagctaggttattgtattacttttgacagagataagttgaatgcaatgtcaggagaacagctttctgcagactgggaagtatgagatttggaatttctgataagtacttacttcagatgaattcttttactcctggtttaagcaaactgttgactggtatttaaggtgaagcaagcatcataaaatagtcaagaaacaagtctccagagcactaagctggtgataaccaagctttttgcacaagcactaatttagtaaagataaaaagtttcttttatgaggggtatgtttcttttagtccggaaatgtaatacctgcaccaacctttaaccatttttaaattcttcttttttttcttttttaaactaattaattttttttgcagagacagagtttcactatgttgt

SEQ ID NO: 1561914 - DNA, 4001 bp, Homo sapiens
aatgaaagagtttgtgtactactaagagtacatgtactgcactttgggaagcttgggtaaaggaatgattgatgtgaaactttcctttaacaaaagacccctatataatttatgggactagctaattcaccagtgccaatggtctttgtttttgaatggaatattaaatttaaggaagctattctcctcacttgtccaagttagtaaattagaagttgaaggttaaagtgtatttatcctcagatccttatgaagaacctctgattatgtttaccaaggtctaaatataggtcatgtgttctggtctgcttcaaggtctttaaatttacgagtcagtttacgctaataagtaggacagtgggtatttactggattctaaacagaattatctagcaaacaactagaattctgttaccaggtgacttttttcaataatcaaggaaaacaagcaattctaatattgttggtagcttataaaacaagtgaattttatgtattatttagtcaaatatttgatctattttagtttcatctgtaaaatgtggataacagtatctatactccacaggactaccatgaggatcaagtgagttaatacacataaagtgctatttaatgttaattactatctgaagggagttccttgctagtaagttaaaaaaacaaaaccaaacctcattcttttgacaccgttgctctctattatagaaaacatagcaaacatatagaatcagaattgagataattacttgaagtgtattctttaaagccatcttctcccagttccagaatcatccgctgtttccacctctccaacaagaaaacctgttgttttgtcatggtctgctgaaggactcgggtcacacttggtatcacattcctttgcaaggggattttcaaaggaactgaaggatcacttgcatttggtttatcacttctctctggattgaagataggaaaccagttttgtggcactcgtctgtcctcaccttggtttggcagcttatgcttgctcacgggtccacagagcaaagcatcttcctccaccgatcccggggtctgggcgacgcctctggatgacaagacagactgaactaaattagagtatttttcttggtccacttcttcatatgggttcacttttttcttccggccacatgagtaagaggaagtagagaaagccacaagggcagctgattccacagaaaactttgaactcctgagctgcctgcaaatggtctgaaataacttcatcttcattcagatttgttttcactttagtctatttgcaacggtcgaaggcctttatgtttgtattcctattggagagaaaacaaccatcaaagcgaaagctgcatcagaatgatattgcacatcaaaattgtgaactttttcgacatgtttggacagagccctttcttaagaaagtcgacagagcgagaccctgcctccaaaaaaaatttataaataaatcaagactcaatacccgaaggaccgacacatactaaatgcgaattagtagacagcttgaggcaagacgtcccagtttctaatctgcaggaatgtgacgcccaggaagggaggcgtgtgcgagacacggaaaaacacaaagatggagcccgtcccatggcggccacacagtcctaggtgacagacgacgactaattcctagacaccaggctctctgctaagtattctgtgtggatacttctcatttggtcctcacaccctctaccgtgggtctagaatgaacccgttgcacagacgtggaaatcgggttggagggtcccgtcgctcgccggtcagagctggtggcggcgctgaggtcccattactgtgaccgcaaaaagtcgcctcccgctccgccgtgggtgcggacccctggcggggccaggacggcggtggcccctgtggcaggagtctggattagagaaaagacgacttaaataaaagcccagcctacggcaagtgtcggtaccttggaagccaccacacttcgcttaactctcaaggcgcgaacaacctctcgcgacccgtactttcatccgtcccgcgctttggtttcgaattaggcacagcctaaggcaaagcaggtccagaatgccccgcggcgctcacgccccacccgaggctttcgtcggcctccgccaacgcgccaccagttagaggcagggagtacctctccgagcggaagggccggcgtctccgaagcgcgggagcctccaaatcgcgcccttctgctctcacgagatctggtgacgtcagcgctcgctgccatcttggactcgggctgagtaataaattccccccgcaccgaaacgcggtctttctctagacgcgtcttgctgggagagtgtccgttgcttcccgtccgtgtcgcggccctgcggttggcggcctcctcgtggagcggagcaagggtaggccccacgtggcgtctttgcccggctccaagatggacggcagcggggactgggaggctgctctgggggagcacgtggcgccctgctcgcctgctcccggggcagctgggatggtggcggagtccggaggcctcctgccgccgtcgggcagggaggccggcggaggcggggccgtggccgcccccgagaggcgcccaggcggcggcggcggcggcccagcttcttctttcctcgcacagccaggcggcccctgctcgagtcccgcgtcgccatggccgcggttcccgagttgctgcagcagcaggaggaggaccgcagcaaggtgaggtcctcccagcctcagactcctgggcgggcggccctgcgagctccggggtcgctgcattctttcccttgcgcgtccataggccgtggctgctcgccgccatccccagcgcgggaagcacccgtgagacccgggcggcccctctccctggtcttcactgaaggctgccccggggaatccctgtggatgtcccggattctattaggacagaaccagagacgcgggaccttagccccagctcaggcgccggtgccgagcggacttggagagatgatctctggagaccccggaatgttctttttaaaactttcctcggcttcgtggtgaccagtaggtgaacgtgaaattgacttaacatgcgacagaccagtttggtttgttgcccccaaaataccctccttccccccaccttttactgagaagacttttttggggggggggcccaaacaacttgggaaattgcatcaagcgtccgaacatgctgcttacaactttagaaacgcaaaatgcgttgttgtgggagttgtgtaatttttagtaggtgctcaaatacttgctgaacttggtgtctatttttaagtcttgcccattgatgtaaactgtccctaggtcacgtgtatcttgaggtctaaaagattatttatgcaataaattgaaattcccatagccaattaaagattcagacgagcctccactctttttcattggttctttaaatttgcctcggtagctttgcgatgcatggtttgcgagcaacctttcttgcagaatcgtcaacgtaagtttttctgaccgatgaaaaagaacctctaaaaatacaaggctctcttaaaatgtaatttggagccgtcttaacttacacatttcttgagaagttaaaggcacctccatagagaaacttgttcatctagtaagtaaataccagagtttcaaagcggctggattgttccaacaagggtatcattgcattaattattaaaatagagctttctatacaggagggtgttgtttagagtggttttttttttgaaagttctttattactaaaacaaagtggaaacttgagaccacgattctttgtaaaacattataaaggtacttttctccataaagggtagataatggattgggattttggtagcattttattttttctttctttctggtacattcttttagctgtcttgattcggagtcagctaggtaaaaggactcaattgcttcaccccactctctggtagtacagtatattg

SEQ ID NO: 1561915 - DNA, 4001 bp, Homo sapiens
cttaccacccagggcagggcaatgtctccgcagagcctgcagtgtgcagaggccactgagcatgctgtggctgtgtggcagtgggtctgcagctgggcatggctgggttggagtttcacgtgggggtgggtgggggcggggggtgggggttgtgcttaaggctctggaggcatcccctctacaaaggaaggagcaaatggcagacagaagcagaagctgatgtcccatttccacgtagctgctgtgatttatcattttcacgtagccaaggatacaaaaagggcacccgacaccgcagcctgagcttcaacttcgggggcacctgggttccgccgctcatctgtgccctcccaagacctccgcaataaccgtccccggagtccagggaaaaggcctcctcaacgtccccagctccctggcacatgagctctcagagcctgggacactcccgcagcctggctcaagcccccacgacctgtgaggcattcatctggacggggtctgggggtcaaggggaaagctgggagtcccaaagggcaggagagtcaccccagacccagccagagtccacaggacttctgcccactcacaaatgaattgtagtcacttttcaaaaagtttcccgtctgcatagaaaaagagcacccagccgcctccaagcagaccccaccgtgagccgagctggctcctgtgcccggggcctcctccggggctcttcagcggtgaataccgcccggcccccggcatcagcgccgcgggaggccacgcgggaagtcaagctccccagcagggacctgcacagacgccgaccaccagggctgctctccccgaagcccccctagtctccgcccacatgtgccccccgccccccacctcgccgccctgcccctgtaaacgcctcctgaccctgacgtggctgggagagctgcagaagtgccgagtcccggccgggggcagcctcgccgccgctcagctcgggaatccctgccccccaccagcacctcagtgggggatactgcaagttcaaggtaagtttagccccacgcccggctgccggggctttgttgcggagcggcaggtgaatcgcgcccccagcccagccccgaagcccccatgccatccactgcccgcgtggggggccgctgctttcttgcaaaatgcccgcaagtcaaagttcctgcctcccagctggacgcgccctccaggccctgccggctgctggctctgcagttttccaaatgtggatgatgccgcgagccaagagaaaactccacggcacccccgccggagccgcacggcgccggcacccgcagcacccacctcgctggcaggcacaccccccaccgcggtgcccggcaagtttgcaggggccgtcccggcggcccagcggtggtgatgggctgagcaggactcaccgcggagcccagggcacccctggggccgggctggtgacagcggcagcggcggcgggcgcagggtcgcggctccctaggagatgctgcagcggcggcagcaccagccacctcctccgggagccaatcgcgaatgcaggggtgggggccgaagctcgatgcgtccgcacttggtgggggcagagagagaaagaagacaccaggcaccccctctccacacccctgcccttcccccagccctcctgcagcagcgcagacttagcaggagggagatcttgagagagagagagagagagagagagagagagagagagagagaaggcgctggtgcagagttagggagaggcggccgagctgcacaccttgagccccggcctcctccgaagggaacccctgcaccccagcggggtcagcacaaggtagagaaggtagaggtcagggtggaacaaaagggaaggtcccgcgggtgtgcacgctctcgcaggcacacagccggctcgcggagacacaggggcgggggaggggaggggaggggaggggagggcctgacctgagaggccagagcgggcgtgggggcccccctcgggtcaggagccggcctcacctttgcagttcttatatacccggccaagcatcccaaacacgcggccctggccaagtggccccctcgggctgcgctccctgaccatatttagtcaagcaggggaaaaaatagcctgtcagctgggccgcggctggcccggccaccgggaacagggtgggagcacccacgccattgacggcgggtcccgggctcaggctgctgtcctgcccctcccggcccctccctgacaggcctcccaccggctgtccctgcccgagatccccccgctatttttagcccagccagtacagaggcgcctcctcagtagccgggcagcagcctccatgccatgccagccggctcctagggtgccctggggagacccgggcatctcccaggctgcagggccgggggtggggggggcgggcagaatggtacggcctccttcgctgctctgagcctccagtgggctgagcccacccaggccaccaggagtgggtggccccctccacagtcccatcggctctgcccttttgcctagaattggggccaggatcaggtggtgacagagccacctgggtttccggagactctcaagccaaccccaagtcatgacaaatgccagtcgccttggacagaggcaaggtcaacctgcttgccgcccccagccaggccctgccaccaagggtgtgtgatggggagaccccaatcccgggtgctggacgggctcaggagctcccccttccgggatttcacgcccgaattatgtaacagacgagggcctgggacggggcctgacggggatctgtccttgcagggcctggacgcagagaccagaggcctgaactggcagactgtcctcacaggctgtgtgacgctggctggtcgtcccatctctctggggccccacaggactggggaccaggtcgtggaatgacagtggaccacagtggtccggggaccccgctcgttggtggcaggcacaggcccgtgtgatggggacaatgagctttggtatttgtgagtcctgtccagagcataggtcctcctgttcagaagccacctcataaatgtccccagtgcctcccggacttaggaaggcatccccttgtggttctggccagttagggacacagggccggggagtctatgccgctcagaacaggctcagctgcatctaatcccaggggagcccctgaggagcctgcacaccccccaggctggcccacaggagctgaggcagggctctcctccaggttcacctcctgggctcacggccccttccccacatcccaaggccggctctgcagagtcatggggagaagccggagccccagccacactcgccacacacgccgacacccactctggtgtcctccggccagcgacagcgagggacagagggacgccccctgcacctgcccagtgcagaggcttcttgagtgatgccaggcccttctcccagccctgtacgccccgctaaagaccccatgtctcaccataaaggaggccaggaggttttaagcttctacctggtctgagcacttttctggaaactaaatagccactcggcttcccactggcagcgggagagcgtggtgtgaggtgtggtgtccaaactccccctgcaaggcccctcccctgcagcccacttcctcctgcctgccgtctccaggcagggttgaggggggcaggccaggcctgcagctggggtcaggggcatagacagccacaatgggggaggtggggagcagtctgcaggcctgggcaggcggctctgtaaaggatgcgggtgctttgtggtggtgagagagagggtatgcagcagacgtggccataaatcaccctcctcacggcagccccacacccacggaccagggcacgggcacagggccatctccttccaggagaagggctggtgtgggtggccagatctgacagcccccaggccgtaggacagagccagaagacagagcagttcccccgtttacccatagcaccagcct

SEQ ID NO: 1561916 - DNA, 4001 bp, Homo sapiens
taattaattctttaggtaattctgaagctaaagtttgagacccactgttctagtctacatccactaatccattctctacacttttaatatagccatcttgcaaaacaaaaaacaaaaaaacaaaaacaaaaacaaatctggttgtattcctgctttgcttaaaagcctttagtgacatttttgactagagtgaaatctaaatttcttagtacagcagaaagaaaaatccactaggatctagatcctgcctaccagttttcagaaagtcaagcactttaaatcatttttgtaagaatgcattgtcatgtagtgattaagggatgagctgtggactcataccacctggctttgaatcttcacttaccactttacaactggctgtgtggccttggattagtcacttaatctcattgtgcttcagttccattgtgtgtacaatgtgaataataacatccatatcataagcttgctgtgcagttatcacaatacttggcactttgtctgggctcagtaattgttagctattattattttgattatgtcaaaaagaaaaaaaacattactggaattaacctgtagtatagcaagaactggagaggattagaattaatgcccaaactaagggaagtggtccccataaaggaaggcccacttctctgggcagtttcagttagttagctaagaataaaaatacccagtctcaacagagaggttcagaggtctttggggtttgactagggtagtgaatctggtaattagattctaggatattataggacagataactgtcaagcttctaaagtgagagccaggaaagctgtgaaggaagtcagaaaactgatacagagcaaagaagcaaagacggtgaaaaatttcatgtatgtttctctaataacagttaatagagcagccaagtgatcaaatgtgagaatcctacaatgactgaaacttggtcgacattttcagacacgctgttggtctgaaacaacgttttacataagagcaaaagcattgagtaatggcgagaatcaaagtctaacctccaccacaaattagttatggtcttggacaaattacttctctcctgcctcaatgtcatgatctgaaatagggggccacattatgaagagaactatatacattcatagcttagtacagtgcctagcatgtgggaagtgctcaatacacggcagccattacttttattgggagtatattatcttatacgaatcatatataaaaataggcacccctggaggttcctgcttgatcaaagcaattatatattatcatcgaatattttgactaaaattgggttccaacttataaggtgaggaaatactgtaaagacaaatccaaacacagtcatgtatcccacattcacaatatttagggattagcaattttcacttcaaatatgtacaagattaattctatccaaatgctcacttagtgtctattaggtgctagcaagactactagcctcaggggggaactaccaagaagagtaaggcatgattcttgtcctcaaggagaatacaggtttgagaagataatgggacaatcttaataaaacataactcaatgctgtatagggtcaaaaaaccaaaccaaaccaaaccaaaccaaaccaaaccaaaccaaacccgcacaaaaaactgcataaagtctttaccaagttgactcatttttcaaaatcatagttctcattttttcctctatcctcctctgaattagtctcaatccatttttacttactccatctttagttacggcagggagtcaagatctagaaaaactagtcactgccacccacgataacagaaggtagcagccacttgtcttctctgctatattcctagtgcgtagcagaaaagtagagaatcttgtcccctttggtccacagaggatggcttattcttctgcttcagctcttagttcagatgtcacctactcagagagcctttctctcagcactcaacctaaagtgttttccctctccctccccattattctctagcacgtgattccttcaaagccctacctttgtgatgaatgctgtgatgtgccaccctgacccccctaaggaatgaaaggcttatttccccagctcctggaagagctgagacagacctcggctgccagcctccgtccatgattgacttggctgaagagagttgaagttaggccctttccagggaaacagacatctaacgacagatcaatcaaggggtataaaagcctggcccttctcttcaactttgaagggccaacccagcactagagttcctgtgggactggtggagaacatccttgagacttcactgcagcttaactttttctattgcccaatcctgcttcctttcttccttggtaatcatccaaaaagtcttctctagtaaatgtcctgcctctaaatctcctcagagtctgattctcaggaaacccaacctaggacaatctagaaacatcttgctcaatatcaatgtgcaatcacccctcagtatttgggggattgcatccaggacccatgatggatacccaaatccagatgctcaggtccctgatttaaaaattgtgtagtaggccagacgccgtgggtcatgcctgtaatcccagcactttgggatgccgaggcgggtggatcacctgaggtcaggagttcaagaccagcctggccaacatggcgaaacaccatctctactaaaaaatacaaaaattagccaggtgcagtggcgggtgcctgtaatcccaaacttctccggaggctaaggcagggagaattgcttgaacccgggaggcggaggttgcacagtgagcagagatccagcttcagcctgcgcgacagagcgagactctttgtcaaaaaaaaaaaaaaaaaaaaaaaaaatcgtgtagttttgtacacaacttgccacctccttccatgtaccttaaataatctctaggctacttataatacctaatacaacgttaaatgctatgtaagtagttgttacactgcagtgtttagggaatgacaagaaaaaaggtctgcacgtgttcagtacagatgtaaccatcttttttcccccagaatgtttttatttatttattttcttaaatagagtctctgtcgcccaacctggagtgcagtggcgtgatctccgctcaccgcaacctccgcctccagggctcaagcgattctcctgcctcaacctcccaagtagctgggattacaggcgtgcgccactgcgcccggctcatttttttgtacttttagcagagaccgggtttcgccacgttggcctggctggccccaaactcctgactcaagtgatccgcccgcctcgggctcctaaagtgcggggttacaggggtgagccaccaaaccccgccgccccaaaatattttctatccgcagttggttgaattcacacatgcggaactcatggatagggagcgtattgtttctcccccatcactagaacatggagtcaggaccgtgcaagtccctcttggtcactgccgtatctactaactcggcagtgctgtagacacgtgtatatctgtttatggataaactgaagatgttaatgaatgaatgaaaccgtcatattgagtctctgaaacggcaacaggatttgggtatggtcttatcggggaggaagacgagcatgaccttagagggtcatccctacaaggtccacagccctgcaagccccgcggctgctttcacgtagctggcagggccacgctgcacaacgtctctaacgccgtcggagggcggcccccacctcccgacagcctggggtacaccgtgcaccctccagacagtcaggggcacacggggcccctcccagcgagggaggggacggggagtcacaggttcggcgtagaaggcggcagcgcaggtgggagcgtggtgaggcgccactcctccagctctccccaccggcgggaagacctcctcgccgcccgcatccgtgccgaccgcaacatttaccatcggcagctatttc

SEQ ID NO: 1561917 - DNA, 4001 bp, Homo sapiens
tgagacttcactgcagcttaactttttctattgcccaatcctgcttcctttcttccttggtaatcatccaaaaagtcttctctagtaaatgtcctgcctctaaatctcctcagagtctgattctcaggaaacccaacctaggacaatctagaaacatcttgctcaatatcaatgtgcaatcacccctcagtatttgggggattgcatccaggacccatgatggatacccaaatccagatgctcaggtccctgatttaaaaattgtgtagtaggccagacgccgtgggtcatgcctgtaatcccagcactttgggatgccgaggcgggtggatcacctgaggtcaggagttcaagaccagcctggccaacatggcgaaacaccatctctactaaaaaatacaaaaattagccaggtgcagtggcgggtgcctgtaatcccaaacttctccggaggctaaggcagggagaattgcttgaacccgggaggcggaggttgcacagtgagcagagatccagcttcagcctgcgcgacagagcgagactctttgtcaaaaaaaaaaaaaaaaaaaaaaaaaatcgtgtagttttgtacacaacttgccacctccttccatgtaccttaaataatctctaggctacttataatacctaatacaacgttaaatgctatgtaagtagttgttacactgcagtgtttagggaatgacaagaaaaaaggtctgcacgtgttcagtacagatgtaaccatcttttttcccccagaatgtttttatttatttattttcttaaatagagtctctgtcgcccaacctggagtgcagtggcgtgatctccgctcaccgcaacctccgcctccagggctcaagcgattctcctgcctcaacctcccaagtagctgggattacaggcgtgcgccactgcgcccggctcatttttttgtacttttagcagagaccgggtttcgccacgttggcctggctggccccaaactcctgactcaagtgatccgcccgcctcgggctcctaaagtgcggggttacaggggtgagccaccaaaccccgccgccccaaaatattttctatccgcagttggttgaattcacacatgcggaactcatggatagggagcgtattgtttctcccccatcactagaacatggagtcaggaccgtgcaagtccctcttggtcactgccgtatctactaactcggcagtgctgtagacacgtgtatatctgtttatggataaactgaagatgttaatgaatgaatgaaaccgtcatattgagtctctgaaacggcaacaggatttgggtatggtcttatcggggaggaagacgagcatgaccttagagggtcatccctacaaggtccacagccctgcaagccccgcggctgctttcacgtagctggcagggccacgctgcacaacgtctctaacgccgtcggagggcggcccccacctcccgacagcctggggtacaccgtgcaccctccagacagtcaggggcacacggggcccctcccagcgagggaggggacggggagtcacaggttcggcgtagaaggcggcagcgcaggtgggagcgtggtgaggcgccactcctccagctctccccaccggcgggaagacctcctcgccgcccgcatccgtgccgaccgcaacatttaccatcggcagctatttcagaggtcggtctttcgcctcctacagagagccagcctcctccttgtccccgccctcaaatatccttcagtgaggacaccggtgacctttgggggtggagagggaggcgcctacaagccccttcccctctcttcggccggacacaaagcgggcttttccacctagagtcccagcgctctcacctgcgcaccagccgtcgcgccgccccaggccgccaccgccagaggccccagaaacagatctcaagcagccgctgctgccgcggatcccgacaaccttcgcgtcgcgcgagggcacggagcacgcgcagctctgcggtcgacgccgggccgcccccactccgcttctccgggttttccgtgaagctccagccaacagcggccgtcaccggaaaaaacggggagcgaagtttattcagcgtatattccagcaaattgttgaaactgaaattttaaaagaacgcataaaatttaaataacatatcaaaatggcacagcttctgccttttggtgagcgcttgacaatgatttattgaatgaaagaaagaaatagtccactgcgctctgctctctgtcctgacatgaccaattacaaagcgcttggatttgtcgctcagcgccagtatcccgcctctctgtgcggttgtctggaaaatcaggatttttactctcccgtaactcccgggatcgggtttggaaaacggacatgcgccgtgagagctagttgccttctactaaagcatccgccctcagtccttcctgagggcttacagggaagtgcggagtttcgcagctcgtactcttcacagattagataattcacccggcatttccccatcctgcttctgggttccaggacaaaacttttattctcttttaacattaaaaaacatataggaagttatgttcaaacatggctatttttattaaaatttatccggcactgtgaaagctacctttcctttctcacaatctttcgcaccgaatatatgttccattcttgagctagtcattttccaatgttaagaaaacacaccacagaaaagcgtttttttttctctcggtcagttcaactgcctagcaccgtgagttaccatgatacgttatttgctaatgagagtcattggggtcccagcctttaaaaatagcctgcgtccggcgccatttttgttttgggcccactttgaaagccgcgatattctgaacagaggccatttttcttttgggcagattccacgggccatcgaagtgtttcgctgccatcttaaatcctggctgtggcctcaatcctgcagcgaagctgcccagatcattttgtgtttgggcggcggctgagttcccaaacgcgcgcggagaccctgggaaggaggaagtaagcgcgaaagtgcttcccttaagcttctgaaggttggctgcagttccggctacctgtgtagtccgagtttccacagccaggtactactccgccagtgaccctggacagtaacaaaacatataaagcccgagcccaaaccccgccaccatcataggtaagcacatggacctctgacaacctcagatgttccttcaagtgaactgaactgtttgcccatctcctccctcctggtttttggctttgattttttgagacttttccgaatccttctccctgtacttccacctttcttcattgttttcaaaaagccaaaaagttgctaaacatcaggatgccatgagcatgggcattacggtggagatattattcaggaaagttaactgtctttgcacaaagggaatgcagtagatgggccaggtatttgtatcaaatcatggctacctgcatccagcagtacaaatacctcccccttcccagacatttttggagatgtgaggtaaatacagattgcgtttgtatatacttcccattcattcatttattcattgcatttcttgagtacctaatttgtgctaggccataaggattcaggagttagctaaaaaaaatccattaactcatggagcctacattttatcaccttgacatctactaggttgagacaaataacagtattttatggttcttagcactgctagactgtataaacaagtatttgctttctccttcccctgaactatttttttttatttttagtttttaatttttttggccgggtgtaggaattaatggtattgacacttacttcttggatcctagacataacgatatttgtaagccagttggctagcgttaaaactaatattccagttacttagggccttgttgctccaagttcatttcacctaccaccagcatcagcatccctgggagcttgttag

SEQ ID NO: 1561918 - DNA, 4001 bp, Homo sapiens
ggaataatcaaagcctataaaactgatacaggtaaggactagcttcctcttaatgcttgaaatattgtaggaataaaaaagtttcagagttgagattgtctagctctatctctttatgttagacatggtgaaattcaagcctagagagggcaaggaaatggctcaaggtcacacaaaccaatgggggccaaggtcagatcagagcccaggcctccttaatcccaggccagggtctttccacctcatcctgtgcactcaggcagtctaaagcaatctttcttctagggtataaacttaggaaatgcattactttaacatgtgataaaacacatgtgaaaacacaaagaggctaagcaaagtttccacaacaagtcaaccagcaattataaaatctttggaggacaactgccaactggcactaaaggttcttttacacaccatatcttttttgttgttttgtggaacctgtaaccctttgagaggctgaagaaatctaggggtcctcgcctagaaatacacacatttgcacttacaaatttgtacgcaatttcagtgcacgtatgaccccctgagctccatgcccaattaagaatatctcttgaggcagattcttctaaacaaacagactgcctgcttcaacaaatatactccatctcttagggtggcgaggctatcactctgattttcctcagcaaaacaccattgtcccaacatcatttattagaatattgcagtcctctaggttggaagatactagagaaattagtccaactgcaccccccatgagatataggataaggtcatgggtaaataaggggagactagagtcagcctgcctaggttagaattccaattccatcactcactagctgtgtgaccttgggcaagttacttaagctctttgagtctgtatccccatctgtaaaatggggataataattgcagctatttcatagagtagttatgaggattgaattggataattcgtataaaacatagcaccaggcctggcacatagtgagtgttcagtaaatgctagctggcattattgtgatgatgatgtatgcatccatgcaagcattatgcatgcctccatccaatcccctccgagagcttttacttgcacatgccagtgatgagcagctcgccgcctcctaagctggttgagcagctccaattgttacaaacttcttcctatatcgagcccaaatttgtcttcttgcaacccccactcccgctggccctagttctgccctgtggggccaagctagaacaagtctatcctacctccacctgacagcccttcagctacgaagacagtgatcgagtccttcctccgccctccccctcccccttctccagcttgaacatcctcggtttcttctcccaacccacaacagactggctgcgcttactatttactccgaggcgttgtacggtttccctcgcacatagtcatgcaggccacacaccccactgccaacacaacaaacccgaccctcgtgctcggcccccgcccgctgcccctgtccgcggtgctgaagcagctcccggcctcggcggccctcggcgaggccctccccagcccccgccctgggccgcgccagcccggacccaaggcgcggacccccggcgcgccgcctccgcgacctcggcagtaggtgcggcccggcccaggcccgtccccggtgccgccccccgccctgcccggatgccccgagcccgcgccccggccccgcgcgccagccccacctgcccggcgaagggcgcctccgcctcgtccgcccgcgccaccgccaccgccaccgctgcccggttccctgcccccgccgccgccgccgccgcccgcgcggcgcccgggaggcagcagagcgcgggcagcagcagcagcagcagccgcccagggacccgccagcggctccagcgcggggcctggcccggcggcggcggcggcggcggcggccccggcgcggcgcggccgccccggctcctcggcatcccggcggcggggcccgcgcccggcccgcctgccttcgccgccgccgccgccgcctcggccgccagcgcgcccccgcctccgcgcgccccgccccggtggggggcggccgggggcgcgggggcagcacccgggcgggacctgcgagggcagtggctccccgaccagccctggggcaggggccgcggagcggcgctggggagggggttgcagaggctaaaagaacagttctagaggcagggtccgaaggggtggaactggaggtcggggtctgggggtagccctgagcaggagggggaagaggctaaatcagtaatcctggaggtagaacaactggatggccctgggggaacatatccggggttgggggtccggaaccctggggagagggtcctagggagtggcattggaggagagggggcctgagaggcagcctgggggaggagactgaggagcggctctggggtaaaggcggggttcgagagcaagctaaagaaatagccctgggtctgagagggtgactccggagagggagctctgagtggctctcctgggccggggtggtgggggaaaggggtagagaagacctgaggagcgtttaagagggggcattcctgtgagacattaggtgaagttgaggtgaagctcagtccctcacccctagagggaaagagctcatccagctgggaagatcatctttcatccaaaacaacccatatttatcaagcgctttctatttgtagggctctgggctacttgggatgctgaaaggaaaaaaaaaaacacccaaaaacaaaaacaaaaaagagaaggccgatttcctggagtgcagaggtttacagcttgatgagaaaacataaacgcaaagaaaaacagaatggcaaacaccacgtgtcaacaaggatacaggcggctgctccaggggtcgagggagacctgatgaggggctggggaagttaggaaaaagtgtaatggaggagggtgggactctagctaggacctgaaggaaaggctggatttaaaccaggggaggggagaggagagggcatttcagggaggaagttgagggtgtacaggatgtgcctgaggcggcagataagtttctctggagcacagggttcctataggaaagtgttgggaagtgagggaagttgtacaagacagtgaatgctaggataataaatttgggttgtgttctgaaggaaaatgggggagggtggtcattaaaggttgtgtgtgtgtggtgtgtgtgtgtgtatgtgtgtgtttaagcaggatgatgtgtgaaaatagtattttatgattacgtggtaatttggagatgaaaaaagggcacaggctttagcgtcagacctatgttcatatcttggctctgttccatttttataaaatgatgctactattactgtataagattgctttcagcatgaggtgcttgacacttaatagatattccatgttagttcccctcccagtggagagaataatgaccagaggaggcagagagattggttaggagactagtgtaatagtctaagtataaggaaataaggataacaataataattaacatttattgagtgcctaatacatactagttactgggctaagcactttcctccacgatatctcatttaatcttcatagataaaccctatgaaatagatgctattattacccctaatttaggataaagaagtggaagactctgaataagtttgccaaacttgcgtgattcataagtgatagagctgaatcgatttgacttcagaacccatttttttctaggatgggggtgagaaaagagacagatttaagagacaatgggcatacaagaagagggaaaggagtttggagtgatggcaaatcgagaaagatggatggtagcatcttcacagaaacggagtcctcatgtggaggaactggcttgaaggaggtgacaaggagctcggttttagacttgctgaaactggggtgaccacaagatctgtgagatgggtatggg

SEQ ID NO: 1561919 - DNA, 4001 bp, Homo sapiens
tcgagaggaagagggttagccgagtactgctgcgcagattgtgcgctgcccaaggcaagggctccgaaataagtgcgggctgaaatcccgcctgcgcgaagctctcccagcctggcgccctggccctgtgcactgtctggcaggaggggccgtataagccagggcagcgcgggcaggcaagaggaagccggggccactgctgcctccacgctctccgtggtcctcccttccctgaccccgcccaggtctcttggattttccctcctcacgttctcacccgcgacaccaaactggatgacgatgtctgcgtcccggctgtacacgcgagtgaaggtgagcggcgtcaccgcgctccacagtgcgaaggcgcgggcaaaggcgtcgtcaatcaccgcccgcggcaagtcttccgagtagttttggatcctgtagcgtaagagccagaggaaggaggtcagaagtgaaaggctggagcggggcagcagggacaccccatatcgcagagacttcaacatacacaatgctctctgccgtccacgctctcatctataaattgcttccagactgttttttttttttttttttttgtctacttagaccctcacaatggccctggcaggaggacttggattgcaagagccatttccctgaaggagaaacagaggctcagaggtggggacactccccaggggccacacattaaatagtgaaacccagggacgcgtccaagacaggacatgttcaccgctggcccaagagccagacctggcctccccgccccaccccgctgcccccacggccccggctcaccaataggtgatgttgtggtggtgccacttgaggtcgccctcaaaggtttggaatctgcccaggtctgggaccccgcaccgtggggttcgcatggccttcagcgtggcgctatccagctcaccggtctcgggcagggacagttgcttctggagaagcagcagcgcaggccccagagatttcgactctccacgcatctctgccacccgagtgtaaccatagcggtacaggtattcctgtggatgaagggacacacacatgccagatctctgacccctttctctgcccagctggggccaaaggactccctccagacactcatggagggagtcttttttctttttctttttcggagagacggtatcagcccactgcagcctggacctcctggactcaagcgatcctcccatctcagccttctgcatagctggaactacaggtgcacatcactgtgcctggctatttctttaatttttttgtagagacaggatcttactatgttgcctaggctgggctcaaactcctgagcttcagcgatcctaccacctcagcctcccaaagtgctgggattacaagtgtgagccgtcatgcccagcagggactaacatttaataaagcattaaatgctttccagacaccagtgctttctgaccacccagggatctcccctccttagacatcctcagctccttctcacccctggatgcctctagcccatttctaccccacagctgcataaggtttgcccctgttcactcccagcctatgcttaccccagaaccctccaatgcctcccccaccccaaaccatttcccatttcccacctaggaaagccccattgcccatttctggccatcactgctcaaagcctccacaagaccccccactgcctaaccctggacacctctgttcttcagatacgcccatcaccaccaacacacccctaaagcatctcctctgaggccctgcatcctctctgggacactcaacaccctcacggacagccctccccaactctagactaggtgtttgcccacctctgccagctgcctgtcggtgagattggttctcaggtctccagggaagagcacaagggtggactggcgctgtctgggggcagcaaagcagcagcccagcaccaggagcaccaggaccaggggctgccagaggctcatggtgagggcagaggtgtctgactgcagctgctgttgtgggggctttaaggaggcgctcctgtgaccccacccctccttgacaggcaagtgctgactcaggggtcagggtgtgtgtgtgtgtgtgtgtgtgtgtgtgtgtgtgtgtgtgtgtgtggcagcaccagcatgagaaagggcttacaccacctcctcctctctccactgcccgcagtctccactgccaagtcaggcaagaccccagacccgcaggaaaccgcaggccctcaggggaggggtagggttttgcaaactgcagagcttgtgggaactgtatgaaagggagggagggggatgaagctggagggatcccccatcccttggtctgaaagcctccagtggtcagccaagggaaagtgatggaagactccctgagacttctttctgaaactaatgatccccctggcccatccttggccttttgcaacaccccctcccaggtcagatatcctccccaaacccctccccacactccaggctctgtcctctttttccctccctgacagccttctttgactcagcttcctctccctgcttcatctgggggcggaaggaatgggctctgctaggcaaggctggggaattccactggggcaaccccctgtcttccgcaggctgaatcttcagggcagtaaaggggacagtagcagcctctagaaaacagcagacatggctttactctcttccttcaggacctcgggcaaatgtcttaccactttgaagtgtttcctcagctgtaaaaaaaaaaacggggggtggggggctctttgtccctaaattgatgtgaggattaaatgagatcaaacatataaaatgtttagaacactgtaggttgtaagtccgcaacggatggtggtgattggttttaattactaaggccaagacccaagattcagggccaggtatggtggctcattcctgtaatcttagcactttgggaggccgaggtgggaggattgcttgagcccagaaagaaggtcaaggatacagtgagccatgattatgtcactgcactccagcctgggcaacagagcgagaccctgccaaaagaccatgattctaacttggaatcaccaaaccaggttattgggctctaagctgcagtgtaacctggagtaaatgccttcccctttgtcagcttaggattcttcaactgcaaattggggcaggatatgggggaaaataatctataggagccctttcagttctccagccctgctccatgcagccaaatctccagccccaattatcacacttatgccaagcctccctcccaagcctcccacaccagcagcctccctcactcctttcttcctagccagccggcatcgggcagggtctatattcaccttcttcaaagccctatttgggaaaaacctgctaacaactcaaaaagttgtatttatttattttattttatttttggggggtgtagtatcactctgtcacccaggctggagtgcagtggcgtgatctcggctcactgcaacatctgcctcccgggttcaagcaattctcctgcctcagcctcccgagtagctggtattataggcgtgcgccaccacgcctggctaaattttttgtatttttagtagagatggggtttcactacgttgaccaggctggtttcgaacttctgactcaagtgatctgcccacctggcctcccaaagtgctaggattacgggcatgagccatggcgcccggcccaataagctgtatttaaagggcctactatgtgccaggcattttatatgcttatctaataaatgagactgtgagatggagataattaacttcctttacagaaaagttgaagttctaaagttcactaaccaatgaacatctgctttgcagtcacgaagtcctggatttccatcccggctctgccattttccagctatgtgaccttgggcaagtcactttacctctgaaccataataataataatgcattttttgagatttactgtgtcaagcaccgt

SEQ ID NO: 1561920 - DNA, 4001 bp, Homo sapiens
ctgagatcgcaccactacactccagcctgggcaacagagagagattccatctcaaaaaaaaaaaaaaaatctcattttgatactaattcaaaaggccaaatagaatgaccctctttctgaataattaaaacaatttacattttaaacatgtatttctgtaggatgtattctatcatctgaaatattaataagatccaagaatttcttaactgaacagtaaacagatccgaagtatataatctgtgaaaatgatttagaaagcattttgactgggggaggtggaaaataaggacatgtaaatgatctgcagtttaaaatgcaaaatcctgtcacgttacatctcacatgtccaagacatcctccgtgtgctgaaaaaaaaaatgatggttctcagaaacggtataatccattaataagtcattcatccaatacataacaatttttaaaactccttataaaaaggagtccacgtattcacagatactgtagaatccccagctcctatgtatattaccgaaaaatgcaaacaagtgtatctttgaggtattatggcaatccacatctttctcatcagactataccagtcacctcagtactgtggaaatgttccatcgattttggcagcccaggccatgaggccccccacaacatcccgaactgttaaagggtctaactcttgagctgctgataaggactggaggatcttcacggctttctgtgagtcatttcccagtttgcaaatcacataaatggggacagcagccccttcttgtgtgccctgcttctcttcccagattgcttcttttaagagtttcaggctctccgcatccctgcgttccaaatgtttcagagggatgtgtagggcatgaggcaaacgacaaatgtccacctccacctgaggcctgacgtccagcaacaggtggaatgccccagaatccagcagtcgcttatagtcggtgacagaaacacgctcctctgggctcagtagttgcagggagcggcatttatcagtggctgaggagccacagaaggcttcatagtccagcagatcagtcacagtgggccgttccccgcaagctgcacagtcgagcctgcggctccgcagccgaatagagcggaaatgccctctcagggcatcaaagagcaacaagctgccactgtaagaggggcccagacccgcagcgattttcagcacttccaaggcctgcaggcagcccaggaccccggtaacgacaccgagcaccccgccgtccgcgcagttggtcactgtctccgctgggggtggttgggggaatatgcagcgatagcaagggccaccgtcataatggtagactgtgatttggccctcgaagcgcaaggcactggcagacacgaggggccgacccgccagcacacatgcgtcattaaccaggtagcgagtgggcacgttgtccgagcagtcagccaccacatcatatcggcggaccaggtctagggcagtggctggcgtaagggcctgagtgtacggcacgcattccactgccgaattgaggcggcgcagcgaggcggcggccgaaaaggccttggcctggccagccagtgcctcgccatgcagcacttggcgggccaggttgctcatctctaccacgtcatagtccacaaggccaaggcggcccacgccggccgctgccaagtactgcgctagtggacagccgagcccaccgcagcccacgattagcacgcacgcggtccccaggcgcagctgtccgtgcacgcccagctcgggcagcactagctgccggctatagcgcagaatctcatctcgggacagagcggccttcggcggcagcggcgacaccggaaccagccgttctggctgcggttcctgctcagccaaaagagccgacgccagcttctgcttcagcgaattcaattcctcctcacgttgggcaacttcagcttgtaaggcgagtacctcctcccgggaagccatggcgacctcttccggaagttgtcgtgaaaggcatttccgcttccgtcttctgtctcctagcgactgggataaactaaaaaactttatggagcttgggaaaaggtgatgaatagatatttacttcctgaagaaaccttcagattaaacttcaaagatgtataaatccagaatatttctaattgaaccacgcaatggccctagaagaactagcgatcaatcacacaggtcatcccccgcttccgaatttggtacggtccgacccgtccttttccgcgccacattacgtaattccgcttccggcatctggctcagttccgccatggcctccttggaagtcagtcgtagtcctcgcaggtctcggcgggagctggaagtgcgcagtccacgacagaacaaatattcggtgcttttacctacctacaacgagcgcgagaacctgccgctcatcgtgtggctgctggtgaaaagcttctccgagaggtagcgcaccaggtctccctccccgaagaatgagatgagctggcttccccggcccgggtgtcggcagctggctgcgcgaagcggccctgtccagccttctttgcctcacacaggaaggcccggggagagggccaccctgcgagggaagcagaggcggatgcttgttgggttttcttcgtgtcctgggttctcattcctgcccttgggttttgtgagactctcatttatctttattatgtagtactcccgtcccccgcctttccgtagaaaggttggccactcttttacttggaagcgaggctgaaagcgtgatcccactcctccctctaggcggtcaggatctgcggcaagagccgggagtccaagcgagagctctcactctccgctccggtgccgagtgcttacataagcatgaggtttggtgtgtgtgggttagggagctattgctgggcacgataacctttctggaaaggagaaagcagaagagcatcttcgctgatcactggtggatgtttggtgtgattgttagaaccgggatggggggtgggtggagttcgaatttggaagtgttaatgcagtgtttttaaaaactgcaaaaaatcctggagtcagtacgaagtaacttgttttacgattgcacaaatgggatcatgctgtgaaatctttgaagactttttctcatattaacatgtacaaacatagcaaattactttggaagttaggtaacattccatatggctgtgttatttatttaatcaggtcatggcaatgaactggattatttccagcgccttttggttgtttctgttttttggcttttgctttgtcgatgagaacaaggactttgttcacaccatattttccagctaaatttagaaaagtgcttgacacatagcggtgctcctttattgcatcagtgttggcagcagacgcgttcatacttttacttgtgtactagggataaattcttcgaggtaggattgctgggtcgacagaaatgtgcttaaaatggacagttactgccaaattgctctaaagaaaaaaaaggttgtacaagtttggactctccattcttcagagtgcctgtttccctatcaaccagcccgcctgagcattagacttaacattgttggaagtactcatttgtgaaaaccattgctgttttgattgtatttccttgaataactgccttcatatgccttgcccctcagagttttaaaatttttatttttcctgtttaatcttttaattttgatttctataagctctaaattaaagaaagtaactatcatacaaccgatctcgttcagggcttgtattctaattttgcaatttttttttttgctgttttaatttttttatgtagtacaatttatgtttccttttaatggtttgtgaatcaatcttttaagatcaaaatgaagtttgataaaggaaacaaaacttttcagatgcaatcaaattacttgaagtcagcccagcttggtacctttgagctgcctcaccctcaggtggtgtagctgctttgaagtggtaggggacagtaatt

SEQ ID NO: 1561921 - DNA, 4001 bp, Homo sapiens
cggggcaagggcaaagggcatttcttctttttgtgaacagcgcctgccacagctgggctttccagacagacccagggagggcagaaccagcggcagcagatgcaggagtcaggaagacccaccggggccagcatcactaaggcgggccctgaggaccgggcagccctggtgacacacacctgtgggctccgcctgcccagcacggcctgcagtctcaccatgagactgcgttccccaaggcggcatgcagagggcacagtgacagccctggggaaaggccgcaggcacctcgagttctcatccacgtggcaggagcccatggacaccgagggtgtcggttgggagcgccacaggcacagaaccaggcaaagaagaagagagtgcttgccaggcactgccctcctgaggtcgcacagaccagagggagagacctatgtcatactgatggccggtgtggccctgagtccaacgtggctggcacagactctccaccagcacaggtccccactcctcctggtcacctgacccctgacccccaccccactctccaagtacaccaccttctttgagctcctggacccaccacctcctgctgccacagggcctggaacacccacctgtctcttctggccaccctgcttacctagttaacccgctcgcccgtcacacagtgccagctccaagctctgcgaggactggaactctacttgtctgactcccacagaagtcaccaaattcaccttggtgtgactcagatagggtcaccctctgcctaaagcacttcgggggcctcccaggaggctgacaatggcctaagggcccgggactctgcatccttccctccctccccagggtctcagctggagactctggcccagcacccagtctaaagcagagcccctgaaaagctagccagctgctagcactgtgtttgtgctttccatgacaggctctggagccccgggatgtcctccttaaggacgagcctcactgcaggggtctctgcccaggggaccccagcaggcacggaggggcctctgcccagctcaggctgaccctgagagctcactgcagaccccagcaggcatggaggggcctctactctgcccagcagaccccagcagacatggaggggcctctgcccagctcaggctgactctcagagagcggtgtgcgggttcgtgcccccatcgggcggcacagggagggcggttgggctcaccagcgcctgcatgtcgtacatggtgctcagatggtcccagatgaccttggatgggacctgccgcccgatgttctggctgaacttgtcccgaatacaaatcatgtggaagtgtcggttcacacctgaggggaggaggggcggcgggataaccggtgagcggtgaggagaaaggggatggaggggacgggctgccctggggactggaggggcaagggtggctgcggagagatggggagggccagggtgtggaggggctgtgggggggcagggctgggtggtgtgtgtgggagggggtgggctgtcccggggcgggggtgggggtggggcactgcgggctgggacctcgcggtctcacgggggtaggggtcgtgggcggggtccggggcggggtccgaagggcgcgtgggagggggcgggggtcccgggacgggtgtggcggcggtgtcacggcccgggctcggcggggagcgtgggggcgagggtgtcgcgagcgcaggccccgccccgccccgccggttgcccgccccgcccccacgcgcgtccgcagcctgggcgctcaccgacgggcttgtggcccagcatggcgtggaagaggcacacctccacctcggggctccacaccactgtctcctccgccgggctggtggccgcctcccccgggcccttgtcgcctgcggcgcccccgccgcccacctcggcctctcccatggccgcggcccggccgagcaaggagcccccggcgggagcaggcgcggccacgagctccgcgcaggcgcactcgggggcgggcgcgcgctccgccgggtacgcgctcgggctcacgcgccggcgtcggcgcaggcgcagccgaggtctcgggtcccttcccgccggggactccgccctgctccgccccgcgcgggggttcttaaaacgtgttcctctttaaagcacagtaagaaatacactgcacccaaacaaaaaagtctgtgcttcaaaggaaaccatcagaaaagtgaaaagacgacccacagatgagagaaaatatttgcaaatcctatatctgataatgaacttccttgtagaaggtataaataattcttataactcgataataaaaagacaatctaactataaaacggctaaggatttggatacacatttttccaaagaagatgtacagatgggccgggcgcggtggctcacgcctgtaatcccagcactttggggggccgaggcgggcggatcacctgaggtcaggagttcgagacaagcctggccaacatcgtataaccccgtctctactaaaaatacaaaaaaagtagccgggcgtagtggcgggcgcctgtaatcccagttactcgggaggctgaggcaggagaatcgcttgaacccgggaggcagtgagccgagatcgcgccattgcaatccagcctgggcaacaagagcgaaactccgactcgaaaaaaaaaaaaagatgtacagatatggctaatgagcaccatcggtcacgcgaaactagaatcagcccgcgtggggaccccctgccccgccgagaccgccacaaccacgcggccggggtgacgagtgctgcgagggtcagggctcgggaccctcgtgcggtcgtgctgtgcggtcagatgggccgctgctgcgaaagacagtctggccgttccttcaacgatggaaccgtctccctaggaagcagcagctccgtggcgggcgcccgcggcagtggaacaagacacaggttcaggctgggacccgcagccgcgaggcaagcgccgcccccaacccggggctgaacctgcgaggggcgcccggagcgcgggcacccgcacggcgcagccgcgttcagcctaaaagcagcgagcgcggactgcggcagcgtgggtgcgggctgagacgaaagtcagagaattcagacacgaaaatacacagcatgggaatccattcacaggaagagccagaactggcaactccataggaatagaaagtagatgcacggttgccggggacgggggagggggagggaaacgcgagtcactgcggatggggaccggcttcttttttgtttgtttttgaggcagagtctcgctctgttgcccgggctggggtgcaatggcacgatctcgcctcactgcaacctctgcctcttgggttcaagcgattctactgcctcagactcccgggtagctgggactacaggcgctcaccacggccggctaatttttgtatttttagtagagacgcggtttcactatgttggccaggctggtctcgaactcttgacctcaggtgatccttcctcctcggcctctcaaagtgctgggattacaggcttgagccaccgcgcccggccgggcccagcttcattttaaggaggtgaaatgctctggaattagatagtggccacggttgctcgcaacaaaaccccaccgaatcgtgcgctttaagcgggtgaacttaacggtctcaataaagatgttaaggaaaaaacaaaaccagaaaccccacaattactgcaggcatagggctcgctgcccgggtctgggtgcgggacggaggggctcacgcccgcccccagagtccagcgcctgctgggagaaagggcaagtagggggtccggccctgccggccttgaccgcctgcctccgactcccggccgccgcgcagcccaagctctggggaagcgttaaccgcgggtcgctgcggaggccccaccgcggggcggggccggggccggacggtgaagagggggcgagatcagggcggggcctaggctggggccgggcgggga

SEQ ID NO: 1561922 - DNA, 4001 bp, Homo sapiens
gagacagctccagcacaccactggttggttgtcttattcttgagctgggagaattctttatatattctacatcagcactgcccaatggaactttctgcaataatgaagatgtcctataattttgagtggtccaatctgatatccactagttatctgtggctactgagcacttgaaatgtggctagtacaaatgagagactgaattttaaattttacttaattttaatccatttaaattcaaatttaaatatccacataaggctagtggctatcataacagacacagaaagaactgactctctcccatgcgggataacatttgggacaataataacgttaataagagttatattgtgcatactttatatgttcataaaactgtagttaaaagcacagattctggagtcagctgcctaggttcaaatctgtttccttctctttaaaatgggattagcctgtaatctcagcactttgggaggctaaggccgaaggatcctttgagcccgagttccagaccagcctgggcaacaaagcgagacgcggtatctaccaaaaataattttaaagattagctgggcgtggtgtcgcaaggcagcagtcccagctactccggaggctgaggcgggagggaagattgcttgagcccaggatgtcgaggctgcagtaagctgtgatcgcaccactgcactccagcctgggcgacagagcaagatcccgtatcaataaaaaaggaaagaaaagaaataatgcttgtagagcgttcggcacagtgtcgggttatactgtaaacattcagtagttggcgctagttattagagcggtgttcctggatgagccacctccatgttgagcctgtaaaactggcctaatatgttctctatgagtcactgcattgctctgcaaatcagataaaacgtcactcgtaggtcagttattaacaaccccactgataatctttggaaaaaactgacataattttctttttcttttttttttggtgagacggagatttactcgttgcccaggctggagtgcaatggcgcgatcttggctcaccgcatcctccgcctcccaggtccaagcgattctcctgcctcaggctcccgagtagctgggattacaggcatgtgtgaccacgcccggctaattttgtatttttagtagagacggggtttcaccgtgttgcccaggctgatctcgaactcctcacctcaggtaatccgcccgcctcggcctcccaaagttctgggattacaggcgtgagccactgcgcccggccagaaactgccacaattttctaaagaggaaaaaaaaatcccttctaagctatcccctcccgacgagacccttcctgttcctttaaaatgggccgggcagcagaaagacgagtgagtgacagcagacaggccaatcagaagcggccccgtctcgggcccaccccgaggcctggcccaaccgcgtcccggtagctcccggaataggagcgttgcgagacggtcggttccaagtgggcctgggcgcgggggagaggcgggtctgtcctcgggaactgcaaggccctgtgagcgggaggactgggatcccggccgcggctgctggaagcgtcgaagctcagcggggccgcggacactgacctgtgcttagaactcatcctggcccgcagagcctgccgcgagtccctggcgtcccctgtggcgggctcttggagccactttcccgagcggaagtcagcccgcggctcggactccggcgggacctgctcggaggaatggcgccgccgggtgaggagttgcgcgtggctttggggagagggctgtcgcccgcgggaggttactagtcgccgctcgagagccggccaggcgggatccccttcccctgcgggacaggggcatgggcacaagctctggctggggcgctctcggatcgagggtccgaaggagggctgcgagctggtgggagtgcccgcgacctggcggggttggtgcctgggggaggggtgcagcgcggagctacgggtcgccccgaggctcagccgtggggaccgcggacgcgcttagcctaggtctggcctcattcatttcactcgcgcgggcttctgggccaggcggcctaaggttctggtcccggcgctgccccttactccgtgtgaggttttgggcagattgtccttctttgtgctgtagtttcccattcagtgaaaggggcaaagaaaaccctcacttctctctgggagcctggagcataagttctcaagtgacactctaggtgcaaacttgcagtcggccacgtattcattgtgtaacccaaagcaggttacttaacccctctacacctcagtttctcatctgtaaaataagttagtcaaattagtcacgttatctgcctcgttgagttgctttattaagtgaaataatcttcgtgcttagtttagaacagtgcatggccctaggtaagaactaagttaactgcattggaagttactgagtagacgctgtgcagggtggaatttcatgtagcctcatcgtaactttggaagcatgtactcttgttactaccatttgacagatgagaagttggaatcccacggaagggaacttacttgcccagggtgacacatgaatgagtcagtggctcaccgtttcattatttgagaagttcaggatagtaaagtggttaaaagcagactttggattcaaattgcctgaagtttgattttcagtgatgtgtcctagggcaggtaactacttctgagccttactttcctggtctgtgaaatgcagaaaatagccaccttgcttagatgttgtgaggatttaatgatttggtgtgtgcaaagcacagcatagcgtgggcatacctaacatattaagtgctcaacttttagtcagaaaagttactgctctcgttaacatggagtgagaagattaggattctgacacaggtgctgttttaggggaatttacggtctaggtgggaaaatgctagtcgcagccattcactagatcttcatatattgggtacccgcctgtgcacaaggcattggggattcagcattagtatcttgactccgctctctcttaggtctttctgtccattagcagtttctgataggctttgactttgaattctagccagactaactctcatcacttctcatcatgttcactgctgttgccctggtttgggccaccatcatcttctggcttggattatggcggtagtctcccaactggtgtcccctgctctgtccttgcacctgcatggtctgttctccacacagtattgtttattctcaacacagtaataccattagagtgtaagtcaaatcactcctctgcttagaactttccagtggtctccagccgggtgcggtagctcacgcctgtaatcccagcactttgggaggctgaggcgggcggatcacgaggtcaagagatcaagaccatcctggccaacatggtgaaaccccgtctctactaaaaagacaaaaattagctgggcatggtggcacgtgcctgtagtcctagctacttgggaggctgaggcaggagaatcgcttgaacccgggaggcggaggctgcagtgagccgagatcgcgccactgcactccagcctggcaacagagcgagactctgtctaaaaaaaaaaaaaagaactttccagtggcttccactacggtggtatacaaggccctctggatttgtcctctgctacctctgttacctcatctacttcttaccctttgcttattccactcaagctgtactgtccttgctgatctcaaaaaacactgtatgtgtacatactcctgattcagaatgtttgcatttggtttttcttttcttttttttttttttttttgagacagagccccaggctggagtgcagtggcacgatctcagctcactgcccactctgcttcccagatcaagtgattctcgtgcttcagcctccctagtagctgggattacaggccaagtcaccatgtgcggctcatgttt

SEQ ID NO: 1561923 - DNA, 4001 bp, Homo sapiens
ctgaccaagtggtgacagcagagggcaaaacgtgaaggctgtgctggataaggctgaaccttcctcataagcaacaccaactgctttattccaggtcagggccaactcttccgccatgatacatacatggtccctggcgggcactgtccttactgggcccctaggagtccctgcgttgtggcctgaccaccagcccctctctggtgatggcccagttgtagttcttccgggagtccaatgctgcttccacccgtgcctccaggttctctcgggtgatgaagtttttcacctcttcctatcgggagagaaaagcccagctgaacaggagccttgggcacatgccagccagcccacccagcctgctggcctctcaccccactgagaaagcagctcctgctctccctggggaagcatgcctggaacccaggtcctatttgagagcccctctggcctcccagtggagtgatatcaggttgcttttccacgttcctcttttctcagacacttcagccatagccccgagtgccagctatgaaaatctcacgtcctggtaggtgaaatccgtccctcagtggtcccctctgaatcactctaactcatccttccccccattactttatttatttatttatttatttattttgagacggagtctcactgtcgcccaggatggagtgcagtggcgccatctcggctcactgcaacctctgcctcctgggttcaagcgattctcatgcctcagcctcccgagtagctgcgattactggcgcacaccacgcccggctaatttttgtatttttaggagagacggggcttggccaggctggactcgaactcccgacctcaagtgatacgcccgcttcggcctcccatagtactgggattacaggcgtgaaccaccgctcccagccacccttctatactttaaatcaagcctcatccattctcactgcattactcctaagtggtctccctgcttttaagtcgcacacctgctaatcctagcctgaaatacttaacccttcatggcttcatcacctgttatgcaaaatacaacctctttgtggaacgcagggtccctcccacagacctgctaggtacctgaacactgtccaattactccgctcacctccgggtctttgcgcctgactggcactctcctctccaaatccggacctgccaactgtaagtctctgcacatagccagcgcccgcgtcgcggtgcccagaattcccagtgccccgcaagccgcgtccccggctggagtcccaccctccggagacgttgcccacctgcagctgcagcacttcccgctccttgcgctgcgcccaggcctgcacctcttcggccttgcgggcctgctccaacgcctgccgctgctcctgctcccgctcctcctgccgcagcctcgctatcctgtgagggtcaaagggccgaggctgagcggggcccgggcttctcccaggccggccaggccgcgccgccccgccccgcctcccgccccacgcaccgcagctcgtgcagccgccggttctccgcctggttccaggccatcagctcgcggtgctcggcggcgtccttcagggccttgcgctccgccagaaccccggctcgggcctcgtgcaccttcctctgcacctcggacacgaactccatcctgggtgcagacgcgccaggaatcagcaccctctccgcccactcccaccgtcaccagcgcgcgcgggcggccacctccccccggccgcacacctgagggcgcgcacggtctggcggtagtgctggtaacgctccatcagcacgaagaactccgcagggtccaccgcgggcggcatgttcactcgctcgatcttggatttggccagcgggtcgtggcgggtcttgcggccgcgcgctggcagcaccagaggggcccggggcctgcacggggtccccgcgcccaggcggctcagcgcgcgtagcatggccgagtctcctcactgcggccgcggtgccgggacgccaccgtgccccggaagcggcgcggggaaccttgggacctgtagtcctcgggctgtccctcacgccccgcccggccgtgtggcctctggaaccgaagcggcgaccctgcggacgtccgcatcccgcccccaggctctggcccggccttcccgccagggcccggggccatcccttagttactcccgcccgcggggccggacccgcgtccctccagcccccacgcagggaagggtctcagcggggaagacagggaggggacgaaggacagaactcgacgcaacagcttcggagaacctcacactttattggaggatggcggggcggggcggggctctcgggctgcggtctgcggagggagaggtggcggtcatgtctcaggacactggtctcgtaaccgccgagctgccatcttcctggttctctcccctctcgtcccccccagtccccatgtggcctcccacagcaggacgccccccgcctcccgtagaagcctgaggatccagctagtgtggggatctccagctcccttgggcatgccctcttgtccaccctaaacaagcctgacgcatagaaacctcagcacatacacacaaatcaggcggtaagacattgcctcataggaactaaccactttcttctttagttaccgggctctcctgatgcactgtaaatgtttgatttgcaaaacagtagcaaaccatttccccacgcctgtcttctgctatggtcttggggagctctgcagtccctgagatgttcctagtgcacatgtcagtcaccacctggtcctcttggccctgttgtctgtttgagtgaggttgcatccctcacctctttccactggcctggggtctgtccacctcaagacagtcattggcttgtcaggatgcctgtgggatcccatggccaccactgtcttatagaacaattatctccttctagtctactagtgactttggtctttaacccaagtgctttgtaaattgtctagaatcctcctgggaaataggaaggatagcagacagcaccctgctgtgtgcagtaggggcactgagaaatggctgggggtgctgtggcagggggcatctcagtggtgtttcattctccccaccctcccagcacccaaccctaagccacaatggcctctgatgaccagtggctggtcttgatgctggggacctctcaccctactcaccagcagtgtccgtgccaggtgtcgcttcctgtgaagggaccactgggccgtggtcctgccctcccagggcatgctgtcgtccaggggagccagggcatcacttgggaggccatgggcagtctggactgggctgcctgctgcagtgtccagggcccttccttagaagggaactgatgctgtcctccctaccccgacctcaggctccaggagggtgggggagcccccggccatcactttcttcctccccatgaggctgggagacacccacctgggggcctaagggcattctggggatcctgggctgagctgagggctcgctttcctccagggtaccagccatgggaccagtgctgagcctctgagggtccaaggtgggcagtcagcagcagcaggagcaggaggcctcgcctggagctggccatggctgctctaatggacagggtacagcattcaaggagacttacctcacccccacatccccctacttcctccagggccactttggaaaactggcatctcaggggcagctttggtatctccttatgcccttccctctctgccaccgctcctcatcccaagcatacaggggtccagatcctgggggatcctggcccagcaggggatgatgctccaggggacgagccttctccctgagcctggggcacagaggctacctgccttgccagctctgagggccctcccacttgtccaggtccatccatctttccttcaaggagtttccagaagtggaagaaagttggaggggaacagagacctgaattcaggccaatggatgggaggatagatg

SEQ ID NO: 1561924 - DNA, 4001 bp, Homo sapiens
tgatccactcgcctcagcctcccgagtacctgggattacatgcacccaccaccacacccagctcatttttgtatttttaatagagacggggtttcaccgtgttggccaggctggtcttgaactcccgacttcaggaaatccacctgcctcggccccccaaagtgctgggattacaggcgcgagccaccacacccaaccaatatatccacttttaaatgtattcctaacgataataccctgcgaggggtaatactgcatgccgagctatcttccatttgcttttccagaccagctttccaccctgccctgtgctgtgtgtcaggagcctgagcttgccccataggaaaacctactgggacctggccctctaccagagactggaggcaggagcaggaggccgggacatggacctccctgcccactcagactgaggctcacacctccagtccaagaagccctccccagtgactcttctccctgtcccgatcactgctgccttccctgatcctttggagtccaggagtagaaactccactgccaccagttccaggctaaaggaccaactgtcattaacctgcactctgcctttgcaaacggtccctttataaaccctcctcaaatcctcctgtgagcatgaaacctgattttttttttttgggtatgtttttgagacagagtctcgctctgttgcctaggctggagcagagtggtgcggtctcggctcactgcaacctccacctcccaggttcaagcgattctcctgcctcagcctccccagtagctgggattacaggcgcctgccaccacgcccggctacttttttgtatttttagtagagatggggtttcaccatgttggccaggctggtctttaactcctgacctcgtgatctgcccgccttggcctcccaaagttctgggattacaggcgtgagccaccgcgcccagcggaaacctgattcttgactttacattttttatgcccatctaaagcagtggaggctgagactcacagaggttcagtcacttgcccaaagtcacatagtatcctctggcctccctggcatgctgctgacacctgcattttacggcaggaatcttctcactgaggttcgcctacacagacttcccaagggactaaggccaggataatttcaaaggaatccattttctgcccaagtttcgctacgttctctctgctaaaacagaactgcctgaggacgaacctgcgtttaaaacaatttgaattctcctttcccgtcccccttttataatgggtcctcccctttacaaaagaaaggtatttctctagtgacactgcccaacaacccctctaattcccacctacaggtctgtgtgaacgccgttcctcggtatccacagctacgagaacgtaaatgggaatagaacgggtaacccgctctcactgggcagaagccagccacggacagtgaattatctggaaatgcgtctccctgaggcgcgtttacaatacaaaactttattgttgttttatcatccaaatgtgtatatatttatgttgttttgtgcaactgtatactgccaataatcactttaaaatgtttaatacttagagcgctggatcaaggcaaattcctaacaacttgactcggaactcacacacggcacccatcccgtgacagagcaccaccggggtggctgacaagacttctgaccccaaaacgcggttctgcggagagagtggggcaggaccggggagcaaggcgccgctccccaccgcccgagcgctcgctactccagggccgcagcgctcggtcccgccggggttcgcagcccggcagccctccaggcctctcagctcctaggccggggcctctcccgctcccagcgccccggtaccccgcggcccaagccgaggcccctccttgcgcccgggccgcgaccaccccccaggcccacgctccccgctccccgctcccgcactcaccggctcgggaaagcacgtcacttccggagcgtcgcaagcggccgaccacttccggggccttttggctccggaagcccaaggcttgcccagtgcgcaggtgcagaaaacacgccgacggaccgagaggcgaccttgtccctggtagcggaagcaggagcaacggcaggagggatgcggagcgctcagctgcagccgcgcttctcgccggcgccctcgctgcccgagcacaaggacagccgccccgcccgttccacccggtgcccaaggtcccccagcttctctgacccctccggcgtttgcggaacctcccgggtctgacgaggacaccgccgttgcccgaggaggctacggggcaacgcagagcaggcagtggggaccgcagggcagccccggggcgccgtccccaccgcccttaccctggcttcgccttgccgccgcggggaatccggtgcggacgcacgcgaactctgcccgggagccgaggtgacgatctacctggtctcggtaataagtatttgcaaaacacatcacaccaaaatcccgttaacttcatgaaaactcactttataggatgatttttgaagaaccagtttattaagagattacaccaaaagcataaacaatttatacgtcaaactccgactgaaaaaaaaataaccgataaggatgttttttaaatgtactgtactcacaaataacaagacaaatttgacctgttcaataaatagaaatgaagtggctaaaaatgtttaaatggaaatggaaaacagtcgtcttctttgtacagttttgaaggggtgccccctattcacgcctacacgtagaaaaaccctgacaaaatcagaggttcacttaacactccaaccatatgagcgtattaaggtttcttttcagatcttaggagatcttgtccaccttaatcccattcacagatcttaggagatcttgtccaccttaatcccatcataaagactgttggcatgagttctgatgtactgttttaatatgctgagtactgttgattcaacaacaaaccttaatgggtgatgagcttttgcataccaatatgaatttgtcagcacttctgaaaactggccatcatttttcaaattcacaatttgctggatgtcagggaacaataggaagaagaatgagcgtcaattttcatgtcttcctttgcttcttcactggccttccatagaagtagtcagaaaaaaacaaagcaccatcaaccacacttcacaaacaattcatgttggcctaagctttgctcaacattcatatgacagaagatagaataatgaaaaggaactgctggcatcactttccccataatattacataaaaatggacagcacattaaataaacattctgttattaatcattaaatatattaacaccaaaaatcatgtataaattaggaaataaatgtacaaactattttgcaaagtgctttttaaaatatatacacaacattcaagatattcttaatgtaagacatttcagattgaagttttggggtaagtgtccttttctttcagaaagtattattaatacagcacttaaaaaaacacacaaacacacaaaaaaggcatattcccagattggcaaggaataaaaataaactatcttcacagttatctaaaatgtttaacattttcagtgggaaattttagtccccgattgagtttgcaaattaggtctatgaaaattgacaggaaaagaacacaatcaagggagatgactccctaactgaaattgctaacgcgtttgtcaattagcaattaagaactctcatttcggtgatcgaatatgaacacatacgtttatttttgagcccttaccagtgttaagggttttagaaacccttagtgcctacaaaataaacacttctctccccatttgtgcgtgacatccgtctcctaggagaggggagaatgtcctagaacaggactggtattcaacacaggcaagtcctttaatctgtgcctcagttcttcatctctaaaatgggaactgttacctgcctcca

SEQ ID NO: 1561925 - DNA, 4001 bp, Homo sapiens
aatcatattatggctaggggccatgatgataggagcagtcagaggaattcttgtgatgagtatgtgtaagttaaatgagctgcttatcagtagaactgatagctggataatagctagggtgacttcatatgaaatcgtgtgggccacagctcatagtgcgctgattagtgcatattttgaattagatgctcatcctgatcatagaatagatagacggctaggcttgatgtggctagtttaaataggaggcctacattaaaattagaggatctggtatagggaggggggttcataagaggagagcgatagagagggctaggattggagcaataatataaagggtgatagtagatgttaagggccgcgagggttctttggtgaaaagttttattgcatcaaaaaatggttcaagcagtctgtaaggacctacaatgttgagtcctttgcatagttgtatatagcctaagatttttcattcgatgagtgtaaggaacgctatcgcgataagagtggggataatgagcaggaggaggttaattacaggcatgttgttaagaagaggagttgaacctctgattataaagtgttaagttttatgcaatcgctgggctctgccatcttaacaaaccctgttcttgggtaggatgtgtgatgatttaagagactgggatggcatcatctatggagtgagggcactttatgaagtgggccctatttctcttgtcctttcgtagtaggaggaatgttaagtaggtagaaaccgacctggattactctggtctgaactgagatcacataggactttaatcattgaacaaacaaactcttaatagcggctacaccattaggatgtcctgatccaacatcgaggtcgtaaactctattgtcgatatggactctagtataggattgcgctgttatccctagggtaacttactccgtttatcaaattattgggtcgatgtgtaataactcacttagacttgtgtggtcttaggttgttaggaggttgaattatgctccgaggtcaccccaaccaaaatttttaatgcagggataggaggctagggcctgtaggcttgttggagtttttatttgcattgatgaattaaagctccataaggttttctcgtcttatttgtttatatccgcctcttcacggatagatcaatttcactggttgaaagtaagagacagctgaaccttcgtgtggccattcattcaagtccctatttagagaacaagtgattatgctaccttcgcacggtcaggataccacagctgttgaatatatgtcactgggcagatagtgcctctaatactggtaatgctagaggtgatgtttttggtaaacaggcggggtaagatttgctgagttccttttatttttttgtaatgtttccttagagcatgcctgtgttgggttaacagtgcaaataatacggtgtttattatatcatttattaatattgggatgttaactgtcagtgggttactcccgtctgatgtaagcttatgcaatggagaatgtcttcatcttacttacattaacattactgcttctattaagtaatagattagtccaatgtgatgttaggagttcagtagactggttagaatttaagatagttagatattgagcttaaatgctttcttaattagtggctgcttttgggccaactgtggtggtaatgttttttactctctgtaggaagggtctaaagagctgtctgtctctctagactaacagttaaacttacagggagtttaagtaattctgtgggtaagttgaaagttgaactaagccagccagctatcaccaggctcggtaggcgtgtcaccgctactcatgaatcttcccactgttttgccacataggtgagtgtgctctttcagctattcttgggtagctcgtctggtttcgggggacttggccatagttctatgtaaagttatttctagttaatgcattatgcagaaggtataagggcttgtctttgctttttagtcctcaatacagttctttcatccttcccttacagtactgtgtctattgccagaaatatctaccagggtagaaatttctatcgcctatacttttgtttaaggtaaatggtttgattaagatagtttgataatatttttagcgaggtttggggctagagttgtctgagtggtcaggtcatgatgaaatcttctggatgtaagccggatgctttgggttaagctacactttggtttatccaagcgcactttccagtatgcttaccatgttacaatttatctcctctatacctgtgtagaaaattatcagtaatagtgatttctagagtagtattcgaggaaggtgatgggctgtgtgtgcgtgcttcatggccttattcaaccaagcactctgctcttggtttactgctaaatcctccttaagcccttagatttcataaggctgtcatgagattttctggacatagaaaatgttgcccatttcttgccacctcatgggctacaccttgacctaacgtttttatgtgtatacttgtgcttactctataacctttttagggtttgctgcagatgggcatataggccaggggcaagaggtggtgagacgtatcggggtttattgattatagaacaggctcctctagagggatataaagcaccaccaagtcctttgagttttaaattgttgcttgtagtactctggcgaatggttttgttaatgtaactgttagggtttagggctaagcatagaggggtatctaatcccagttcttgtcttagctactgtgtcttcagggtattaaagctactttcgtagtatgttttatttcaactggagttttttacaacttagatggagcttagcactctttacgccaagttctattagcttgggttaactgtatggccatggtggcgggcacgaaattaaccaaccctaaatattagtatagcttagttaaacttctgtttattactagatttaacactgctgtttcctgtgggggtgtggttgagcaaagtgttttgagctgcatttgtgcatgcttgatacctgctccttttgatccgggtgatctagaggacattttcactggggtaggggtgtttgcatgtgtaatcttacaaagaactaataaaaaggtcaggaccaaacctatctataaggttttgtggacccatctagacattttcagtgtcttgctttgagtggttaagctacattaactgtgtagaatacttaagtggaaaattaaagtatgagaaagaaagaaagaaagaaagaaagaaatagaaatagttgcttacagttctggaaattcagggtctttaaagttggattggcagaggtttggctgagagggttattcataattagagtatggttgatttagggttatggtgtactggggcagcactttcagagggttatgctcaaggtatcatatcagtattagggcagaagtttagttaatctattatacatagtggaggatttattgggtaggaggagccttaagattttttagaaaattacatcaatcgaggggtagctgttggggtgttcgtggttaaaatatgtctgggctctgactgggttgcattttagtttcttgtgtttggggtttggcaaaggtatgtttacctaggttgatggtaaagtcagattaggaggggggagtttgcggatttattcggaaatagttcttgaaattgagcatacgtgcatgcgtgagcatctattgattaattgttaagtccttcaaccatgaattaacaccttatggttgttatgtcagtccggaatattcagtataagttcagctacaatggatttggcaggagtcaggctgttgccatgctgagtcacagcatcccaaagttaaaaaataccaaatgcatgacagtgctcccgtgactggctaatagggtggtagtgattaatccatcaagatgtcttatttaaagggaacctatgggcaatcttaattttatgg

SEQ ID NO: 1561926 - DNA, 4001 bp, Homo sapiens
tggcggcgtgtgcccatagtcccaggtacttgggaggctgagacagaattccttgaacccgggaggcagaggctgcagtgagccgagattgtgccactgcactccagcctgggcaacacagagtggctctgtctcctaaataattaaataaattagccagttgtggcggcccgtgcccatagtcccagctactcagcctgcagtcccagcgggctgagttgggaagatcacttgaacctgggaggttggggctacagtgagctatgacagcaccacagcactccggcctggactgcagacggagaccctgcctcaaaaaaaaaaaaaaaaaaaaccagggcagggtctgataggcgcctgaacagaaaactcttcctggacattggcctgggaaagtggggcctgaggaacacagtccctgtgctcagatccctatcctcagcctgaaagggcaaaaatctagagggatggaaggcttcatctttagatgaggctatcgtctaaagagggaccgaagtttggccgggcaaggtggctcacgcctgtaatcccagcactttgggaggccgagtcgggcggaacacaaggtcaggagatcgagaccatcctggctaacatggtgaaaccctgtctctactaaacatacaaaaaattagcccgacgtggtgacacgtgcctgaagtcccagctactcgggaagctgaggcaggagaatcgcttgaacctgggaggcggaggttgcagtgagccaagatcgcgccactgcactccagcctgggcatcagagcgagactccttctcaaaaaaaaaaaaaaaaaaaaaaaagagggaacgaaggttatctgagctgcagcgatccaggcagggaagaggtcaggaccccactgtcctgtctcccaggcaggctgaaaagcttggagctcaggccccaggcgcacaggtgtaagacagggatctggagccacagacctggctccgggctcagctctgccacttaagtctctggggaaataagtaaaatggagaccgcagttcctgcctttgccccagggactctctctctcccccgcaccttcaaccccagctgcccaaaactcctcgtgggaacaggaagagaggtctcaaaccgaaccaagctggggcgcggaacccaggtgggagagacaaaagagcccccaactcagcacccttctcagtccaggggagagggcttgggggactctgtgctccccggaatgttaaggagcaaagcccacccaccaagttgacccaaaactaggctgcaacaagtgcctcccaggctcggtctcccactggctgggacttgaagactccctctcgctcccaggggtcgcctccctcgccggcgaaggccctgccagctgacaccggccggcccacccccatcccgcaattaggcgggagacaaaatgacatcatgcacggcttggcccgggtcccaagagacccgcccgtcccagctccgaggcccaacaggcctggggagccgcgagggacgcccaagagccccccagctttacgcgcgcccctgcctcagagggcccaggacgcagcatttccgcggaaacaccccacccccaacacacacacacaccccagcttggtgggagcctggggagggtcgggggtatctgggtgggggaggggtgagttaaagggagggggaggggcccaagccctcccggctcgtctcaccagcgcgtccgccgagacatccccccggcccggaccgcgccgcgctcgcccgcccgccggcagagcccggagcgggagccgggccggggtcaggacccgggctgctccggccgctccgggccccgggccgcgctcgaaggcgtcagcgtgtcagcaggtcccgcgctcctcgctcgcaggaactgcagtcgccgccggcgcgggttgaagcacttttctatctcccgccaagcgcgtcggcgccgcccagtcctggcgcgcgggcgccgggggaggggcctgagtgaggggcggagccagggggcggggcggggcggggcctgcggggcggcacctgcccagaccctccagggccggctgcaggacaggggcggcggccgctacttcggagttgtggagcgggccgggatgtgaccgaggcctggctcacgtgtcagtccggggcggcccaggagtatcccacatagcgaagaccgaggaaggggagcgaggcgcgagcatgggagagccagccagggaaagcgccagggcggaatcccccacgctagtccaagccactactgggtccctagagccgcaccctaaagcggctcctcaccctacctgtgcctctccctgcttcctctcctgcctccaagagaccctccttaatagactttattttttgttgttcatttttcttagaggcagggtcttgctctgtcgcccaggctggagtgcagtttcgcgatcatagctcactgcaacctccacctcctaggctcaagcgatcctcctacctcaactcacgggtagctaagaccaggcactcgccactacacccggctgattttttttttttttttttttgagacggtgtctcgctttgtcgccaggctggagtgcagtggcgcgatcttgactcactgcaacctccacctcccgggttcaagcgactcccccgcctcagcctcccaagtagctggaactacaggcgcacaccaccacgcccggcaatttttttttttttttttttttttttttagtattttagtagagacgaggtttcaccatgttggccaggatggtataggtctcctgacctcgtgatccgcccgcctcggcctcccaaagtgctggaattacaggagtgagccactgcgcttttttttttttttttaagagaagggggtgtcttgctatgttgctgttgcctagactggtctagaaactcctgggctcaagagatcctgccgctttgtcctcccaaagtgctgggattgcaggcgtgagctctttccagaatttaaaaccatcctcctctccctcagggtaaattccttactccacaatcacatttatctgatcttccagaccaccacccagccctggccaaaagaaacggcctctttgcctttgcctgagccattacccagggcaggaacacttcctgcccctcccacgtggctgattcctatttaatttggggtccactgcccacaatctgcctgtagacttctgcatttccccctttgaactgggagcatcctgaggtccaggtggcctctcaatgcacaccagtatctccagggcccagtagaagacctgacataagaagccccaggcaaaggtttgttgcattgaattgtttaccttgggtttaaactcccagagattagcccagatttagtggctcatgccagtaatcctagcagtttgggaggccgaggtgggagaactgattcagtccaaaagtttgagaccagcctggggatcagagtgagaccctgtctttacaaaaaattaagaaattacctggctgtggtggtgaatgcctgtaatcccagctacttgggaagcagaggcaggaggattgcttgagcccaggagttcgaggggctcaagcccttgtcatcccgccactgcactccagcctgggcgacagacagtgagactgtctttccttgagatttagcaaaggttttctatattagattgacatttaccaagtaccaaggatcaagtcacactggacttcctgggagcagtgctgagaggaagataaatgagctctgagacaggacgctgaagaaaccaaatcaaaccccagccttttagcccctgttcaggcctcagagcccccttccagaagctgctggccacctggggacagtccagccaccagctgctgcaaacttcacttaccacagaaggaagactaactcacatcttaagtgctagaagcttccacatcacttaattcagggtttctcccgcccactccccttataaagtaattaatgtgg

SEQ ID NO: 1561927 - DNA, 4001 bp, Homo sapiens
tcctgtagtcagataatgtacatggtttatttaaagagtcaaaaggggccgggcgcagtggctaacgcctgtaatcctagcactctgggaggctggggcgggtggatcacctgagctcaagagtttcagaccaatctggccaacatggtgaaaccctgtctctaccaaaaatacaaaaattagccgggtgtggtggtggacgcctgtaatcccagctacttgggaggctgaggcaggagaattgcttgaacctgggaagtggaggttgcagtgagctgagatcgtgccactgcactccagcctgggcaacaacaacgaaaactccgtctcaaaaaaaaaaaaaaaaaaaaagagtcaaaaggatcttggtccctgggttgggccactgatttacgatcactaggagttctcactcctaaatttctttgatctgttcgcttcgctccatctccacagctgctgcactggctacagcctcatgatctcacatcttaactctctctgctttctctggcccatctccccacttccaaaccatttgtcacgctgtaaccagtgcctaacacacaaaactaaccatgtccttcccctgcttaaagcccttagctcctgttgctcagtggaactggcgtctgaggctacctctccaagcctaagcgcctaagtcctgttgcaaccctcaggcccttcctcattatccacaccaaactcctcagtgtctgtaaaacaagccgagcaaccctcagaattatatgccttcgctgctcgtttgttttgtttttaggacagggtctcacgctgtcacccaggcaggagtgctgcagcgtgatctcagctcacagcagcctccgtctccggggctcaagaattctcacgccgcagcctcccgagtagctgggattacaggcacgggccaacacacccggctaattcttgtatttctagtagagacggggtttcgccatgttgcccagcctggtctccaactcctgagctcaagtaatccacctgcctcggcctctcaaagtgctgggattacaggtctgagccactgcacccagccagcctttgctgcttttgttcctgcaatttggaacactgtccccatcccagcctctcacctctacccctacctccttcactacctataccttcctatccatccttcaagaccccaaaaaccatccctgattccttcagaaaggcagtttattgcctatcttatcagactgaaagcagtggctgtgtcttatttatggttaattccctagaagctggactgatacattccatttaactaaaattcgtatcaggtgcttcggactgcagacaagcctatcacaacccagaaggaagaaacagggaaggcacctgggggctgccaagcaatgaggtggggggtaggaatcatgaatccgcatatttttaaaaactgccccagatcctgatgtaaacggtacaagagagtctgagaaacacagggctcccctcaaacagtcctgacttcagcattcctggaaaaatgaaaatcctttccttttgcctctaatgctttccctgctggtatcccaggttaaaaaaaaatagataaaatcagggggatttttctgggacttggctgggctgggaaacaagcctgggttctaatacaggctcagcccctgacgtactatgggcccctgcccctccttggggcctccattaccacggccacccccacccttatcaattgtgtgcccctgaggtagtgactgtcccgctctgagcattagtttccccatcttccactagtcgtcgtcagctctgacgctctatgagctatgcatacccgtagctccccgccgaccccgatggtcccctcccctccttcccaaggtccatccgccagggtgcagccgacgcactcctaatgctaaggccgccctctcatcgaccgccccttcctggcctcgactcagcgccaaaggtatgggtctctgccccgcctgctctttaagcctagccggggcggtcagcgcaagcgcactgggtcgcatcgaggccccgccccctgagcctgggtagcggcgcgagggccgggagaaccgttcgcggaggaaaggcgaactagtaggttggggcggccacggcggccggcatgggtcacgtttcctcgggaggaacgatgtgagggaggggtctggcaagagattggaattccggaggccgggagaccttgtggctgaaacccttcgtaggagcggggcaactagtgtctagtgagggggttgggctggcgcgcactgatcccagactttccggatcttctgcctttagatcgggccggtgtcggggcatgtaggccagtgagactggagccagttagagctacaacggggagcgattagggccaaactttgtccagggtggaagcgagcgggcccgtgaagtggggccagcctgggcagccgaccgtgtcgttgcctcggggcctttccaggcactggcctaagtcctggcgataaagtgcgaccgatttccttgtgggcgttttgaggctttcggtgatctgacccgtctgtcattcattcttcattcattcatgtgatgaatgaatacagtactaagcgcggctaattactaggtagagaagtgatcaagacaaacactgttcctacggtacagggaaaagtgatgggctgtagaatgtagaagcccggggcggagaacagggacagcttccggaacgaaatcgcgagcccagatcaggagtggtggcgagagttccaaagagaagacagcacgtgccaagtcctggaagggggacagaggccaacatatcctggtcactgaagacacctgactctgaatctgtttcacgcccagggaagagatgacagtggccggggctaggctacaaactctggaaatggagataaataaaggaattcaaagtactatatacttaggcagcaaaatccataggatttggggagagtgagatgtaggaaacaagtactcaaggcttgggtacctgggtggggttcatcagagaagaagcagatttgtgggagacaacaacaaattctattctggttgtatggagactcgcaggaaaaaattggatattctagtttgaaggtaggaaagtattgctgtgaagatgtagatttgaatgtcatcagcaaaacataaataaagccaagggagggttgaggctgtagaatgagaaaaacaaagggcccacttagcaccttcatctgatttcttttctttctttctttttttctttttttttttttttgacagagctttgctcttgttgcccaggctggagtgcaatggcacgatctcggctcactacaacctccacctcctgggttcaagctattctcctgcctcagcctcccaagtagctcggattacaggcatgcgccaccaggcccggctaattttgtatttttagtagagatggggtttctccatgttggtgaggctggtctcgaactcccgacctcgggtgatccgcctgcctcggcctcacaaagtgctgggattacacgagtgagccaccacacctggcccatggtgattatctttatgtcttatcctcctccatatccccagtacctagtcaagggagtggcattaaatgcaaatcagtgtttgccaactaaataaaagcccaacagcaaacagatgttggaatttcagagttgtggaacgatgggggctcatggagggtttcattactctaatgtcaaggtaatgggttcttgtcctggctctgccactaggcttctgtgtgacctctgacaagtctcctcctacctataaagagagtacagccaaaaaatggtctcatgtatagagcttcaaacactgctgataaatttcacactgatttttctcttttaatccacacagcaatcttacttgaaagggaagtcggctgggcggggtggctcacgcctgtaatcccagcactttgggaggccgagagtgggggatcacgagatcga

SEQ ID NO: 1561928 - DNA, 4001 bp, Homo sapiens
gactgcggcccctcttccctctgcccaaacccccgggcccagggcctccaggaagcctcctctgcctgttgttcaccccaagctgtgtggttgcaacttgagctgtttccaggccttcctcccatgactctgttgaagtcattctcggtccttggcctttgagatcatcaaccctggactgggatcccggccagccccagctggtccccagggccatcactgcctgtagtcatgagacagtggttgcccgtgtcccacggaccgacacacccagccctcagtgtttcttgcatggttcaggaaggtagacagaattccttctcacccatgacctagttgggagtgccattgtccccagatgccggccccctcctctcccgtgctttagaggggcctagtccttccctgagtccagtgttctcgggaactttgactcctggtgcccacagaaggctgcatgcagagaggcagtgcactgtgcccaacagaggctgtgatggccatcactgtccccaccacactctatgaagctctagggcaggcatggccaggccacccacagctgggtctgagcccagctgggcccctctgccttcatggccacccggtctgcactctctgctgtggtgtggctgggagcactgtacttaagggcttgcacaaggccgccatgtccaccccagcaattgtgggaagtggtgagcggaggcaggggtgcccccatggtgcagctaggaaaagaggccccagaaggggagtggagtgcccatgagagggggaggggccacctggaagacaggattcctgggctaggtttgggtcagtggagagcaaacttggctgctggtgccctcgaggcttgaacaaaacagggagccccagtcctcaggcgggcctgtggcagtggagtgggaaagggctctgtgtatccagaggcgccttctagaactggtggaggggcgaggggcaggcatgggtggggcctttagttctgaggccatcgcttcccccttcaggtgccctagacaccaggggtcagcactgatacttggcctggatgtgactggatgccatgtcccccatcctggtgtccagattcccaccataacagaaaaggctgggctgaagccagcacagggcagtgcccccatgacctccagcccctggagctgggcaggccagatgcctccttctcagtgcacctcatctgagtctcctccttagagcagctggagggctgggaagagcagggatcaggttctcccagccactagtcctcgtcctgccccctaggggtgagtccatcagggccctccgcagaccttccccacccacaggcgagatgacccagagaggggaaggcccgggtccctgcatacagcactggctgtgtcggaagggccccctggtctcggtccctttcccctggcccagggtgtagggatgggagatggggaggggacacagatgctgtgggggcgtggagtcccacagggctgtttctccatctgtgacacacatgcctttactgggccagggggaactgacgactgcaaccctctccccagcacccttgtacccgggctccccagccccccccggagctctgggcttggcatctccagctcctcagcaaaggggcagggcctggacgatggccttcccttgccgcaggaccactgcttctcagaggccagaacagccttcctgctgcccggcccctggccagagtccctgtcggcccccagcaaactcgctgccccagctcacccctcagtccgtgcccaacagaccctaccacgtcccagtccgtggggcccgcctttgccccccgtgacagccgggtcgggcccgggccacctctcatctccagccctgggccgttaggcctgtcctcaagacccccggggccccggatcccacctggtgcggagaaggcgcttgggctcgctgggtgcgtggaactgggccggccgtcgggtctggactccaggcgggggcggggcgtggcggccgggccttacaaggcagaagaatgtgcgcggggcggggccgcgggcggggtgcgggggccctcggctgccgtccggccttatttggcctcgacccacgggctggcaggcgggggcgctctggggtgagccccccttccttgctgtgccagcccgggctgcacagagggccttgtagggaggggaggtgatggggtgagcaggcaatgggagagggggtgtgggggttcgctctgggccaccccttcccctccagagaggcaaacggaatgtccagggccgcttccccagaggcctcccacttgtatgggccgtgggagtgcagcttcccctgacgggcaacggctctcgacgtggggagggcagaggcggtgggtgggggggctcccagggacccctacgcccggtgactcgctctgtccacatcagcggtcgcccgccagagcggggttgaaggaaccactcgggaagcactggtttcgtggagggaaacacgatgaacaagtagctccgcggcctggggcctcaaaggagaaggggacctggggggagcgtgggctgttccgcagggtgctctgggcagtgacattgggcagacaggaggtgcaggggtgcgccccgccgtgagggctcccgggcttggggtcgccggcagcaggaggtcaggaggatgggggcgggagccggaggggctgagaagcagcagggacccctctgtggctccctgtaggccatgtggggtgtcggagggttccgagcagggggtgacgacctggcttgggttttgacggaatccttctgggtgatgtgttgaaaatagcgcagagggggccgagtccacgagcaggggacctgtgaggagcgacccagcaaggatcaggctgatccggactagcggggaggccgagggacaagtgctaaaactatttccgaggtgcagccggtaggatctgctggggcatgggaatgggtgtgaaagaaaagagttagggtggactctcagagttttgatgtgagcaacgagaaagagctgccattttctatgatgggtttgctgtgtggagcagtttggggataagaaactctattttggacagattaatttttaaaaactttattttgaaatgatttcagacttaggataaagttagaagaactgtgcaaagaaccctgtatagcttcatctagattctccatttgttaccattgggttttattatattttcttcttgctttccatatacatatacatatatataatacatgtacatacatttatatttatttattcctacccccaaccatttgagagtttcttgcatacgtatgtcctgttatctctacatgtttcagtgagtacctcctaaaaaggagattctcttaaatatgcatagtacaatgataaaagtcaggacaattttcacattgatttaattacctaatttacagtccatattcaggttgtgccagttatcccaataatgtcctttagaggaattttttctggtctaggagccaaagtaagatcatttgtcatcacatttcttcagtgtcccagttttacattttattttttgattgtggtaaaatatacataacataaaattaccattttcagcgtgtttttttttttttttttttttttgagatggagtctccctctgtcgcccaggctggagtgcagtggcgccatctcagctgactgcaagctccgcctcccaggttcatgccattttcagcatttttaagtgtatagtttggtggcattaagtatattcactttgttttgcaaccatcaccaccatccatctccagagcactttcatcttcctcagccgaaactccctgccagttaaacactaactccaccttgcccccttctccccgcccctggcagtcatcattcatctttctgttttctgtgagtttatctacttattggggcctcatgtaagtggaatcatatagcattcgaccttttgtcactgg

SEQ ID NO: 1561929 - DNA, 4001 bp, Homo sapiens
tcaatgcaatctgcagagctaatccaaccccaccccaaatgcatggtgtaatacagccaaattcacctggtacaaaattaagggatgttcatggctgtggtcattatcttgactaccaacacactaatacatcattaataactattaataggattgttgatatggttaatcatcatgtggatacaactagggagttatgtagctcttgattcataaaatctgttgtgatataattgatacataattatcaaagtgatatggtaaatgttcttattgtggcttacaatatatcattaatgacctcattagcattcaggtaagtataactgatggcatcacacatgtgctatattatggttatgaaaatattatcaatgatcctccaatctggttattagtcatcttttcatatcttaccaataattatattaagaagaacaggaaaatactggatgtcctaggaaatacacagccttttgcctgacacctttagcctttctgcctgccatctcaaccctgcccttggctagacccaagcccatggagtaaggggaacttcggaccccagaagcctagagaagatatgttcaacctaggcagtctttgagggtctctcttactccagtcttgtatgaattgtggcagggttctggtttctgcaggggacaaggcggtagaggcaattcacaggacagaggaaactgaatgtcagaactacactccccagcactgaatgtgatgataaccatgcctaagacaagggaattaagcaggacccctagggacagaaccacaggacccctccccactcccaggaggggatattcacctggagatgatggcaggacagctggggctatgcagaaaggcaggtgagcccctcctggctgctgcttggccctctgctgccttcttgcccaccctgggctttccaggatcctggctgcctgaggctccctgctcagccttgggcttcttgacgctggtctcaggtgtcgcagtctgctggggcagggctgccgggggcccagcactgccctccgcgggccccccgcccctgtcaccctctcctttggggccttggctgctagttgagggttgggccagggtaccatcccctttctctgaggcaggggctttggcatctttcttcagggtgggtggatccggagctttctttgggtctggggggccagggtctttccctgcagccaggggtctttcacctgtgggacctttaggtgccttgtctgcagaggaggtgagacacccatcaggatccaccctcctttccttccctctcacccaggctgggcagagaccagctctgggcccaggttcccacccaggcaacaacttgcaaatgcttgtcccactgagtctctggggccacttgatggcccctagagatgagctgccacgaccttggagggcctctgtgggaggcttccagccctttgggtgggccttggtggcccccatcatccttgccctgactgtttaggtgcatccccagcagccatccctggtggcttcacattttcctggtctctccaggaagggcttcatacaggccctggacccagcccaaccctagccagagattcctctgatttctgggtcccccgtgcaccatgcaaacaaggctggggcacagaactcccactgaggaacctgcccagtcctggattcaaaaccccccttcccaagctcctccctccatctcctgccccagcttggcacctgttgatgggttctgaattcccagctcaactgctccattttctgtcgccatgaggtagggaggcgtgtgctgctgcttgtctaactcaagtctttctagctgcagaaacaagagtggagtgtgtcaggctgtccaatttcccctctcgtctggctgcagtgagacaggaagccgaggcctgctaactgaggggagagaggtacctggagcaaagaggggcaacctggttgccgtctgtctcccagcggctgctcaggagcagtcctgggcagttgtaagggattgggccgggtgggcagaggcggaggcaggggtgtgggcagtggaggcggggacggaggagaggatctcttacaccaggggccatgcagctgggactgccgccacctgtcactcttggccccagttcagaggacacggcattcttcccatggcccgactggggggagaatgatgttggaacaagcgagaaaagggaggggtatctgggacgctgggggagcagccctttccccaggccttgctcagtatccctgacttggacaggatcagagggggcctggaagaaggggagtactcaggcaggcctgaagggcaagagtatgcccaggctgagccctggtctgcccacctgtgtgccacatctcctggggctccccagaacctggctagagccacaaagtcccagggataatctccctgaccctagtgcctagctctgtgcctcgacatctggacctgcttgcgtcacctttgggtaagaaattgtctcgggggcactttctcaacatgtccataggcctggaagctttttcttttgaaactgtccttttcttgggctcctggggacacggaggctgccctgagtagccatgggagatggagagtgctctgtgcccctcccccaagctcatccagttctcacccatgacccacatggaagaagggggctggcagagagtcttttcaaggatgctccactacaggggtggcccgaggggcactctagcctgaggtgttcgagataggatgaggacagctatgatccaaggagccttccatcacccagagcctttctcagagggggctcttgagaactggccagacctgggtgcattagaagtagctgtagaggccagaagcagtggttcacacctgtaatcccaacactttgggaagctgaggcaggaggatcactcgaggccaggagttggagactggcctgggcaacataacaagaccccgtctttatattttaaaaagtaagataaaatgaagtagctgtagagtggttatccaggttcaggtcctgactgcagcaaaccagtcacttcactccatggcctcggctcctctgtcaaatgggaagccattggaaaaacgcttgatgagagaaaggagggagaatgcagcccctctaagcagtggggaaataggaacctgtaaaaaaagattgaggaagctgttaatgaactgacaaaaagtgaccaccaaagtggggggaataaaaaaagcaagatgcaaagtagcatgtagagtgtgctatccatttgtgcaaaaaaaaaagggagaataatatatgaataatatatatttcactttatgcacataagaatttatttggtaggataagcaaggaactgggccccaagggtgggaaggagacatcactgtatatactttgacttttctgtttgaaccatgaactatgtgaacaggctactattcaaaatgagtgggatgttttgttttgtgagcaaatgtcaagggtttttggtataagctggtaaaaaccatagttggagctctttccccagtcttgactacttttgctctgcctggccctcctctccaggcccggtcctcctctcctccatttctcttctttaaggtccagttaacagtctgcctcttccaggaagcaaaagtaacagctgatgcctatacggtactgaccacgtgcctggcctcgctctgcatgctctcatgttgatccacccaaatggtcttcagaagaacccagtgcggtaggtactagagagatggggaaaccaaggcatggagaggttatgtaatttactcaaagtcacagcttggaaggggctgaactgagctctgaacccaggtcccctgcagaaagggagcttccacttgctgagcacctgtcattcgttttagccatcttgcctttaagcatcatcttgatgataactctgtggggagcgctcatctcattttctgcatgaggacgaggaga

SEQ ID NO: 1561930 - DNA, 4001 bp, Homo sapiens
gaaaggcctctttgtccaactctctgtggctcctgctcaagctcctggatcagcaagtacccctgggaagttcggcaaacgtccaggtgcccagggggtcggggggaccctgtaggagtctcagtctctacgggacagaagaatccataagactgcctccttctctttgaaaacaaactgccctctaagccctgacccagcctcctctgcacaaggaacagctaccgagggagacagggcagggtcctgcctctactgatagcagcaccctggctggtaccacaggactccaatccctgctctcttactcttttgtttaccgttaattaacagggccatatggaaggaggcgataatcacagccaaggaccaatgggaggggagcccggggtggcagggaggctgggggccgaggggagcctccctcagtcagccctgtagaggatacagcacccccactccccaggccagagtgaggccaggacaggctctgctggcacctcagaggagacagaggcagagcatacccctcagcaccgagtgggcccccccaggtctgccccacatccctcccaccttttgtgcactcagccactggcgttagaggtgtcctcagttttctgtgatttaaaagaaaaaaaaaaactgcaagggcaaaattctccaccgacctctcccaaaaggataattataatcatcgctgccattatcatcatcgtgacagagtccatgcccaggaccaaacccacctgcagccacggaaccccccgcaccaccgcaaatgtttggtttccaaaattaaacacccaactttaccagccaatggtgtccactgattcaaaggtgatgctgagacaagcaaagcccttggtgactcaggaggagcagtgagaacccaccactccaacacaaagccaccagcacttgtttattttcctggtttatagagaagaaagtgaattcaatagacagaaccaaagtccacggccccagaactacagacaatggcattagggtgttcaacttcttagctaaccctgatttttagttttaaatacaaaaatccagttacactaccaccataaacaaccacactccacagctgcacggacacgtagcgaaaaaaggggctgagaggagcggccgatatttacttctgcacatctatcccacagacgcatgcaccctagatattgatccttaagttgagaaatgcatgacatgcagacaaaacgttcacgtgagcacctctcctcagtaccttgggtgggggtcacacatgacacaccccagactctgagaccctgcttcagagaggtcttctgcttaagcggccagtgctctccccaggtacggggctgctgggtcccacggccacagacatatccgttgttcctcttccagaaatgcgcataaagtttctggttttgatatgcgctccccttcccctaatgtctcctctgtcagacgcacaacatgtcccctggaatctcagaggagcatgaacaacagagagacaggagaaaaacagcacacggcaggccagggaggagaagaaagcccccgtcctccagagcagtttcaaaaagccatcctcagacctgcttttcctgcaaacagagccttcatcttagaaattaactctgcccgcgcgccctctccctgtctctgtccaagaggaaaagccaagcgttgggtatctgcctttgtcagaaagaacgtaacgttgacttacctttccccacagctattgtctgtcctctttcaaaatgacatcacggaaagcaatcatgaaatttacatggggggtgcagggtggactgggggaggagagggaaggcagctgcctcccgtacagcggtcacatgtggggaagcctgcgtgcgggtttcaattaaatatcttctccccttagtgtgcgaactcctaagccagctaaaggcgacgtctcatttacttaatgactgctctcattagcagcggtggcacgggctggcggaggaggctcctttgtaaatacgctacccatgaacccttggggctccaatatatctgtttactctctgaggtgaaataaatttacagtatagcatcagaaagatggatctgctgaattgggggtgagaggtgtcccagtccggtggagtcctgtgtcctgctctgagcctcggccaacagaaggtgcctatgtttgtccacactgattcatactcaatgtgcagcatgattgagtttttttaaaaagcaaaacacacaaaagggcagagagcatcacaaccaccacattcacccccctctgctttctctgccagtggttcagtccaataattcctaatagcagcaaccggaatgacagatgccccgggttagcatggctacagcgaaagtactttacaatatttattggtggtgaggaatatgatctaccatcataaagagcgggctgcagaatttattactcaaatgaaccaggaatattacatatcggctcatctgcatattcaagtacccctgacttaaatggatatgtattttttaacggcataaaaggtaactatagccacagaccaaaaaatagagtcatgcacacaaagaatagatcaggaaaagacatttttctgttctcacactttcccttttcactttaatttttacaataataaaaaccttcccaaagagaactcagggattcctgggcatgggaacccccccacaaaaagactaagtttattgcaaccagagcgaagcacactgcccaagttttctgctcttttcctgattcttttataaacggcctgaaaggagctatccagtgaaaatcaagaagagaaaaatccataacacacacaatagaagtgctcacccactctctatgcagcctgactgtctgccttctcatctgccagtttgtgatattttcccccacattcagggataaagtgggaatttcttcagtaagagaactcaagagccagagtattcttgtttgcggcccaaatctccttcttgtactgataaatcaggcaaacgattgtccattatcataatcaggatgttagaaatgaaactgtgaaacacaagggtgaaaactcaatgtgagacgcctgcaaagatgccgccgtccaagggcagctggagaagcagaaaactcacatctcagaagttcagtgcagagatttcaacagacagtaaacatcatttcttggtaaattatgcaagagcacaataccccaacttaattagcgctaaagggctcgggccaccaaaagtgtgactgaggcagaactgaacacagctttctctaagagagcatgttttgaaaatcttagtggcttatttttaacatacagtttgtgctttacacgttacatacaaaccaaaagcttcaccccaaaggcaagtatcttagattcttatacgcacacattatcctcaacaaataaaacacaaaatgcacacagagcaattgttcagattgagcacaaggacataaatgcaagcctgcactggtcaaactgaggatgaaatattaattagtcaaatgagaacagttcgaggtttccacaatgactgcctaccatttttaatttctgtcataaacttatatccattagtataaaaggacacattcagctgagagcactcctgaaaagccgtttctgtctcctctggacatgctgtgagtgctaggatgtcttacaccccaaaccttcggcattcagaaattctattaaactcttatcggcaggctgcaggctccgggcaggcttgcgggccattgttccatgatgaatacagaatcaaagggagggccgttgctgaatcagccttatttcccaacgacacccaaggtttcatgaaagcgacttaattcagatatgcaacagtcacacctaagaaaccacagcgaagcggaggtggcagcaggagagatgaacctgcgcaacacgggcttcgtggggcacaacagttttttcaggtaatagaaattgtatttgtga

SEQ ID NO: 1561931 - DNA, 4001 bp, Homo sapiens
tacctgctgtcatcacatgacagcccacagagctcagtggttaagaatttgaatccatcacctggattctacagtgaacactttgctacactggcttcatcatttctctctgcccacctatcaatcctagatccacttttaaaaacaacagggcagtaagtgaaaacgaaaaaccaagtggttccgattcaagggtcaggaggatagaaaggactatgggatgagatggctgggaacactttaaagagagggtgagcctctccagaggctccaggtgggttaagacccactccagagcagtggatcgcaaacggaatgtgcgtttctaacatggtcccctgaccacaggcaccaagtctttcagaaccactgctccagagccaatatccttggatgaagttcctcgctttactcattctcacctgggccaattcacttgtgcttgccatgccttggtttactcatacacaaaatgggggtgacagcacctcaaagaatcgtgaggattaactggattattacgtgggcactcagaacaatgcagggaacagtgagttcaacacaagtcaccgtagctaccagactggcccaacagaaaattctttccacaggatcaagtctaaacccctcctgtttcacccatttcttcctgactgctcagtggcagaaaccagccactagattcgcactgatcccagttgtctgaccgcacttcaagtttccccattttcatgccccgctccttctccggaacttccgtcttcctcacttaccaatgtgttatccatcttcaaggctcaccccctctttgaaatgttcccagccatcttatcccatagttctttccatcttcctgacacttgaatcggaaccactttgtccttagttttcacataccgccctgttgtttttttaaagtggatccaggactgatagatgggaaggaaggagagataccagcgtagcaaaatgttaactgcagaatccaggaaaagtgtctataaaagcacatggtgaaattcctccaacttttctaaatgtgtgggaatcttcataataaaatgttttcttaaaaaaaaaaaattggtacctgcaaatcagaggtctggccttaactcgaatccaaagaaactgcatccagggctctgggcacagcgagcctcccctaagatctgccgtgactcctcacagaggaaaggtgtgtacaccggggtgcgcagctacagtaactaaacttgcaaacactaaccatgactgagacagcatctgctgcaggggacgcagtgatcagtgtcatttcatttggatacaatttaaccacggccaccaggtgggcttcacgatgtacacatcccaacagctgctgaccagcttccgatcctcgcaagccccctctgcggcctggccgtcggcggtgccctctgcccagaagaggcgcggcccggccacgaaccagcaagcagtagggcagggcgagaagcccaggtcgtgggctccaggccgcgtctccagctcgccccatcaccccagcgcctcctgacagcgaccacgagcggaggcccgagcgctgccccagaacctgccagctcgcagggtccagagacaaagtttgagcacctcggccaaggtcgccaaggccggcgtgcgtcgactccaggcccacctctccctggaccctgtggccccagggaggcgcccacgttggccggcggggggtggttctcgcgggtccccgtccgggcttggggtccggccgggaaggcgcggctggggccggagctggcggggccgggaagcgaggcccggccaagagcggctggccctaggcgcgtgtcactcacatgttgttgaagcggaacaggtcgtcgcaggtaaaggcccgtagcgtggtcatcgcgccgccgccgcttccgaagaccgttcgccaagaccccgcgcccgccctgccggaagtctcccggagcgtggccgccgcggaaccgagcgagacggggtactgcttccgggctacgagttgctgggcaacgacagcagcaaagcagcttcctctggcggccggcggcgggaattgccaggtcgctcctgtaaggcctccggggctgtggctgcccagaacctcggaacccctcccaggcagcggctgcagaaagcaggcggcgacacctgggaaggaaagaagctgctggtgatgcggaaacccaagcagaagagcggagttcgcagccacccggtgctgcagagtaaatgaggaatgggagaatttatgacccagaatcccttgtcccagtgttgcgagttgcagatgtcatcttaaaatgtcaataccacgtttaaaaacaaaaagaaggccgggcgcggtggctcacgcctgtaatcccaacactgggaggccaaggcgggcagatcacttgagttcagcagttcgagaccaacctggccaacatggcgaaaccccctctctactaaaaaaaaaaaaaaaaggaaagaaataaaaattagctgggcgtggtggcacgcgcctctaatcccagctacttggaggctgaggcaggagaatcgcttgaacccaggaggcggaggttgcagtgagccgagatctcgccactgcactccagcctgggcgacagagctagacttggtctcaaaaataaataataaataaataaaagcaaaacgaaatgtaaaattgattttgatagtacgctttattttacccatttatttttcctatttgggaaaaatatttttccctgaccccactttattatacccgaaatatcatttcaacatgtaaccaatcaatactcaacatgtaatcaatcaataaaaaaaggaatgtgatatgttacattcttttttgcaaagactttgaaatccggtgtgtattttacatttgcagtgcatttcaatctgagagagcagctgtcatcggaaatgcttgttctctatttagatttcatcaatgtatggttaaaaagcagattctcatatccaagcggttccaaatatactgttttcaaatcgctgaaccaaacatcagtttttaaatttaaagtagttaaaattaaaagttaaaaattcctttattcagaccagacacagtggctcacacctgtaatcccagctacttgggaggctgaggtgggaggatcatttgagcccgggaggtagaggttgctctgagacatgattgcaccactgcactccagcctgggtgacacaccaagaccctgtctcaaaaagataagataaagagagataaaatacataaagcaagcaggaatgctgaaatgtatttacacatgagtgttaaactggtcaatatccacagagctgtaatcactgtctctcctgggcactgtataacactatgcatttgtattttatggacaagaaaaattttcattactatcaattttcctcagcttacaaatttgtaaaattttgtattgtcaaagacaataaaaagcagagaaaacctggaaacgtgtactaaacagtaatctttttctggccatttcaaagtgtttcataattttttgtgtgtgacatgaactaatgttgatttgaattttgttccttatgaagtagtgaaggtttttataatatttttggctctgattcattggtattataaacattagaagtttatagctactttatgtttgtatctaggtaatggtggaataaacatgattttgatttttagaaaaaaacactgtgggtttaacacaaaggtagcattggaaccctgcagaaactggatgctgtaggccagcagtttgcaagcaccgatacgaattattattccgattttgaggcacagatcagaaatatcctatagctacgtggccattccaacacatggggtcaggggaacgtgcagggcagtacagagaatatcctggatattcaccagctggttctcccttctctcctgtttgtctacttatttttaaactgttatcagtttccattgctgattgcctcctatgaattag

SEQ ID NO: 1561932 - DNA, 4001 bp, Homo sapiens
cgggtaacaaaacaagaccctgtctccacaaaaaaatttaaaaattagtggggtgtggcagcacgtgcctgtagtcccaactactcgggaggctgaggcaggaggattgcctgggcctgggagcttgagactaaagcgacctaggattgtgccactgcactcctgtctgggcaacagagcgagaccctgtctcaaaaaataaaagaaaatggggaataagtggagttcccctactggcaccttctgaagaggccacatgattctctgaaatctaatattttcttgcaagtgttcctgtgtattttctttctattcatttccatgtaaaactgttgtcctttcctagatcttcagttaaaactgattctccatgaggctctgccttttcttgaagcttcaaggcaccctgtcacctcccatgctgcacctcccaaactgaagcctctgtcaagtcatcgtctctgggccactgccaaggcctcctgaatggcttacctgcccagtttacctgctgtcatcacatgacagcccacagagctcagtggttaagaatttgaatccatcacctggattctacagtgaacactttgctacactggcttcatcatttctctctgcccacctatcaatcctagatccacttttaaaaacaacagggcagtaagtgaaaacgaaaaaccaagtggttccgattcaagggtcaggaggatagaaaggactatgggatgagatggctgggaacactttaaagagagggtgagcctctccagaggctccaggtgggttaagacccactccagagcagtggatcgcaaacggaatgtgcgtttctaacatggtcccctgaccacaggcaccaagtctttcagaaccactgctccagagccaatatccttggatgaagttcctcgctttactcattctcacctgggccaattcacttgtgcttgccatgccttggtttactcatacacaaaatgggggtgacagcacctcaaagaatcgtgaggattaactggattattacgtgggcactcagaacaatgcagggaacagtgagttcaacacaagtcaccgtagctaccagactggcccaacagaaaattctttccacaggatcaagtctaaacccctcctgtttcacccatttcttcctgactgctcagtggcagaaaccagccactagattcgcactgatcccagttgtctgaccgcacttcaagtttccccattttcatgccccgctccttctccggaacttccgtcttcctcacttaccaatgtgttatccatcttcaaggctcaccccctctttgaaatgttcccagccatcttatcccatagttctttccatcttcctgacacttgaatcggaaccactttgtccttagttttcacataccgccctgttgtttttttaaagtggatccaggactgatagatgggaaggaaggagagataccagcgtagcaaaatgttaactgcagaatccaggaaaagtgtctataaaagcacatggtgaaattcctccaacttttctaaatgtgtgggaatcttcataataaaatgttttcttaaaaaaaaaaaattggtacctgcaaatcagaggtctggccttaactcgaatccaaagaaactgcatccagggctctgggcacagcgagcctcccctaagatctgccgtgactcctcacagaggaaaggtgtgtacaccggggtgcgcagctacagtaactaaacttgcaaacactaaccatgactgagacagcatctgctgcaggggacgcagtgatcagtgtcatttcatttggatacaatttaaccacggccaccaggtgggcttcacgatgtacacatcccaacagctgctgaccagcttccgatcctcgcaagccccctctgcggcctggccgtcggcggtgccctctgcccagaagaggcgcggcccggccacgaaccagcaagcagtagggcagggcgagaagcccaggtcgtgggctccaggccgcgtctccagctcgccccatcaccccagcgcctcctgacagcgaccacgagcggaggcccgagcgctgccccagaacctgccagctcgcagggtccagagacaaagtttgagcacctcggccaaggtcgccaaggccggcgtgcgtcgactccaggcccacctctccctggaccctgtggccccagggaggcgcccacgttggccggcggggggtggttctcgcgggtccccgtccgggcttggggtccggccgggaaggcgcggctggggccggagctggcggggccgggaagcgaggcccggccaagagcggctggccctaggcgcgtgtcactcacatgttgttgaagcggaacaggtcgtcgcaggtaaaggcccgtagcgtggtcatcgcgccgccgccgcttccgaagaccgttcgccaagaccccgcgcccgccctgccggaagtctcccggagcgtggccgccgcggaaccgagcgagacggggtactgcttccgggctacgagttgctgggcaacgacagcagcaaagcagcttcctctggcggccggcggcgggaattgccaggtcgctcctgtaaggcctccggggctgtggctgcccagaacctcggaacccctcccaggcagcggctgcagaaagcaggcggcgacacctgggaaggaaagaagctgctggtgatgcggaaacccaagcagaagagcggagttcgcagccacccggtgctgcagagtaaatgaggaatgggagaatttatgacccagaatcccttgtcccagtgttgcgagttgcagatgtcatcttaaaatgtcaataccacgtttaaaaacaaaaagaaggccgggcgcggtggctcacgcctgtaatcccaacactgggaggccaaggcgggcagatcacttgagttcagcagttcgagaccaacctggccaacatggcgaaaccccctctctactaaaaaaaaaaaaaaaaggaaagaaataaaaattagctgggcgtggtggcacgcgcctctaatcccagctacttggaggctgaggcaggagaatcgcttgaacccaggaggcggaggttgcagtgagccgagatctcgccactgcactccagcctgggcgacagagctagacttggtctcaaaaataaataataaataaataaaagcaaaacgaaatgtaaaattgattttgatagtacgctttattttacccatttatttttcctatttgggaaaaatatttttccctgaccccactttattatacccgaaatatcatttcaacatgtaaccaatcaatactcaacatgtaatcaatcaataaaaaaaggaatgtgatatgttacattcttttttgcaaagactttgaaatccggtgtgtattttacatttgcagtgcatttcaatctgagagagcagctgtcatcggaaatgcttgttctctatttagatttcatcaatgtatggttaaaaagcagattctcatatccaagcggttccaaatatactgttttcaaatcgctgaaccaaacatcagtttttaaatttaaagtagttaaaattaaaagttaaaaattcctttattcagaccagacacagtggctcacacctgtaatcccagctacttgggaggctgaggtgggaggatcatttgagcccgggaggtagaggttgctctgagacatgattgcaccactgcactccagcctgggtgacacaccaagaccctgtctcaaaaagataagataaagagagataaaatacataaagcaagcaggaatgctgaaatgtatttacacatgagtgttaaactggtcaatatccacagagctgtaatcactgtctctcctgggcactgtataacactatgcatttgtattttatggacaagaaaaattttcattactatcaattttcctcagcttacaaatttgtaaaattttgtattgtcaaagacaataaaaagcagagaaaacctggaaacgtgtactaa

SEQ ID NO: 1561933 - DNA, 4001 bp, Homo sapiens
actatttagtagtaggcacctgagttgcaaaattaattgaaatatcctttgacagatgcattaagaaatatctgaacaaaatacagcactactataagtgagggtgtaaagaccagggaggcatacgatttagtctttgttttaaaaatattgctgtggcaagaatgtggaggacacactggatgtggtaaacctggagacaagcccacagcaacagtctaggtgagagatgagttcagctgtaactgagacatgcacggggcatgtgcagtggtggacagacagcgtacgagggtggaaggtgctatagttcgctgagtggacactgcaaccatgggcttcccaagtattacagggttattgaggactaatataattcacattttatgaagatataaggctccgagtggttaattccttgaggcactttcagctaggttttgggagagctgtgattcatattcaaatgtctgattttaaagcccaaactctgggcctacagcaagaattggcctaaagcaataatttaattgaaatgcacaggactcagcttactaataacacacaggtaaatatgtaacatctgcagcgagagatactggaggcaatatggcacagggtggcacccctgaggtggaggccaacaagttaaaagtgtggaatgcctcagtaaagtcatgaagacagactttaaaaatgtctactgattccggcattttgggaatgcctagtgatccagcaagtctatttcagtctagcggtgaagataaagcgacattacgatggatttagtaataaataggaggtagagacaaggagataacgggtatagatttctccgggaaaacatggctgtcaagagagacaggcaacatctacagcaggaagaatagcccaaagggaggcatcctttttacagcttttttaaaactatagggcaaacatgaatatgcggcaggagtggaatgcagctaaaaagaaaacggatgaggtagtggaagatccagggacacaaaaactaactgatgaagcatgaagaggacggggcgctcaggtttggatgaattagcttttgaaagtgagttttccacatctgataaatccttccctttccccttgaagctgaaggtagagaaagggaagccggggtggactggggctggaacacgggaaggtctgaaagcgcctccgcgcgtgtagaggggcagtgccgcggaggagcgcctcaggaagggcatgccctcgcagcacgggcttttgctgtgtcacgtgtcagaaagccacggtgaccaccaccccgccagggaggccagaagaagttctgcggcgacaattctctaaagcagggcttaagtccaggctcggtactgacagccgtgtcccttcttgggtcaacactggggctaactctaccatgtctcctcccagcaaccccgaaagtcgcatgggggacacgaccctctgtcgagctccacaccgacagtctgaccgggggcgggaccagcgcctggtctcgcggctttgctgtcgcctcccgcgcccacgggcacctccgccaccgtggcagccgtcacggagcccttccgcgtcccgagcgccaaggcacctgcgagcagccgctccagggctcgagattgggtgacaagcggccgccaggccagggaaagcagacccgcagggcccgcgcgcctccagccacctccgcacccgcacgctccacaggtttcaaccagcaagagcggcccgcggcgccggggtggaagtggggtcaaggggaggtgagcgtgcaggacggggcggggcgcactgaccccgcccagaggagcgccatgggtggggacgttacctccaacatgcctctcctgctcgccccggccgtgtcgatgagagtgttgtccaagtcaaagaaaaccgcccgcacgcggctcagccccatagcgccggccgctggcgcgaaccgtagccttgccaccgccgcctgcgcatgcgcaaggcggactgcccagagagacgtgggaggagccgcgaagtcaccagaccatctcccggcgcgggtggaattcccgcgatctgtctcattccctgcgccgccgagaaaagtgagatcccgcgagactcccagggtatggtctctcaagagccctggaaacgtgtgtcggcgccgccggatgcggcgacttctcagtggctgtggctggcgttggtccgaagcgtggtgttcttccctggtgtctttctgcttatctctttcctccctgggccctccggcgcgagggaccgtcatcacctccccgagagaggttgtccgcgctgccaggcgctgggcagcaggctctccgggtggccgggcgggcggcgcggagacgtcggcgggcctgatgtctgccttgagcgcccgcggtcctagcctgcctgtacgcgcaggtcactgtaggtgatctggggacgggggaaggtggagcctgcgccttcccgcctcgcgccatttgcggccttcgccggggtggaatccctgtctgcctgggcccgcgccagcacgtttctgaaggatgtgacttgggtctcttacaacccgtttagtacctgtgccctaagacggaggggctgtgtagtggctgccccatgttttgcccttcctgattgttttcctgaaaccttgcgttctcaggtctttggatgccttttactcggttgttttcaggcatagcaagaggttgagggacgtcgaccgccttttaaacccgcggaagggctgtagcaactcttgtctcctagtgctggcagaacggggatcgtaacactaatctctaatctttgtctctcttgggtacctttactgtaatttggatatgtggtcatcattagtgaccagaaattgactgtcaggtacaggccaattacctgattttgtttagccagtgagctaagtggttttttttattttttaatttatttttatttttattttcgagatggagtcttgctctgtcacccagtctggcgtgtagtggcacgatcttggctcactgcaacctccgcctcccgggttcaagcaattctccggcttcagcctcctgagtagctgggattacaggcgcatgccaccaccccccggctaatttttgtatttttagtagagacggagtttcaccatgttggccaggctggttctcgaactcctgacttcgtgatccacccgtcttggcctcccaaagagctgggattacaggcgtgagccaccgcgcctggctaagggtgatttttacatttgtaaatggatttaaaaaatcaaaataacagtgttttgttacacatgaaaatcaagaaattttagtgcccatagttgcattagaacacagcgcacacattcatttctgtatcgtctgtggctgctgttgccatacagaagcagacagagttgagtaattgtaagcgagaccacgtggctggaaatcctaaaatattcattatttagctctttagagaaaaaaattgccagtctctcacctcgctggtggaactccttaacagaccactgatgttcagtaggttagattaattggtttatctttatattaataggagtttcttctgcagcgttagactacctacagtttctatattttatggagcacaatcacagttgacatctcattgctatggtggagaataaacccataggcattcctcaaaaccatgactcctttctgtgcttacctcattgacgtatagggctagcctatcaattgtggacatttagattagcaatcagccaaaattatggtgaattaattggagttacttttaattgcctgaaatgtcagaatcaatttagcataaaactataggcacaggaagcttataggattggagcagctttttttttttttttctgacttgcatgcagagtttgttgtttgctgatttaggcaaaaatctaaggttagatgaggcatagcagtctgtataatccttttaaggggatgcgttgtttgatagat

SEQ ID NO: 1561934 - DNA, 4001 bp, Homo sapiens
acagactctcccacagggaagcacttcctgacttgaaataatgttgtaacattaaaataacctcctggcatgaggtactatgacattaaattttattagagtgaattttaaatgttttgtgaatcaaaacatttaaaaggagttagtgtggcgctagcacttgatggtactgtcataacttttaaatgcaaaacaaaacataattcatagctatatctcctacacatcacatgagaaatttagaaaccagctgtgataaacgtcctctgagaggttcctgaggacagggacccttatcttcttgcatttttgcagcctttatgcatttctgcagttatgcgtactgcatgcaacttgtccttaagcatttcctaaagacgtatcaatagcggtaaagtattataatttatagccaaaagaatgaagttggcaaaacaagctaagagcccattatgtctgtcttctgaaatagagtctgaactgaatgtgtacagaaataaaatcgtgtctagtcatgcaatgggttaagtatctgctcttggtaacagcaaaggatctttcactttcaaaagaaaacaacgaaacaggcacacacaaaatttctgcctttctcatcctaaacagctgaatcattcacatattcaacagcccagaattcttccgggctgtcagtgcgggctctgctttttgagaggttggaatttaaaatcctccttaggagagcacggaagaattacaggaaattaaagggattcccaaaggacgcctgacttaaacagcagcagcgttaccgttaatcaaacaggaggctctggctatcaatcaatctccggagaaggaaaaatactatgctgagaaaatatattcgttcattagtcaagtatttactaaaggtgtactcggcgcaaggcccctggagagaggccaacaagcacaccagctctggatccctcgccggaccgccccctccccggcggggcccacctgcaggcgggacgcccccaggtgcgcgttccaggcgccgggggcggcccccgcacccacccctccggctccaccccggcgcgcctcacccggaccggtctcaggagcgatacgggcttcagcgtggcgaaatgcaccaatacgactcgctacgcactgagaagggggccccacgcgcgccccgagctaccgcgcccgcgggcctcagggagccgctgaccttctaggtcgtgggacccccgcaccaacccgggccagggcgaggggggcgatctggggtctccagagggcgcgtgaggctgacagccccccccccagagtgttctaggggcttcgtggggcgcttggggagctctgggggtcctaggggttctctgaaaggcgcgtgggggctgagggtccctgtgagactctggggattctaagggggcgtgttaggggatccggagagcgtgtgggggctgaggaaccctggggagttctgccggccctagggggtctctaaagtgcgcgtgggggctgagagcccctgggaggatgcggggtttccagggaccctgggggggcctgtggggtctctggagggcgcgtgcggactgagggcccctgggcgtcctgggggctccagggggcgctgggggaccctacaggatttctggagggcgcctgcaggctgagggcccctagacgtggtctgagggccccagaggttgcgtgggggactcggggggtcagcctgaaaggaagggggccaagtacggagaccccccccccccagggcacgcacggtctggcgctcacccaaacagccctcggaggaaggagtgggaggccttgactcgcttctcggcctccgccatcagctgtactgcctcacgctccttccccgcgttgtccatgtcgcccgccgcggccgccacagccccctcagccggctcgctgtgcgcccaggcgccttaaccctccctctggcggccgcagggacgcaggcgcaggcgcgacgcgcgaggcctttcgggagctgtagtccgggtcctgtcatggcggcggggattcgcgagccgcctactacagttcccaggaggccccggggcggggtgtgtgtgagccgagcttgcgcaccgctagctcccaggacgtcggcgcagggggcgtgacccccccaaaggggtcctgggccaaggtgaactttaattttgtatgtatgcagaaatggaaaaatgatccgtggcctctagtaaagatcacctcctcagtaagactcgcatggcaatgggatggatgaaggaacaggggataacagattggatggaacccacacccttcatgcaagttctgcaaaagagaatctggtgtagccaccaaagcatcacatgcttgataccgcccaccaaaaaacgagcaacagctggcaataagagccatttttatctccaagagcaagacgtccccaatataagttcagttatttttaaatctccccaaactgtaactttctgttggtcctctcttccttggttataaatgagttgcatatatgcaatatatgcataatccactcttttgttgactgaattatattcaatggatgtgaaccattgaactcttatcctttacataatactggccatagtggatggatctccagggacaaaatgtttgcctgccaggaagacttctaatctcctaggagaagtatccatagatagatgggatcctgtgccagagactttcaggcctgtcccagagggagttatttttgaagacaatgtctagaccattcaagcttggcagtgctaaggcagagatgctgaaactaataagaaaatcactgccaagtgagatttatgacagtttcaaactgttaataaatacactctgggcactggcatgcaaaattttagaaaatgaagactgtctgtagagggcaaggcaagaggggccaaactcctagaaagaaagttgactaaagcacatgtcacagagttcatacatttcaggactccgtagagatagaaagaaatctcagctcttcgtgcagtttatttacgattactacatgcattattctaactttgaaaagctgagctgtgtgtttttggagagagaaggaggcgggaaattggaggtgaccgtaaatgcaggggagaccagagaaaaactgtaaaaagtgaacataagcatttggaaagcagagcagtctatgggggcttaatggagtgaggctaagtcaaaagctcctaagtaaatcagtgtgttgattaaatcagttgttccctaacgtggttcgatgcagaagctctaatggatatttaagaaatactgattcctaggccactgggttttggtatcaaggtctcttgcagctggggtctagaaaatgcacattttgaaaagaactctccatccctatcctaaagcacacagttctagattctcatatctgtagtcagttgaaaaggagctggaacagactgcctccccgaagctagcacttgcaattaagagagacatttttggtggtttctagtaatttccttcattctcttctttgtcacaggaaatttgtgggcactcccaccgttctgccagtccacaccaaagtgggagaaaaccttcaaaccttaattactgggtagagctagtgttttattctcccaaaggctgggggaggaaaggaggcagggcagagagatgaacctcacagaataaggcctgactagagagacagctgaggaatccttgaaacaagaaggaaaaggaaaggagaagcacccctggtgtggatcaggagaagaatagaagtcatcttggagaagagccaaaggacccactgcccacacctgcgctgcccaggatggagccactcaccactggtggctatttacattcaagttaaataatattaaataaaatgtaaagttccatttcttggctgtactagccgtatttcaagtgctcaatagccacacatagccagtggctactgaaagagttataaatatagcatcctggtg

SEQ ID NO: 1561935 - DNA, 4001 bp, Homo sapiens
ctcattgaaatgcagaacctgaagcaacctctagtgacaggagctatagtgttcaatatcattttacatgttacaagcagaggattcattgtacatacaaacaatgaaccctggcagagttctttatcctaaagccccacagattgttatttaacggtattaatagataaggtgacataagcagtaagttctgaagagctttttccaatagctatcaacattttttttaagagagcaaaaacagtattcccacattttctgtttcttctgttcattttatttccctgcttttggtatccaacagaagtggtttcaaatgaaaatcttaaaataattattccaaagaccaaggatattctaaaaaccagtaacagtctttgcctctgagaaggggaaactgtagggtttggcgtgaaagagagattcacttttcaatgtgtttgtacctttccaattggatatcattcggtagaaccatattctaaatgagcatacatttaaaatattttcaagaacaaacaattcacaaacttacaggtttccattaacattttcgtttgtgcagcattcgctgaagacctaagatttttattcctccaatcaccttctcaacaacctgctgcaacaaatactgaagcttttttgcagccagggatcagttaggtggatccgaggccaggcatttaaatcaaagagatgcagcaatcttactcaatactactaccactctcacgcatctcattcaactccatttaaaaccactgcagcaagacagctggtactctccttcctgtttctttaccgtacaggcttaataacaaaaacaggttggttttgaagccctgctcaaatattgcaaaaaggaagtcttcgcattcgggagggggaaaaaagtttcgacttcgagagaatctcatagcttccgtgtcattccatttgggaatcccagatcctgccagtgaggtagatgctcgctctctcggttaacttttccaccctagatgccctcaaactgcctaggaagcaactaagtctcccaacgacccatggctagttttgttaaggcaggtacaagacaagcagtttatttaaaccatgacgaactgggtcgatgttcataaaatgagagatggggagagcaaaaaaaaaaaaaaagtagtaataaagacagccaaactcctaattttatcaaccaacttcccacttgccatttcccagccttcacaccagaggtagtaaaacgcctttttaccgagaaaactaagaagctacccgagcccaacatgaaaattccgcggacaattcgtgttaaaatattttttaaatgcccaagtgaggaggaaacacagcaaccaaatctcacccggctgggaggctggggtggggggggtccccgcggcttttccctcccgtgcgtcccagaagctgctaaggagccggggcagcaggaggacgacgcggggagctttcaaaagggctgggggaggcaagaggaagaaaaaactttagggacagaaggggaaagtgggcccctgcagtccccccgcaaactcctcgggtgacccctccgcgcggggaccccctcggatccccaagcggactgccacccagcttcgtctcagctcctaccgccgcgggccgccccccgggctgaggggaagcggcgcggccccgacaccccgaaactacctcagcgcgtcccccggccggcgcgcccctcagtgccttggcagatctgaagccgctggctctcgcagcctggggaactcgcccctcttccctccgcctcgcactccaccccctcgcccgccaccgcctcctcctttatctccactcacctcccgccgccattttcctcgcagctcagctttaaatcggaaactcgccgctcagcccgcagccgccgccggccgccaccgactaagccgcagccgctgccgtcgctgtggagcggctgagacagcagcagctaaagtcgccgcacgggggccactgggatatgtagtcccgaggccacgcccagcactaccggtcccagggggccttgcgcggccggcctagggttccagcgacccccaccctggcttccgcggcggagggcgtggcgacgtgggctcgtgcggccgctttcgcccagcatcgactgggagctccctcgggatccggagaaccggaatgcagtcctagccctgcccttaatttttttcatatttgccttcgtccagtaatacctaacatttgtggagcgtttctggtatgccaagcacggatcctcaaaacaagcatccggtagggaccatgatcatcctcatttttcagatgagcgaactgaggcacaaggtcggaagccacgaggctgttccttagctgctaaagtcactgggtgaaatgttgttgggcagcagtatattcagggtatatttagtcccgaagtatcatcccacagcgtatttatgacttacaataaagaacagcttgctttacaatggaaagatctggcaggcacccccttaccaagtgatcgaacttagcaccaccaataatgggtcaggactgttgttatgtgtctcctaatatgatgcagtggggaaagcatattgctacctctgtcgtattcttgccacatacacacaaaaagcttacttgaaaaaataaacgaattcagaatgtgggacattctacacaacatctagcctggagtcttttaaaatatgacagcatgaaagaggtgaaaaccaaaagcaataggtgagacttgattggattcaggatgatttttttatgtaaaaagaatttggggggcaatttcaatgtggactgtatgttagataatattgagtcagtattagatgtgttgagtgtaaataaaatagaataatctgaccacttaccacctccacggtcagcaccatcatttcccacctggaccactgcaacagcctcctcagtgttctgcctgcttccactctttcctcttagagtctatactcaacacagcagccagaggaatcctggtaagaaccaagtcagtctctgtccctcctgcaaaattcttgcagtaacctgcaaagccccatacagcccgtctcttgccctgcccttccctctctaaactcatcaccttcttctcttccactcacttctgtaactcagctacaatggactcggcctctccaacgtgcttagcacactctggccttaaagatcgtgcacttgctatttcctctgcctagaacagtattttcccagaaaattcaaataacccattccctaatctccccatggtcattgtccaaatgtcacttattcagtgaggctttccctaactgctctattttaacttcctgcccactctgatcccagctttccctactcctattcctttcttcatttattttcagagcatgaattatcattaaaatcatgatatatttctgtttacttatgttatttaaaatatctcattttggctgggcgcggtgactcacgaatgtaatcccagcactttgggaggccaaggcaggcagatcacctgaggtcgggagttcaagaccagcctgaccaatatggagaaaccccgtcactactaaaaatacataattagctgggcatggtagcacatgcctgtaatccgagctactcaggaggctgaggcaggagaatcacttgaacctgggggcagaggttgcggtgagccgagatggcaccattgcactccaacctgggcaacaagagtgaaactccgtctcaaaaaaaaaaaaagtaaaaattaaaaaattaaatatctcatttctgggccgggcacggtggctcacacctgtaatcccaacactttgggaggccaaggtgggcagatcacctgaggtcagaagttccagaccagcctgcccaacatggcgaaaccccgtctctactaaaaatacaaaagattagctgggcatggtggcaggcgcctataatcctggctactcgggaggctgaggcaggagaatcacttgaac

SEQ ID NO: 1561936 - DNA, 4001 bp, Homo sapiens
ttttaacagggggagagatacatacacacacacacatatatatacatatacatatatatatatttttttacacagcctttgaggggaggggaagaaaacttgaataagcctgaactgacttatgggactttcctgtcaatgatttaaattaaatctgctcttacattcacataaacagatcttatgaacacactattaacttacaagtaagttaatctgtcaatgcctcctttaaacttgtggtgttcacaggtatgcaacattgagcaaactgaatctagaaaaactccttccaatgagccttgcaatatggattcgctgggacattctacaaggaaaatcagtgtttctaagttttaggttaagagaagtgtcagaggtttcaaaggcaatctgaagagtgacagatgagctcaaagaaaggcaaagaaatcacaataaaggaagaaatggatgttaacaaatagccaagtgatttctaatatccacaatgcaaagcatgggctttactggttgcaaaaagtagacacaaagttagttttcacacccagactgactcatagagaaaacattaaattaagagttgtcaaaactcacaaaagcttccccagcatttgtagaaacatctttttatgagccaacagggggctacgacatcacaacgctgtaagaaaattcaggcacaccgggtgcacctgagtgaacacagttcttgcagttccctgggactaacacttttaagtcaacaaagagaacagtttacaagaaagctgttacattatccctgaagagcccagggcattcatagaatctgctttgcctcaggaaaaattctgtgcacagagtgcaagccagaagaaccacaattaatcagctactcctcgggcagcgtttcccaaagtgtggaacgcagaataatttcaggaggaacaaggacgcactgtttatttcaacagacagatatttattttttttataagcattagaaaaataactggctttccagtacccggtttgtgattgaagttgccgccttaaatatatttaaggagaaaaaaagagtcagtttgaattttttaaaaaatgtaacatttggtaaatagcagtacagatggtccacggacataaaggtgcaacgcgagactgaaacgtgtgcaacgccgtcctaagagaagcccctcgcccgctggcggggagcggacagtgccccgcgccgggagcttggaaagccggccggatcggacgctggcgctgagctacgtggtaaacccgggaacagttcctctccccgttctctgggcccgaggtccgcgcctacaaaacgcgtggggtgtcacaccacaaggagacaccccgagaatgcggtcaggggccgcgagacggtggcgggggacagcgctcagtacaccgctcggcgctgcacgcctggagaacgcccggtgccacgggacgccttgggcccggttcgaatcccgactgcgccactgactcgctgaggacccgcgggcgagcgactccaccgtttcgacagggggtgcgggatgtgcggctcaaccagagaagccttgaggactcctagtgaccgaccgttcgtgcacagacaggcggctgcgatgcgacgccgccgacctgcgtccaccacagagaaccgtaggccgcctcggccggccgggcctgggcctgacgggagccggaggcggccgcgccccgcaccgggcatgcgcagcaccgcgcgcacccggagaggagccgagaccgtggccgcgcgtcgagtgggccttcccgcctcagcctccccgtccggccaggccccccacaacggcctgcccgtcagccccacgcctcggctgacggccagcgcttcccggcactcaccgctaccagcgcggcgggctcccggccgctccttcgcctcaggcccgccgctgccgcctccgcgtcggcccacctgcccgccgtaggacaaaggcgccaccaaccgaccggcgcgggcacgaggcaatggcggccgggcggagagtggagatgggggcagagggcgcgcacgtagcggcaggcgcggcactgtcgcaagaccgcgcgtgtttacggcagggctgagttggggcgtcgatctccttggcaatgagggcccgggaagtggctctcgggcgggagttgagaacgcagggagttgcctagcaacagcgtcctaggctgaggatgggccccacggtggtcgcctcagcccccgccccagagtactttttttctgttttcagagcacattccctcctccctaactgtgggaacagaacattcaaatccccaaataccttgatttagtcttgcataaaactgaaagcaaaaaccccaaatccctatacacgtgtgtattggagaatatatatagtcctgtaacctccggaccacaaggaacaaagagagcagaaaggtggagaaaatgttgtatttaaatttacatttaaataggctctgtactctattagtttcactgacaagcggcaaaaggtttctggagatatagtcacaggttcttcttgagttatttattcttggaatattcgttcaacgtcaaaaatttcccggaatgtaactgttgaccgtgaagcctgtaaaatgttgtactgttcatttcatgtatagaatacatttgtcacagggaatgggatttgctcacacaatagtaaatgcactctattaatcacagccatagctatattaatcaggtactcttttattagtgttggaaacgcctcagactccatggggtctagttcttctccttgcgaatattgcctactaagaaaaaatggtgcctgcggaatttaaacactacaagaagccagatttctttgacatctacccctatgctcactccactcatttattcactgaatgtttattacatacctactatgtagccctatacttattatatgcctgcttgttaggcgctgttatgagcaaatgcagacccttttctgctatctttgagattacagtctggtgaaagcattagacgaataatcacacttgagtgtgtaattgcaaactgagataaacgctgtgatggaaagaaatagggattctcaatggttgtaactagaactttagtttactcacaggcaaagtgggttattccaattcccactttataagactgtatgaaattagaaatgaagacataaagtctgtcaaataatggatacccaacaaatgttcattcttattcctttccctccaatatagatcctaatactatgaaaatttaagaagaatcatattaattagatgattaagataaccaagcttagggaaaaatgttggtttagaggtgagtggcagtacctcaagtgggtagtggactttagccaaaagatgtattcagtgacttgtgtattaagtgtttaatgagtgttttttatgcacttgattttgtggagagtagagagtaaggtagacaaaatccttgtgcttagggagctcatggcctattagggaatatgagcaataaacaaacgataatatatagtgtttgatgagtatttttgatagaggagcaagttaattttatgaagaaagattcttgtagggaggcaggtgctcaggacttggtgacttcttatttagatgtttgctttacataataggtaacatctattgtgtgcctaccatgtgctgaatcctttacacatatcatctcatttaatcctcacaaccctattgagaggtgacagcgtgctggcagccctcacagcccttgctcactctcggtgcctcctcggcctcggcgcccattctggccgcgcttgaagagcccttcagcccgccgctgcaccatggaagtccttctctgggctggccgaggccggagccggctccctccgctttcggggaggtgtggagggagaggcacgggcgggaaccggggctgcgcgcggcgcttgcgggccagctagagttccaggtgggcgtgggcctggcgggccccacactcg

SEQ ID NO: 1561937 - DNA, 4001 bp, Homo sapiens
ttttcacttttcttttttaggattttgtgttcctttgtggtaaacacctagaagagaaggagcatctctcttttttttttttctttagacagtgtcttgctctgtcgcccaggcaggaatgtcatggaatgaccatagcatggctcattgcagccttgacctcccaggctcaagcgatcctcccacctcagcctcctgagtagctgggactacaagtacaagccacatcaggtggctaattttttttatttcttttgtagagatggggtctgccagctcctgggctcaagaaatcctcccaccttggcctcccaaagtgttgggattacaggcgtgagccactgtggctggccggagcacctcttaaaactctagaaagttagaaggtctcaaagataacttctttgcacaattagagatgaaccaggaaataccaaataactggctgcctatacttttttgtattcccttcagcctttgtattgccacactcattacaggaagaaaacaaatttaatagttatctggtatatactgttatgcttcatttcttgttgtttttgtttgtttgcttttagtttcatcacaagaatgttatgcttcatttcttaacacctttctcccagctagcaaattcctttaaggcaatgtgtttagtgaggaagcagccgacaatttctagtacccctctgccactaacttgtaagatcttgaaaagtcaactttacctttctatgtttcagctaaaatcactacctgatttgaaatctttacttgatctctcaggcctttgtagtttttatacattcactcttcttcaccattttactggcttcaataacgcctttctgatgacctctccaggtgactctgctcttaagctgtgggctgtccccttccagggaagacaccttgggtcaccgcccccaaacagccaggtccctccttttaaagacacacacaactccctaagttgataaaggttctctccttccttgccaaccagttccactctctgtgcctcttttgctggccagctcctgcacccaaacctcagtctccctttgtcccccttttctctcatcaaacacctcctttttcctgttgcttcccccaagagggggtggaggatgcttgggacataagtcttcagagccttgggagttatacagctttgcaattcagccccagtaccccaaggactgccccaatctgaaccagcgtctgtacccaaagggccctcattcctcatcaatcacctccttccctcccagcaaagaactgctccagccctgacagcctgagcttggcccccatgcctccaccccaatccccaggtcctacctgcattagggctctaacaccgcctaaggcctaacccagttccacgtcctgccatcctctcagcccatagaccccaatcccggttcccttcggacccagtgttccttctccgcgaccctgaccacgaccccacgaccggctcccgcctgttccccaggcctggagcgccaccccgtgcagaccccggccagccctgcactccctcagtgcaccggcccccgcgcccagcaccctccccacccagcccggccgccgctccctccagcgcccccgcccgcaggcctggggcccgctccccaacatggcgacggggacacaagcgcggcgggcggggcggctccgggccgggcccgctctcagaccgtgccactcggtcgcccggcgccatttttccgcgcgggcccgggcggcgcctcctccccgcgaagccagcccgacaaggaccgcggacgcccggcgggcccaccccttacgggcccgcgccgccgtcccctcacctgagcgcggccccggccctcccgggcgggccttggagcgccggcccgggccgtgcgtgcccgccgccctcggtgcgtccgtccgtcagtcctcgcgtgcgcccgtctgtcccgccgcccgcgcccggccgcccgcagcccgacccggcagggcctcacggagccggcggggagggggatgggccggaccgggccggggagggagggggagggagggagagagggagggagcgcgagagggggcggggcggactcgaggggcggggcattgcccacgtgaccagacgtccccgggagcgcgaggtggagcgcgcgccagctcccttcggtgctgagtgcttagtgctgggatctcgtgggtctctgtcggctttccagggctattctctcgccagtgagtcccacttcggaagcacacattgcacagtcttttgcgagcgctctgagtatccttggacatggcaactccaagcctcagtttacccatctgaaatatggggaaaatcatagtgcttgtgaagagcaaatggaggtgggcttggaaagcacttgtcaccgtgcctgacacatactgtctaataataagcttaatgggatatagataaaagctttcattattatttgcctctaaatccctctcttctttttcccatcattacctccctagcaagctaaaatgctcagtaaatagaattattgatcgaacgagtgtggcccctcccctcttcccaaacgtagaaaggcctcctcagcactggacttcatgtctgtcatacaggcctggattcatatctggctttcactcttttttaaaaattttctgttttttcccacactacactgatgtattttttaaattttcgtaagtacgtagtaggtgaatatatttatggggtacatgagattttgatacaggcatgcgatgtgtaatcacatcatggtaaatggggtatctagcaactcaagcatttatcctttgtgttacaaataacccaattatactctagttattttaaaatgtacaagtaaattttgtgtgtgtgtggttttttttttgttttttgttttatttttgtttttttgagacggagtctcactccgtcgcccaggctggagtgcagtggcgcgatctcagctcactgcaacttccgcctccctggttcaagggattcgcctgcctcagcctcctgagtagctggtactacaggcgcatgccaccacgcccagctaatttttgtatattttttaagtagagatggggtttcaccatattggccgggctggtcaggaactcctgacctcatgatccgcccgcctctgcccctcaaagtgctgggattataggcgtgagccaccgcgcccggccaattgttttttactgtagtcaccttcttgtgctagcaaatactaggtcttattctttctaactattcttttgtacccgttaatcattcccacttcccacctacctccccattaatcttaccagcctctggtaaccctccttctattctctatctccatgagttcaattgttttaatttttcgctcctggcccggcatggtggctcacgcctgtaatcctagcactttgggaggccaagatgggcggatcacctgaggtcaggagttcaagaccagcctggccaacatggtgaaaccctgtctctactaaaatacaaaagctaggtgggcatgatggcgggtgcctgtaatcccagctactcaggaggctgagacgggagaatctcttgaacctgggagatggtggttgcggtgagcctagctcgcgccactgcactccagcctaggtggctgagtgagactccgtctcaaaaaaaaataaaaaatagttaattttttgctcccacaaataagtgagaacatgtgaagtttgtctttctgtgcccggcttctttcacataacataatgacctccagttccatccatattgttgcaaatgacacgatctcactcttttttaatggcggaatagtattccattgtgtatatgtacattttatttatccattcatctgttgatggacacttaggttgcttccaaatcttggctgttgtgaacagggatgcagtaaacatgagagtgcagatctcttccatacactgatttcctttctttccggtgtatacctaagaat

SEQ ID NO: 1561938 - DNA, 4001 bp, Homo sapiens
tgatccacccacctcggcctcccaaagtgctgggattacaggcgtgagccgcagcgcccggtccataaacaggctttttgatgcaagactcttatctgcaagttttcaaaaacaacagggtggatggaggcctttgagtggtaaatggtgatgacaagtttaatctgaaggaagagacaagcaaagagaaactgaagggcaggaaggaggaacagaagggcaccagaagaacaccacgctttgagtaatgaaaagggggggtggaaattaactgagtccttaccaaggatctactgtgagccaggcatctggagctgcaaagatggaccatgccctcaaggggctagaagtccgcagggtaagactgaggctaagaccctgttttgtgaacgtgtaattctaattgggaaaatcaagcagggaaggcttcacagagaaggtggtgatttagtggagcctttgaaatgtggaggaggatttgctaagggagaaaaacgacagtttgagctagttattttgggggagaaacattcacatatttttatagctgttcatttggaactttaaatcatgggaggcttcttaaattcagcaccactctatcaatgttctctttctcttcttgctttatcttaaatactgaaatgttcaagcccaaccttggggcaaaggcagaaagcctcggacagaaagccccggaatgaggtgagtgctagccaaatctgctctgtcacctccaagtccagcccgcccagctagcccagtcagcccagtcctgctctcttggcaggaaaggaaggctaataatatcccctgagggccagggtaagggggggggggggcgcggcgggggtgatctggatgccagcaggcaaggatcactcttgttctgtcagtaagccaccaaaggaaagcttccctgcttcctaatccacggggctcctagtctacctgtgatagggaggccagctctgcaggaagaaaaaaagggcttcatgacaaggaagggggaagcatttggattgggaagtgcagaggtggttatgcgaggttatcttaataaaatgcttagcaagatccctggcacacagcgagcggtggaagaacgttagctcttatattaataacactattattattacagtaacacctcaattgtactccgacaacaagaaaatcttttttgtgcagcctacttttacgacgttcgagagcaacttcagagatgacaagtgatttcaaaattttttcaaaggtacgagatcaaattccaaccgcactggcctgagagcccgagaccctgagttgagagctgaccctgccacttgtcagctgcgtgaccttgggcatggcacttcacctttccgtgcctcagtttcctcggctgttaagtggggctaagaagcctctccccggtagggtagtcgtagggtcccgttagaggatgccctctgctgctctggggccggacgggtgcaagggctgctcacggcccctcttccaagcatctgggctcttggagcgggcgaggtagatggatgagcaaccccaaggcccaccaagctctgccgcctgcagagccagagcgagagaagggttcgcgcctgcggggggcgtccctgtgacccagggtgttgagcccggagggaggctctcttgctacccacacgctgtcgccggcgggctgggcgcggggagcggccgaggaaagccgggctgacctgggtccggcgggcgggcggggcggggcagagggccccgggggcacgggggaggcaagcagcacgggccaccagggcctcgccgtgccgcggagatgatgcggggaaggagcagggcaaaggagcgacgcccccgaatgcggcgccgcgcgccccccgcgggccgggcggaggcgctcactcacctgaggcgcgggcacccgccgtcagtgcagcagcagcggcggcggcggcggcggcggcggcggcggcggcggcggcgagaggggcgggggaggtgctgcggtccgcgcaggcgcgccgaggacgccagggcggcgcatgagtgctgtgcccgtccacctcgggaactaccgagaagatggtggctgagccaggagaggccggcggcgccatctttgatgtagtttttcttgctgcggagtttcctcagagaagaatctcagattttggaggcgctgggcggcagggccattgagctctgcgtctggagcgcttccctcagttccctgagtcgcatccttatgaagcccctaagagctcttgcagggtatggcatcctccttttaaggtgacctagagccatacccaaggtcacagggcgcctagcacagtgctcggcacgtggaaagagcttagtaaatttttggtgaatgaacatagtaatttaagaactagagtccaagactcagggctccgaattaccagtcctccattgtatcacccctattacaaccgtcagccaaatcatctactttcttgaatgcaacattagagatggaattttttttcccagaatgattgcagatattaaacttaatgacccaacaatttaacaccaaaatgtacaggacacactcttcctctatttattatctattatttctttaccattaagtaccactgactaaaagtttttttgttttgttttgttttgttttttgagacggagtctcactctgtcgccaggctggagtgcactagcgcgatctcggctcactgcaacctctgcctcctgggttcaagcgattctcctgcctcagcctcccgagtagctggcactgtaggcgtgtgccaccgggcctggctaatttttctattattagtagagacgggttttcaccgtgttggccaggatggtctcgatctcttgacctcgtcatctgcccgcctcggcctcccaaagtgctgggattacaggtgtgtgagccaccacgcccttttaacccgagccagtgtcgccatctcggctcaggttcccaagtccctcagcctcccaagtagctgggactagaggcgggcgccaccatgcctgggtaatttttgtatttttttttttttagtagagatggggtttcaccatgttggccaagctggtctcaaactcctgacctcaagcaatccgcctgcttctgcgtcccaaagtgctgggattacaggtgtgagccaccacgcccggccactaaaagcatattcttttaattaaggcaaactgaacaaatgaatattaccaaacatctcagagggcagcaataatattgttattcatcaagcacaattcttgaactgaatttagttggaaggaaaactaacattaattgagcacagccatttattttatggtttatgttcgttaacatttactgaattcaaattagttctagttcaccatccactatttatccctatgtccttggttagacaattaagtctctccacacctctccatgcccgaattcctcatctatgtcacacacccagaaatagaagttacaaggttgtggcaaagactgaatgataatatgcatgtaaaatgcttagagctcagtaagtattatttttctttgttctatcgtattttactgttgaagacacaaaacatacttcttgagtttgaagaaatccttataagcaaaaaatgcaatacaatgtaataaataaaaagggggagggtataatcatctttagagagataatctgtccccattttacagatgaggaaattgaggataaaatgaaaattcatggccgggcgcagtggctcacgcctgtaatcccagaactttgggaggctgaggcgggcagatcatgaggtcaggaaatcgagaccatcctggctaacaaggtgaaaccccgtctctactaaaaatacaaaaattagctgggcgtagtggcgggtgcctgtaatcccagctactcgggaggctgaggcaggagaatggtgtgaacccgggaggcagagcttgcagtgagccgagattgcgctgctgcactccagct

SEQ ID NO: 1561939 - DNA, 4001 bp, Homo sapiens
cacaaggatgaaaagcaaaaggaacacaacaggcacattactgtccacggatattagcatgaggtacacaaagtgaaaaattagttagttggggtttattgtagatgagtatgtaagtggtcacttaagaaaaactctattatttgatgactaacaaattttgtggaactcataaatgaacaacttttctgagtgacattcgcaagttagaaaaagccaaatctgaggaaagtgcacctcccctgctccaatcccatcccaatttaagagtcataaggtaagcaccaccttttgctggcctagcttcatctggtagcaataaagacgtgggagtctagtattccccacattccactcattccctcataaacaccccagagttgctcttaggacttaaaagttccaaacacagatgtacctgctttttgagagaagggcaagggagaagggagcgtagatgtttttcccaggagtccaccttgtacgtcattcctaatatgaacaccctatgtttattataaaaagaactctcatatactttatcttatttgttctagtctcacaaattggcgaggcctcaatcaagttgtagtccaggtgctttctttggagggaaagggctatgagcgcacatcttctaagtacacgacatcagcagtgtagtacgtgcaccatgccttacaagtgagacacaaaaaatttattggtagtaaacttcctataatagacattaccagcctaagacttcctgagaaagacaccctgtcaatcatctgatcagacctgtacttgcacagagctctgctcaagctatgagttcaataactgtttgttgcattatacttgactccaactttgttccactcctgaataaaaatttactgaggcctgaacttgagaatgcgtgtcctgaaagtagaaaccctcagtctctggctcacctgggcagggagaaaggtttctcaaacgagccaagacaaatcagaaatcttaatttgatcttcctaaaacataagtcagatcactccactgattaaaacaagagcttcacattcccctagagcagtgctgaccaaaaatcatgagagccacatatgtaatttcaaattttctagtagccacataagaaaaaaagtaaaaacgagagaaattttaattgaaaaatttaaatttatatttaatatatttcatgtgacccaatatatcaaaaataatcactgcaacatgtaatcaatataaaagctcttaatgagctattttacatccttttttcatactaagtcactatactcgtgtgtattttacaacacatctcaattggactagtcacctttcaagtgttcaacagccacatgtgtggccggcagttaccatactggctggacagtgcagatacagaagaaaaccccaagtccctatcctgcaaggccctgatgatttgggtcctcctaaccttctctcccactctctccctctccggagcttcactggaggcctctataaggtcctttcagcctcaaggacgttgccgaaatgaatgcatgaatgaatgaaagcatgttacaaatatccgaggccaggccttgcgtgattacagtagaggccgaaagaggcagggctgctggtcaaggtcagacggctaggtggggtgagctcggggcctagccggaactagcggagaggaaaacaagcctccgcgtcgcccgccccgccgccccgccgccccgcgggctcacctcctccttcaggtagtcaaatttggtcggctcgggctgccgggctgcccagttcttctgtttccttttcaaatcccggtcgaaaatattcagggttctgggcgaggtgctaccgcggggagagacaccagaggtgacttccctacggccaagattctccgctgggaccctcgccgcccaaggtcgccgacataagcgccagagccctgccggccgcagcatctccagctgcgaccccaattgccggcgctttttgtgcgcatgcgccagcgcggcttttgtgtctactccaaagatcttctcgagggaacgtgcaagtagtttggcctagttcgcttgccattacggcggagcgtcacgcggaggattgtgggtgtgagccccacgtgaggcttggtaggactgcggacggtgagtggggatggactggagttgaagagctcgagatgaagggcttgagggcgtgtgtgtgtgtggcgcggggaaaaaactagtctctaacaggatctctttcggatctgcgaggggttttgccccttcctcctgagcctttttcggtctcattcttcagtcttcatcgatccttttcagggtcgcttctcgaatcagtctgttagctgcccccctgcggtacaggaggtggaaaggagaccctagttcaggggccagccctgtgttctccgaattagagagcgggcagaaggggagggtgggctacggggatgcgggcgcgtgtcgggagtgaggtccggtcgccttcccctctctcggattatctgacatataatgagtgctttccttctaaacatttacaatacatgcagtacttctcctggttgaggtggtacctacctcgtaagattgctcagagagttaagtgctgtaatacatcgaaaaatgtgtaaatgcaccagcgatagcttccttttttttcctagttagtgtaattaaaaggacttgatttttaaataagaaatattgcccttttaatcattttgggggggggttgcttaataatcaacgacttttggctctttgcaaaattcccatccagagatgctaaaccattggagacttttcacaagggaacaatattaatttatacacacatatgtatatgttctagtatgttttgggggaatgagctcacttgggccttcatcactggtagaatcagatattatagaaagaagtgatatttattaactggtgtgagactttacctggagactcaaatttactttttatttttaaactttttattacttttgaaggatgatcgaatttaaaaaggaaactttcttagctaaacctgagttgattttggtctgtttagttagaatgctagtcttacagaactaaaggctgtttgttggcagtagccggagataaggagtaagcagaatgagaccagaatgtgaagaaacaaatgaggccaacggaggctagggaatctttctttcttacttttttttggtagacagggtctcactctgttgccccagctggtgtgctgtagtgccgttaggctcactctagccaagacctcccgggtggaagtgatcctcttgccttagcctccaaagtagctgggactacaggcgcgcgccaccatgccgggctcatttttgtatttcttgtggggattcaccatgttacccaggctggtcctgaactcctgggctcaagtgatccgcccgccttggcctccgaaagtgctggtgagccaccgcactcggcctagggaatcttaactacatttgccttcaattagtaacacatactggtatacaaatagaaattctaagtgagagcaatggatgaataaacatttgttcccctccataaagccctgggattctgctttgtctaccttaagtttatttctctaaatgatctgtcatggaaagaggatattttggtatgtttctgcttttttgcatgtgacccagaatacgttggagagatgaaattagacttgttacctctattttatgtacacttaacttagaatatattaacttagaatatattgtgaatgtgttttaaaacatttaattattgtactaaccattattaccattaaaacatttgttttatttttcagtatttgttttcttcaagcatttggtcgagattaagaattaaaaatgtcatccaaacaagaaataatgagtgaccagcggtttagacgggttgcaaaggacccgagattttgggaaatgccagaaaaggatcgaaaagtcaaaattgacaagagatttc

SEQ ID NO: 1561940 - DNA, 4001 bp, Homo sapiens
ccacctgggaagccagaggcccccactcaacccgacagggtcccagctggccgacctaccccctgcctcgcctttcctcccgcccagcctggtcccaaaccacctgcccagctcagccctgcaggagcttttcctgcaagcggggcacaggaagagcacgcagcgggtgccacctctgctcacttctcctgcagggcctggcctcgtggggggtgctcctggccagtcccctgcgtccccacctcccacacccagagtgcagcccaagttctatctgatacatcagcccctggcacagttccagcttgaggaaggttgaggagatgggccaggttgtggcccaggaatcttgcacagccgtcctagacctgagccccgagctctgctgtgtggccatggtctaccccagctgccctctctgagctgtttccttgcgtgctgttgaaaaccaacagcaggcagtggctactctgtctctgcaggcgcctgagttacccactagcaaatagatcaggagcagctggggttaactctttcagggctggggcttcctatggggctgactctgaggaccttcggcaggcgtgtgtgtacacacacacgtccaagggggagtgggggtggcagaaggcaagttcggcagatttcatttatggagaagtggagatgaagagcaacagaggcagagaggagcagagtcaagacaggtccccgtctctcttagtgacctgctcccaggtcacccaaagcagcccagcaaaggggagactggcaggcctggcaagcaggggtgggccaagcctgggccgagagcccccatgaactccaggtcctgaacgccagccccctccagggtcctgttttgtcagggtcagtggggctcaggaaagactctaacctctagcctaactcagagaaggtctgccactggctgaggggcacgcagcaagccagggaggcccaggtagggtagatggagatcttgggagtgggcaggggtgctaagctgggaatggggacatctggggtcaccctattgtatccctgcctccatgactgacctgagacatatcccctcaggccttggttttcctacttgggaagaaggagggtcaggtcccttccagccagggctgtggtcaaggtgctgagtcactaggggcagtggggagggggtgggagacagctttgcctccctctggagttggggcatgagggggccaggacagagccgagcacagcggtgaacggtggagaaagggctcagggccgtggctggtgcccatggtggccgcagggccacccatggccccatgggagggtgactctgagcagcccttaccaactgtaggactctgctgccctggagtggggcctgaagaactctgggggcggcactagagtcaggagtgaggggcccttgcgtttccaggctccccttccccagtcagcccagcctggagctgccacagagtggggtgaccgctgctgtgattgtcgccagccccccgccaacaccagacacacaaatggggtgggctgaggggtgggaggcagcaggggcagtgacactggagcagggacaagaggagacatggagagacagaacaggtcacacaagggcagaaaggtcaagagaaaacagcagggccagagagaggggaagagacccagaaacagcggcggggcccgaacaaccccggagggtgagactaacagagactcgggtagggagacaccgcgagcagagcccgcgcccactcacgtcctggaagagcgtgtgtccggcgggccccgggtcgggcgcgagctgggggtgccgcggggtctggggctggggctggggcgcgggcggccggagcaggcacacggtgagcagccccgcgcacgccatggcgccgccacccgctcgggctcggctgcggttgctgccgaccctggacgccgcggcggactcggtgtggctagaggccgccccttggcgccggcgccgacgcgcgggctcaggccccgcccccgccccgcccccgcggacgccgggttccctcgcctcaaggtccaactccagcgccgcgggcctccgcgcttccgcggccacggcggagggggaggcgcccgagggctccggtcccgcgacggcctgtcgggagcagaacctaggggctgcgggcctacccagagggacaggatgaccaagccagtgccgaggtcagggtgacacaagtgggtaaaacccaccaggacttcaccttttggggcgtctgtatcctcatctacaaaaatggtactggcagacaccctatgcaattgttgggactcattcaatgtcaagtgcttacaacgggggctggcgcagaggaagcccacaggtccgtgcggccgaatcccaggcatcccgacgcccgccctctctggcactaagcgcagccctttcccctcccctccgtgactctggccctcccttcaacccgttctccacacagcagccggggggagcttttaagatgcgaaagaggaggtgtcacttcggtctccagtgactccttggcccctgaataaagcttaagactgaacgccccactccaggagcaccactctgaccctcacctcaggaccgcagccacactgctttctctccggtcctctatcccgctccctcctgcccaaggcctttgcccatcgtgtcctctgcttggtgttttcttcctctggttaactcctacttattttacagcgctcagcttaagcaccacccattccagaacgcctttcccgattttctcatttatgcagatctcctctttcagaccctgagagcaccatgaaaggaggtaacacccgtgtccccagaactgttaaatacctgacacagaaccagcccactgtatttgttacatgtttactaatgtccagaaacgtctggaaggaagacagcaaactgagcagagtggcctctggggctggggaaaggagaggccactcattactctgcacttcgggcagcactgaatagcattcttggctttctacaacaaaaacctttactggatctgcttttgagttaggaccaaaacagcgaggaagctgacctttcttcgagttatgaggctcaaatcaaatcgggcacggacagggagaagggaagtggagaatgggcatttccccagcaaccttggcctctcccgccccgaaatgttcccaacagagtcccaaaacccggcccaaacgtcatcaaaatatttattaaaaccaaagcaggagggaacagagctgttaggaagcaaatcaaagtgcagattggagggtggggcagagcagtggggaggcaggcgcttcagacactgcaggagggaccacagggtctgggctgggggaggccttcaccacccctcctgcccacatcagtgaaggtcccccactcacctctcccatctcatatccatcctggggggcagctggggccctgaactggccccctggagagggcccaccccaccatctgaccacccatggctgtcagtcagtctgtctccctccctcactttcccaataaataaatcacccaggcctcagttccttcagtatggggcagaagaacagctcagggacccctgcccttgctcaagggtagagggagttggggtatcaaccccacacccctcctcccctttgctgattccccaggctcaccaaagaggcctcgataaataaataacgctccattaaagcttcaatcagaaaaaacctttaagacagaagtgctctcaccgtcctacacgcccagccagccaaagcctccccacctggcctggtcagagcaccagattctgggagcaggcactgccctgggccttgtgggacccccagagcaaaagggccgaaagtgcagttagagcccccccacgcgcacacatggactcatgcacacacatgtggacacactggggcgtgtctgcagtgcacacacagaggtgtatgttcaccttcattccccggtacat

SEQ ID NO: 1561941 - DNA, 4001 bp, Homo sapiens
gctgagatcaagccactgcactccagcctgagcagctaagcgagactctgtctcaaaaaaaaaaaaaaagaaaaaaaggctcaaggtgatatactagatgccccaaacaccaacctaccactaagctaattcacaccttctcatctggaccactttggtagtcagcaatttgacgaagtggcaacggaggcaaaggatgtgggtttgggtcccctctccttcctttattagtttcatgaccttgggcaggtcagtaagtcttttcgtctcattttctacacttaccagataagtagggtaacacccaactcaaaatcctgtgtgtggaaggggataacgcatgacacacatggcccaagctctcagttagctaagtctgactctatccactccaccctaagcctccaacactgtgaaatgatccaacatgcaaatctactcgtgtcactccctgccccaaactcctgaacaagccataccattcagcagctctccaaggatcttcagaacctgctccctactgacctcctgccactgcttccaccaggcagctaacatcacagggcttctttcagttccagaaacacatcgcccgccttggcattttagaccatggctccgaagccgccatcacaccaccacccatgtttatcaacgtaagccccacttcatcctttattcccttataataccacttcaaaatgcaccagacatccccaatcttgattgttgttaaaaatgcaagttcctgggccacgagcagtggctcacgcctgtaatcccagtactttgggaggcagaggtgggtggatcacctgaggtcaagagtttgagaccagcctggccaacaaggtgaaaccccctctctactcaaaattttaaaaattagctgggcatggtggtgggtgcctgtaatcccagctattcgggaggctgaggcaggagaatcgcttgaatccgagaggcagacgttgcagtgagccgcgatggcgccattacactccagcctgggcaacaagagcgaaactccaccacaaaaaaaaaaaaaaaaaaaaaaaaaaaaaaaaatgcaagttcccaggctcccgtccagaccaactgttgggccgtctccaggggagggacgtgagaagctacatttcaatcatgcgcctcagttgggtctttagagtaaggtggggacacactgtccagactagagctacctgccctggctctgcagtccctgtcctcagggtggaacagtgatccctcctgggcttccaccccaaaccctggaaggtcaaggcccgaaaatcctttccatcagtttgcccaaaaacagatgaaatcagcccaaggtgctgaagagtacagtttataaaacagtaaagcacatgtaggaatgccctaagttctactttttcctcatgatgctgctgtgaagtttttccactttatttttgtttaaaagtctgtgagctccggacccaaccctccaccttagcgttggtgtcccgcccgccgcgggggtcgcagggccggcgccgggcctggccggagcgagggggtactgggggcctcgggccgccccgcgccagagcctccggcgcctcacccccaccccaaggtcctgcaggcgaggaggcggggaccccggcggccgcgccgcgggaccccgggcgggcgggggcggggcgggctgtgcttgaaccacacggtgaccgcgcgggccgtgcgcgcgcacaccccccgcacgcccgcagcctcgcgccgcgcggcctctccgggagtggggccggcccgccggcggcggagacgaacgattctctctagggtgcgcccagtgccccgcctcacctggccgccgtcagcctcgtcgccccactcggccgcgctcccgtagtagtcctcgtccatgatggcgcccggcacggcccccgccatgccctcccgcgagcgagcgcggcgcatgcgcgaggcggggacgggcgggcgggcgcacgcgcggccgcgcgcctcggcccgggcgggaggcggggcctggaagaaggggcggggcctggaggaagggcagggccgcgggctcggcactgggaacaaaggggaccggcggaaggaacgcccccagtcgatcccggagcgatgcccgggtggaccaggggcttagctccggagagaggtttcccactggattcgtgcacagcccctcccctgcggcgccggctctgcgagccccagtttcctcatctggcagctggaaacaaatccttccggaagtgtccaggacccacgaaagtgttttaatttcttttagttttggtaaaaagtactaaacgcgaccgggcgtgggggctcacgcctgtaatcccagcactttgggagaccgaggctgacggatcacttgaggtcaggagttcgaggccagtctggccaacatggtgaaaccccgtctctgctcaaaatacaaaaattagccgggcgtggtggcatgcgcctgtaatcccaggtactcgggtgactgaggcaggagaatcgcttgaacccgggaggcggaggttgcagtgagccaagatcgcaccattgcactccagcctgagcgacagagcgagaccctatctcaaataaataaatacatacataaaaagggcagggcacggtggctcacgcctgtaatcccaacactttgggaggccgaggcgggcggatcacctgaggtcaggagttcgagaccagcctggtcaacatggtaaaaccccttctctactaataacacaaaaattagctgggcatggtggcgggcgcctgtagtctcagctactcaagaggctgagtcacgagaaccgcttgaacccaggaggtggaggttgcagtgagccaagatcacaccaccgcactccagcctaggcaacagagtgaaactgtgtcaaaaaaaaaaaaaaaaagaaaaagaaaaagaaagaaagaagaaagaaagaaaagaaaagaaaaaagaaaagagaagaaaaagtactgaatgcagtggaaagtagcatttttaattttttataaagtggaagataggcccacaaagcaaaagtgcccagagctgacaaaaatctctggagaaaggacctctctggtcgttgccaaagggagcagctgacgctgttgtaaagcccgcagctcgattcccagcgtgaagtagggggtgagaatatgacagcctcctgatgatcacggaaaggtttttgtttggttgttgtgtttttgttttgttttaattttagattcggtgcgtgtgcaggtttgttacattggtatattgcgtgatgcttctaatcctttcggcaactttttcagcctttacccccctccacaccttctgccttttggaataccccatgtctgttgttcccatctttgtgtccaaatcacagaaaattttaaacagggagattaacgccataaaatctggatgctttgaaaggtaacgcccgtggctgagcgccgcggctcacacctgtaatcccagcactttgggaggccaaggtgggaggattgcttgaggcaagagtttgagaccaacctgggcaacatagcgagacaccgcccccccccttcccccgcccccagccaggtatggtgatgcacgcctgtagtcctagctgctcgggaggctgaggcaggaggattgcttcagcccaggagtttgaggttacagtttgctatggtcgtgccattgcatttcagcctgtgtgacaaagtgagaccctgtctataaagaaaaaaaagaaaggtaatgcccatgtcagtaaggaaagagtattagagaaaagagctccagaagattgataatagtgactacttttggagaacttatcagggaatatgtcttcatttattcaacaaatgtttattgagtgttccctaagtgcccagcactgcgctgctccctggagctcggtgaacaagttggacctgatccttgtccgggtagagcctacattctactgaaggagctgaatggggggagggggtgg

SEQ ID NO: 1561942 - DNA, 4001 bp, Homo sapiens
gggtttgttatgcctcgaagccaatagccaatatgcccaagtctatgagcatgtttctttcttttctttctttttttttttttatttaaagagagagggtcttgctctgtcacccaggctgaagtgcagtgctcagtgaactgcagccttcaattcttgggctcaagcgatcctcctgccttagcctcccaaatagctgggactacaggcatgcaccaccatgcccagataattatttaattttttgtacagatggggtctcactttgttgcccaggcttgagctagctagcttgcttgcttgcttgctttctctctcttcctctctctctctctttcttttttttttcagagtcttgctctgttgcctaggctggagtgcactggtgagatctcggctcattgcaacctccacctctcgggttcaagtgactctcctgcctcagccttctgaatagctgggattattggcacatgccaccacacccagctactttttgtatttttagtagagacaggctttcaccatgttggccaggctggtctcgaactcctggcctcaagtgatctgcctgcctccccctcccaaagtgctgggattacaggtgtgagccactgtgcccggccaagcatgtttctaagaaaagggcaaacaattctcaaagaggcccctaatatctaaaattggtttagaatccctgccctaggtgaatacaggaaacactatcaaaactaaaagggaacttgtagggcatcttaatcaatcaaccaagataggtaccaaggcccaaaaccatgtagaggcttgtgcaagatcacaagcagaggtgcaatttgaagctagattctcccactcttaaactagtgccggacagacgaaggcctagcacatgggctacggagccctagtagattccagtccccacactgagccaggaggggtcgctgcccagggatacctacagccatactcgagctggacaaggcgcacgctctttgtggaagcaaacacgtccaccaccgcgtagaggggctgcgcagctggcagtccccgggcgctcgggcccatgtcctcgccgttgatgatgatgtgcatgtcggccgtgccatcggggcgcgggcaaaagaggacacccaggcggctacggcgcgcggtcggaggcagcacgttcagctcatagagctggtccaagagatggctgtagagccctggccggctgcggcccaccaggcggtcccggggaatgcgaaactgctcaatgcgcagatatggttccacgaggagggttggaggtcggctgggggccgctgcctccgcctccgggcggccctcccggggcacgcggttgtggtggcgcgtgatggcgaagacccaggtgtggcccaggttgaccagatcgggcagagaaaactcgggaacgggggccagactggcggggtccagcgcggtcagaccgagacgcagatgtccgcaccagcccagctctttctcctcgatctcgaccaggaagacctggcccggggccagcggctcgcggctgaagcacacgccgtgggcgaagctctccacgcgtgtggcccgcgtcccagaggggtccacgcggatgttggcaccgtgcacccgatggaagcgggtgggagggggctccgggcgctcgagtccccagagtgcacccgaatccacgggctcggaggcagcagccatctctcggccatagggcaggccagctggcgccgggggctattttgggcggcgggcaatgatggtgaccgcaaggcgaccttgtaaggcatttcccccctgactcccttccccgagcctctgcccgggggtcctagcgccgctttctcagccatcccgcctacaacttagccgtccacaacaggatcatctgatcgcgtgcgcccgggctacgatctgcgaggcccgcggaccttgacccggcattgaccgccaccgccccccaggtccgtagggaccaaagaaggggcgggaggaagactgtcacgtggcgccggagttcacgtgactcgtacacatgacttccagtccccgggcgcctcctggagagcaaggacgcgggggagcagaggtgagctggcaccggaggctggaggggatccccgagcccgggatcggtgcgcggcagaggaggctcgcgggtgggagctggcgctggggccggggcttccctcgcggaggcgccgccagcaactccccgggggctgctgcacggaagcgctgaggagcgagtcaacagcccctctgctgcctcccgtagatgatccgagccgcgccgccgccgctgttcctgctgctgctgctgctgctgctgctagtgtcctgggcgtcccgaggcgaggcagcccccgaccaggacgagatccagcgcctccccgggctggccaagcagccgtctttccgccagtactccggctacctcaaaggctccggctccaagcacctccactactggtctgccgccctgccttctgggcgggattgggagaagagatgacggatgagggatggggggtagttctgcagacccctgaggatgcctgggagccgggagggctggaaagggcccctccaactgcgccaaccctgccctgacccccctcccaggtttgtggagtcccagaaggatcccgagaacagccctgtggtgctttggctcaatgggggtcccggctgcagctcactagatgggctcctcacagagcatggccccttcctggtgagtggacagcagggggaaagcacagttcccaaagtaaaaggctggggaaagcgagagaggggctttgtgattttccaaaaagtttccttccttctaagcctcgggattttcctctatgccattggctttgctgcctgtacctctcagaggttttacccacatgtaaagtgcctctcatggtggccctttccctccacccagctggcccttgggacttactcagccatctctttcctcctcaggtccagccagatggtgtcaccctggagtacaacccctattcttggaatctggtatagctggagctgtgggtgtgtctgggcacttggatggggtggcatttagctaatttttccctcccctctagattgccaatgtgttatacctggagtccccagctggggtgggcttctcctactccgatgacaagttttatgcaactaatgacactgaggtgagtctggtgcctgcccatctgccccaggctccccggtcctccatccatggcatgatgctgggagagagagcatggccttggagtctacttttcgctctgtcatatgctattgtggtatggtggccagtcacttcctcttgcacaaatagggtgggttaatgtcattatctctgaagttctttccagttcaaataccaaagcttcctgattccctctgtcttgctctgccatccccaggtcgcccagagcaattttgaggcccttcaagatttcttccgcctctttccggagtacaagaacaacaaacttttcctgaccggggagagctatgctggcatctacatccccaccctggccgtgctggtcatgcaggatcccagcatgaaccttcaggtgcagggtagctgcaggagggaagggaggtagcttgaggctgtggccttacagttagcaaggtcagactgactggtcaatgtccccatccaacccagcttcctgcataacctccccaccaccggctgccctaggtctgtctgtgtgcctcccacacaggaaactcacctgtcaggctgccagctctgtgttttgcattgagtggcctctcatacccaccggcctacataaaccaccctgggtttcagcttccggattgctgaaggtctgggtggtagggtgagggaggctcttcctttttgccctccacatgagctgagcaccctgggtgtttcacaggggctggctgtgggcaatggactctcctcctatgagcagaatgacaactccctggtctactttgcctac

SEQ ID NO: 1561943 - DNA, 4001 bp, Homo sapiens
tgaaaccttagcagaactagttcatacacctggggcacagagttagcagcctcaataaaattcgaggcttgtgttagatcacacagtaaaacagaagcccagtttctcatccaagttctttctctctctctctctttccaaatggagctaaatttggcattaggctgacctccacccccaccacgagaacatcaaacacccggtttcagtatttatgacagtaaaaaccctttctcgcccttaatatatctgtcttctgtctgagagcattgcttttacagatgatacgatatcagtaaattttttttgccattatgtcataggcttgaccactagcagaggacaggataaactggtacccgttaaaacgttcgaagtcctggcagggtcttgctttcaaaagcgcagctcagctaaaactatgtgtcattgaggtctgccgtggcaaagcacaccgtttacctaacccaaggcatttggcttcaatctagttaaaaaaaaaaaaaagaaagaaagagagagaaagaaaagaaagaaagagagagaaaagaaagaaagaaagagagagaaagaaaagaaagaaagaaagagagagaaagaaaagaaagaaagaaagaaagaaagaaagaaagaaagaaagaaagaaagaaagaaagcaagcaagcaagcaagcaagcaagcaagcaagcaagcaagcaaaagcctctcaggtttatttactgaaattgtcatttcttcccccccccacccccacaccccgaactttaatcagccacgcaaagcacaaaacctacattcaactctgattttatgacaggaggctaactcctcctccgcgaatttatttcacttaactctcgaagcccctcccacttggcagccaggccctgcagcccccaacgcagtgctcccctctgaaaaacacaacgctttgcccatttccacttttaaagaccgattcgttattgtggagccaaagcccctccgcaatcccgaccagatgggacattttcatatcttatgctccttatagttaaccccctcccataagatccaagtggtgtgataccaggactaaatccaagagaagggggaaagaagcagaaacagggaaagtacagtgtaatcagatccccaaacaaactgatggtacattgcactttaaaggggtagctggaggactctatccagcaggcacatcaaaaagggggaagaaaatagtttaaatgtcccagagcatccgctgctgctgtaactgttagaaagcaaagtcttccttactatacttgctgtatagtaaaatgccaagcctgttctcttaaaagaaaaaaaagtaataataataatactgcagcgttatggcatttgctgtcaaaagccgagtgctgaaacggttaaacagccagcggttagtagcgagaatccctcccggtgtcccgtggagaggaaaatcctcccgacagactggcctagggaatcccggcctgggacacttccctgcccccgcgtaaagttgtccaaagtcgccttcccaagtgtcccttccctggccggggcgcgggcgcccctccgcgggccccgctacctgtgcgccgagggcgagcggggtccccaggcctcccgcaccgacctctgccgggagctgaaagtgctgcccgggacgggagcagcaggaaagggccgggaggagcgagcggaaaaggctggaagggatcgagagtcagttaccttggtccacagaccccatgatgcggaggggatggcagtgccccagtctgaacgcagcctctctctgcatctggagggcacggggacttggcgcgtgtttggaaagggggatctgtttgtatcgaccagcagccgaggggacgccgtcttctctaccgcgtgcccgcggggctgccctggccgaggagcctcggagcgacccgggagctgcgcgcctcccggctcccggctcggcggagtcggcgcggctccgcgatccggcttactccagaggcaacgcgacttccttccccgcgctccgtgtttataggctttcaatgcagtaaaataacgggattccctcactgtttcctcctgtttatccagcgccatggaaaccactggatcccgtccatctccaaaactaagggctttcctgcaaacttcacactcaggaatccatgacgtcgcctcctccgcggccagccagctccgtggctccttcggccgccagcacaagtccctgattgttcgggagaaaagtctgggagagggagcgaagcgggcgacggcgagaagaagggggtgggggcgtgcgagtgtccaagtcagccctgcaggagctccaggcggctgtttgcaaggagtgcccagccaccgccttccctggcccgtggcagcttttcataaatcaagcccgagactcccaagccccccatttgccaagcgggcgcctcttggagaaagctgcccagggttcaaatcaacaccccaggttgtccaagctcctggacgtttgcccaggggcccttcccagtccctcacggcctctggctgcccagatttttgtgtgttcaaggatggtggggaggaggaagaggagaaggaggaggaaggaaaagaaataaataacggtgccttgtgtcaactctccaacttcgagaattttttttcaaagagtttatttttagattcatttagaaaatccaaggtttccagtgatgctcagaggctccagaaataatgaaatggccaaagagaagctgaaaccaggcaacccatgtgtttacacatgctctgaataaacaggaaaataaagagaaaggatatcatgaactttgcacagtgtccagaagaaagtccttgcgatgccacgcatggttcacagcaataggccacgagacccccagaaggtccgtggggagggggagagggagaggtgcagcggtcaagatgccttttctggacttggactaggtctgcctcttcacctgcctgcagggtgggaaattctgagcccaaagataaagctggctttgaaaatggacttcagatactgttgtgagctctgataaaattgtggatagcaaccaaggctggtgactcatcacatacacaccccccctccccccgcacgctcttacagagagacttgaacttaaagaggcatcgagaggcagctggctccatccgtgggaccactctgttttccagtactggcccacaatagcctcactgggcagctcgcagacataaccactcctgctggagatagatgctggcccacagagaccagctggaactgcgcctgagaaagccccacccccagccccgcccaggggactctcttcaagcctgcctcaaccagggtggcctccagcaggacagtctaagtaatgctgctcccccagagagcagccattatctgtccacctactgtgtgccaaggaattcaaggtagggaagtctcactgactctcgagtaactcaaaaatcgtggcgccaccaaatttcttgcaaccaccctgcaaggaggggatcctctctcccactttccaaaagggaaactgaggcacatagaaggcaggtggcttgcctgttgatttacttggcaaattctggggtgcagcctttaagggcgtagagaggattcttttcagtggagcctattgaggaagactcattccctgaggcctccttcaccaaccatctgaagcaagaacagggtgaccaaccttcctggtttgcctgggattgagggggctcctagaatgtaagactttcagttttaaagctgagaaggtggaaccttccacccaaggtggaacttgggacaggttggtcatcccaggcgtgaatgaaactcaacttccttttgccagtatccagacaccaaggaagcctgctaaccattgtcttctgcagacagttactacacttagtaacactatgaatggcaacccctcacctcagtacctactaggtgccaggccctgagctagagtcatctataa

SEQ ID NO: 1561944 - DNA, 4001 bp, Homo sapiens
tggtggccaccaagcagcacttgccaagaaaaaccataaaaagtacctcccttcagatttggcttggaaactatttccccggaaatccccccaccccacccgacaaggaaaataaaagctgattaccaatctgggaggggtgtgagtattcgttccctgaaaaacatgactttaatcttaatgaacagaaagaccacggatattagtgcggatcgtttgcagattcttaattgtatcttttcaaagcaaaagatgtcctccagattgcaactctagaagactggtctcttctgttggctaattgtttccatctccagccaagacacaaaattattactaatgaccatctctgggtatccaagggaagaggatacccaaagctaaagcaaacccctcacctaacgtggccagagaggacaccgatggaagcgaaaacttcattatctgcctaacacagtgtttgtgggaaacatcaggccaccaagcctccttgacaggcttcctccacgagccagtcagcacaagcccttcctacacactagatggaggcaagcccagagtgcgtctggaagctactaacaggcctgccactgagccttcaacaagcattggctgggctgggctgggctgtcaaaatcaggaagcctggttgggttttttgttttttccaagacaacctgctaaccagaaatacacagtgaggttgggcgtgtggccgcttccccctcctcctcctcctccctctaacgaatgctcctgttaaacacgtgaagtgacagataagcattgggcccagcccggggaagtccccagcccccagcaactgagggcagttggaggcacagagtgacaaagttcaggcagaaagagcctgtgtccttctgaatccatgctgcagctgcccctcaccctaccccatcccaccacatccattaggactaagcgtagaagatcacttaatatagctcagaccaatcctcttgtgagtggtaagtgatgggttcagcagcagaacccagggaggaaatgggccggccttataataccaaaggttttaaccctctccagcatcagacagacaacctcttcctcagtttcaacacaaagtccccgtcaaccactgctcacaggaggtgatgggagctgcgtggcctcacttcagtgcctggagggaaggagcggcctcctacccttgataactgggttcagctgcaccccccttccttctttttttggcaactcctccctgctaactccattcttcgcttcctcacctcctccctccaaaggcacagaaatcatgtcccttgccctttgacagcccagtcccaggcaagaggccagcagacagcacccgccccccagccttgggacctgcctgccaccttttgttttgctgagagtgaccctcagggagcagtcatgagcaaccagaaactggtgcccctaaggggcaagagggagccgaccgccccctaagggtggcaggggccactgacgcctcccctccctggcacctgggtaggggcaccctccctccaggccccttaggaagggggacggctggagccaagaggactcctgtgcccagtccccaggcctgagcccctggcgggctcaggggccaggccaggggtagcctccaccgaccttcgttcggattcaaatactcatagtcgaagaggatggagaagtcaagctcgtcttgggggctgcccccaggctcgtggcctggggcgtccccgccgtcgggttggggctgccgctcgggggcgttcatggcgcgcagggcgggaaggctgcggggccgggggcgagggcgggcgcggctggctctgggacccctcgcagtggggctggcggaggcggctcgagcggcggggtccctttcctcgtagggacgcacgccgggtccggggacggcgcgcctggcgcagcgggtcctggacgcgcccggggaagctgagcggcggcggcgacggcggcgcgagcttcctgctccggaggcacctgttgcagcccggggaggcggggggggggggggcgtggaggcggggacagggcggccaggccggcgggggcggggccgccaccaggggaccggaggggaggggcgcgcggcctgggctggccggtgccgggaggaaggaggctgtccgcggacctgaccacactgtcccgggccaccgctgggcgctggggcggccgctgtctcccaccctccacgggtgagtgcgacacgcgctgcgcgaaccagggtctagacaagaaagctgccgccactaggacttttgccctaagggacccactggccccacactttttcctgcttttcttctccatggggtggaagggggtatccacccccttctattgcagacccgtgtctccaggcgtctccgtgtgcccacgggggcggcatgattttcacagtacttcagacacctgcatggccctgaactcaactccccagcgcctaggaaggaatcggactgacagcactagtcccccccgttacagctatgcctcctggccacctaccacgtgccaggtgctgggcacccagccggagccagacactgttgccctcggaagctcaggctctggtagtgggagaggcctgaaggagagaaacaggacaaaaagcatctgcttatggggccaggagagaactcaccagggtatgggataaaggttggggtggctttagtcccttgggtggtcaaggaggacctctctgaggaggtgacatttgaagaaacctgattgatgaggcgatcttggggaagtgtgttctggcagtgagaaccaaaacacagagccagagctcgaaggggctgggtgtgctggagggagaacgaggagtacagttctgatggggcggttggcaagtgacaaacacgcctggctgcttgtttaaagcatgattcccaggcccctccctggagcttctgattccataagtctgaatacagactcgtgaatgtgtatttttaattaagcacccaacgtgagcattaatgaacaggtacatttggcaaacactgcataaggacccagtaactaaagaacaccctccaataaaactctgccagggggctccaccaacttagctgaagttggaaacagactcacagaggtagaaaagatcaaaacagtggtcttcaacccttcccacatattagaatcacctgggacacctttttaaactcccgtgctgggctgcaatccaaacccactgaagcagaattcctaatttttttttttttttttttttttttttttggagacggagtctcgctctgtcgcccaggctggagtgcagtggcgcgatcttggctcattgcaagctctgccttctgggttcacgccattctcctgcctcagcctcccgagtagctgggactacaggcgccagccaccatgcctggctacttttttgtatttttagtagagatggggtttcactgtgttagccaggaaggtcttgatctcctgacctcgtgatccacccgcctcggcctccccaagtgctgggattacaggtgtgagccaccacgcccggcctgaaaatttttttaaacttcagatgaatctaaggtgcagccagtgttgaggatgagaagattagacgggagaggtcttaagatcctcgtgagaaccacagcttgacctcaagtgattcgaatccttccccatgtgccaggaggaattgaggacacgcattcttcaggggagccatctcagctccattaaggggatttgtgccaagccatccatcattccacaaatatttattgagcacctgcctggcactgccacaagatgttggggatgcaaccatcaacaagccacagcctctcccttcatcatgcttatgccctgaaagcaaagtagcacagttatgaacggggttttcaaaattgcactcagaccagtggttcttaacccagactacacattagaatcacctggagagctgttaaaatttgtattcaacg

SEQ ID NO: 1561945 - DNA, 4001 bp, Homo sapiens
gtggtaataaacactttatcagcattgtcttatttaatccacccagtaaccctacagagtagaaactaccacaatctctgttttaaatgaggaaaataaggctcaaagaaattagataacttgcccaagtcatttagccaggaaatatgggaaccaatcaaatgcctgcagtcaaactccaaggctgctctttgaatctcttccagaaagaatccaaaaccatttctacctccatgcacacctaccaagaaagaaatgcctcccacaggccactgcccctctttgaccttagaacctcctagactcctgtgtactaacctgacgagcacgttccatggctgcctcactctcccagccataagcatgtgtccgggagtgtgggttcccatagtagttgattaggtaagggagcatggcatcaagcacccgggggtcctgaacacaacagaacagatcattttccttgagcgcatcgtcaattcaggtcccactccacccctcagacctggccaccctgccttaagacactctcaacccctcaggcactgcctagaggaggcctcaaacattcttttgttcccacaaaactacccaccaaatatcaacctaatacactcccactcacaacccatcccaactcggattgttctgcctcccctcaggtagtctacaaacactgccttgttccgacatctgtttctgctggtgtttccattcctgccaggtaatgtgatctataaggggctgggacaggacagggcctaggcaaacacccctggtcacacattggtgaaaacttgcattagtcttttaacccgtttaatacttgtccaagttcacacagttactaagtggccgttctgctcattccagagcccatgcttttaactaatactatagagcctgcgctgaagtgatctgaccaaggtcaattgctagtgagtagtaaagccaatgccagtggcctcgaatttaagcctcccgactcctcgctcagtgctttttccagcacaccttcacggctctcacttctccagggattcagccatttctttgcgtgatcacgcccatcatttacttcctataagcagccttgggaaaagcttcatccttaccagaggagttgtagcttgcacatccatatagagaggtcgcagcactggccccacctccggggcagcggctgtatctgcgggaaccgcagactgaggagcacggtctccaactgataaaaaatggaacggagtagccaagtaagaccgaaggcaactatgaacgcatggcatccaaagggcagaaggaaaaatctggctggaggtgagataagtgtaagggatgctagggtcgaatctcaatggaaagaaaacaacaccagatacctgacacgctgtaaaaggaggtaagggagagggagagagggttcctggagggggtgttgagttgatattcaaatggtatcgtaggaaggaaggctctaaagggcaaagacgtttagaaggaacgtggagccagagtaggtgcagtcccttctgaccgaaggtaacggtctgcacgggagcccggagcagcatctgtaacttggccaggagcggtctgaaggacgcgcctccacggctctgggggcctgtcgcgcagggtgcgaggggtggtgcgccggggtcaaccgttcggggacccgcctaagaaagtttgagggatgtgtcatttgagagaagggtcagagggtctgggcagcagggtggacaggaaggctccggaatattcagttgcgtcgccgcgcggaggggacaggtccgcgcctcccggagagcgggacccgagcgtaccgcgcaggcgcagcccccgagtgggcgccgcgggcttcggccctggagccgctgtcaccgccactgccgcccgcctccaagcggctcggagcagcatggtcccgctggcagagcccaccttccgaagccgctgcagtcctgggccccaggctcccggaagtgctgcccggcgctccggaagcgattcatcgggccgcgagcgccctccccgtcgttttccgtgagagacgtagagctgagcgacccagcccgcgagcgaggtgaggtaggcgccgggcgacgcggggccggaacgcgaagagggtggtggagtcgggctacccactgattttccttcccttacttcccctgagcccttgggcccacttcccagcctaccgcttccgtccccgcccgactcttgggccagcgcctgggcccacactttcctatcccccgcagatgccggtggccgtgggtccctacggacagtcccagccaagctgcttcgaccgtgtcaaaatgggcttcgtgatgggttgcgccgtgggcatggcggccggggcgctcttcggcaccttttcctgtctcaggtgaggggcgcgggcggtgatctctgggcaggacaaccagaccttccggccctgccccattcggcctggagcctgaacacagcctccttctttcgacttccctctctgtcccctcgcgagccagactcattccaaaccaccttcaatctgtaaagtcaggttggaagcgtcagtgcttaagaatttgagctttagagtcaaaatgctttctggcccttttcttactggttcggtgactttaggcaagttggagactgggtttccttaagtgtagaatgaagacagtagcatctaacttatagagttgtaaaaattcgatcagcacactttgcacagcatctggcacatattaagtgctcagtaactagttactactgttgcttttatttttttttccaattgcgcataaggaaagaaactcgttcagcggttttactattctggatacaggatacagagataaagcagttaaactttacactctaaaggtcattttcacatttagaggctgttattgccatatccctagattgtaaattatcatttacagagcacttactctatgttaagcactgtgctaaatactgtagttttcaaaatcctgtaaataatgttgagatgcccattttacacttgacactatgtgtaaattgtagagctgactcttgaacccccaccttactccaaaatcattaacaccaagaaactaaaagacagatgtctttattgggtcttaaactgcaggcaacaccagtcaaaaaagctggtttctctatgtattttacactgcatctgctgcctcccacaaactgaaggcagttaatacgacatccaccagaaaaataccctggagacccagatggatctttttccttctcattacccaccccaggtagtaagatataatatccagtaagtggaaaatcagatgtaggggttgctagactagtgttagcaaaaaattggaaaggagcagttaatactctttctgatatttttgttaccaaatagctccatcttggtttcctcctcaggatcggaatgcggggtcgagagctgatgggcggcattgggaaaaccatgatgcagagtggcggcacctttggcacattcatggccattgggatgggcatccgatgctaaccatggttgccaactacatctgtcccttcccatcaatcccagcccatgtactaataaaagaaagtctttgagtagtcagtgtccctctcttaaaggaatattcttctctcagcctattatccagctttgccaaggatcttctgcactaaagagatggactaacgtaatgactagggttagtatctctttcacaaggcctgcctctcttaatccaaaattggaaaacttgggagtgtctagtattttccatagatactattcaactaattactcagtacaactctgtgcttgttactacggtcaccattttaaaggagaaaaactacttcaaaaaatggatttataagccgaaatttcctcaaggtcacacattgcattatttccaaagcaatgttcatcctgaggttggttgtttccttggtcgcccaggttggagtgcagtggcacgatctcggcttac

SEQ ID NO: 1561946 - DNA, 4001 bp, Homo sapiens
tgttggtgggagtgtaaattagttcaaccattgtggaagacagtgtggcgattcctcaaggatctagaaccagaaataacatttgacccggtgatcccattactgggtatatacccaaaggactataaatcattctactataaagacacataaacgtgtatgtttattgcagcactatttacaatagcaaagacttggaaccaacccaaatgcccatcacggatagactgaataaagaaaatgtggtacagatacaccatggaatactacgtagccataaaaaagaatgagttcatgtcctttgcagggacatgcataaagtgggaagccatcattctcagcaaactaacacaagaacagaaaaccaaacaccgcatgttctcactcataagtgggagttgacaatgagaacacatggacacagggaggggaacatcacacacctcacacatcgggacctgtcggggcgggtggggggcaagaggagggagagcattaggacaaatacctaatgtatgtggggcttaaaatctagatgacgggttgataggtgcagcaaaccatcatggcacatgtatacccatgtaacaaaccagaacgttctgcacatgtatcccagaacttaaagtaaaataaaattaaaaaacaaaaacaaaacaaaacaaaaacttggccgggtgcagtggctcacgcctgtaatcccagaactttgggaggccgaggcagctggatcacctgaaggtcagaagttcgagaccagcctggccaacatggtgaaacccccatctccactaaaaacacaaaaaattagctgggcgtgtaatcccagctactcgggaggctgaggcaggagaatcgcttgaatccgggaggcagaggttgcagtgagccgagatggcgccattgcactccagcctgggcaacaagagtgaaacttcgtttcaaaaacagcaacaacaacaagaacaacaacaagaagaacaaaaactctgcttttaaaagtattttaagtccagtgtgaaaaacctagaagtcacagcaaaggccgctaagaaacttaccattactcatgacccctcttactactgaccttgaaaatcacttgcccttctccaaggccccgccagcttcatgggtctcttcctgaacctcctccctagttccagggcttggcctaagtctcacagagcagaaagaaacgtggccacccttcctcacgtgagtcctgtgcaaacatacagccccacacagagctcctaacaatggggcatcagtacccaggcacgatcgatgattatgaacccaacgcgatcagagactcccacatggtgtgtgtgactgcgcgcacaggcgggaggaaaggggcgaatctgcaaaacgagtacaacagataaaattcgcaacagacttctacaccctttcaatcaaccgtcccaagcgccacgaacgcgggtcccgctccgtggggggccgcagccacactggcaggagggaatcctgggcctcgaccagacgccggcggcgtcaggagaaacggcccgcgctgggcaggcggcgggcaccgcgtagctcattaccacggggggccccggccaaggccgcccgcctcaggccgagccttggggctgtgctggacccgggccctcgttcgcacggcgcccgcgccgccgccgtcgggaaaccgggttttcaagcgttcggcccagcgggcgctgtattttagggcgtgacccccgccccgccctcgagggcgaccggaagagcaggcaccacagcagatgcgccgagtctgcgccccgcaccgcgaggagcacccgaggccgcgctcccggagccgggtctggtgactaaggcgcgggtcgcgacgcaggggcggccccggactctcgaccccaccagccgcctgaatgtcccgccggacgcccgggccggctcacctgggaggcgcctccgccgtccgcccgcgcggggccaggagcgcggcaccacccccgtaccgccggccgctctttgtgtctggaggccgcgacgcaacactcctcccggcctcgaggcaccgccccctcggtgtcccggcgcagtgggcgaacagggggcggggcgagcgaacgggagagggggcgggtcgggtccgggattgcggggcggggtgggggcaaggcggcctccgcaaatctcagggcggctctggccagtttggagcctggggtgacccttggagctgacctcgctggtccctgtcggagccctgcgcgctgcggagcttggcggttcgcagctctcggggtagcatcttctggaaacaagcccggaggccggccaggcaggggtaataccccaaacccaccactgaggaaaccgcgacttaaaacctaggtcgtcacgtttccaccgcatattaaatcaatacgggttgagcatccctaatccaaacatctgaaatccgaaatgcttcaaaatctgaaagtttttgagcgctgacctgatgctcaaaggaaatgcacattggagcacttcttttttcttcttttaactttcttttcttttgagaaaggctgtcacttctgctgcccagcctgggatgcagtggcgcggtcatggctcactacagcctcgactttcccggctatggcgatcctcccgcctcagcgtcccaacccccagtagctgggactgcaggcatctgccaccatgtccgctaatttttgtatttttagcacagagtctcactgtgttgcccaggctggtctcgaactcctaggctcaagggatggatccaccgcctcggcctcccaaagtgctgggattacaggcgtgagccaccgcgcccggcctgtatttttttaagagaggaggcttcaccatgttgcccaggctggtctggaatttctggcctcaagtgatcctcccaccttggcctcccatagtgctgggattactggcatgagccaccgcacctggcctcattggagcatttctaattttggattttcagattaggggtgttcaattggtataatgcaaatattccaaaatctgaaatcctaaatgcttctggtgccaagcatctcggttaagggatattcaacctgtatatatttatcgaacacctactagggccaggcattgtcctaggggctgccaacagcggtgcaaaaaatccctggcccttatagagtttacacagaaaacaatttaaaaacgtaaatacccggccgggcatagtggctcatgcctgtcatcccagcactttggggggctgaggcaggcggatcacctgaggtcgggagttcaagaccagcctgaccaacatggagaaaccccgtctctactaaaaatacaaaattagccgggcgtgatggcatatgcctgtaatcccagctactcaggaggctgagacaggagaatcgcttgaatctgggaggcggaggttgtggttatcaagccactgcactccagcttgggcgacagagtgagactccatttcaaaaaaagaaaaaaaaaagtaaatacagccaggcacggtgactcatgcctgtaatcccagtagtttgggaggccactgtgggcagattgcctgaggacaggagttcgagaccagcgtggccaacatggtgaaacccagtgtctactgaaacacaaaaaaattagccagttgtggttaacgcgcgcctgtagtcccagctactcgtgaggctgaggcacaagaattgcatgaacccaggagtcggaggttgcagtgagctgagatcttgccactagactccagcttgggcgacagagcaagactctgtctccaaaaaataaaaataaaaacataaatatacaaaaatgtcagagagttatatcagaattacaaaatgagctacagtacactgtagcatgagaaaggtgcatatactttgtaggaactccactttagaggatgtgaggatcagaggcaaaatggggtgagaaggaagcaggatgaaagacaggctatgggggaacggagtttccaa

SEQ ID NO: 1561947 - DNA, 4001 bp, Homo sapiens
tcaaggactcttcttccccaaggcagaggaggcacagtgggctgccagattgccaacccggccaggacaaaaggcctttgacagctccctgctgcggttcagcagtgacccagaggctggccctgagaggacacggctctgcccagtccctggagagtccccaggtctgctagtgaagccctgcggccctcaagccaggatgactctttccctcttggctgcaaccaaatttccaagggcctgcatgtgcgcccatctgtctactgtccaccgcagaggtgaaacgggaacatgaccccacccgcccctctgcaccctgaggtcacatccgaccagcacagtcgtgcctcaccctgcacctgagactgaagcacccatttctcctgcccaaaccccagcaccatcaaccccagcacatcctcacaccaccttcaacagatggaaaccaatgtcactagtgtcccccaaagcagcctcacttcctgacgctcatgcatcaccagctgccactggccatgctccaaactggggtaccgtccaggctggtgcctgtccttcatgaggtcatccgacgggcactggagtcttcgagtgcccacccttgctctccccattcctgcttccagcccctccccaccagtctcctaagggactcctgccattgaggagccactcactgaaagataccaactgttccaaggcctgggatggtccttgggcccccagcctgttgcaggacctcaggttatctccgcggccccagcgagcctcccaggaaagcgccggaagctccttccttcctgcaggaaggacacgatgcctccgccgtccctaggtccgcccgcaagcctgtgcccctaagccgagcacaggacacccaagctgcacagccacggactccgagggtttcgctgctcaaaactctgaaacagccccttctggcccttctagcttcaagaggaggaggggggcgcgcggtccagctgcgctccgcagcccacaaagcatcgtttcctttttaagacgggagacccagggccaattagcatcgaagcaaagcagcttccccagcctggacaggcgaggcctttgtttagccccctcccccgagggcaccgggctccgggaaagaatccgccccccaggcgtcccagggagcttcggactccggggcagaatggaaacttggccgagggagccccgaccaatcccgacaccgaagacgcccgcgctgcgccccgggcatcggctccagccccttctcgcctccgcgtagctccacgccgggcggaatggggggcggcgggggcgggcggggccggtttgctcgcgggtgggcaggacgttctcaccccccgccccctacactcgcaaactcgcaggcacagcctccgtcatcgccccacccgaatctcagaatcggaacttggccgctcactcggcgcccggggccggctgcgggaaacgctcgcacagacagagacaggcgcgcacccgggggcgcacccggggccacacacgcctccccaggcgatggggtccaggcggccccgcccgaaggcttccgtccggccagcccatccagccgctgccccgcacctgtccccgccgctccggacccgcggccgccccccgcgcacgcacaccggggacgggacccggcgccgcgactccccacgccccgcaggcgacgccaccttcggccgtagcagcccggggtccgaggcatcccccctcggagctggcgcgggacccagcgaacgggccccggggcggagggacgcttcgggaccccacagccgccgtgggtcgggcaccgggggctccaggaggctcgcggaggggtcgccactcaccagctgaaaagcgcagaggacgacgagcgcgcagcggccggagcaggagcccatggtgcccgcctatacaggaggcccccgggtgccccgcgctcggcccccgcccccgctccgcccgctccccacgcgccgcagcctggaccccgccccctccgcatcccgttcccccctcctccccgcaacccccggcccagccccagccccgggtaacagctgcgctgcgtctcccctcccacccccgcctgcggcccctgggggcttcgcgccggccggagagggggaccgttcttaaaggggcgatggcgcggcctctcgggtagcgaggggcggcgccgcggccccaggacagacctgcagctgaggggagcccgccctggacgcggcagggatgaccggcgtccgccccctcctgcaggatgacctgcccagcacctgctcccgccgtgcgccctccggcgtgagatccccatcaaccttccccgtgtggggtctgagcgacccgcatccgcgaggcgttttctctgagagtctcagagattccttggcttggagaagtcctggacccgggtccagagctcagaggtcccctccacgggcgggcgggccgaggactcaggaggagggagtgagccgggctcgcccacctcccacagggagctcctctgctggaaggctgagacctgaaggccaggtctgctccaactgcctggaccggcctcctgcctgcgcgggaggggcctagggagcctcgggttgggacagcctgaggccttgtgcacggtggaggcaggacccagctgcccagggcaggtcctggggtctggatggggctgaaccccgtaaagcctgcgcttccggaagaagcttgcgctggaggcagggaagggtcccagccaggcccgagaggagcaggacgtggatacagtgagccagagtgtcagccggtcggaaagcccatgggggcagaacagcgggagatcagggcaggtggccgggccagggctgccacttggtctttactcagtggcagggcaggctccctgactgccacccaccgcctgaggagcctgagatgggtttcccatggcaacctgaattcctgccccactcgagattttatgaattactgaggattcttgccttcctaattttggttgtgtgtcccacagtcccggggatcaggaggggttaacagaagaccaagggtcaggttttctgcactgcggggagccaccccagatctgtagtccaggctcatgggcgggtgagggggtagcttccaagccccaaaggttagagagcaaaggtgtggccagttgtggagggagggggagcgtcaggttgtttgcagtgctggggagataagaatattcaggaatcagatggtggtgatggttgcacagctctgtgaatatactgcagcccactgagcactacactgtaaaggggtgactattatggtgtgaggattatatcccgatttttaaaagatgtgaaaaaattaatgtttatttatacgatatataagacattgatttttaaatacagcggtaccatccccgtcccccataaccctggttcctccaggcacttggagccattggtggaaggacgtggactcctagaaggtgattcgcaaaggtgccacgtaagcagaggagccgggtaagcagaggcccagtgccacgtaagcagaggaaggcccggagccggctgctgaggtcctgagggagagggaggggcacctgctcagccttgcctgtgtgtgtggatccttctctctcaggggaagctgcctggacatgcgtgcgccttgcagttctgtcctgccaggctgcctgctcttcctcttgaaagcaaaagacttcacttgctgaggatgcaacgatgctctagtgtcccttgcaggagccagtgtcagagccaggagccgtcgtgggcatcccctgctccaaagttacgagttctggtgaaggggtcaggacagcccctttgagagttcagcagagcaggtctgcacaggtcccacgccgtgcacagcccacactccacctgccctggtgcacactgacggcagcagccagccgcggggaccccaggcgcagtgttgcctcgtgaacgttagagcagcctccagaggcgggt

SEQ ID NO: 1561948 - DNA, 4001 bp, Homo sapiens
gcgcgctgtaggcagaaaagggaatgcccgcctggaaggtggcggctgccaggtcctgggctttgagcgcgtgacatggtttgccgtccctgaccaagacgggcacggccacccggcgcggcgagggcaggggcgtcacctccatacctttctcggcccgggcgcgcttcatcttgtagcggtggttctggaaccagatcttgacctgcgtgggcgtgaggcggatgaggctggccaggtgttcgcgctcgggcgccgacaggtaccgctgctgccgaaagcgccgctccagctcgtaggtctgcgccttggagaaaagcactcgccgctttcgcttcttgccggcgtcccccccgccgcccggggtctccttgtcattgtccggtgactcgtcggccgagggctccggggacttggagcttgagtcctgagggggcgccccggcagccagaccgtgcactggggggagggggagagagaagcgcgtcaggcgtctggaggccgcgcgcagcctgcaccagactcggagcaccctggatcctccgtgcgaccctggacctccgcgcctggcagcccagccccgctgcctttgccatgacccctgccttcctctacgcctgacgaagacgtcgggacctcccagggtaaagagggaaatccgtaggagtgggggctaggggctcgcctttcaaggggctcacatagtgtgggtgagaatttggggggggaagtggcactgaagatcatcgcgggttaagggctccggcgcccttaagcggtttcctctccggcgagacgtgggcagatttttaaaagaaataccccacaatcccagcattgatcggctcggccatttaaggcaggtttttgggggctttcgtttctgctttcgggccttctagacaccccctgcactgcacaaagcgtcctctatgatcgcgcagggggcagggtgagctatttatacccgggccacccgaagcctccccaccctccacccgtacccggacgaggctcgctggctacctccagggcgccaggccagtccctcccagcggccggagtccgggggctgcggctggagccatcggtccgggttgacatcatataccagcccctgggaggtatagcccttctccctctttctccttaacttctcgcattgaaaaaaattttggagaccaagttctttcccggaactaaggaggcttgaagaggagggcagaggacatcctatacaggtgttaaaaatctttctacggatccgagtgagggggtccgggcttacatggccccttcccctttcactcccagcgtccaacccgggctgcggctgcaggaatggaggggaccacggcctcggcagccaagttttgctacttacgggagtactgaaggccctcggtgctggccagccagcgcgtgtacgggttgtcgctgctgtcgtagaaggggttcttcaggggcaggctctgcaccgcgtccagggcgccctgccccagcggcccggccctcttggctggctcgggcccctcgttctcttcctccggaccttcggccacagagccctcctcatcgttggtgtccggcaggtctaagatgtccttgaccgaaaaccccgtctttgtgttggtcagcgacatggttcgagaccccaaaatttatgtcgcaaagttgtagcttcacttggtcaattcgtggcgctcccctgccccggcgggcgggggaggggggagttggggggagggactgggggaggggaggggggaattggctttaattattgggataattattatttttaaaaagagaaagaaactggggatggggaggaaaaaaatgaagcccaacccagtgcctctctctgtcttctttgaaagcacgcggaaatggacgcaggaagccgggcggcctgcgcgccgagcgccgcgggccccggccttagtttctaactccaggaggggtgccaaggcggcgtcagctcgggctccggcggccgctcggcgcgcggtggcggctggtggcgaggaaaaaatgggccattgcccgagcgatcagtccatataaggctgggctccactcacgaacctggggaggcggggagagggggagaaagagagggagggagggaaagaaagagggagggagggggagcgagagagggagcgggagaagggtggaaaaaagggggaagagacattaaaaacgcaaaggttggccacgtgtgggcgggtcttgggagtcaagtggatgaagacagtatttgcagatgtgaaattgtgggttttggggagctccgcgctcccagccaacggccctctagagcaagatgagaggtgtaacgtgtcaattaattgcaaagacggggcgagcctttttttttttaaacccagtatttacatacaaagggccaccgcgtcgctcgcgagtccacacacttgaaagggccgttttaacaaattgcatcttaaaaaaggtgggggtggggaggaggaggggagaaaacaaaacagaaaccaggaggagggaaaaaatcctctttaacattcaccggttcctacctccccgcccccgcgcgcccacccccggcaagccggaaaattggcgatttgtggcgcctttggaaaagggggagggggcgaaggccgagctgcggaaatctctcctttccatcgttggtggttgcctaaacaagatccggttcaaatggcaagagcccaacttctgtaagcctcctaggtcaatattttggttgaggcttaaggatgagtgctagaaatgacaaggcaagtaattgattccagttaaccgcgagagagcccaaaacccaggagagagctccgctccgggccggccagagccaccaccaagcgacccgcccccttccagccgccctttatttgctaaagactcatttatttccttcactccgcctccccccacctcccacccccaaccccccgcctccacctctctgcggccaaggaggacgcgcagttcactttctgctttgcgggcggtcccggggagggcggggtaagagtgaggagctccaacttcgtctggggtcggaccctggccctgctgcctctgggctctgcgggcctctttccccgggtggaggaaagggcagacggccctgctctttcctgccctctattatccctccctctccggccccctccctctccagcctctggctagaggtggagcagcgggaaggcggcggggcgggattgcgggggtgggggtgggggttgtgtctccagcctgggtgaagacccagaaagctgcgggggaggggggtcgctgggtggcccgacgatgcctcgttttctccccagttttcttctcccacgcgagttctttagtgtggtctctttttggacgccttgggtgcgttcggagtacgcgctccacgtttccaggttaagtcaggttagtgtgaagtttccagccactctcggctctgggaactgaactttcccgggacttgcacttcctcctcggcgctggggttggaaaagaccacgccgcatttgccaccccttcttctagttaaaacttttttggggggggggtgcaggggtgtagattggctacctgatgctcgttcgccccagaggagtgtcaggaaggagctttgtctgggggcggggaggggcacagaaggccacccctgcggggtccaggtctagtcttcccacaacctgggctcctccgcgcgggccaagctgagcgcgcgggcaccgggtcctcctcgcgcgcagctgcagcggacgccgccgcgccccagctgcccccgggttgccagcgctgggtgagggcacctctccccgagccgctcggcggctttctgcagccctagctgcctcgcccccagtatgtgacgtgggtgacaatggcccaggttagagcaagcccctcgtcggcgcgtcctgggtggtcggacccgggcaaacacaaatacaaaccgattgctaagctgcggacaatgagcg

SEQ ID NO: 1561949 - DNA, 4001 bp, Homo sapiens
ctctgcaataatgttgctatgtgtatgatccaccttgagctacacttcaatttactttcaatcaaacattaatgaaattgcacttagggggcccttcgaaaattaatctcccaagataaattccacttcaaaaaggactgattgttaaagctgggttgatttttatagttacaaacgccaacaaagtttccaactttgagagctgtagttaagaatgccgtgtgaacttctccaccttttcgcgtcatttaagaacttctaggaggagaaaatcaccacctcaaagcctcgtggcataatgttacactactcggtttccgggctgtcgctgtcccccgcccccagcaagaggttcacagcctgctcctctctgagaccggttcgttttgaatcgcagtttacacgcgcgagtcggttttcgcatgcctcccccatccgttctagcagtttcttgcagacccttcgggtgcaccaggacctagccccggggcgccctcgctgtcaccacgtcctgccatagagcaggttggcgcccaggacgccgccgctgtactccccggcggccgcgtccagggccgccaggccgccccccgggccgtgcagcgcgggtgggctgggcgacagctcctccagctcaggtgctggcgtcggggccggcggctgcggaccggcctggccgggggtgggcgtgctggcgccgttctggcacggcttgccgtccttgaccagcacaggcaccgccacgcggcgcggggacggcggcggaggcggcggcgggcccaggccgccctcctgctgcagctgctgcgccgccttgtccttggcctgccgtttcatcttgtaccggtggttctggaaccagatcttgacctgcgtgggcgtcaggtggatcatgctggccaggtgctcgcgctcgggcgccgacaggtacttctgctgcttgaagcgccgctccagctcgtagacctgcgcctgcgagaagagcacgcggcgcttccttcgcggagcggctgccgccgccgccgcgtgcagcgggcccagcgacttggcggcgtccgcgatgccggtcagcgaccccatgccggccacattcacgcccgccgacggccccatgaacctggagactggggaagagtcccaagggggaaggcgagtgagctccaggcccgccgggagccggtccagccgccgctctcttcacgccgcggccgcgacgccgccgggccctcgctgaatcccaagaccccctgaccgccgcggcctccggccccagcacgccccgcgcgccctcggcgggtcccagagcaccacgccctcaacgggtcccaggacgccgcgcgcgttcccggtcaggtcccaggaccccccgcgcgcccagggtccccagaaaccccgcgcgtcccgggccgcgtcccaggacgccccgcgcgcccgctcggccccaggacctcctaagccgcgcgcaccccgtcccgcgcccccgcgcccctcggctgtggcgggaaacgcctgagccgcccgcagccccgcgctcctggcccctctcacttgacgagtagcgtgggtccgggttggcgccgtaccagccggtggccgcgccgccccgcatgccgtccgtgtaggcgggcagctcgcccatgttgcccaggccgccgttgcagtagctgcccatggcgccgtgcgggaactgcgagacgccgggcggcatgtggtaggtggcggccgccgccgccgcagctgctgccgccgccgccgcggccgccgcgttgtgacccgccatggcgtgagaaggctgcatgcccgccacggtcgccgcctgcgaggagggcccaggtggcggcgcgcggtaggcggccgcggcccccaggggcgcccccaggccgggtggcgcgccgtccatggcgccgctgaacttcttgtaggtctcctcgatggggctcaggatgtcggacacggagaagggcgtcgtgtgctttgggctcaacgacatggctcggcgggcagccaggtaggggggcctggggcgcgcgccggcaggacgcggcggccgctcgtcgccgccacctcggccgcggcagctgagcctgtgacgaggagtcggcggctcggcgagccccccgggctgcgggatctggggtttattttagtccggcgccaggtttacgacagactcggggggcggagcaacatcccaaacgagcaaacaatggtcattgacatctttttctctcgcccccccaacccccgccccataatggaggcaaaaaaaggtaaaaggggcagttgggtgtttcttggaaagatcactccccgttgcttttcccatctttgcttttcccatcctttgcttttcccatccttcgctcctccatccgcggccgttaccccagccctcgagcaccagaaatagaaactcggaggctggcgtcgaggctagacatggactccgcgcctggccccttccagatcccagttttctaaagtgacttcgcaccaaagtccggtataattgcggaatggggaacgtgctgctaagtttggggggagggtgttgcgggggcttgcttcgtcctctccagttatcagcccctcattcgctccatcacctaaagtgttaaaaaaaaaaaaaaaggctcttgggtcccaccgtaagagcgcataaagagaggaggtacaatgaccgtcctttgccattgtagggctccctaatttatgcgtttttagacccttaagcatcattttgtgggcaaccaaacgggcacttccaaattagctcaaagtatccaagcccagagaagagagaaaacacacatacactgataaatacgcagatgctaacttgtaagtattctgtttttcctctgtggggatggaaattgaacaagggaaagagggggaacatttttatttcctaaaatgtttcctactgagtttgcacttgtaaagttttttctgctttctttccctttgtgtgtgttcttactctctttctctcagtaaatatctctgacttaagtttattctcccatcactaccgtgatcaaaaagaagagaaagacaaaatatcaaaacttccaaatatttctagttgttcgcaacgggtctttttgttgttgttggaaaaatataacctgttcaagcgatatgaaaatggatgcagaaatcaggtgaaaattgtagtttctttggaaaaatacaaaaccatagataaacagatttttaaaactttgtcatcctttgacttgcagttttacccgaatacttagacattatgaactctctactaaatactgaacaagacaaagcataagacaaaagcagtgtgcaaagcatattgattaaattttgaaaacaatcttgcagcaataataatgataacgagaaaacaaagataacacttttaagttttcctggaaactggagcaggagaaagaaaaacaaggagagtgctttcttaagcaatattttgttttattttttttccagaaaagggtgtgtggaatcgatttaagtttaacctgacagtacatgtcttgaaggcaagaacagtgttacatattcctttttctgtttggttttagccctttggtggaaatgttctccatggttttgttcttaggattttaataattgttttgttcaactcagtatggttttgcaaagaatctgccctttctaggggggaaaaagccataggtcacctgtgggaaggaagtgacagacgaatgttaagagtaatgttttaatatactgtaaaaataaaatgcaaggttacaggaattgtttacaaacatcagtattgacttagcaagattaatattgctacagttttaacacgatgctacttttacaggtcttttatgaacttgaaacacatcggctaggtcttcatcctcacctgcactggaattacctacttaagaaaaacaaactaatgatacacaaagaagcacttatgtatgtatttaaacacttgctgggatccttctgaaaactacagt

SEQ ID NO: 1561950 - DNA, 4001 bp, Homo sapiens
ttggtgctgcaccaagattcagggcgtcggctggcgatgtcagaatgtccattctgctggctggtgcggtgttttgatttccatggtggggcctgctggcatggccctggcttcggggctgggatggtgctgtcccgactttgtccagatcagaatgcggtgcctatgcccagatctcaggggtctgctccccctatcccccctcctctctcgaccctgccccttagtgggaccggtgcaaaggggttgggaagggatctggtatcttcgtcattgtcggtactgcttctccgggggtctactggcccctcactgaccttgccaagtgctcctctggcgagggaacacaggggaccccacattcctgcgcggcactggctcccgtgctggccgagatgcacaggagcacctgatgatacggccgcccagggctgggagctggggcctcagttgggggctcgctgcctgcgctcccccaacacctgccgcccggtccgcgacaccgtgtatgccagcttctgcagggagtacctgaacacctgcgacgagaaacccaggacccacccttagtggagagcacccacagcatgtctgtggtgctgccgtgcccacccccgccccaccccctgccccgcccgcccatccagcgtaggctggagaggcgggcgcgggcgcagcttgtccacgagtcagggcagctggagcttttccaactgtgctgagagctgcatggcggcaagctgattggacccacaacttaggtatacctcacttctcgcaatgggctgtgtccctggaggatttcgaaaagcgaatcctacccagtaaatgcagcattccaggaacaccttgaaggaaatatgcgattcctttggcaaaggattcctttagcagggaattcttcctgcaaagggagcttttagggtaaatgattttatgggcaaagcgctttcttctgatttatctctttttacaccaagcgcttttgcctcttttttattttttttattattatttttttttttgtaaagcaattgtccttttttggaagtgctttttttccccttctatttttctctcgaggggctttttcctctaatttttttctttaaagcgtttttgcccgatccatttttttccgttagctcccttgtctaatttttttctgcagtgcgtttttaatctaatgcatttttttctgccaagtgcttttctccgatttatttttcctgcaatgcgcgtttttctgttttcctgtgaactactttttctctaattcgttgtagggttttttttttttgcgaagtaatttttattttttctgagaagtgcctttttctaacttattttttgttccacccccgcaagcgctatatgtttttttaaataaaatttctccgcaatgcgcaattttttaaggtggaaaattttcactctgcgagctgtaaagtctttcaacacagtagtgccccgcctccctcctggggtcgagtccgggtgtagcgggtttttcttaccgcgtaggtcgctaaatgcctgggtgatcgtccgcagcggtcgcccgccgcgccccgagtctttgttccctggcaggcgcgggcgcactagggagggtcagcgcgaggaggacggcgcagggaatgggcagggggcgcgcggtgccggcagcggcacttgggcaggcaaggatcgcggcaatcggaataggacgggtccgggaagcggcaatcgcgacgcagtcttgcgggttctaggggcgcgagttgggaaccctctcccacccgaaaccccgtcagacttacctgcagcagcacgcggaagatgtaccagccgatgatgagcagttcagccgaggccgccgccactgccgccatggttccaagaatggtaggtgggtggtcgagaaagagggtttgccgagatccgctggtctcggagtccgctgttgggcgcactgccgcagccgcggtggccgcgccttaagtacccgcccgccacctaagtgcgcatgcgcgccttggggggtgtttatgaggaggggtggctgggggcgctcctcattcgccaggagaggaaaaaaataatccatctgctctttccataccgacccccgcctcctgagttccatcttagcccccttccagaagattccgccgtgcttgcttttggattttgctttaaaatggaggggtaccacgactctgggtagagtacagggcgagaatgggggtgcaggtctcttagtgtggcgcccttctccccagtccctggcctgcaaatttgagctcagtctccggtgccactccaaagcctaccttggggatggatggaaaaccgaaattagggaggggtcatctgccccatagagcaaaaaacgtggtgcccctttcagaagctttggcataataggcccgtgctcggcgctcttttcctgatactgaatgagttttaagcccaggtcctctgcttcatgagggtgcctgagcgcgtaacccgtctgattctttacatctctcttacggtagcgaggagatgagaatctgcggtggaggtcgctactgtagggagctgagccagagcactgcgctttgggcgcaaaagcagtagtcacccggtatctgtaggagggatacaggaaggattggcgcccttcgtatgcacggaaggaatgagctctacggagaagtggttggaatatgcttggggatagttttctgctggacaggtcgtttcgacctcagtcttccgctcccctcccccaagccctggtaggtcggccttagccagtggggttctttgtacccgttgcgctgtgcggctggatcaccgaacggggttacgctaccgctaccggagggttgtggctaccgcagccccgtttccaagtgaggcgggtcccttttagaccgccagtcttgtgggtccctcgcacagcgcggattttcgggcgggaagaccggaatgcggtttgtgagtgtggtccccgcgcaccggtagccagccgaaagcacctctttccagcaagctgcctggcccagggaccaactggcatttgcccctatgtggatagaaaattaattttcattaaaagctcccagaggtcaggttctatacagtgccagcagcagatggaggtgtaatgatccaaacgagttcagtttggacaaagtagcatagtgactttttttctacattgactttcggagaagttggcagattctggcaaagtgacgctgggctgtttgaaaaaggcaagcttagcctaggctgccatcttaaaatatttcgaggctgtagctgcctcaggatcctttgcctgtggtctggtggccggcagtgccccgctaacagctttaactctgcacttagtgcctgagcacctatggctgtgagagatgctagatacagaaccctgtccttaccacgtgggggcacagcagggagcccttggtcgtcctttggcaaccactgggcggtattgtgaggtctgggccccttgaggacgggctgcagccccaggaggcgatacatgatctctgctgggcagggcccaggcaaagccagcccactgtgtgaaaccgtgccaaagagccctctccccgatcccccaggagaagccccggggagacatcccaggaagcttcccgaattagtgacttggagaggagtagaactttcacgggtgggcagggaggaaagggcatttcacatttgctgttgttaaccatgatccattttcccaaataagtatacattctgttcctgttttttttttttttttctttttttttttttttttttgtctgtctgtctgttctttgtctgtttgtctgttgtgttgacttttctcttcaggatccctgctgccttggtgatcccgggctgacagccagagagcacagcggctcagctcctggagagtgagggttgaagaaagcggagggcagccgcctgcgcccgctggctcccattaggtcggttcctgcagcggtgcccggcag

SEQ ID NO: 1561951 - DNA, 4001 bp, Homo sapiens
cccctctgcccggccccctgttcccggtccggccggaggcggcagcggcgcagatgggctgctggcggccgcagcgcggttatcagcgctcctcgcagatgggccgcccgccctccgcgctcgcggctcccactccccgcggcctgcagccccgtcccctgggcgcggggggaggcgcctccggatctgctccccggctcccgcctccctccctcgcggccccctcaccccgcgggcccggcccgggcggccgcggagggggagggggaggggacaagtgcacttttcgtaacgaccgaatcaattgtgtgtgaagagcccgctccggccggggacggggctgagcgcggggcgggcgggccggccgggggaggagcgcggaggggggagcgggggagcgggggagggagggaggccggcgcggggcggcccggctctcgcgctccggccggggagggagcaaggagggcggggggaggccggcgcggcccgaccgggccgggggcggaacgcactaatggagggtctcggcgacggaaagttcaaagctcagcagcgccccgggagcggccgccccccccccagcccccaccctctgcagaacaatgaggtcccggcgggggagccgcggggcccgcgccgcacgccctctccagggcgccccgggccagaggggacgcccccgcccggccgcccgcctcctccctttaggcggctgcggttccccgccccctcccccacgccaccccgcccggaccgggccggcccgggggacgggggaggggaggggatggataggtcaggcctcccccgtcccatgaagggggaacgaggggcccggggggctgagggggcgccccacccacccgcgggaggctgctcctgcgccaggctgcggctccggccgcccctccccgggccagccccgggtggggtcggggcgacagtgcccgggcgggccccctcccctggcgctgggaggcccggcggactccccgtcccgcggctgcccctgcctccctcccccccccccaccccgcggcaccaccctccgcgcgcgcacacacacacacacacacacacacacacacacacaccgcccagccggcccgggggcgggagcgcgaggcgcccgggacaggcagccccggggcgggcggggggaggctcgggctccagagcagccgcctgctggcggggggaggggacaagaggacggaacatgctggggtgagcagcccgggacagcctgcccggcacggccacggcccgggcagcggcgcggaggggggcagggacgccccgaacccggagcgctgcccaggcgagccgggaagggccggtgagcagggacgcgtgcgcctccggcgggcccgacacacggacaacctcagggacacacgttcggacacacatccacacccccaccccgcccccgcccgcctgccccaagccccgcggcgggacccgcccgcggccgccgcgcgcgcactcaccgagcccgtcttgaccggcacatacaccacttggcccatcttgggttcccggccgctgcccaggcggaagcccttggagcgcacccagaactggaacttgcctttctcgccggctgcggggccgctgcccgcgccagtcccgccgccgccctgcaggacctcggcgatccgctggtatttgctgcgtgtcaccgtcttggttttggccgagtcgccgtaggtgcgcaagcaccagtcccggaactggcggcccagctccgagtccccggggctgcgctcgcgctcccagcccccgcgcagcagcagcgtcggcttcggcatcctcccgccgcgcccggcgccctcgggggcgggccggccgccgggccgcccggtgccgggactgggctgggctgggctggaccgggccgggacgcgccgcggccgcgtctgtcccgcggtgtggctccggcgaggctgctggatgggcgcgggcggcggccggacgcgcggggctgcggcgcgctctgtcctgctcgggcggcggcggcggcgttggcggcggcggctccggctcgcctcctgctccgcctcctcctccccccggccgggatgcaggagcgatggaggcagctccgggcccggaggtgcagagggggcgggccgccccgcgggcggccgggggaggcgggaggcggggagcggccccgagcgctgggagcgagaccgagcctgggcgcgggcggcagcagtggctgtcagcttgcgcggctcatcctgctcttgctcaggctcccgctgccgcggctcttcctcctcctcctcctcctcctcccgcgcccgcctccaccacgccgcgggatcccacctgttagagcggcgcagccttcgccgccgcccgccccccccttcctcctgcgcccgcccgccgggcccagcccccgcccggcccggcccctgggggcgcgggggcagccgcgcccgcagccgccgggagggcaggaaccacaggcgcgcagtgcccagcccaggaaccgcgttccgtctggccgggccgggcccggagcttcgcaggccccgctcctcccggacgcggcggtcccgcggggagtagggcgcagaccccagcccagacgccgacctcccggccgccccgccccacttagccaggccgggaaggtgtagggcaggctccccctccctcgctcccgcaagtgacttgacctctcccgtgagccgaagccagaagagcagtgttcccctgggggaaccccacatcgccgcccttcggggcccccaaacttcctctccttttgcctcaccctgaattccccgaagtttggccagctttgcctctgcttgcctgccccactgctctgggacaggcccaggccccctgggaagtcgcctgtggcctcagcccaatcccacctccgcttcagaaaactctcaacacatccacaaactcatcctgagacaccctgccttcctgagtgcgccttgacctagaatctcttgctgagtaaactcaggtagccccaccgcccccctcctacctgggcagatctgaccttgggtagagctagctggtcccctcccccttaatgaaattaccaacataaataaaggcacaggccaattccccaggatttctgtgcccctaccccccacttccttaacaggtcatgaggaattgctgcacttctctcccagctgtccccgggggtccaccccatgtccccatgacactcctgcaggcaagtcaccatccaagtcctgaggcccagactttgtctagtgcaggaccgtttcctgcgtaggaactactgtctactcccatcccaaagtcccccaccccaggacctactacgtgccatgtcctggcaactctgagaggcagagggaatggctccattttacagacgaagacctggggcttggagaggtggcctgacctgctcaaggtcatgcaggaaggaggggtgggtttcagctcatgtgcatctggctgctgctgccatatcacacacaaactcttcccctttcaccgcgctcggagagagccccacgctgtgtatacctggctcacttcccccagtagacagggagctccagatgctcagggccatatctgacccatcctcatatgcacaggccctagcacaacacctggcacacagtaggtgccagtaaatgctgaaagaaccctagaggtctcccaagccccaacctctctctgcatttcacatgggagattatttttagataatttacatttcatgttactttatatacaccaacaactccacagtcatttttcctctttatcttctcaagagctctttttggatctatgctggtatgcatgcccgtttttaagaggtgaccactcagagcggggaaggcactacccaaaggccagccccaggggcgcaggggcttctgtgattaagaagctcagaccctgactttttccatgtgtcccttgacggttatccttccagcacactcttcctgagagcagag

SEQ ID NO: 1561952 - DNA, 4001 bp, Homo sapiens
tcccactgtgcggcaggaaggtgctgaatagggtggtgtcgcccagctcaagaggtgctgtcttaaaaccctgctctataaagcaagcccagcctgagcctggattagacaggagcttgatattattcaaggacacatttaggccctaatggctttccaatgaaggggtaatttactacccggggggctaaactaccacagggcctgggccataaacgggccttttccccagaccaactcagtccagaatccggcctgtgtcaggggtcaagacaggggcctggtcccatcacacagatggctctccccagaagagccatgaggtcccccaaacacctctccccacaccccctttggtgtgtgtgagttggtggggcggggcgggggggggggagcaggctggggttgccagctgattctgggataagtagggctttatctcaagggagaatctatttcaagccacaatccttctcagaaagaggaggaaatcacagagtccaaacaccatttcaggtgaaatcaggaggttattcatctcccctcagagcagacagaaaggaaaatcaatgttttagagggggaaaaaaggttccatttgaattaatgggtttgtggcttctccattgatctgagcctcttcacactttctttttgtgcttttgtgctcttggggagaggggagggagtagggaatggggaggagggggtgggcctcccataaggaaaaggacggtctaaccttaacctttctacaggaataatgctaattagcgaggcttaatgagaacttcccccaggaagcgcagcccggtaggggcggccggactcgggcaaacgcagctccgggtgggagcagggtcacttctgctcccgagcggctggaataaaaatgcggattgcactcccccctcctccctatccaaagtgtccagccttgaagacaaggtggagggaggagagagagggcggaggtgtaaatccaacttaacccctgcgcgcgccctcgaggcggccggctgcccccgccccgccgtgtcccctcattaaggaaggccccttcgccaggggccgccaacgcccgcggcttccggtcagacggtgcacctgagagggacaccccgtcccctcccgggagggacccgggcctgctgaagtgggctcaactctgcaaaccgcgtctcaactccccgcgccgcgccggggaacccctccctgacactcaacgcttcccgtcctcacatccccaaacacagtccacttcccttctcgtggcggccgcggcaacccgagcccggcccccgccccgccgccagagaacgcctccctcgccgggacgcggtgccgagcccgctgcacaccgagcggccgtggcacaataccgcggcgctgcgcgcacaatcaccgccccccaggacccgcggcgcgcaccccgggagtggggtgcgccccgcgaccctgggcgctcagggccagacacacctcttgggcgccccgcggcccccacagtgcagccttcatcgccccccctccactctcgggcacactcacccgccccccgccccagcccactcggcccagggcgcagccgctcccccgcgccccctccctcagccccggcaaaggaagctccccctgcgcccccctccccagaaccgcccccagcccctcgcccccctaaccgcagctcaacggccggcggcagcagccggagaaggggggcggcggcccgggccccggaaacggcccgatcgccgggatccgggccggactccgtacctgggctggaagcgaggcggagatgggcggtcgggatccgcgagtgagcggggcgggcggcggtgacagccccacagctccagctgctgctgctgctgctgccgccgcggctgcccggggagaggggctggcaccaccgcggcgcgtcactgcccggcccgggggcgggggtggccaggaggagggcccaggcgagcagcggcggcagcggcggcggcgccgcggcccggaggaagggggagggggcaccgggcacggggaggcgggagagggggcgggaccgggcacggggcgggggcgggggggaggggagcgcagggagggcgcaggcagggggagtaggaggagcagcaggaggaggtggcggaggggcgggtgagagggaggagtgggcacggggggaaggggagagaggaaaaggaggcacccagggagaggggagaggagaaaggagggagagaggcgcggggggagaagaggaggaaggagggggagctgggccaggtagggggggataagggcgcgctggacgcgccgccgtgcgcttcggtggggagcgcgctcttaagggggaagcgcttcgaggaagatccttgcacggggctgagcccggaaagaaggcgctgggatctgtgcctacccatcgctcccggaggctgcggtctctgggtccggtgggggctggggggagagggcacccggcgggctgtctgcggtcaggccaggagagggagacttggcccaaataaagtgactcaggcaccctcaggaactctcggcgcccggggccccttcgggcagccttcgacccccatgcgtctttcgggtccccagggacgcgggtacttgtggggcggggctgccgggcctcggggttcggctcccccgggcggccggagcgagaccccgggctgggaaagccaggcacgtggccggctctcggccgtacccccgccccacccccacggcagggcccccagtgcttgatcaagttcaagctcgagctcctcggcgcgctgcccaccggctgcccctccgcgcccctcccccttccccatccgcaccgtctcgctcttcactcttcctttgtctctttcccaccacttagtttacaccccctccgccctcctccccgccccccgcgggcacccgagtgtccgggaggcgctcacctgttcgacccaaacatctacgcgacccccagcgcccgccgcccgcgtgcccgcccccgccccgccgccggtcattgtgctccgccagcccacaccgggccgggtcctgacggcgcgcgagccacagttgtaaagtaataggataatctcggggacgtcgctccagcccagacccgggcacgcactgtccgtggagacggcaccgccggggaggggagccacgcggattccagatgcggtcccccaggcggacagacccttgcccggggcgcaggaggaggcaggactggcatcgcggggtgggagccctggacctccgagcaacctcggactcggcccgaaaagcaacactctcatcaccaaaccgcagaattagaccccgatggagaaaatgggtcaggggatccattcccaccccacccctccaaatccagaccctccgctaccacagatcagcctcgaaaaaagcttgtgcttcaacaaggatggggaactgccctcgtggaattctgtggggaaattgccaaaaaaaaaaaaaaaaaaaaaaaaaaaaacaactaaaaaaaaaccctgataaggatcccacctcctgattcctctggtcgcatccgaagaggaagggcaatttctactgactctttacgctaccattcattcacggtggaaccagcagagaagagaaaacgagacagccacagcgattgtttgcaattttgaaacagactgcctttaaccctccaactttttttctgtaaaaagccttttttctttcttcctctgaaagctttgcattgtgaacaatccatggtaaacaaggctccctctacagccgcgagtgcgaagtacaaccccacaggttcagagcccagcgtttacccgtcagaaaaataaaatgatgacaagacatcacattagcgccacgcaggcttccttccgcacatgctcaagactctgctgtcaatagaaaactcacactttctttttaaaagagggtttaggcacatttactcatttgcaccttttattcctgaaatcaaatgtgttttcaaa

SEQ ID NO: 1561953 - DNA, 4001 bp, Homo sapiens
ccctaactcctcctgtattgcggcaccaatcttgggatccccaactcccaagagtactttcttctttttggacggcaggtgggtctccaagagcaggcggaggtcctcatgaacaacccctcaggggaaagaacacagttcccactaacaggctgaaggacgatcaactctaacatccctcagctgactaccctggtcccaccgagcacgctgggatggcatacctagatccctccccatcaggcattgctcagagacatggagacatcagtgattgcactcaggggattgacagatttgattcgcaagtcatcactgcaaagcctggcccagccatgggaacaactgcattcaggtctgatagcacaagtgggcaataaataatagcttgtaacacaccctcgagtatttcgtagaatttgccttctggaaccaaacctttttttctcagcctgtgtttacccaactgccctttccaatcgaacagaaagcagagaaccagacacttgattgtgtttaggcaaaacctcaggcacaagtaggtgttaagccgaccccctttaagaaacccccctttgtcggccgggcaccgtcgctcgcgcctgcaacctcagcaccttgggaggtcgaggcgggcggatcacgaggtcaggagatggagactagcctggccaacatggtgaaaccccgtctctaccaaaaatacaaaattagccgggtgtggtggctggcacaggcctgtaatcccagttactcgggaggctgaggcaggagaatcgcctgaaccagggaggcagaggttgcagtgagcccagatcttgccactgcactccagcctgggggacagactccatctcaaaaaaaataaaaataaaaaatagtttgtcactacagtgcccacaaggaaacgttaacacacattccacatcgtctgcttaaacagtttggtctagcacagttcccagaccttgagctctgtgaagacaattatttcaaattacacattgtatggctcaaatactgcctcacgcctatcagactcagagccagccaaggacggcaaatactatcacaagctgcccgagaggataccgaaaggaaccacatctctctgtgacacttggcggtggccgacttaccttcagacacggcgttggcattttccaaggcaacctgggatgaggcaaagggacaaaaggccaccagacgaacgatgctgtggaatttgcccaggttgagcacagactcctccacctggggggagaaagaggctaagtggtttccttccctccctcctgcctctgcggcgcagtcaagcagcggttctcagccttggaagctcttaaaatatgctgatacctgggccccacatcccagcttctgctttaatcgttcgggggcggcgtccgggaggcttatttctaattgctagagcgattctacccatgggtcaaggtaaagacccccggatctagagctttccaggcccgtccccccgccccgaaccgctcggccggccacgtgggagcgcgctgtgcatgctgggacccgcgcgatgagggtctgcggggccgccaaaggagcccacggatctcacccacctgcggctgcagcagactgatctcctccacttccttcagcgccagcagcgcgtagccgaccgcgtgctcaaacagcacgtgcaacagcacctggaacgggagccggggcgcgagcgtcaacgcaacctcagcgtctgccggaacccgttcccagggcaggcgcaggcgcaggcgcaggcccaggcccaggcccaggccctgtctgcggcccgaacgcaggccgaaacccccaccgtcgcgtcgcccgcgccccgcaaccactcctcaccatggcgccagctcccgggttcggctcgcaatgcggctagcgcgctccggcgcgcggaaccaggctccagaggccacgcccccgcccccccgaccaatcggaggccggggacgacaccatctccggcctttggaggggccgcccagggtggtatcgcccggagcgcgggctgggtggtgccgagcgcgggcgagcgggccttttccggcctctgcagctgcgcgggcgggcgtggttgccggggacgcgcggcccccggtcgggcactgcaggcggcgaaacgacttgggaaggccctttcggggtaatagtccggttcctgatgttcttgtcatatgagttacgggcagcagagctgggtgaagtcggggcgggaggtccgcgtggggcgcggcgtccatcccagacagagaccgctgcctagccggcttcccgcttcgtccgtggcctcgggccccagaccctgcgccccacgtccccgggacccaggcgttcccgtcccctactcggggacgagcctccccggcgccgggtgggcggtgcatcctttcctcccacccgtaacgggagcggtgcctggcgcgctctggcgcagaccctgctgggaatgtagctcgcgcagttttcttcgtactattaatttatttcttttttttgtttttggttttttttttttaaatgactgtagcaggcagtaacgtgcgaaagaaagacgctccagcgtcttcctaggccagtttcttgttgctgtgctgcacgggacccagctccttttgctgggccacgtgttgctcctccgcttgggcggccctgaattctgggcgctggtgatcgctgagtgaatcgcagctgcttccctgtccttgagggcgtcttttgggcactcaggcgactctttagaaatgagttttgctttaataattaatattaacgttataaatccaaaacctagttatacttaagtagcgtatcccctggtatgttttaaagagtcattcgaaggggatttttaaaaataatgtatagctataaactgcatttatacatttaattgttattttgttaagcgattgagttacttgacaaaatccaagtacatagttcactcacaaatctaatatgtcaaacctaaatgtggttggtaaatcttactctcataatttcaatatggtttacagatgtggttgaattctgttacacatgtctacttacgagtcagaatcgttattccatttaatattttaaaatggaattgccaagttaatccatacattagcatgttaaattattttaaccgtcgtgaatacatcaaaatagacgattccaaaatgtaatggaaaatactaatgctaatacttcaatttacttcattatttctgcccttaatcctgaatcttcctggagttacaggtgcttatccactaaaccaggggttttcaagcaagaagtcagaatgcattaatggacagcatttaaaaaaataggattgggtgggctataatccagcactttaggaggccgaggcaggcggatcacttaagatcaggagttcgagaccagcctggccaacatggtgaaaccccgtctctaccaaaaaataaaaaaattagctggacgtggtggagcatgtctgtaatcccagctactcgggaggctgaggaaggagaatcgcttgaacccgggaggcagaggctgcactctagcctgggcaacagagcaaggctctgtcaaaaaaaaaaaaaaaaaaaaaaaaaagaaaaaggattaaagcgaatagaaataagagtgtgttgcttagagtaaggtgctgttcattgtaaaacttttgtctcagctctacatacatatatagaaatatgtacacaaatatttttcatatatacatatatatgtaactatatgaacacacttttgtgtgttaaatcagaatataaaaaacctgagggtcaatcaatgagccaaaaggtaaccagtcgtactctggaaaaatttgggtcctctggttacaaaggagctgtcatgaagtagtttgctgacttacagagatggctgaagaaaagtgcttctgctggtgagataaccaatgcttgtgatcagatatggatgtggtatgaacattaaaaggtttcctt

SEQ ID NO: 1561954 - DNA, 4001 bp, Homo sapiens
gagcacaggccatggagaggaccgtcggacacagcaggggggcacaggggagcacaggccatggagaggactgtcggacacagcagggcgggtacaggccatggcaaggaccgtcggccacagcagggggaacacagcagcacaggccatggcacatgggcacggcggggctgggcctcctgctggaactccacttgggcttcaggccacgagagtggatttctgggtctcatgcggtgcaggtgtccgcctttgcagcaacacagcatcgctgctgcctgaggtgcccgcacttaccaccccccggccccatcttggggagagactatgtaacgtggcccaggtcaagatcacagttcaggttccctcccctcccgaccactgtcattagggatcctgagtcccagagccttccaaggggcttgtccatctgtctgtctctcgtgggtaagtgggcccgggatgcttgctgtgtgggggcctctgccaggacctggatccctgctgctgtccacccaggggctgtccaggaagcagagacatgggaggtatatgcccacggctgtctgtaggtctggtggccagcgtgtgagggtctgtgtctccttgcgtggagaggacagcactgggatgtgaacaggccgggcgtcccctgaaagagacagccggaactgggtgggggtgggcgtgatgatgggggtgatggtgggggtggtggggggggtgggcgtgatgatgggggtgggggtgggggtgggggtgatggtgggcgtgatggtgggggtgggggtgatgggggtgggcgtgatggtggatgtgatgggggtgggcatgatgatgggcgtgatgatgggggtggtggtgggggtgatggtgggggtggtggtgggggtgggggggggtgggcctgatgggggtgtgggcatgatgatgatgggcgtgatgatgatggggggtgatgatgggcatgatgatgggggtgatggtgcccaggcccttcagcaccgcaatatgctgcggaagttcttccggaagttgtcatctagaaaggcgtagaggaaggggttcaggcacgagttggcgtagctgaggctggtgatgacgtaggacatactgatgaccagtggggtctggggcaggtccgtggtcagggccacgacagaggccaggtggaagggcgtccagcagaggaggcacacggccagcacgacgaggaccaggacggtcaccttccgcctggccttgcctagagccttggctccagagcggagccgcacggcccgcagcctgcgcaggaggtctgtgtagagcacacagatggtgcacacgggcagcacgaagcccaggaccaacgtgtagacacggctggccttgaaccagacctgctcgggccacgggaagctcagcccacagcttgggacctgcagctcgttgctgtagacgccagcgaaagagaagaagggcagaaccaggaccgtgacgcccagccagacacacaggctggcgaccttcgccccccggtaggtgcgccagggcatgtggcgggacctcacggtggccagcaccaccaggtatcggtccacgctcatcacggctaggaagtagatgctggagaagatgttgtagtggtcgacggccagcaccagcttgcagagcagctccccgaagggccagtactgcagcaggtgctccgcgatgttgacgggcagtaccagcgtgaagagcccgtcggcgacggccaggttcaggatgaacacgttggtcaccgtcttcatcttgggcgcccttaggattacaaggatgacggccgtgttgccagtcagccccacagcacagatcccggagtacacggcgggcaggagcacatagaggaacggcagtggctcggagaaggtggcattgtggccagtgccattgtcctgagagacgttggcacccatcgtggggagggagaaggagcccctgctgtcaaggggctctgggtgcccagcggcctgcattgtagctgggaccgttgacgatttgcgccctgggcaggtgggaggtgccttggagttgggtatctggttgggggcctccttgggctggattctaggaaagaaaaacaaccagagactttgagatccggccgtctgttagggcacagccactccaggttctctggcagagactgcggccactttgccaggtcaaggacatggggccagagggagcctggtggggtgtgtgggggcctcctcccgcctcttcctggtgagacttcagcagatcagttccctcctcccgcagagagcagctgctggccaccctcctgggaagagatgtggatccgtccctgccccagcaacccgcagatgcacgggctgcgtagaatcaagcggtccctttggaaacacacctcccaagctcatctctggctcccttgaatctgaaggtccttccctcaggggtcttggagtctgcaccctccctcacaccctcccgagagatgctgcagaccctgctggtccagctactcttctctccactgacctgtccagtgcttcgagtccagaagttggtagccttggtgtgttcctggttttggccagtacaggcagtcgcagggatggagggcgaggtgtggtcctcactgacagacctccagctgaggtttcaggagtttcaagacctgccctgctggctgcctcagccccggctgcgaggttcccagcctggtgtcagtgctgatgctggtgagggagggaggcggatcccccttgctgacgtggagcccggaaggcaggccccaccttcccctgagctgcagtagcgcctgcagtcggctgtcccagggtctcctcagcattcacttacccaggcagactcctcagtgggcggctgaggcacgtgtgcgcctgtgtgtcaggaagggactccatgcaggggcctctgggtgtgcccaggtcttcgggcagagggcactgaaggcatctgtgcctctgtccgggagtcactgtgggcctgggcacccttatctgtgaacatgggtgtcttggtgggtctcctgccccaccctgtgtgtgtacatggtgtgttcctgtgtgtgtgtgccagttaggacatgtacgtgtgtgggcctgtgtctgcctgtatgggggtctctgtgggtgagctctgcgttgtatctgagtgggtctacatgtccttggctgagtgtgggcatctggggggtctgtatgccctcatgtggaagcagaacttgttggccataggcaacccaccttctttttttgtcttttgctaaaagaggaactcagcctaggcaagctgtgaaaggctgcagagaagacgttctcacgctgacacgtaactctcccgccgtcctgcagaggtggtgagcatcacactctgctctgggttggtctttaagtccttcccttctccctgcttttcttccttgctggacgcaccctggcttatccaacccgtgtgtgtgcagctcggccgcatctggacctgctttgcaggcaacgccacagctgacacgagcagtcgccagtctcagagccgctcctcagcggagacgtgttgggtcagagggtctgtgttttctttcctttcttcttttttgagacagggtcttgccctgtcacccaggctggggtgcagtggcactatcatggctcactgcagccctgacctccctgggctcaggtgatcctcccacctcagcctctcaagtagctgggactacaggcatgtgccaccatgcctggctaatttttgtgtttttttttgtagagacggggtttcaccatgttgcccaggctggtctcgatctcctgagcttcagcctctacctcagcctcccaaagtgctcaggttatagccatgacccaccgtgcctggtcactgtgtgttttcagtctggggagatgtgtctgcccatcgagactgtgcccgctgcctgtggggttgcaaggatgtcaccgcacactcatggtcggccttctttcctg

SEQ ID NO: 1561955 - DNA, 4001 bp, Homo sapiens
cctagagggtgagagactaaggccatgccctgacagatgtaataggacttccacaggcgaagagattgagaaagaaggccttccacgtgggagaagtcctgggaggaaacacagacgcagaatatgtccagcaggctctgaaacctgtgtggttagaacagaaggttcctggaaaataggagtgggtgaggagatcgactggggagcctggctcactctatagaattttgcaaactgaagagggatccaagaagcatttcagaaagccagatctagcaggtttgtgtacaaggagttggaaatgagataaactgttggtggagaggtcattttggagatgtttttcttttagaattctttcatatttaagaatagactgaataaccctgacagtccccagaaaggatgaacaaaatgattcaattcaaccaacatttgttgagcacttagtgtacacaaagcaagagaaaacgttagatgcttgttaaaagcaaatattggtgattctggttttaagccacccccgaattgaagaaatccaaactaaacagaacgctaaggaattattccacttcaaatgcctgccaatttcctcaagattcagcttgtgacagatacaaatacattccaggaaagtactttccctttttcactgctgactttacagactttaacataaataagacaggcagcactttgtttagataaatttttatgaaggtattaatccatggcttactatatatttcactgtcaatgaaaaattcaactctatttaattttccttaaaaaatgaaagtttaaaacaaattaccagatctttaatgcaacccaaaaatcaacttatgtttttgatggcttgaaacctattccacattcaattggatgttcagactttgctccaaagttgaagaaaagattaaaaacttctgggacaaatcagaataaagctcctagaacttactaggatgttttttggtacagttcacattctaggacacatttctgaaatcctatcttgtaagatggctctaggtgtttgaaatctacatttatatgttaatttcatgtcagacttcacccctataaaacctaatgcctgcttagactcagctgattgccacgaggctctcagattccattatatccgatacttcaaagaaacatttcctcggtgcatctgcttcgtattttctagcattttcattcattcattcatttgacatacatttgttgaacatcagttctgaaaagctacaggacccgtgaggctttggggacgcaatagcgtgtgtgtgtgtgtgtgtgtttgtgcatgtgcacgcatatgtgtgtgtggccaggaggaggaaggggaagcaagtagaacagtaaaatccagagatccagtcactgggagaagattgagttagggaaggccccttggactacgatgagacttttgagttgggcctggagggatcggttaaagtgtgtcaggcagtctgatccctgaccaaggaattgttcatgcaaaggcctgaagtagtaaaggacatggttcattctggcactgtcaaaagctcatgtggaaccaggccccgtggctcaggcctgtaatcccaacactttgggaggctgaggcaggtggatcacttgaggccaggagtttgagaccagcctggccaacatggtgaaaacccatctctactaaaactacaaaaataagctgggcatggtggtgcatgcctgtaatcccagctactcgggaggctgaggcatgagaatcacttgaacctgggaagcggaagttgcagtgagccgagatcacgccactgcactccaatctgcaggacagagactctgtctctacaaaaaaaaaagaaagaaaaagaaaagctcctgtgccagatataaagtgcgcataaaatatatactgaccttgcaggttgtacttgaccttgcaagtaactggagaccagtggaagtgcctcaggcaggcctgaagtggaagcaaggaagggctccttcctgcttcagaatgacctgctcgtgagcccagaggaagcagaggcaggctcagctccaaggacctccctgagcagctggctgagaagtgagcccacaaccagtgaaaactgtgacagctgcacgaccgccttgaatgctgccctgcgttgtggatgtttgtgctgtcccttgctgcaacctgagtgcctgcacagcagggagggcctccgttgccttttgcaactggcaccagacatgccacctagatttgcactaaatgttccctgaagggaggaaagagaactcgttgccatgaaaacacatttctctagaaacttttttgaaaagttcattaacttttggaaaagatgaaaaactagtataatgaacacttgtatacccttcacctagattcatacatatatatacagatacacacacacacacaccacacacacaccacacacacatacacgcacacaccacacacacatacacacacaccacacacacacacaccacacacaccacacacacacatacacatatatacgcacatacacacatgtatacacacacagacacacacatacacacaaacacacacatagacacacacacacatagacacacacacacacatatatacacacatacaggcacacctcggagatattctgggttcagttccagaccgccacagtaaagtgaggtatgcctctatatacacaaacatgcgtatatgtgtatgtgtgtgtatgtatatatgtatatgtatatgtgtatatgtatatgtatgtatgtacacatatttttccctgtaccatttaaagtaagttgtatacacccctacctcattgtgtatctcttaagaacaaggacaccagccgggcgtggtggctcacgcctgtaatcccagcactttgggaggccaagacgggcagatctcctgaggtcaggagttcaagaccagcctggccaacatggcaaaaacccgtctctactaaaaacacaaaaatcagccaggcgtggtggcatgcacctgtaatcccagctactcgggaggctgagacagaagaatcgcttgaacctgggaggcgcaggttgcagtgagccgagattgcgccattgcactccagcctgggcaacaggagtgaaactccatctcagaaaaaaaaaaaaaaaaaaaaaaggaattaaactaccatcagagtgaacaggcaacctacaaaatgggagaaaattttcgcaacctactcatccgacaaagggctaatatccagaatctacaatgaactcaaacaaatttacaagaaaaaaacaaacaaccccatcaaaaagtgggtgaaggacatgaacagacacttctcaaaagaagacatttatgcagccaaaaaacgcatgaaaaaatgctcatcatcactggccatcagagaaatgcaaatcaaaaccacaatgagataccatctcacaccagttagaatggcaatcattaaaaagtcaggaaacaacaggtgctggagaggatgtggagaaataggaacacttttacactgttggtgggactgtaaactagttcaaccattgtggaagtcagtgtggcgattcctcagggatctggaactggaaataccatttgacccagccatcccattactgggtatatacccaaaggactataaatcatgctgctataaagacacatgcacacgtatgtttatggcgccattattcacaatagcaaagacttggaaccaacccaaatgtccaacaatgatagactggattaagaaaatgtggcacatatacaccatggaatactatgcagccataaaaaatgatgagttcatgtcctttgtagggacatggatgaaattggaaatcatcattctcagtaaactatcgcaagaacaaaaaaccaaacaccgcatattctcactcataggtgggaattgaacaatgagatcacacggacacaggaaggggaatatcacactctggggacggttgtg

SEQ ID NO: 1561956 - DNA, 4001 bp, Homo sapiens
tacaacagaatcctgaagtcacagaccacgctgaggcagaggcagggggcctgggtttggaaaagcctctgccgcttcccaggaaccaaagctcctgggaagggcaggaaccccctcctgcccccgcaacaagcttttccctctcccgacctccctcccacctgcccgatcttgcccgggcccaggggcagtgtctgcccttccagacacccacctgcaatgtggacacctccaccggcccgttgtcttgtcccaccaggaaaaactccacggtgaccgtcttcttctccaagcgccgagaggcacctgagcggtgggtgaacagcgggaaggcccgggccagggcacaggcggaagcaaagacctccggctgctcgcagaccatctgtggcacatagggagacggcgtgaggggtgcaagggccgccaccagggagtgcagggagctgctctttgaacgcctccggaacatcagctccctggcaggtgacatctagacagagatgtcccacagcagccgccaccccatccctcaggtcatccccggaaccatgggaccaccattggtcatgctccaagagaaataacacattggccaccagatgtcaacagcctgaccagccatgaaaatgagggacagagggacagacacaaagtgggcctcaggaaatctaggtttgagtctctgatttgccaccaaaactgatctggggcaaatccccgcgtctctctggacctgtttccctgtctacagagcagggatgataacgtccacagccctctgggcgtgcgctgcagtctgagcagggctgtgagctccccaggcccgagctcaccgctgcccgactaggagcaccgtggctgcctcctctcgaagcactcaccacaatgcagcgatgcgctccgggcggcaggcaggtccgcaccagccgcgtgatgaagtgggcggccgaggggctgttgtgccggctcaccctgcagggcagggcagccacggtggcgtagttcaggtagaggggacagctgtccgtggggttggggttgagcgtgctcagggcagcctgccagagctagatcagaagggagagacaagacacagaggcttcaaacagcggccacgtgccaggaggccctgccctgcagccacggccacaaccactcctgcagtcctggaagggcactgcgcagctcccggccaccgttttcccatccttagggagatgtgtcgcctctctgcagagctaactgtctctaggctggctcgcatccccctggtgggatgaagccaccaagcctggaagggccaggctgggggctgctttgcttccaacactcggatagggcttaggcggcttccaccagagagggggcaggggccaggtgtccccaaggaaaggcagctggggacactgccatgggaacttctggaagccagggcctgtcgccaggcggggccgacgcgcggccctgggagcggccacgtctccccccccgccgtccgcaggtgtcgcggcctcgcggggcgcagggctgggctgacaggaggaccaccgcgccgcaccggcgacggggcctggggctgggcctccgcgggcgaggactggcctggcggctgagcccttcagggaggcggcccggcctcgttgggcccggcccggcggcggcgggggtgcggcgggcgaggcggggcctccgcgggccgcccgggcctgggcttccgcggcgcgggtcgcatggcggccggcggcccgctcacctcctcggtgacccggggctgcagcttcccgcggacgtggctccagggcacgcggtgcaggtggtgcagctgcccgagcagcagcaggggccggctctgtgggtccgagtcccccgcgctcgcctggaactgcagccccacgttcgccatcttcctgccggcccacgccccggccctgcccggcccggcccggcccgccgctcggcccccttcgccccgctccggcccggcctcggcaccgccccggccctgcccggcagcccgcgggccccgcctcccccgccgctccgggctgctcgcgagacgtgcagggcccgcccggggcgcgagggggcgccggccaggccgggcggaagggtgcgggcaggcccggccgggcaggcccgaagccggccccgagcaggccctgccgagtagggcccgcgcgcccggcctccagcggcgccgcccctgggcctagcggccctgcccaacacgcggggcgacgtggcccgccaggcagcgcctcccggacgggcctggcctccagtggggcctgggccgacgtaggcccaagcccacccgacgcagttccgcccggtcaggcctcaggctggccccaagcaggtcccccgaggtcccttagcagctgcttttgatccccagggaccccgcaccctggccacccatcagttaggccggaggggcccagtgactcttggacctgagtcaggtccttttgtcccactgcctggcatggtgggtacagcgtggacggtcacttcctcctcacttaatcggaggttccctggcgtttatcagaccccgctctgccaggcactgccctggatgtgagagggtgacagggacgtggctttccatccagggcactgctgctgggatggccagttacaaatccaggcactgcctggctgcatggggggccttcccgcccacccctttgcaagaagggtcatctggcacagtctaagcaggaaaggagggacgagatgagacgaggaaggagcagggtgacctgagtcacctcagtcgccttacaggggaggaaaggccatcgggggtgtggggcaggagccgggtggtggaggagccaggggtgagccttgagtggatggtggaggcggagggtcccacccacagggtcagatgcaagggtcagggaatgacgatgcattggggaagctccacccaggagtcatttaaaagcaaaaatctgttacccaacatcctgattgctcaagggcctttggttggtaccctcctctgttacctccatgtagttccataagccactcctgttattttgagtttcttcttcataaccagcctaaaaatgaaaaaaaaaaaaaaaaaaaaagaaaagaaaaaaagaaaaaaaagcactgtcaactccctggcgtggtgtgagaggttttccaccactgacctcccagctggccccctagctccctaacttgtagccccgggagccacaagccaggctttcaccttccctgtccacaggctccaggtctgtctgctcagctctgagccatggtccctggccccttggaaacaccacagactagagcttcagcatcctgaaggcaggtctttttgactttttgttgtttttttttcctccagttcctggcacagagcaggcactcaaaaaaaaaaaaaaaaaaaaaaaaaaaaaaaaaaaaagctgttgaatgactgaaaggcattcctttgaaaccctcagctttcccgacataaaagtcaacgctaattggatcttattttcttcaaaagattttacagcagctgaatgttttcacacattggtaaagggtactaacagtgtgtatgaagatctctcactcttttttctgtttgcaaatacgttgcagacaggcacacggcactccagaggactgagacagctggaggatcttcctagagggtgagagactaaggccatgccctgacagatgtaataggacttccacaggcgaagagattgagaaagaaggccttccacgtgggagaagtcctgggaggaaacacagacgcagaatatgtccagcaggctctgaaacctgtgtggttagaacagaaggttcctggaaaataggagtgggtgaggagatcgactggggagcctggctcactctatagaattttgcaaactgaagagggatccaagaagcatttcagaaagccagatctagcaggtttgtgtacaaggagttggaaatgagataaactgttggtggagagg

SEQ ID NO: 1561957 - DNA, 4001 bp, Homo sapiens
tcagccttaattagcagcctcctgcaaaatgaaacaatgtgcttgttccaaagggtaagataaaggtcctgacagctgcccctcacttccaatcagatgtggtcctcaaatccctgcatagagaaactcaccgaaacagcacagagaaacacacagacatactcacaaagcatacagagacatacccagataggtacgacacacacacacacacacacacacacacacacacacacacacacggttggaggttctgcttggagtcacacggcacacaagattgctgtcaagaaagcctgtccataaatagtggctgtacaccctcctcacttacaattcagggaaaagaagagcggggaaggaaaggaggaaaaacaacaacaacaaaagccacgacagagaacgggaaaaggcagagactgaaagcgaaggaccgtcggaggaggagggcgagaggtctggagaggagggctcgccggaggaggcgggcggggcgggctgtgcggagggtgcggccagcgcggtacccgccccggcgaggcgctggggaggcccgggtggggagaagaaatggggcctgggggacggtaggagcctccgtgcggagaccactgttcaaggccacaggtgaggaggtgtggagggggcttcggggctgttgacctgggtcagctcctcccctccaattcaccgcttccgcgactccaaatagatggaatcactcagtcctgctgctactggagagggaaggtgaccttgacgctgcctcccgctcggcctggcccctccgcctggcgtttcagggctgcacggagtaggtctggcgggcggggggcggggcgcaggcacccgggacgagggttgccatgggaaccgctagggaggcgtccccagcccgggagccgggaggagctcggtgggaggggagcgggaggcggagggggctgcgctgtccgacgtggggagactgcggcggagggaggaggcgaggggcggcaggcacgggcggaagtgacggaagccagggcccgaagatggacggaatctgtcgcctctgcacagcctcattcagttgtgtccttcccagaccctcagactcgcccactacagcgtccagcgctgcccgggcgggggagaaggggcgccctcccgggggggatgggtagggggtgtcggccggggaaatcaggccatttcccgcctcccttccccaccggcacccgcgccactcttcctgacaggaccaccgatgccctgctccacaccaactgcgtccttttccctagagagaaactgaggcagagaggggtaggaatgggtttttgaagtgttggcgggggtgggggtgtcctttgaagcctctacccagcctatcaaccctgaggcgtcgaggggcgatggggctgtttctgtctcccgcccctgctgcttccctgggacccccacctcccaaagccgaggctcaggcgcaaaggtcccggccctggcgggacacggcccgggctgaggatgcgggcagagcgcgggggttctccaggggctggggctggggcctggccgcgcgtggggcagggctaagctcacctctctgcctgctgtctccgccgagcaaaggcgggtccggttcgcgcctgcgccgcagttcggggcgggggagggggcgccggcccgcctcagggcctggctctgcagacggcggccgcctgcagctcccccggctcctgtccccttccagagttccctgctcgctcggacaccccagcgccctcacagagacccctcggactccctgggccccagcccctcacgcagcccctcagactcctcaccgaagctgccgtcactcccgcagttccccacccctcccgtggaagacccatcccttaaccgagccttcctctcctcgctgcaccgtcagtcccttttccaggtctccatccccctcatggagccccaccccagcgtagaaaccgcttctcctcgccgggcccccgccctcttcacaggctcccatctgtctccgggctcctaccgggaagtcccctcccacttgccttgagagccgctaatccctctggagtcctcacatctcactcagtccccatcctcttttcatcctcttttcctctttgagtccctacccatccctggtacgggatcagcccttgtaccttgagaagggagtttgggtggaggactcggggttgggagagaagtgacctccactttggaaggagctaatgacagcctcccttgttgtttcctcccctagccccagttctgccctgggcaatgcgtgcccactgcccatctccctggagagccagcctgtgccaggcagctgcatctgcctcccaccctgtcatgagctgtcagccttgattttgtcccacatttgctgtgtgatcttgggaaagtcattgtgcccctccaaccgtcatcaagcacccttgcacagacatgcctttgtgtcttgagcatctattctgtttctccttgtgctaggggctggggacacacagaagaatgagctcggcaagatagggccacatcttcctttttagtttttctttttctttttttttaatttttatttttttgagacagcgtctcactctgttgtccaggctggagtgcggtggcatgatcacggctcactgcagcctcgatctcccaaggctcaggtgatcctcccacctcagtcgcctgaggagctgggactacaggcacgcactaccatgcctagctaattttttgtatttttaatagagacagggttttgccatgatgcccaggctggtcttgaactcctgagctcaagtgatccacctgcctcggcctcccaaagtgctgggattgtaagcgtgagccaccgcgtctggccaaggccacatatttcttgttcgtgttgtatctgtgagcctcccatagtgcttggcactgagtaggcagcccagtaaatatttactgaagacagtctaataatagtagcaaacttattatgctcactatgtgcaaagtgtttaagcgttttgtatgttctatttacttactcatttaagtgtgtgtgtgtgtgtgtatgtgtgtgtgtgtgatgggaggaactcttgcagctcaaaactaaaggccccaaatggtgacaggagatggcattggagaggcaggcagaagtgagaccttgtggggcctcataagccaaggtaaggagtttgagcttcagcccaagggtagtggggagccatggaagggttatgaagaggggtgggatgtgatctgattttcattctgaaaagacctctggctgctgtcaagagaacagcatgttgagcacaagagtgacagcaagagatcagcaaagagatcagagatgacagtgtcttggcctggtgcagagaaatgaagacattcaagagatgttagcctgtaaaatgaactacaggaatagctacagattggaaacaacctgtggtggttttaaaatatagctacaaattctttagcactcctctgtagagaggtgggatccttgtaccctctctgaatcttgggtgagctgatgactgcttcaaccaatggagtacggtggaagtaacactctgacttctaaggtccagacataaaagtacaggcaacttctgctagaactctagctcttggagcctgaggcaccatgcctacctagggctccatgtctgcttagaggctgccatgctgtcaggatgccaagaccatcaggagaggacacatgaaggcaccacagtcccagctaagcttagctttgagtcatcccagttcaagcataaaagaagtgagtgaagaagaaccagatgaggccaggcacggtggctcacacctgtaatcccagcactttgggaggccaaggcgggtggataccctgagttcaggagttcgagaccagcctggccacatggcaaaaccccgtctctactaaaaatacaaaaatagccgggcatggtggcgtgcacctgtaatcccagcta

SEQ ID NO: 1561958 - DNA, 4001 bp, Homo sapiens
aatgggtctagtctttacctcatagtgttgctaggatccaacgaatcatattatgtaaagtgcttggcacatggtggtttaaagcttgggctctgtctgcttgcaatcagacagaactgggttccacttctacctcttctgcctggtagctagtgaggccttgagcaagttacttaacctctttaatctcagctgcaaaatgcgaaggttaaatgacaaaagacatgtaaagcagtcagaacagcgcttggctcatggtaggtactcaataaatattagtcatcaccgtcatcatctacctaagacgaagctggccaagaatatttatgcaattctttctacagttaattaccgaatgcttattatgtgccaggcattgttccaggcactgggaattcatcagtgtacaaaaatccctgcctcgtgaagcttaagtcttcttagcaagtatttagtgaatactcagtacgtgccaatgaactacacagcaatttccacgagactcccattttacagataagttaactacgcaaggtgaagaagctccaaccttgcgccaccaccccagaggtattctcccagcaattaggaaggctgggcggcggtcaactcccgggctggacttcggaagtggaaatgagcggccacctagtcccgagtggggcttcacccaagagctgctcactcggaccagcccggcctccagcagatactcggcgcggcagccacgcccccaggcgctccctctcctcgccggctgccgcagcgcccgaagtctcgctgacgccgcaagcgggcgaggcagggtgaaactggcacggcagaactggctggggctggcccgcgttcccccactcccaagccgagcaggcgacgcgtgacaagcggtcccgggaccatgaggcctgggtcgggccgcggtagagcggggatgactgtgcgcttcggccgccgcgggcttaaggcaccaggcgcccgctcccagcagtccccggcccacccgacacagcccgccgcgcggcgctacctgcaagtcccagccggccgactcgagaaagaagcgggcccggtcctcctcggcgcccgtcaccgccacgaactccctcagcgcctcctgtcgctccgccgccatcttcgccccgtgcgccttccaaagcgctccggcggccgccgcacaggcccagccccgctgccgcgttccgcttgccggtcgacgaggcccagccgatgagggcccagcagctgggagcccgcccgcagccccgccccacgcggtgcctcacgcaaagccctccgtgcgggaagccccgccgctccgcgccctctggcgaccgcggcgcgaaccgcagcctaacggcgggggtgggagcccgaaggatgagaggcggggcgggtcttacatacacctgtgggctgaaggctccctgcaggagtcagattcccagttattcattgacgcagccctcatttcattaattgtgcattcgttcattcacttacttgtcaagcatttactgagagctatcaatggcccgacgtttttctagggctgtggatatggcagggagcaaaacaaagtccctgctcccatgcttcttacattctaggggtaaaaattcagaccttgaacaggctaggcctccgctcacaacacgtccatgcctcgttatctcgccccgcataaaagacagtctcatggcctgcctgcaggacccatgagagatgggccagttcctccctctcatcaagggatccgctagcttcctctgctccaggcgccttgccctccttgctgttcctggaacttgccagttatcttgcatttgcctcagggccgttgcattagctgcttctgtgcctggagcacctttcccttaccgatgggcaaggcgctctccccgctttctttgggcctctgctccaaggccactttcttaggcacaatcctgtcttctgggtcctcagcttctttgccctcttgcctctccaaagaggaacttacttgttcagcttacttgttctttgttctctattttcaaagcctaacttccttgttctttgtacctccttacccctagttacggtaaacaaccttcccgcgggtcctaatctataactcacatctgttcccttggataccctcgctacaattgccattcccgcggaaactcttcttcctgccgaaaccgcttgccctaccactgtagcccacatttctgctccatttgaactagccaatcgggattagcttagattgcgcagtccagccccagccaatgggaacaggacacagaagcagcgactaaccgcattagggataaaaaccccttctctcttttgttcggtgtgctttcctgaagaccagatgtgtgagtggcacccttctgcagaagtaaattggctttgctgaaaaatcttttatttcagtgctggttttccttgagacttcgagctttaatttccaacaccaccgtgggacactcttcccttcctcttcctctgtcggcccctgctcattcttcagctctcagttcaggtgtccctttctcaaggagaccttgagaaggtgcccaggcttagtcaaaacccctcttaatcaggttatgaacagcacaaagtccagtcttccctcaattgacacaatagttgctttcctggaaaattcggtgtcttattaacactgtgcaagaaatcctttaagtttatatgacaaacgagttagggcttgggttaggttattaggagcatggttgcagccacaataggccctggcaggaggcatgggaggagggtcctttctttgtggtgtgagactctcctttctattgcaaggccacccaggaccagccccggtccctaggacttacccctttcatcattgtgtcaactcgaaatgcaccccaactttccaggaagtccaagaagctagaggctcactctggacctcacgattggcaaccagtaaggtctttctaccctggaaactgacaacgactaaccccagcttaaagatctgcaggcgatcagctcctcaaggtccagttccctggctggtattggagtcattgaaactcattgtcaccccccctcttcatttttgtgccatcagggaaagctctttgttcggccagagggtccctgatccctcttctagaggacttgagggcatcctttcccataacactacctggcagctagtgtttactgagcacttactatgcccctagacactctgcaaagagccttagatacactaactcatgcaccctatgaagtgagttctattgttatcatttccattttgcagatggggaaacctagacttctaaagagttttgaatccaggtatggcacagctcctgagtctgcttctaaccgctacaccacactgtctctccttagactgcaggactgtgctggtcacttcctatggctggtttctggaagcagctccagatgacccaactggagtttaaggcaggggatgtgagggcatgaacttgaaactacatttacataacacttatctaagtgtccttaacaaaactagagaaggaggtgctgcaggctcagctttagctccactctcctatgtccaaccacaccagcccccaacctccagccccatcccacccaagccccatccccaaattctaccaccacgaccacctccagcctcacctctacctcacagatccgccaccagcacctgacccaccccgccccactttcccttctaactccaccctcagtactaaatgcaccccaccctccaaagcccactttcactccatttcacccccagccccctccgggctcatctccatcttccttcccactccagtctcaccccagcccctccctttaatcctatcttccaccacctcccgccccaccccagccttcctttggcaccccctctgccgtgtcctcactggtggtgacttcactttgggcaggagctgtgtgtacccaggactggtgtctcctctgacccccta

SEQ ID NO: 1561959 - DNA, 4001 bp, Homo sapiens
ttccaagatgcctttcaaagttcccgaccggccctgacttcctccctggacaccagcctcctgctcggggctttggtttgatcagccctcccctccagcactggaaccccccgtgccacgaacctcagccaaactgattcccaagggggcttcccacccgcattcccacggcgctttgctcagacccttggagggcccttagtcactcggctccagttttacacacctcaccacaacaccgccgccacacgcagatcctcacaaccttccccgcagaaacatcgtccccaccatcccgcaataatagtgcctgtgagcccttctatgtgtcaggggccatgcaaacacttcccacgcgtcctctctccaatgctctaccttctgaggtcaatgctatcactaccccatcacacagatgggaaagctgaggctaaactaggaactggcccaacacggcatcaggttctgttctgactcccaagtttgggtcagggcaggcagctgggaggcaccggcagagccagtctgggggcttctctgcagaggaaggaacatcacctgttggtggcacagtcttttgagaagctgatgaaagtgttactcttcctttggagacgcaggtgccagcgcacatgtttccattaggcttaaggaattcagagatgtccgaggcccagccaccaacaccagagaggtcacaggcaggggctccatcccctcaacaggagggaagaagataggggctgagcctggcaactctggagctgcccccaagctgccccaaccgccttcccagcctcgcaggagtagactgtctctgtgacatctctcccactccctacccagaaggcacaccactggcactgcttttggggtgaaggagaggggagccccggggctggttactgaggctcacctgtatgacgaccttgacggtggcagtgtggatggtgggggtgcacaccaggccgccggcgtgctggccgtcggcgctgcggttctgctcgcccatggtgaacagcataggcaccgccagcagggccgaggcgagccagatggcgctgatgaacttcttggtgcggcttcgggacatgagggtcttggccttgaaggggtggcagatggccaggtagcgctccacactcaggctggccacgttgagggccgtggcgtaggtgcaggcgtcgcgcaggaagtagtagccgcggcagccggcgtcgccgaaggcccaggggtggtgcacccagatgaagttgtacagctccacgggcatggccagcagcagggtgagcaggtcggacagcgccaggctgcccaggtggtaatgcaccgtgctctgcaggctctgcagcgacttcttccgcgccagcgtgaacgccgtcaccgtgttgcccaccgtgcccaccacgaagagcgccaggtacacggcggtcaccagcaccttggagtagatgtcggtgttcacgtccagctcgctgctgggtgccgccaggacgcgctccgacgcgttgcccgaagcgttgccgaagcccggggccagcagcgcctcctccagtccggcctgcgcccgctggaaggggtcggcggccggcgtgcccggggttcccggcgcggagctgttgaggcgcatggtgggcgctggagtccgcggctctgtccggcgcctccggggctggaagtccgggcaggagtgggcgcgtctcaggcggggaccgatgaacgggagcccaggggagggcgcgtggcgaagaccagcgggcgcgccgtccagtcgggaagcgccagacccagacgcgccgccccgggctccgggctccgggctccgctctcctccggactcccagcttccggctcctagctccagaacccgtggttcctcgggctgtctcccggctcggcgcttgccacgggttccaggtgcctccgatctccaaaccgcgcggttccccaggcccccgaggacagcgcccagcccggctcgggctgcgcggggcgagcttgtggcgccgggaggagcgcacgcactgctgcccgggcgcgctcccctccctcgctcagaatctcctccctcgcgctctccgcgcaccccagccccgcacacctcccgccgcgcccgcgccctcccggctctgcgcgtctccacggagccggcggccgcgcggcgcgcccagcagtggggggtggcggcggaggagggaggcagcccccgccgccatccccgccccgcccgggtgcagcctggcgggtcgccccctcgcgctccccggggcagggcgggctggggtgagcgctccagggaaccaggattccgagcgggcgcggcgggtatcgtgcaccagacccttcctgccaccctcttccctgttctccgcaatttctcgcaccggctaggaagggaactatgcacctcccccaaccctgggctcgctcagttggggtgagggtgtatccggagggcagggagggaggaagctccccgctggcagggctgggcggctgcgcagctggttgggccgacccccactcctgggtgtccacagggtgccagaagctgggtgcccagggggctctaggaccactggagattacatttctggtgattccttttaaaatctggccgcagtcatgggcgtgcctggtctgtgaatgcgtatttctgggatgtgcccagtggaaatggtgggggctcagggcatagttatcacctggggcaggatggcgtgaggcagtaccgagggacacctgcaggggctgaggagctgaggggctgggtcctgcagaggccgggagccacagatggtttcatcaaagtctggggaggggtgaatgagggagggcagaaagcaggtgcccagagcagcaccctccccactcagggccctgcatctggcaccctgggctggtctcatgacgctatgggatgtgatgccctgggccccttattactgcctggatttgtcatcagaagccaccctgagagcctgcgccccagcaggatttgggagaggcagccccagcacgcatcctcccaggccctgcaggctttgcacactccctccctctgagtgtcctcacagggtgccccggcccctggctcgggagccaggtgagggcaagattcctgtcctttccgtgtcccccccagcacctggtggcactggcataggtggccaggcacaagcttgcccccccctccatgtctgggttgcccaggggcccccagggcactactgtcccttctctgggccctccccgccccctcccctgctccctcctccccagaacccctgggagaggttgggtagagctgctgccccatgtgtgcagggctgggaggagctgctcgagtgcagcccagggaaccagcctggcctttgtgcacatggctggctgcacctgctgtgctgggagcaggaaacctgggcaggctggggcgggggtcgcagggtgttgagggaagcgggaggctgaggaaccccctcccgggcccgcccagctaggagaattcaaggcttctgagccggtggctggcagcgggactctgtgattattcgtccgttctcgccctgctttggacttctctgttcaaccggagcctgatactcttgtcagggggctgcagctcacaaacatcagagcttagaaatcttggcatcaaaggaaacgccagtgatccctttgctggaagccagtagataggattgaatgttggccctgctacttcacatttgggcgagtgtgcttagcgtctctgtgcctcgattgagtcgtctgtaaaatgggaatagcggctgaatgaagggcagggctgttactgatgggtctccacggggaatgaacgaggtcgaatgggctgtcgggtgtgaggtgaggtgttccatccaactagaataggctggagtaggccagatttgtcctctggaagacacgattcaccagttaagtacacaggtttttttatttttttattttttttatttgttgagatggagtctcgctct

SEQ ID NO: 1561960 - DNA, 4001 bp, Homo sapiens
tcacattgtcccccaaataaaaaagtccaaaagcatttaaaaaattgacatttacttttttcagggtacaggtacaactgttatgttcttttctccataattaaaatatttcacttaaaaaaaagaggacattactaaaatagaggacattactaaaatagtttatacttacaaacttagtgaacagttttttttcatttcaaaaaaaagacttttttttttataatgattagcttatgaaataaataaaacattccacatagggctggaaagagccaggtacttataacggctgcaaagatggtgcattgcctctggtaaagggctggctgggagggaagctgtcctaaaaatgagcagttaagagccaatttcagacgtgggtctttccacgccctccacagacctcatagttaagcctcaactgtactctggactgagtacagtggtccctcggtatctgtgaggaactggattcaggacccccgaggataccaacacctgcagatgctcaagtccctgataaaatggtgtactgtttgatataacctatgcgcagcatcctcctatataccttcatcatctgtaggtaacttataatacctaatacaatgtagatgggatgtaaatagttgttatactgtatagtttaggaaataatgacaagaaaaaaaaagcctctacatgttcagtacaaacgcatttttctttttctgaagaatatttttgatttgaggttggttgaatccaccccacgcggaacccacgactaagaagcgctgtgtttgctaagggcttcacacaaattacctcatttaaatgttaccacaaatggatgaaaaaggtattactataacaattttacaaatgagaaaagggaaacctagggctggatcaaagtaacgacggttaagtacactcctgatctatcgtttacaagactagactgagggctgaaattttgtcaatacaacgctgtccttgtactcgcgtaagcaagtctccatgagcacaactccaggactgctagagtgggaattttctcccagggaccccatttctctttggctggaattcccgatctccacctcactcctcctccctccatggcaccagtccccccatcatctcagaaatgcccctcttctccgcccctggctgtctttccaaacacaatctaacaactggccacgcccccacacaccatagaaggaccatctccacttacggttttcagctacctatgaggtcgtcagtcccgctgtctgtgtcaaatcagaaaaagaacctgaccgtgaggactagagtaagaggctgtgaagactgccgcctcctcgcacgacccacaccgtcgagtgtccggagatggacgggaaaagctaccacagtggcatggccttatttcctgtgagtcgcctttaattcaaacctagacagacgcacgccctgcccggccctcctcagacccgagagctgcgctgtgaggggacgcgcctcccctcgttgatgagaattcgctgccacgctttttgcacaggcgagagcctcaccgcggcggcaactctaccacgtggacaaaggcacagccgtgtctcattctcgacaatggaggagggcgtggggtatgcactaggggctgtctcgggggtcagaccgccgggggacggcaacgtacctgcgcggcgacgtccagggtcagcgcgggccgcggcccccacggtcgggacgccccccgcgtgggacgcagttccactgaggggccggccgcggaggtcacaaggtgggcccaccgaagcctctggtaggggcacgggaagagccgcctttctctcctcctcctccttcttggaggcttactctgggtcaccggggccccagagccgggggactttccggcgcagttccgcggcttcccgcgcgcggccagccggtctccacgcagacgcgagcgccccggcgccgccctctcccgcattcccgtgacgggcagcgaagtcagccagtgggactgcgggccggaaggctaactccgcccatgtgtggcttataagaggcggtagcttccgggagtgtcactttcccagaaatcccggcaaatccgccctagagttttcgttggtccaaccgggccacagactccggcccgtctggttaggtgggatgcctgattgggccaaacctcttaggtcccgcacctagagcggggagtagcgtctgcttttttttccgctgagcggaggccgctaggctggagagggaggggaaggtgtgtggggtcgggtgagatgctttcccctcgtcccgcatgcgcctgtattggagtgatttcagttaaaagtctcgtgaaacgtcaccagtgatgtagtcacggccagcagcagctgcctgaccccgccgaggccttccgtctggcaacatgtggggcgccgcaatgcttgaggccacggcgagggcaacgccggccgcgccccgtggaaaccgcgtggcggagtgcttgagccgatcgcgctctttaggagttaggccacttagaggcgacatcttggtggacacggaggaagccagttttagtcagatgggaaaagtagctaaaagtgggaggagactggggcgagggtgggacgtgggggaggcgggggcgtgacggcggctctccactgccctgaggcttgaggggccccgggaaacccgggcccggctggggttgggactctgttcttccgcgttcatagctacgattcagctgttctggaatgagaactggatttttactgaactttacgaacaggctcaacaggatgtaaccattcagtgtggaggcatgagaaactatagcttgtaaattaaaagaaaaacctcatttctttagacaacattttcagctccatctgctggtctgaggctgaataattaattgaaaagccaggagagaaatggggctagatgaagtgaggtagtttaacctgtgctttcttggcgtcccgtcggctccctttgcttgcattcctaagagaatcttggtctcagatttcaggacaagtggaaaacagttgggctatttagtataggccaccccttcccccccgcaccctctccccccacacacttcagttaagtaggtggaaagtttggattattaaaaagacacgttggaggctgagcagagagtgtgaaagagcattttcggggctttgtgaactaacatggccttttgaaccccaaggcagtgatacttggattgatctaaatcagcgtggatggaatggaagtgggaatgcgttgatttactgcacgctcagtagtttggatgctgtgctgcttttgtttcctgtataataagcccctttaatttgtttcacataacttattgggggaggtaccattatttctgattttatagacaaggaggctgacaaagaaccatcctggtgtcacagggtcgattcatacctagaaaagtatgaagattcatacctagaaaaattagaagaacattaatgcagctccaaggccttttaaaaatgcgagactttagctttgaaaggcagctgttctgccttttaggtttgtggggtctgccttttaggttagggtccttttaggtttgtgtctccagcatataaaattgtgcctgacccaaagcaagggctcaataaatactgtttgaatgaacagacaaacctgggttcaaatcatgctcctcaactgcacagttgtgatgatctgtcctcaacactcactccctgctctctttggaagcaaccctggcttttattccccctatttgtagcaggacaagccgcagacaaaacccctcagaaaccaagttaaagaaggaagggctttattcggccagggaacttcagcaagactcacgtctccaacaaccgaactccccaagtgagcaattcctgtcccttttaagggctcacaactctaagggggtccacgtgagagggtcatgatcaattgagcaagcagtgggtatgtgactggggctg

SEQ ID NO: 1561961 - DNA, 4001 bp, Homo sapiens
gggcaataacatatgtgctgggcaacactgaggcccacttgaggttggagatcatacattatcttaagtgagagcaggcagaaaggttatacgggaatatggttataaagggcagggagggtggtggggaggctgtcactgtgttggttacaggcaaagctgctgacttgctccaccatcaacagcttgaaggataagcatgtgactgggtctagttgatccaagtacctctgatcccctggccaccgtgactggtgcagggattgcacctgaccggagatggaccaatagagctttcctcaggattttgctgcaacgacaaaaaaactgccctttgttgccttgagagctaagctggtaggaagatgcctcaagccttggggaccaccatgtagtatgagtcggcctgggatgaaggcaacacaaggaaaacagtgttaggaaacagacagagagtcccagtggccttgttggaggacctggatccagaaatgcctgaagccgaaatctatgccggaccacacactaggagatgtctgtttttctacaggcagtgtaagatcaatctgtcacttgcaactcaatgagtcctgactaatacagaaacctttgtcacagggcttctgggacaataaaatgaaataatccatgtaaagaagtttacacagggtctggcacagaagagggatcctataaaactgcaccacttgttactctgatgatacttatgtcaacgatgtaaatgtttcactcgagtctcctctgtgcccaggctctgtgctgacccctgtggacacaaagatgaattaagtcctggtcccactaaaggagttcacagtctaattgaggagacttaaatagaccattagagtttaagttcattaacaaagaattctgagcatagtatgcctgggcctggactggggtgggatagatggagagtgacccagttttacctgggagtcaggaaggctccctggaagaggtgacattccagctgggggtggaaggacaagtgtcagtttgtgggtgaagaagggagttggacatccctgacagaaggaacagcgtgtgcaaaggtcctgtgctctgaccatcgggaaatagggagttgggagaaccagaacagtgggaagctgagatgcagtgaggcctgtggggctggagtgaaggtcacaaccttgaagccctaaaggctgaatcatatgcaaatgtgccttattgtggcccactctgtgtgtgtgtgtgtgtgtgtaagctgcccccatttggaaataaggaagtttcacattaaaatctgggtttccagcttttcttgagagataagaagatctgggttagagctcccacctttgcaacaggtagctggagctgagtatccactacccacctttgacaggggagcagccctgcagactgcatcctgctgatcaatgaacgggtccgtctgcacacccaggtggccttccacaggtgcaaccccttcccagctcccgaaggcatttgaatttgggactaaacacccccttctactatataattaatatttggaacacagtagcttttggaataatagctaataataaaaacaattttaaggattgaaagccagtcctaagtcatattggatgacaattcctgcacggggtattgaaaatggcaaggaaactagctgctgtttagtgagtgcttcctctgagccaagcaggtgccaagtactaagcatgtgttttctcattcaattctggcaacagtcttgtagatgtcattattacttccatttcacagatggggaactgaggctcacagagaactgaggatttgcctaaggtcacatagccaaggaatggcagagctgaagatttgggttcatatccatcacccccaatggctgactgttttctcacctgtagccctcagtgtccaaagtccccagacctacccggtcttgacaagttgctcagctgctcctgggtggcctggcatgctgtccaaatggcagtggtttcaggcgggcggtcgctggcagctgtggcaggtggagaggaagtgggggaatcgctgggacttgggaatccctgccacttctgcttttccactctttaatgaagctctcctggctgccttgtcccgcccttttcggggcccacctcccagagggttgggcaagctgcctcatcctctgcccacaagcaagagcgggtggaaggtgtgggaagaggaaaagacagccttttccaagcgatgtctctaatcttggtagcaggaaggtagaattagccccattttacagagaaggaaactgaggcacagagaaaccatacagcttccctttccctcccactccatagttgtgtgccccaaggggagcctgatccctgctcttgggactcacaggtgataatcagacccctgccaagtactgggagcagtggctctggtctccttccccagcccccttcctgtctttagcctgacttgtacctcgcttcaaatctcagctctgtccctccctagctatgagaccttgggcaggtgacctcatatctctctgctggttttctccccttaaaaaaagtttaatgaggctgggcacagtggctcacatctgtaatcccagcactctgggaggctgaggggggtggatcacctgaggtcaggagtttgagatcagcctgaccaacatggtgaaaccctgtctctactaaaaatacaaaaattatctggtttgtggtggtgcatacctgtagttccagatactcgggaggctgaggcaggagaatcacttgaacctaggagacaaggttgcagtgagctgagatcacgtcactgcactccagcctgggcacagagcgagactccgtctcaaaaaaaaatagttaatgaaaataacagttaacatttattgagcacttactatgtatcaggcattcttctaaacaatttctcttcaaattcactgaacacttactttgaacatccctttatggtaaagatgttattttcattcttcagctcagaaaactgagactcagagagctacgtcgccaaccacgccactcagctattaatggtactgccgtgatttctaaccagcgggctggcttcagggtataccagttagccactgggctctgctgctgtggaggggataattcacagacctcgtgattacttcatagtacagctggtactgcaaatagtaggtactcaataatgtaaattccccacgcacaccctctgcagttagtgccctgcaggtctgctttcaggctgtcctgaaagccagttcctacctggaatgcagacacctctccagcatctctgtaccccatcactcccagcaggcctcccctgagccccccaggctccccctctgtgggatggaccagtaggggcacagccactttcccttataaggacatgttgcctgggtcactctcaggcctgaaggggaatgtcctgcggcctggataggggaagtgacgttcttatagttacacagcgattgaatggaatacctgtggccagaaccctcagagggcctaacacacttcccagacagtgcacccctgcaggatgttaggccagctaccaggtctgcaaagaactaagtacatgaggcagactagcagcagcaaacttgtgtacccacaggggccacgctgcttagctcatgaacaaagcaggatgaatgcaaatagcagtgagctacaaagtgtagccccccccactccctcctgtctggtcagctgttattcatctccagttgagggtcaaagccccttgaaaacgaggcccaccatgaccagattttccagcttttctaaagacgccagtcattctctttttaatgtaaatgtcagcttttttttttttaaatgaaagactaccatgcagaccaatcttaacaggtctatgggccaaagccagcatgaggagcatcaattttcaccttccgcaggaggccttagtcaggcctgctgttagctgtctggctg

SEQ ID NO: 1561962 - DNA, 4001 bp, Homo sapiens
tacctagtgatgaggatggtgggacacagccctgaccttgtgatgagggtggggggcctggggctgagcctcactcggtgggtagggcaggaatgggcgtatttgtccagggcaacaattgggacccaggatcctgggggagtgctagaaggggggttaggaggcccggtcagccactgtatcccctggctccccgctgagctccagctgggacctggcgttgcctctctgcctgatttttctttcttatttttttcccctcgagatggagcttcatgcaatctccacctcccaggcaatctccactcactgcaacctccacctcccaggcaatctccactcactgcaacctccacctcccaggtttaagcgattctcctgcttcaatctctggaggaactgggattacaggtgcccatcacgcctggctaatgttgtatttttagtagagacaacagtttcaccatgttggccaggctaatcttggactcctgacctctggtgatccgactgcccaggcctccgaaagtgctgggattacaggcctgagccaccgccaccgacctctcggcctgatttctcaacagggccgctggtgtggttctctcgccccgcctgatcatcagtttctacttctccttcctggggccagcgggagcctccctgggtcagttctggaggctgggtcctgactggatgtggccacacagtcagcccacaggtgcatacatgacactgcccaggaaaaagtgaaacagccccgccagggtccagcgcaggcagctggggaggcctgaggggtccaaaggggaaggggaggggcttgtggacagaagccacagcaggaggcagagggaagaggtcaggggtcacgggcgcctggcaggatggtcagggcctctgagcaccgcttcaggagagcggcctgaggaactccagtgaggaaagcccgtcaagagcccacccaggggtcacaccgtcctgtgggacagagccagaccccacccccctgcccagcctgcctggccgctgccctcccggcgacagggcggagcccctccgtgctctctcactgcccgctccaccatggccaggcgcaaacgcaaacagtgctgggtgccaaggggagaatccatgcggagccgtcgagttccatgcacttcccggccctccgcaacccgggcagctcagctggaaggccgctcccagatcaatcccagctccccgacaggggggccggactgcgacagtgtggcgttcccagcgcggcaacaaaagtaaccccggcgatgacaggcgcccggcggtaacaaaagtaacaagcggaggccccgtcggcccgccccgggctcccgcaggtgcagacgcgaagcctcccaggccagacccggcccgggccccagccccagccccagccccagccccagccccaggccgcggggcctgcgcaggggccgccaggaggccgaggcgcgggcccgaggcgggaggggttccatcaggggcggccacggcggctgggggcgggacgcgcccgaggcacccccggggggaacggcgcccacacacgatggggcccgggaggctcagctccgctgtcacccacgcgcggcccccgcacttccccgccgggccctggggctgggggtcggccggtctgggggggggtccccggggctgcgggagctccaggaggctccaggtgtctccgcccgggatgggggggtctcccgtccacgcagccgggcggggggcgccggggaccccaggcctcttccgcgccgcggggccgcacctggaacgagctgggccgcgccgcccgcggctcctccgactcctcgtcctcgtcccctgcgtccgcgtccctcgcgccggcggcctcgccgtcctcgcagtcctcgtcctccgcgtcctccgcatcctcctcgtcctcctcccaggtggagtcgcagtcggggtcgtccatgctcggcggcggcggggctcgcgctggaggcggaagcgaaaccgaaagcagaggaagcgcggggggcgggcggggggaggggacggagcggcccaggccccgcccgcgtccgcgcgcaacgcccctccctccccgggacgcccgccccgcgcccctccctcccccgagaatcccccaacgtccgcccgggaggatgcccctcgcggaacgcccacccccaccccacgatgcccacccgggaggattcgccccaccccgtctcgcaaggatgcccgccctaggagatcctccctcccgaaaatgtccccaaagcctgcccgccccccagaggacggtctccccggaagatgagccgggtacctaggaaggatgtcttcccgacgatgtcctcccagcaggattctctccccggaggatgcctgccccgcagagaatcccctcttccaggaatatttctgtcccccaagagaaatccccccagaggatgtccccatcagaagaatgtcccttggaggataacccccggaggggccacgtgtccacaggggcctctctccctaagctgggtgtgtaggggtctctgtccttctgctgcgggctgggggccttactcagctcctggaagctgctggcggacccctgtccctccataggcagtgcaaagcacggccgttttcttttcaaagccaccaggggagtctttctctctagggtgccgagtcttatataaccaggatgacatgggcaagccgtggcttccttcacctttgccgccatctctcagttgtaagaaggcacttaggggagaggaccacacgaagcctgggccaccgggagggtcaccctggggactgttcaacacagctgatgccagttcagcgcctcctcagggccctctctctaagcactggcagatatggggcaacacaaagtcactttcacctgccatttcccagcaccgcgggtcccttgctcatccacctttgacatctgctggcagatacatggcaaggttggtgacctcttgaaataaaaatcaggagtggccactccagataaatttcttctgtaactgctataccaattcatttcaaaacatttaggtaaaactaaatctggattttggacttggccatgaggatagctcctcgcagagttgtccctgtaatgatggtggtggaaaggtggagaaggccccagcccagcccctaggggacactgccatctcctagccctgcaggcctgctgggcctgggaactggtgacattccttgtactgtgtgccagggacagccgtgaacgcaagtcttccaatcctggccacaagtacaggttaaggaccctctgggtgctgggccctaatctttgctgacctgttgaccactgttagcaggtgcagtctcacctggctggaacctgtggacatgcatcacactttcttgaaacgacagtggtgatgccccgaagttctggggcgctggacatttctgtaaatcaacttagtgcagtggccagggcaggtttcccagggagcctgagtgagctgcctgacctccttgttagatgatttacaggtgggatctggttgcagcatcagaatagactgtgaggtggagtcggggggctctgatggggacattgatgggtgctgggtggttgtatagggtttgggtgatctgagacttgggtggtcaggctgccccctccactgccccagaaaacagaaagacaagcatactgggtgctgacaacattgttctacggggacagcattcccgctgctacctactgtcggcaggactatagaaccacttccctaaaaagagtattagagacattgcccaacttctgttttacaaatatcaccacaccaaattgcttctttagttgcttttgtgttgtgtgtgtgtgtgtgtgtgtgcagagctcatctcgggggcgtgctaatccaagaagtgcaggagctgctgcaggggactgtgcaacagaattgcttcttcagagcatcctctgcagtccagtgacgccccgtgtg

SEQ ID NO: 1561963 - DNA, 4001 bp, Homo sapiens
ccaaactccctgcagcctggaccccaggattctgtgtcttggggattgactgagtgcctagaatgagttcatctactgggagaatcacatattatttcaccatttctctgagactccatttctttatctttaaaataagggtcttggtgcagtaccccacagcagcaagtgctccaaaggggatgggtcactctgcatcagacaggcaagagggaagaggggcagagacaggcacagcagacccagcacccagagaaggccagcaagacagtgacctcagtgactgcaccagggtcaggccggcactcgggccctttgatccccatgaaaaggcgcagggggtgctggatgtgcaaaggaggctggggaatggggcctggagggacgcctgcctgtagaaagctctatgggaaggaaggcatgtggtccaaagcccaatatattgagggctgtcagggcgcagagggtcctgggttcaaatcccagctccgccatcaactgcccagctcacctggccccacccatggacttcaggatgctgtgtgccgagaggcagaagccagggcggtggagagcaggcccaaggggccagaggagacgggggaatgactggggggttgtagagtgacccgagggggcagggagggcactgaccttcaccccctgccagctgcccacagctgcattttcccacagcagagacaacaggccggctcagcggggtcagcctggttgtgtgtggcctgggccaggtgctggcccatcttcgttgagcttccctgacctcacctgtgcccaccgctcaggagtgttatgtgggctgaataagtagcagcctgcctcttgtccctgtgggcttcctggcccctgcctttccttgcctggcctgacaacatggcagtcacagggttctgggtacagcttcgagaggcagcctgtctgtcctccagggccctctgacctctgacctcccccttcgggcccccgcccccgctcagcagcgcaataccctcccctcctcagccctcccccctctcacccaggccttccctgcctgctccccacaactcactctgcgccccccagcataagatccaggctgatctatgttgctggcttctggtcctactgcctggcccacaggggcacccagatactgatacttgtccgttgaatgaggaatacaagtagaatctccagctgcctttgcacccctcagagttctgtgaaggtgtaaggtgtgcacctgacctgtgcaactggaaggcattttatgaacagatcccgacactgggaactatccgggtggagtgcttgtgctggggaggacaggagctgcacacagccgggccaggggaggggcggggggcacagatgctctgcagacacttccagagcagggtcagggccaccctgacacagggccaaagcatgctgcgatgagaagcctaacccacgtctgtaccgagtcataaaggatgagaagagtcggccaaagggacagggcgttcgtggcaaaggggacagtgtggccttaagctttaggacatcttgggacacacgggtcagcagggactctgccaggccccacaggagacattcggcatgactccggatgcaagaacccgcacccccagttctccccagccccgcagcacaggaatctcccccttccttgggaaccccccacagcacagacaggcggctcttaacccagttttacagacgcggctcacggaggcgaggggtgggccgggctggcgtacccgccgatcggtcctttgcagcagcctcctctttcccaagctgggcaagcagcatatggggcccagctctcgtgcctccactgtcgtggaagtcccacacggatggcaaagcaggaacggccccgccgagcagagtcgggggccacggccacacccccatctactaccgtgcggctccgtccgcccgggagccagggctccactatgagcacctcgactctccgggccacccccaggcgactgtgggggccgacgcgcgggcggggcgggtggggtgcggagccggccgagcgcggggcggggcgcggcgggcggggcgggcccggcgaccgccggcgcgaggaagtcccggcccctggctttggggaagtgccgccgaggcgcctgcgcactgcgcccccgcgccccctccccgactgtcgggccggaccttggagcgcgcgggccggcggcggcgcgagtggctcgggagcgcggctggtgagtgcgcgcgcgcagcgccggggacagcggccctgcccctcccggcccgggcccggggaccgtgctgggcgggagcttcgggagccggcgcacgggactcgaaccccaagggctcccgccgccaggtccacgtggaccctgggccgcagtggaagtggagcccgccccccgcgcgtgggggagggggcgccgcagccgggttcccctttttctggagctcaaagcctggggaagtgattgctcaaaggtgggggccggaagaacccaggtttccgcgtctccctccccctctcagcccggtgaggaggggccggggcgggacaccctgtccgcccccgcccccaccccgctggatctggcagccactcagcccttcgagctgtaggggaggcgctgcgcccccggccccagccgatcgggggctcctggcgctagcctccctccagagcgccgcaggagtccctcctgccgtctgacttgagtccctgctgctgcagtgcacgccccttcggcagccagggtggggcccagacccaacctggcccctcctgcccccaccccgcctttgggtcgctggtgagtagggagctttgaggtaggggtgggggcgtcagaggctgaagaaagaggcacctggaggagaacacaggcttctccagactggaccctaacagcagagagaggagcgtggtgggtgggccaccaccaccatttcagaggtggggagagctggccttccctggaggggccaggccagggctcgcccaccagccagatgtggagggtggcagatgggaaaggccctgggtaggagctaaggactgagaatggagcccctcttcaacccccctcccaaaggttatgacatttttttctgggattgtcacattttcttattctttttttggactgggcaggctctgggacgttctttttccttctgtggagcaaagcggcagccactcccaagggatcctctatccccagagagcagacgtgccgcctatccagcctatcccatcccagacttgggggccaaagcctgggaggctggggaagggggtccccaatgccaggttgacaagcaggaggaccctagttgagactctgtatcccccaggagagacggggggagggtagcctggggacatgggttgccccagttgacctgagaagggtacaggaagccaggtccagggacaggtgaccaggtccagggcctgcaactgggaaagaaggggctggctccctgctctgcagcaaatgcagcccctagcaccccggccctgcacccctaaacacgtcccctcctccagttcagagctggggtggagatggtagcccagggggacagtctcaggggtgctagagtgtgggggaggaccctgggtggggacagagaggaggaagaactgctgcctggggaagccacagacagccccgtctgggtacagctaccaaacctcaggttgccacgccccttcctttccctagaaacttgacccctgaaagaaagcccagctgcagggctactttcggtctcctcatctacttgctaggagcccgtgggacccccagtctcagaggaaactgggccggtggtgaggggccaaggtcccaggggatgctgcacctgccccagacttgggccagggcagtggcctctgcatgcccaggcctcgggggtattgggggccctaagagtgcagaactccagcactgtctcttctgagggccattcacacaccgtcc

SEQ ID NO: 1561964 - DNA, 4001 bp, Homo sapiens
cccactcagcaggcaaatacacacacctcactctcatccagtgactcagaatcagcaaacgccagacggcagctggaacactgtcttttgtcctccccactcccacccccagggcaggcacagtctaccctcctccttccacaggctcaccaccctgggctggccaagaacaggaatcaaggcagagggtctggcagcccctcacagagcagccatcccccagggaagccagtcaccaggccgcacatttgtgctattaaaaaagtgaaagaatttttaacaattctgagtttcatcaaaataaattactttgtccttgtgattttaactttacaaaatctatatacaatgacaaaaaaaattgagttgtagcttctcaatatcatgttaaattttgtagtcattaataaagcttactaatttgacttgaagtttcatcgtcaggccttggcagcaataaacatgcttttagatctcagcatttccgttagcccttgaaaaacacgtgaatcctggggacagaaacagatgggaggtgtcggcctgctgggtccctcacagttgctggaccccaaacacacagagaacacctcccttcttgcagaactgcaaacgtgtggagaaacagtaggggtgaggaatgtgagccaggtaggccctgggagtacctgctgcaaattatggactagggggtgtcaaggttttccagtcctataaaaagaggttacaagccccttcttgcagaacagaagaatattcccctactccctgcgtgactcccccacaaacgccaagagccagaaagtgccccacccatgtgtccccctggcctggacccagggaagctgagaggatggcccaggtccctgtctcaaaggactcacccctatgggagcacaaaggctgcccagagaaagcggctgctgggtgagcatccctaagcagtcactgctgcttctggagaccagggaccttcctcaagccaagctggtgctgcagcccaggcaggaccccaaaggcacctgcaggaggggagggaacagcaccaggaagggccttcctggggagcagcaaaagcttgagggctggaaggatgggcctagctgtgggatggggtgccggctctgggacatagggctgaatgtcaaaatttaccctcttactgagaggccagggcagtctcccaaaaacaatgggaacacccaacagcctcctgccaaaaggccagaagctcagctaagaccctgctcctcagctgggacagccctactcccaaactcacaggttccaaactcccagcaaggtgtcccagcggcaggtctgtgaatatagagagagtacagacatctcgtggaagtaatagatacgtaacagattggactttttgcactaatttttgcctaatttaaactgtggaataagcacgtgaattaggaaattctagaacacacttatgagtgcctgaagaaattataaaatgattaagtagttaattgagaattagttacaaaacaaaggaatgcacaaatagatttccaaaatctagtatctaggacccaagatcccaagacacagtgttcagcaaaacccagctctagtcctggggacaccaggacccctgagaccccaaacttgccctagaagaggtgaggggtcctgagttctgccccattatccctttctgtgaacaccagtggctggggccagagccccctggccatcagaagggaatgggccttaaccacaaaggtctcctcatagccgagggccccacccacaaaactaaccccaaagacccctcaagccaggaacctgggcccacaacccctaggatggcgcgtctgcggccgcctggaaaggacgctcacccaagctggagaagccggctctatgcctctatgccccaatgacccctatgaggggcgcgtccacgcccagactctaacccagggccctccggaggggaccctgccccccgccacgacccgccccacctggtcgagggaggggcaggactcccggttgctgggcaaccgcgtcaacaagcccaaagagtctgggctacggcggaggttcttccgaccagagaaggcagcaagcagggggtgtagggaccaagaggtgggggctgggcctcggctgcaggagctaaggaggggcgggggcgttagccgccgctggggctggccgtggctctgcctctggcacagcgagcccagccctggctggacaaggtggcagctgtaggctggggccgggaagggaggagccagctgggcttttggaccctccctcctctgtcacctgccctctaggctctgctccccacaaccatctaggcctcgaagggcaagagcgagctgtctggtgggagaccctgactgtcggggaccgcagacataggggcacaacgaaggtcccccaggcgtcacctagagctctccatgtggcagggcctgagatcaacccagtggggtctcagcattttctcaattcaaacagaacagtccatcgggtaggaaagatatttcctacaactgagttgatcagaaagtcctagttgactgcaggactgagcaggatcagccgatggcagagctgctggggacgtgcgcttgggagagggagagcgcctgggcaaagctcagaggctgggggtgcggaactcaaaaccgactgcggagagcccagcgggcgggagctggggcgcacgttggggccctgccgaggggcgggcagggcccggtgccagccccggcaccgacgggacgccctcctccctccgcagggcgggaggatgccgccgccagcgaaggagggcgggcgcaagggcccgcgggagcgaagcgggaagagcgcgccaggcacggcgcagggtgaggagcgtgccaagggggcgcccgcgacagagccccccaagccgggctgggccctgacgccgcagggactggcggccatgctccctgcgcagcgccaccgccatctgctcttcggcgacctgctggaggacgtgggcgcggcggcctccaccttcccgtgcgggtcggtggaaccggggtaccgcatgcccgacccgcgcccgtggacgcagtcgctcgagctgcccgccgagcgccagaaccggctcctcggcgtcctcaaggcagcggaggcccgcgggcgagtccgcgccctgcggctgcgctacacccgcatgcgggtgaggcgagggggtcggagggcagagggggcgcaccgggagcgttgagcggagccggccggggcggggcggggcggggctcggcgcgcgctcagctacccgggccccgcaggccgaggagatcgcgctgctcatccagcggcagaagtccgcgcgcgccgccatccggctggagctgttcctgccgccgcagctgaagcccgcgcggatcccggaccccctggaccgccaagaggtgcagacaagccccggtaggggcggggaaaggggaggggccctgcccgcctccgcacacgccggaccccagcctctctccccggcagcggaggcgcgtggagaccatcctggaggagaacgtggatggcaccatcttcccgcggtgacggcgactgagagtgtgcgacgcgccccagcctcccacataaagttataattctccgaaggctcgctggtctttttgctgccactccccaggaccccgagggaagcggggagtatggacgctgcctctcccatgcacctcacagacatcagggtacagagagtggggcctctcccaaaaaagtggggagacgcaagtgggtgggtgtgaaagtaacaggtcagggacacgcctacccctaatcccgatctgccccccactggcaacctggcgttctgtgggtctatgggaggcccccagtcttggggaggacggagaaagagcctgtttcagcagaagtcacccccagatgtaagggtagcctcaggctgcagtggtctcgagtgcgagtcatcccaccagggggccagggagagggca

SEQ ID NO: 1561965 - DNA, 4001 bp, Homo sapiens
tgcccagtggactgttgtgaagatcacacaaagaaagtgaatacgacatgctcgtaacagtcctggaacaatcattattaaatattatcgtctgctggggtaagagctgtcattaatagatggacacatgaagaaaacagggtaaattctatgagggagactcagtcactcactcactcattgccacattctaaaagacgacactgtggcaggcactgggctgggcagggaggaagtgccaccgacaaagttcctgtcctcaacaaggggaaggtaactggcattccggggtgcgcactaggtgtcagagactgtggtagaaaatgatttcatggcagggcgcggtggctcgcacctggaatcctagcactttgggaggctgaggcaggcggatcccttgaggttaggagttcgagaccagcctggccaacatggtaaaaccccatctctactaaaaataaaaaaattaggcgggcgtggtggccggcgcctgtggtcccagctagatgggaggctaaggcaggagaatggcttgaagccgggagacggaggtggcagtgagtcaagatcgcaccactgcactccagcctgggcaacaaagcgagactccatctcaaaacataaaacaagaaaatgatctcgtttgcttctcttatcagcaaagtgctacatgtccggatgaaggagttgaggctgacagccagaaaagaggccatgggcacgagttaggaagggcagcagggacggccgtggcttcccagcatgtggcccctgcaccagttccgggctcctcaactctccgctgtcctcaccacacatccagctggtgggaaggccgcacagcacccagccaggcccacagcaggcattcgagaaacgtctatccaaccaaaccgaatgggaccccttctccaggtgttccgggcagtcatcccaaagctgccggagccaggctaggccagggcctgtcctagaggacggttcagatagaaacgcccctgggaggtgaccctcaccccaggagagcctgcaacaccccgacacccactgcctcgtcgccggtcctcccatgaagcggggaggctgaggtgctgtgacgacctaacagtcttggtctgggcttataaacttggaaagtctaaagacgtattcttctgagtaccaaaatataactggcgaaagaaggaacctcttaaaattacattaccaaagataggttttaggtagcaagttctcaaccgtgtgtagtctgctaagatttataaattaaaaacaaaaacagagcccaggggaacggacaagggctcgcgggcaccctccccgggacgacgtgcacacaggcctgcgggacaagaaggccagggtcggagtgggactgcgtctccctgcccttcttcccggcggaactcgccctcctcacctacaggatcgccctaaatgcgcacgaaatccttccctgttcccggtgaggtggtgagagagggcgaggccgcgagcaggtgcgcccgtccccacttcctgctcagcggggcagcaggggggctggggatctcgggggggccgggccgggggtcccgggatcgcagttgccgggcgaccgcagggggaagggtgcgggggccgcgggacccaggcccaggccccacgcccggccggaactttcctcccaaagtttccccggggcgccaggctgcggcctaggccgggcgcgcctcccagtgggggtcgaggccggggccggggccggggctggaggcggcctgcggacccgggtcctgcccggcccgccctcccctccccgccccggctccagccccagcccgcggcccaggccccgcagctcgccggggtcccgggccttcgcgtggcggcggcgggggccactcacctggacgcgggtccctcggttgccggccgagctcactgccgccccgcccccgccccgtaggcccgcgacccactgacaccgaggcggaagtgcggcccgccgcctcgccgactgacagcccgcgcccgccactcgctgcgcccggcgccgccgcgtcggccgctgcctgcccaatcagcgcccggcccgaggctcgcgccggggggtgggactatgctaatcccttcgcgaagggcctctacctgtgccccctcagagccccgcccacgcagcggagtgacggcaaggacagccagtcacagcaggagagaggcggggttatgccgcccctgagccaaaaggggagggaggcaaggaggaaagggcgtggctgcagagagcagagttgacaaacagtgagtcaggtggcccggggcgtgggtgctccgccctcaggtgcactgcgtcctggcggcagtgcgggcctgcgaggctacccaaagccctgggggctttttcctacaaatgctggggaccgtgcgatagctggggcgtagctgcttccactgtcctaccaaatcctgaatatcgtccacctcctttgcatgccattcaccgccaaccaaaatccagcgccaatttacccctccagctgcatccccgaccgtttcaccaccatacttaaaaccctttggactcccactgacctacagtggctccagggttaagcccagaagttctggaatcagacctggagcttgcattctttaccagctgtgtggatttggacaaattaattaacctctctgagtctgtgatcactcagtttcatctgcaaaccagggttcccctgtcaacatctcattgaagtcatgggtctggtttgaggtgagtggagtggcataaaccaggctggctacatagtcacagcagttggtttaggggtcagcctgtgacccagttctagccaaagaggctcagtcctgggacttttgctgtagggtcagagttcagaccggaggggaggctgaagtcaaatgactctcccatctgcccacagacctctccagagctgggttaggtgagagagggaaggggccagtcttccacatctcactacccgagaacagggctgcacgagaatgaagccagcccagaggaaagccggagcaaccacggccgggtcacgtggaccctgctgcacctcagcaggtcctttccttgacttttcagttacgtgaaccacatgcttgtttctgcttcagcccatttgaggtaaagccaagagtcctgggcttcctgtggccttgagagctctggcagatgacccgtgaccccgcagtgcgtcctgcagcaaagccagcccccgttgggcctctgcaccccctcctcaggccttgtctccccacttccaggctgcccctagcagggccatggaggcagggacaggcctttgccccatctgtggccccgtggcagacgtgggtactctctataaatttcagggcatgagtgagccaatgaacgtggcctctgtggcaggggtggggcccaggccacatctctgggcccagcagggccgttctcccccaccccaggggctggccccactcactggtgggccactgtcagtcggcgccactagagacgtgccgggaccaggaaggagctggctgagcctctcctgaagagagaacggggaggagggcgggcaggcctcagaaacaaaggggttgccatggttacctctgaagaaagcgactccagccggtgaaagggaagggaaggcgtgcggcccccaagccaggacaaggacgatgaggccagttgccacggagatgactgcgctccacagctttccctgtgggccttgccagggccagctcagggtcccagaaacccatcactctccatgtccctcaccctaagtctctaagactctaacccctgtgcccttgaggggatccaacctgcccacccaccccttgaccacgagctctgcagtgagggcagcctcagaggctcaggcagaaggaccctctcatctgcccagggaccaccccagggccaagcagggagatccaccctggccttggggttgggggtgtgatctcagatggcccctgggctggag

SEQ ID NO: 1561966 - DNA, 4001 bp, Homo sapiens
atttaagtatacactgctgaaccctacaggcagaaattcatttctttcacaaatatttacagaattcctaccacgtgcatggcactagaatgaatgctagggatagaagcccaaactccatttccgtaaggactagaatctcattcctgccctccaagagcttacaatgtaacactgtgctaagaggctctgaacctacatatgtaacttttaattataccatgctgacttaatagcatggcaggtgatcaccctagatgttaatacaaactttacattcctgttgacacactaaaagatctatcatctaaaaaccaaaacaggccagaattaaaatctggctacagactaaaacttcaggaatgaagttctgtctaaaccattttcagacttccagcatttttttactactcactttttttctcagttattttagccaagagcaaatgagcgttaggcataaccttaagagctagagaagagcatgtttgtaattataaaaggctcattatgctcctctgcatccccagatccccattcaaagaaagggctgtacaactaactccggacaacagatataattggcttgcctttcttcattaatattaaatttgtgggagacagtcttggcgttttcactgcagtgaactcgtgaagttgaacaatctccaaagagatgaaactttaaaaagcctattcgaagttaaagtcaaatcacaccaggcaatttaactttgcctcggattttccacaaccttacaaaaattacaaagttcttctaagttcctccatcaaaaggccaaattcctggttttttctttcaacaaaatggatgcgtcacaatcttatttacatcttgccgttttaaccaagacctccttgaatcccaagcctaggtctacacttccaggcccctgagaagacctaagaacgatcaagaagggatgcgcgggtaagcgttgtcatcacaacattaaagatttcgaaactcccagaccaccagaaagcgtagagtatggggaagaaaaccaaacccagcaactctaagaggcaaactagaccgggaggaaacaatcggcccccaggacaaaaagcacattcacacctctccgtgcaacccactcatccctttatactcgcagcgctgcagccaaagcacaaagttctttcttttcacccagagtctgtgcctgtcgcggttaaacatgaacggaggaaaattcctagtcagaacccagaggggtaggacggggcttggagtgtggggacaacgccaagcagggagctgtccaggggcactgcccgcccggggtctccagctgtgaagttgcgctcctcgggagattcctggggtcagaacgagaggctggagtcggagcgaggcacaagggatgcgggagaagaaaggagtggggccgaagaggtagccaaagagaatggggctccgaggcgagagagaaaggactggaaggggcaaagggcggccaaggagggcgaaaaggggaagctgccgctgggcgggagacggcggaggagcgagacggggcgggggaccgcgggaggacgggaaggcgggaaggggagagagcgtggagctcggagctccagcaggcacaggccgcggcagataagggggcgcggagaggcccaggcccggcccaggcaggaggcgtcgggagacgacgcgacccaaggcgggcgggcccggggaaaaccgcccgcggccagaccggcagtggaagctgagacgcagtgctgcggcccctccccgtcacgtcagggcacttacctcctcgcagctgggacgctccggtgatgcggggcagtcagttcagagcgtctctcccaaatctcggcacccgactgacccggatccaaaccagccaagggggcggcccgcgcctcgggagtcgcgttgcgcctgcgcactccggcatgcacccctccccctgcttatgctcctcccaccccagtgactcggcagcgcggcagccgacgactgcgcagacgcagggcggcggccgcgcctctccaacgccccgcacccgcccccctcagaagcacgtgcgccttacgtaatttcctgttattcttcggtttgcctcctcccagtggcgtggatttgctcccgacccgcttttggggcgtgcctgcttcctcctctctgttaggtgagtgagtaggcgtcattcttcacagtagtcctctgcctccaccgccccgggatctccttgcgctcggtcctctacgtggagtcacctatgcagaggaattccacggggcgggggcgaggacagggtgcgggggtctttatggcagacaatccccggctgagcgcttggccagagtttctgtgatgctagaatctggactgcctgcgacctctccgggactcggacaccagccctcgcctcctggtgatcttttaggtcctgcagagaagtgaagaggtattggacgtggccagggtcaatagtgtgaagccagaattagaattgaattgaaatgccttcggttttgatatctctgctgtttgtcttgaggcaactgcttttcctcctttgggcctctcagttttccatctagtaagtgaggaagttgaaccttatcggtgaatctcgtgttttcaggcgtagactcctttgagaatctggtgagaactgtagatcctcttgccaaagaaatgcacctacacaccaaattttgcaaaaagatttaggcagttcaccaaaggagatgaattttaggattctttacatttttctgattctgaatgttgctcagatggtaggcgggaaaaggtgatctgtgcaacagctgccacccgctccatcaccaggactggttctgctgatctagctgtgcctctcctcgcctgccaatctccagctccacgtctgcactgctcaaagcttcgtgagaacagatgattttgcgcaattgagttggatggcgttgattgtggcccacccctagagtgagggtttttccctgaaccaaaactggccccatccaccgtcattccccaataccttagttgtagtcaactagataggctgccgaagatggtttaactgtgtccagcttaactacagccaggctttggaatgcctggcctatgtctgtaaatgaaatctaacaatttattgtataacgttgttaaacatgaagcatgatgttggccctggataaaacattttaaattctcgtcgttcataccagaggctcagtaactgaccggttgaaagaaaactgttcattgtaacctaatgatgctagttagatagcattagattatgttagagatcagataacttgttctagctgcctttgtcctgtctcacagtgctagtaagtcaggatttaaactgcccttctcaacatctcttggacaagaaaaagcgggaaatatgatgtatttattttctcagaccttgccaagtgaaatgtatcaaaaccaaacatgtctttttaagctgccacttcaaaatataacttaagataaaatctcatatatccttgagaaggcctggcacggtagctcatgcctataatcccagcactttgggaggccgaggcgggtggatcacttgaggtcaggagtttgagaccagcctggccaacatggcgaaaccctttctctactaaaaatatgaaaaattggctgggcatggtggcgcatgcacctataatcccagctacccgggaggctgaggcaggagaatctctgaagccgggaggcggaggttgcagtgagccgagattgcgccactgcactccagcctgggccaacagagcaaaactgtctcaaaaaaaaaaaaaaaatctcatatatccttgaggggaaagaattgtctggatcgtgattgaattcccagggcttagcacacttcctggggattagtagatgctcaatacagttttggtgaattctcattttacctgctttccatccctaattatattaaataccaaaaactaaaaagttacagtatttcatt

SEQ ID NO: 1561967 - DNA, 4001 bp, Homo sapiens
tcatttcacaatgtatatcaaaacataatgtatgcattaaatgtatgcaatttttatttgtcaattataacccaataaagctgaaaaaatatagaaaaaagatgagacaaaaagtagtaaactgaaataaaacaaaagggggtggtatagagaaagtttactcatctttcaactttgacagtagttataaatggtcccccaaacctcattatctcagaaaagtcgccactgaaagttggaggctttgttctatacaacttgtaagttgcatgatgcatttttaacaccggcctacattgccccaagatctgagtccttgtctagtcacttttgagatgcttaccgtggtgggaacttccttggtagcttcctggtacacacgctgttccttgaccaagttcctggggaaataacccacgactcccatctcgtcctggccatcaccataaacctaagtgcccagaagaatagcaatcaggaaaaagctgatgctgagtgtcttctgagaaactcgcaggcgtcctctttgctgatagtgagaatcatagctgccaatacctccctttcactccggggtccagggggcgctgcggcaaatccgaagtttacttggagcactaagttaacccgcaggaattgtgcatctactgtttagtggcccagtcttatttcgctactttagcatgactttattttacgcaatcttgtgagttgcctgaaatcttttttgaacccataaataaatatataaagacagtacatttttttaaagtactgtagacacttattttaaatgatgcaaatttctcagttttcaacaattcaaatgaacagacttaaatggctttaaatttaatccttcattaatttagaacttacctttagggttgcagatgaggacagaaaatcatccctgcttcatccctccccagggaccgcccctgtatattttaactgaagaacgctgattctttcgaattaattagggtgcaaagtttcctaaaagaatattgatacttagactcactgccaacacacatgccttctacttggcaaatcttctcagacgttttcggataagattcaaattctttgggatgtttaagcccccatgtatttgactctttttttaccaaaatatcacattaacctacatttggttttgttacgaaattgatctttctttctttaaaatgcaatagcaaatatacctgaatttttgcatttccatctacaatcactacatggttcttaacaactagtattaagcattaaaataggttgaaggtaggtaatcaaggaaaggttaagagcaatattcgtcaataggtgtttaaattatcttacactgccagcccaaaattctccagctccattttcttttaccagctttgagtacacatagatctgctgcccttttttaacgttaatgaatctacagtccggggcattataatcttcttgagcactagccagagaaatagtatctggaagaaaaaaaatttaaatgattacattttaggctcctgaattttataacagtaaaaggcaatgtatattagaaaaactagaaaatcagagtgactgataattcccagttcatagctggtgtctatccaagagaaagaagacagccaagatattaaagctgcaacaaaactcagccaagtgaattctccgtagtaagataccaaacatgcagaccagaagaaacaaagctgataacatacacattggagaagattcacttcaaagtataattcgattttatgctattagtggatatattttcaattatgtaatagaaagataatgaaaagcataaaaaagtccttacagacacactcatcatctgcacagagcttcttggaagctagacggtccataaatattccatgcacagcacatacagccacaagacccgggaggaaaagtaacaatattcttgccatcttccttttttctgttttaacttgaactctgactggaagcggggactgacttcagtggttcctgccttttatgtgaaagccagagctctgggtaaataccctggccaattagaagggcctaccacccctccgttttcataacaggctgctcggcttcaggggctatttagcgtctgattttccaaacagagtcaaactctgtgtctttctatacacagataatatccaaaatggtccactattgttaaagccgctttagcagtggtctattgtatcaatcagtagggctttgctgagaggactatgagaatttcaaaccatttttagttttaattcacccctaattttccttcagcttatgagcaaagacatactagttgtaggaatttgttgaaaatgtgagatctatagcacaaataatttgatttaaacaaattcaattaataaatctggatttacgtaatagataaatgaaagattcttatgcttacaaatctttcatgataggattcttagaaggcatgcctgtcccaggctagagatgaattctaacatactaattgatgccccatttagaccctaccagtggggaaagagatgggtgggttgggaaaaataggtcaatctttcccctacctcttctctctaagacttttgcaattcagtctcaaatgctcaagggtgacaggtcaaagagaagagagtgaagttacaagtttatgttacctggaacttcctgcttctgagcatgtttcccatggggagaggagcactcctagaggcaccaaagtggaaccgccagtccctagctccgtctattcagcaaatatttactgagcacttactgtgccaggtatagttctgggcactaaagatatagcagtaaatttaaaaaaaatattttggccccaagtgttgctttctattagaagagacagacagtaagttactgctttttatagggtgtttgaggctggcatctctcccataaggtggcccttcccctgttcttatccattgcttctagaatagagatcctctcaggatgccttctccaccttggttgatgatgtgacttcggagcagtgccttctcccccaaccccaaagtcgtaacctcataaaatgagggacaagaatttaacttactaaataattttgtgcaatacaatttcccaagggataaatgggtaaggcaaaatataataaaaaggttttttgttttgggtatatgtgtgtgtgtgatagagttgtattggtttgagtgcatctgtgtgtgtatgtaaaagagttttggtgtgggtatgggtgtgggtatgtgtggctgtgtgtgagtgtgtgtgtgtggctgtgtgtgtatgtgtgtgtgactttcaagggaggatcttttatatagctggtcctgattggaaagtctgttttattcataccttcattatagacaaggaaactgaggcacagcaaatgccagagtggtctttttgttttttgttgctttttttttttttttttttttccgagatggagtattgctctgtcacccaggatggagtgcactggtgcaatctcggctcactgcaccctctgtctccagggttcaagcaattctgctgcctcagcctcccaagtagctgggctggcaggtgtgcaccaccatgcccagctaatttttgtatttttagtagagacggggtttcaccatattggccagcctggtctcaaactcctgacctcaagtgatccgccctcctcagcctcccagaatgctgggattacaggcatgagccaccgcacctgtcctaaagtggtcattttgaaccatcctatctaaaggttaccagagggatcatggttcaatgctatttcaattcattgttgtcaacttggaattgacaaattagaataaatcatttatttcctgtttcacatcaaggaaagattgaattcgatattatttttgaaagcagaatgcctttccaatttttcccctgtaatcaatctaaaggtctaaatttctgggaaaactaaagcattgattaaatcttcttaa

SEQ ID NO: 1561968 - DNA, 4001 bp, Homo sapiens
cctaaaccttggtgggtagcggatacctttgagcagaccatcatggaagttctgcccgaaagcgcaggtgggcgtccagaatgttcgagggggccccgaggcgcgaccatagatgggaggaaacactccaatccactggggtaggggcgctcgagaaatctgtagttgaacccttttacccatcaatttaattcaagattggaaagatgacagatctaaagtgccgtgcacaagcctcctgtctgacagacactgggaaccggttcatgttgggagaggcccactatgtgtcaagctgccgcccaggtccagaacataagcatggggggtgaactctcagaatcgcggcgccaggaactgcgtcccagagggtggaatttctgagagcgctgaggcttcctttccaacctcaggaactccgacggccttggttattctacaggcctagcgcacagaacgggctgctggcggaaggcagtgatgcctgtgccttttcggcagttccagaggcagcactcggcatcaggcggggccaccgggaggacggagcccactccgggaaccggccgcccctgcgcagcagctaccctgcgggcgggaggacgcgccgaggcgccctggccgccgcccaggggcaggtgcaggagcggcgcggcgggcgcgctcggggcgcgggtgccgggttgcgcaggcgggcgcggcagggaggggcgccggcctcgggagcccgacgccagggcgtggtgcaggtggcggcgggggcagagtcgacacagtaccttgattttcgatctggcgaccgggcgctgcttggtcgccaggtgtccatcggggccctcggcgtcgccgggctcgggggtttcgctctcgggggcgtgcggggacgagctgctctctgctcctccaggctcccccgcgctgctgctgccgctgccgctgctgctgccgccgtcgctgcggcagtcctcgggggggtcgtggagcaggcggcctaggcccactgtggagggaggggccgcgccccgacacacacactcggcgtcaacccgcacgcccgcggcagtttgacctgcgggcggtgctgccgccgccccgccccggacctgggcacctcgccaagtgggcaacgtcgcgggggaggccagtaagccccgaatcggcccacagagctagcttggggtgctcggagcctctttccggtcccagccaaggcgcccacgaggaaccgggcggccacgagcggcggaggaccccgcgcgccaagtttcctctcagggcgggggaggcggatctgacctctccccagctagccccagaagggttggcgagcctttgtgcacccccatgaggacgtgagattgggggtagcctctgctggctttcaatccctttcctgggccaccttggcccgcgctgcagccaacggtcccgccgccgggcaattagaggctcccactacggggaagggggcgcctagagtctggggcatcccagtccctcattgcctgccctaacccgcctagaagacccccgcgtgccccccggaagagggggatgaggtggggagcccgcccctgccgatgagcagagaagacccgccaccccttcccccaccccgggagcccagcgcccaggcccggcccccgcgcgcgctcacctgggatgtaggtgtctgcccttttctcatccgggagctcatcccagctgcggaccgagacccccaggctcctcctcttcaccaggaagactttgggcatggtggggtcccctctcccgactgcggccccctcctcccggctgctccccgctaggggcaacggcggcggctccgtccccggctcccggcggccagagcccaccttcccgcctcgcctgccctcttcctccaccccccgccgcggcgcggcccaggcctctcccccgcacgcctggcgactcccagcctcccggctcggcgacacctatgccttaaatcgcgagtgagaccacgccggggaaaaagtttcataaggtggaatagaaaaggcaccaggaaacttgggactgagcatgcgccctgcaacataacggtgtcaacaagctcgctacctgtccgaccggttccggcggccggggctgcctgttccagcccttccttaggcatgaatgtttgcaaaagaatttaaagtctgttcttccccctcctctttttaagaaaggaagaacattttttaatcaacccccgccccattcccccatcacctgcacctcgaggcgagctcttcgaggtaaaccccaggttcgcctcccagggcacccctccggtgagttggggcctcccacgagttgcccccctcccccgcccggtggatttgtcttcgacgagccagaaaatggctcagttcccctggaccttgtggagccttcctggggcttgatgaaatctgggcggtcagaagggggaggcggcgggagacttccaaggattctgattattaataatggggggtgggggcttaggggcttaagctttccatcagctacaacaccccccccccataagcagtaaaaataaatttaaaaattcggcatctttagaccacgttatttttctgactagtatcatacaatctaagaaaaacaagccttgccccgccaaagcagcttctcctcacaagacgttgcaccccccgagagccccctcaccccaagtaaacacacaatagaaacaaaagccaggagcatattatgcaaatgcagcttcaaaacaagcccccaatcctcgcccactcccaccgttgcctctcctaaccacccgatccccaaattctgagactgggaaatacctttccaggaagctagcatagtgaacattggctacatcttctagccgcccctaccggggaggtaggaaagctttgcatttattattatatctgtttgttcctatcaacctttatgcctggaggggagagggagagaaggagggggagttggtaaaatatgccaagtttgtaaagcagttgtgctcacgttgcggggcgcgctgcccttcccaaggccttgttcgggtgcgcccaggacaaccggcacagcctcttgtgtcgctgcggtcgccctcctccaggaggtcgtcagacgtgtgccagctgccgggtgctgcgggggcgcgtctggtcagggatgccctggagcccaaggctcacccaacagccagcctcacctgtctgtaacctgaccctccgcgctcccagcctacagggcccgggaatcaacacagcggttttccctgttcccttccgccctgaatggcccttggggacacaaccgcctggtaacggatttctcggcgctactggcggactcgcgcggcgcagggagccggggcgcagctctgccggggctgcgggcgggaccggtgcgcggcgcctctaggtctgccctcaaggagtcaccctctctggactgaactctgaactccagcttttctctaagaaaaaccagctaagaacgaaaaagactttgatcccggtgagccggaggaggaggaggaggaggaggaggaggaggaggaagacatttctgtagcggtgcaggaaaacaaggcttcttgtctatgaggctgatggggcagcttccgggagactctgcagatgtatttttatccaccaacaaacgggatttgctagaaagaaggagcttgggtgaatggaagagtaaaaatgaagtacaactatgaagttacagaattattcccagtctttaaaaatcttcaaaacttcacttcgttcagaacttccaattatacagaagaggctgtcaactccattaacaaagcttttttttcctttcactggatttcaaaccagtgagtgtcttgactactttgcctatttgtattattttaaaagattataggatgatgaggtataaggctagaaacctccaaagcaatgcaacctttataggtttggggatgaagacttaacaggataacaacctttttattctatggtcgttgg

SEQ ID NO: 1561969 - DNA, 4001 bp, Homo sapiens
ggcccttaatcagctttctaaattgattgaaacgttgactgggcacggtggctcacacctatcatcccagcactttgggaggccgaggtgggtggatcacctgacatcaggagtttgagaccagcctggtctacgtggtgaaaccccatctctactgaaaatacaaaaattagcaagatgtggtgttgggtgcctgtagtcccagccactcaggaggctgaggcaggtgaatcgcttgaacccgggaggcagaggttgcagtgaggtgagattgcatcattgtactccagcctgggcaacaagagcgaaactcgatctcaaaaaaaaaaaagattaagttgtttgagacctgtctcagatacttttgcttcaccgataggagatagaggttaagagcttctctttgttcatgtcatttctgtggccctgggctctcaagatcccctgtccgcttgtggggtccccagccctgacatgttttattgcacaggcaggagtagagctgctgggtcagacccagccctggggacaccagggacggtcatgctggcattcaagcccagtcccggcagcttgggctcctcttctgagcgtgccagtggcctcctgggggccagctccttggaaacatgttggcccttcagctgctccccagggccccctccccccaggcccgctccgctccctcaacttctaagtgtggctcaaacctcctttcaggggtcaggaagccattcagtgtgcactgcccgcttcctgtggtcatcccgctcagacccttgtctgtatttgctccctcatcctcgtctttttgaattttgaaagatcccctgaggtgcagcctgctgtaggcctcagcccaggctgggagcgggaagctggggctgtttccacgtcctcagagcctttgtgcccctccctcttccagcccctccagggtggtggcagccagaacagcacccgctctgtcccctcgggtagccgggacacgtcttcctgggccagctctgagcgcaacaagccacaggtccaacgcgcgcgatcttccagtcccacaatgccccctccccgtcccatttctggcacttagacacgagtcaaggtagaggagaaaaacctgctttattttattttcaccatttctggggtggctatgggggaagcgagtggcgcgcttcgagggtgttcggagccatcaagtttcagcgctgggagaaggtggcttccgcgtcgcaggcagggtcggcgtggcagccgtctggaggaagaggtggagtcaggggaatcccggccgcacccccgcccgcctccccctggccccggagcgccttgccccgctcacccgggctgcagcagaggcccaagaccgcgcagcggcccccgctcccgcacgccttctggccggactggcagggcgacggcaggtagttctcctcctggcagcgcagcgcttcggcggtgcccacgaagcagcccagctcttccgcgcagcagatattgggcccgaagcagcggcctttgcccccggggccgcaggggaggcactgcggggacgggcggggtgagcgggagccggggcggcgctggggactcgctcggaggaccctgcgaggccggccggggtgcgccgggcaaggatgctggggtccggggttcggagttcgggcgggacagcggggctgagacgcgctggggcgccgtgggggcctcgaccgcggtcaagggcggggcgtcaaaatccgctcagctcctggagttctcaggcgaggccggagcggggcgcgcccctgtggctgcgggtccctccctccccggagcgccgcgggaccagggctggggactcaccttgcgcacgtcgaggtccggcgcggccctcttgcctcccagggggcagttctggatgtagcaggcggaggtcagcgccaggaggccgagcagacagcaagcgaggctggggccggccatggtgcgggtgcgctgggtccagggtccgtgactggtggcggtctctccggcctggcctttttatgcctgggcattgcgtcggtggagctctgtttaagaggttggtagtatgattggtcacagagggtcgccgtgggtcaggccgagtgcgtacgggctttcctcttcattagcagggcctgggccggggtcaaggtcaccgcgttggctaatggtctgggcacagaaggtgaggtgccttgcggaagggagcaggccggggtggcctgggccactagggtgggacagggagaatttggggtggggtgtggcccagccgaagactttatccagcctcccagtacctcgaggaggggggctggggcagggaaggtggacgctgggacccctccaggtgggaggaggctctggcaggatccgcccaccctcttggcccaccacgcatgtggatcattgtcccctcttttaggaacatttcctcttcctaaacccaaatttccagaaaacctcttcaccctcaccacacagcaacacccacttccctgcacctgaaacttggataggaagagatcacatctgtctctaatctgtaactgatattccacctttcctttcactataaattaggcaacaaaccacagcagaattagcaatacctgtggctttgtcacaaatcaaaatagaagataacttcctatcacagctgtcacaaatgcctctatatactgtttagattcattatatcttcaaaattatcacagttattgggccacgaccagatcttgctatctaatggttaaagaagcacgtttatgacaccatcaaaatgtgttttggctgggcgctgtggctcacgcctgcaatcccaatactttgggagtctgaggtgggcagatcacttgagaccagaagttcaagaccagcctaggcaacatagcgagaacccccaactctacaaaaaatacaaaaattagctgggcgtgttggtgtgctcctgtagtctcagctgcttgggaggctgaggcaggagtaccgcttaagcctgggaattcaagactgcagtgagctgtgatcgtaccactgcactccagccagagtgacagagcgagagcgagaccctgtctcaaaaaaaaaaaaagtgttttaacattttgatatctgaatataaatatatatatttttttcttgagacggagtctcgctctgtcgcccaggctggagtgcaatggcgggcgccatcttggctcactgcaacctccacctcctggtttcaagcgattctcctgtctcagcctcccaagtagcttggattacagacatgcaccaccacgcctggctaatttgtgtattttcagtaaagacgggggtttcaccatgttgaccaggctggtctcgaactcctgacctcaggtgatccacccgcctcagcctcccaaagtgctaggattacaggcttgagctgctgtgcctggccctgtaattggtttcttttgtaattctatttctctcattttcgacattaaaattttttttggctgggcgtggtggttgaccaacctggccaacatggtgaaaccccatctctactaaaaatataaaaatacaaaaattagctgggcgtgaggtaggcacctgtaatcacagctattcaggaggctgaggcaggagaatcagttgaacccaggaggcggaggttgcagtgagccaagatcatgccactgcactccagcctaggtgatagagcgagactccgtctcaaaaaaataaaaatttttttttttgcatttttaatatatctcaaaaggaaaataattaaaagaaaagatggattaccccagtgggagaggtattggtagatatcatgaacaagaaaggaaaggcgctgctcaactctccctttgtgaaagcacctgccacccagctgctgggagtgccctctgcaggtggccctcaggggtagctcctcgagagcctgcttcagctgcagagagctgcctggctcagggtcacacccttcccaggtggcccgcatccaa

SEQ ID NO: 1561970 - DNA, 4001 bp, Homo sapiens
ctgaaaaataaagaaggtatgtaaaagtgccttgtttgtaactttgtgcctgacacaaaataatgtctcaaaacagcagccgatgcccagcctccggccactgctgcagcctgtgtctctcctgggtgatacacgtgacctgtttcagggagtctgctagtgcagagacatggaagggggctgtggggaacacagtggagcaagtttcaggaagcccggattctccacctagtcttatcataaatacctggggcaaaacccttctctctgcagcacggtttccaggccgagtcccacttcattcacagggcttggaggaagatgggaagaggcaggaggtggagcaaagcagaacaaacagaaaagtgcccaggaatccagcccagtaaggggcggggaacaggcccggcggaacaaccccttccctagcaaaccacccactcaggcaaccaccaggttcacccaggcgacctggcgcaagggatccctctagtggacgccggccattttttgggtgagtttctggagtcttacatcagaatgttaaagccactattttcgttgttgtttcttttttgtttgttgttttgttttgtgttgagatggagtctcgctctgttgcccgggctggagtgcaatggcgcagtctcggctcactgcaacctctgcctcccggattcaagcgattctcgtgcctcagcctccccagcagttgggattacaggcgtccgccatcatgcccagctattttttgtatttttagtagagaaagggtttcgctatgttggccaggctggtctcgaactcctgacctcaagtgatctgcccacctcggcctcctaagatgctgggattacaggcgtgagccactgcgcctggccttatttatttatttatttatttatttatttatttatttatttattttaggttaccacttaagagcgtttacgaggtaacaagcagttaccattctttatgcatagacagcagttctccattctttatgttattggagaatacgccttagccccattttgcagatgaaaaggtgcagagcgtgaaggcttgcccaagctcactcatcctctccactctcaacagaagtgcaggcaaactcatcggacaagctctaatcaatgctatcagctctgagaaagcggccttgcggcctggaggcagcggtttttcagagcccgtgcaggtagaggcgcccagtgtggatctcacgtcgcgctgggaaaggcctgagcccaaggctgggttctcctgcctcccctgctcaccagctgtgttgccttgggcatcttcctcaccaggtgctttgaatctctcatcctcacaagcactctataaggcagctaggacccccattttccagacacgcatctgaagctcagaatggtcgagtaacttgcccagagtcacacggctgctgggcttctatccctggtccgcctgacccccacccccacccccacaaagcctgtatctgttttcactcgaccctaatctctctcctctgtagaggaatagcagtaaaccacactaattaccaattcccgtctcaggggccaggcctctgccaacgccctgttatctttgagcctcagtttccccggctgcaaagtgtaagatgaaagcgcaagcggcccagttccggcttctgtctgtccgcctgcttgtccgtcggtccttcccctcccgccccatccccggggctcaccgtccgcgggctgctggaagttgatgtaggcgtagcccagcgagcgccgggtggctacatcgcggcacacgcggatggacaggatggggccggcgggagagaacttctcatagagcatggcctcggtcacgtcggggtgcagatcgcccacgtaaagcgaggcaagcgggtagccagaaccgctggcgttcatggtgggcagggggccggggctgcggggcaagcaggagccgggtcacccagcagccccgcgctcacccgggcggaagccctccttcctgggcgcgggcccgccccttccctttaccgcccccgcgtccctgcgcaccaatcgtgggcgcgctcggacgcccctcccccgggatccctcctgggcccaccccccacctgcgagcacttggggatctaaaagctacaggtggggacacctctgaccccgccctgggaggcggaaaaagccttcaacctggccttgagcagggctgctgggacttgagtggagctctcaaaacccccagctcttttgaaagagccgaggactgggacggaaaggacgcaggggactgagttctaaccccggaacagatgatcatctttctgaacccgtttcccttctctgtaaaatgggaatgattccctcctgacaagaatgaaaggagacccaaaccgcgctttttgcgtttcacacacaaacggaattccgaacaggccactgtttcaaagcttgtgtagagaattttaccctgctccattgaagatgtcttcctccagagagcctgatccagtcccaccgtttcgcaccaaggatggaaatggctttgagacatgagaactggagaccactaaggcctttcttggtactggctcatattaccaagaccccttttcctgggatattccctgtccctctgctaagccattacacatccattacaccagggaggttcactgagttacttgtggctcagcctaaatgcggacaattgggaactaatagcagagcaagacctaaacagagcaagactgtgaatctgagcttgcagcgtcaatctgtggtatagggacattaaaaacaacacaaaaacaaaacaactactccactgagcaccaatacttcacttttcctctgataggactttcctggtctcactgatccaacagagcaggtaggcccccactgacttttggttgagtgtggcttcaacaggtggaacagctcctaaactagggacagaaggtgcccatctggctgtccagcctcagagtagcaaggaagcactaattctaatcttgggctaaaaaagacccctctatcctgatatttttctctccttgtggtaatgtggatgttttcagaaggggcaaatcctgtgaggaaccagctctgcaggccaccatacagtgtgaggacaggtgagacgccagcttggtgatgaccaagacttatgcaaccataggttacctatttcactggcttggttgtatctcagagttaaaaaatggggaagggatggtgggctcgaatacaatgcaaaataactgtccataccaaatcttagaagtcactaaagaggacctaatacctgcatggtttgttgtggaaggtagagaggtatcaagtaacgggtgtaaagaggctgtttaattaatggtaatttcttcccctggataacaccttgacttctggtcctaaataatgaaataaaactgtttgcctatttttaaagaaaacagagttaaaaataagtgtgatcagaatagttagctaggtctggtaacaacagagatggtggtgacacatcaattcacaggcaactaactgataaaatttttatttcacttttgaatttttacacttttcctgattattctgtgtaaggtgaaactagaactgtttaaaagacatacacaaatctagtacatcaataaccggggatttttcttttttgctatactattttcacaaccacgggtgtgcttgctaggcaatataaccatcacagaagcaaacgttaggcagaatactggtaagaaaaaacaaagcaagaaaagagctaccagatatacagacaggcttggttccacattcactactgcattttcaagcgccaagtattaactgcacatttttgttcagctagaaaggagggatttttttttttgtttttttctttttttttggtttgttttaaatcagtgcataaatttttcttttctcatttcagcagatggacaaacagatggactctacagctaagtggaatatcaaaggtag

SEQ ID NO: 1561971 - DNA, 4001 bp, Homo sapiens
aattgattcaatgcttagatatcaattttcaattaaactcacatttattaataaaataacaagctgcagagacctagtacaatctctacccactcacagaagaacactaggtttttagtctaaggccagcgttaccaaggaacttgccattggcttatattgcttccatttagcagtgcatctgccttgcacatatgtattccaagtcaaggtattatcagattggacatttatggctttaatttacttaaatgcattttccttatgtattcccccacttcattttgatgatactgactcattctcgccacctaacaagactataaaaataaatagtgtgagtgcagaggaaactgtctccaaacttcatatgctaagatgcccatcctttaaattataaagcaaaaaataaacccatgctttaaatttacctttctccctaactaacctggttatctttctccccaagattgagttgttgtgctgttgaatataacagatacacaaatctaaggtggcacagctgttattataaggtgtcaatttcatagaattctagtgtaggagggacttctaaaaagcatcttgtccatctatatcaggtaagagaaagagtgtctacagcctccaagccccagaagagaagcggttgcactagaagatttttgtgagttacctaagaccctgtggctatgtcttggtagaactccgtagaatgccaggtttcctgattttcctaaaagtgtgttcagtctttcaagctgtcatcaactattaacaatgacactttcctctggctttgtgccaacttttctttttgtttattattctggccataaaaagaccaccataaatagcctcagcgtttcaggttcccttaattgatatctaatgttgacaaattaactcagcccgagttgaaagctccatatacacacacatggtttcaagaagggcgatcgcgcttatcctccaaactgagcagtgatgatccctggacttctcaagtttaccctctaggaggctgacatggcacacaattttgacaagagtttggaaccaagatcctcttccacgccctgctcacaagggtgcccacaagcagaagttctctctctgtctctccattacaacccaccaggcgcgcgcgcacacacacacgcgcgcacacacacacacacacaaataacaaaggaaaacacagcctcataaaggctcagctattgcatcctccagtccacacctgccaaaagacaaaaaccatgcgggaatcctgctctggcaatatgtccaacacttctcgggaaaagcagcgccgtggcacccccagggcgtgcgctgctgtatacacacaaagaactggtgctgggcttgcgagcagttcggggtaccagcacgctctcagggctggaatccggggttctcctccacgccctcccgcccagcaaaatggaaccatcctttatttggttggtagagagcccaggctggatagtagcgcatgggttgagggtgggcggtcccctatccctaccctccaggcagcaggtccctagcctttgcatctcctaggagatgcaggatcgcgctgtcacagtggtcctcttcgcatcctctcccggcaaagagagatgctccggttaccagcggcgcgcatccccgcaggcgcctctcctctcgccgatacccacccaggcagtcccgacaggcgcgcctgcctacctggtggccggctgtcagcgaagcggcggtgcctcagccccttctcagctgctacagcgctcccagcgccatgttcccggtctccccgggcgcacgctggggaactactactggctgggtaggggcaaggggggcgggggccagcgggagggggtgagaggcagagccacagctttctactctccacccaaacctcccccagctactgagcatgcccagctgcccggcttcgcccctcggaggactgtccatgagcgtacgcagctgctccgggttttcgtggcagccggcgggaggcaggctgtagcggcggccgggggtggaggtgagggggagggtcggggggcgtgtctacactcagggtgcaggagccaggagccgggagctggagcaggcgaccaatccaatcacgtttactcccagtcgtccccggcgggggcagctcctgcacgccctctcccccaacactcgggatttgcagaaatgttgttcaggaccattgcaggattgagttttgcttaagaggctagcagaggtggggaggaggaggggctgagaagcagaacagtgggctggcctctttgccaccacctggaccggtgattctcaaactttcatgtgcctgtgaattaaaatgcagattcagattcaattggctgggtcctgagattctgcaagcctaacaacctcgcaggtgatgctgctgctgctggccctcccaccactccgagtagcaaacatctagagaaccccttatctgtgacctctcagtggccatccttcaatccgccagcctagcaatggtctctggtgtccacagagactcctccagcctggggttgctgagccttacctggaaggagtgtttgtggggctaggctgtgaccacccagcttctccttggctgctgtctgatttcgaatttaaggcccaggggaagaaggattcctggaccttttcatgctcactttgctagctggctagtaagccagttgctggatgagctgccccggtcaagtctgaaccagtctgccttggctgtccccttgcctttcctgagctgggacaaaaactcagactgggcatcaaagtgtttattgtacatctaatagcaagcttgggcttgcctagttaagaaagccgacagattatgacaaacatagagcgcatttttgtaccaagagatgtcaggcctttgtgttcagtgatgtttgggctgaagtttgcaacgatatttgtggttcaacttaaacttcccagttgcctactgccctcccagactcttgaagtctccagcattatcaagactctagtgaatgaaagacattcacgaagtagtcctgagttttcacccttggaaatgaagaagccacgctcttgtctgtcttcagctgccacaagagtacccttatgagctagtagtggatatggaatctgatcccataactagatagcaggttacaaaataaggatttgtatctctccgttccttattatactcaatgaccttagacagttttctagctaatagtatagtagttatcatttccccttgcttgttttccattcacttagtacctttaatattgtactggccatatcaaaacagaaaccacaggataaatggatgattacttttctccctcagtagtcccatgtccttgtgtatcatactcatctcttccttctcaaagctgcacacagccctaacaacctacccactgccaccatcgtcacccccacaactatatgcataaatattttctacttttgactttcttatatgtgtgctcacatagatgcaaaagccagaacatatttttactgagatatcgtttatttgtcattggttagtatcagttaaaatttttatttgaaatattgaactttaatcacttaaaatagccttcctgttatacataaagtttgtgtttgtacatttgtttctgctagttaaatatgatgatgattgttagctgcctcaaatttattttggaagcgtgcaaggtaaaaattatagatgaataataatgctatttctgtaaatactgcattgcatgaattcctaagggttttctttatatgtaatgccatttcttgagggtttagcctgcagtatttgactaaggaccaacatctgtgggtgggagggatacaggaagcaggagcaggcagaggtagaagctaagctgtgatgcaagccaattgcagcctttgtcagccccttatggagctcactagctagggtgatccttcagaatgaccatgagttggtctga

SEQ ID NO: 1561972 - DNA, 4001 bp, Homo sapiens
agaagatggaaaaagacaaaagaactgaaaactcccaaacttttcacagcaaaatagaactacatttaatcatccatatcagagaagattcaaaaaagcagttgggtgactgggctaaggtagaagactattcaataaaaatctcacatcttgccattttccctccctctcacaatctgcatttaaacaagtcaatttcctgaaataggaatctggcaacacccaccaaaaagtccaaccatatgtaaaatggcatcacactgtaaagctcatattacagtatcaggacaattgatactttcaacagcagcaatggctgccaggcagcggtcctgaattgaagacttgtaaaggggagaaaatacacaacacagaaaaagaaacctaataaaatggggaaacggattctctgggaggagcgtatgcaactcccaaggcaaaattcagaaagatgttgtttcccctcaaaacaaagagccttaatgcccagaatgccacagttctgaatcgtgagtacctgcaaatagacagaaggaaaacggaggggatatgtgggtgagagatgacctggattctcacgagaagaagggcagccaccttagaggtgcacggaatacagtttcaggcctggtgcaactcaaggggcagttcaccattttccagtaagcccgaaattgacgaataaaagggacttaaagtattagagagcagctctttggaaacccacggaaaacaaacattggggattcaaaggatttgggaggaaaggaggtggaaatgagtcaaaagaagccttctcgaggataaaatcatgtgaccctcaggaagagaatgcccaaggagctaagaaaagggaggacaggtcctggggaaaagccctccactccaacaagcgggaagtgcataccaatgggtgcgggggggcccccgaaggtaccgctttcggagcacccgaggcctccagccggatgtcaggccacgcaccaacgagggaccaccgtgcggggacagtgtccgcgcgcgggaaaaacggcggcggggccggaaggggacagggtgggccggaagggggggcagggcgggccgggagggcgccccacggaacacttacgcggccgctttttcctcaggctttcgacgcgctggcgggagaccgaggtggggccgctgtaagagcccagtcgatcccgcctcgtgccctcagccgaggccccgaccgcgggcaccgacgcgctgctcgcccggcgccgcagtggctcctgccgccgcccttcggggtccccggccgcctgctccccagccgacgagacggaggtggcggaagccctgccgtggcgctccatgggcgcgccgagccggccccctcccatccgcagcagcagtcgctgccgcccgagcaagccccccagcgtcggattccttctcgcctcctccgcggcagtccagccagagcagaggcgcgccctcggccggccgcctcttccgttgcgccaacgcgcaggaagccaatccgacgaggctggggacggcccaaaggcctcgcgtccagtcggctccctaactcgaggaggattgaccgtgcctccgtccaatgagaggctatcgtgacggggcggggagagggtggtggaggaggggatccgggttccgcggaggaagagaaggcggtgtagcccagaagagagtgatggcggcgccgcccaatggacgcgtgggtggaagggcccgagcctcctcatccaccccctccttccgccccccacttgtgcatgcctctgcccccccgggccgcggaactctcctggggcgaccccgagtcccaccccgctgctccgtgccgtcctcgcagctcgagccctcctccagcccagcagtgctcccgcagcgtctggccgctggtcgtcggcagacgaaagggcttgaaccgcggctgaccttagcctttgtccctcggcctagttccgcagctgccgtcgaggccgccagcccctcccccagcatgtttgggctaagccgcctcctttccgcctgcgttggagagagaggtaccagaaggaatgaaaggactggggcttgtctccatggcaactgaaagaaagaggtgggttataaatccttcgccaccctcctgtggcgaaggaggggaagtgggagccgggaagtagagttggccttttgcaggagagtctggagcccctttctgggtgatgcattgggggccatagaaggatttggctgccgctttggagcatggattttttttttaatcatcttcctttctcttttggagagaaaaattggtcacctccaggactgagaccctgacccttccaagcatccccactaccaaaggctgcccaagcccggaaggatcccatcccgttctgtactctgaggtcacttcctcactccgtcaaatttcactggactgtgggctaattaaaagtgcctccgtattagcggggcgtggtggcccatgcctataatcccagctacttgggaagctgaggcaggaaaattgcttgaacccgggtggcggaggctgcagtgacccaacattgtgcaacaagagcgaaactccgtctcaaaaaaaataaaaaataaaaaagagtgcctccctggggagactgtaatgcccactgggcagtgatcctaatgccccttgggcagtgatccttattcccctctcccataatgattggttgtagcaggctgaacaaaaaggttgagcttcgcttgtgcttgctgaatagaattctcacgcccactccacgttagctcccctcactgtaggactagctctgaaaattctagctcctgtaggaagccaacacagacggatctacaagaaccaaaaacagctatagctactcttctaaatctcagtgcctgacattgcctctctttctgcctcctctctccaccccccaaaaaatgtggtcctccttgacctgagggagcttccgtccaagtctgagctctgatcatcctgaagaatcaaagtatcatcatcccttggctggcaagatgaactccaacatcaaaacacttgaaacagtagtatttttacacaatttgcccactgcctctacatctcacttagtccttgcagtaacatttggatgatgaggtaacttatccagaagcacaaagcctaaagaatgacagagcttggactcctgagaagttcagctactgcccgccttatgataaccaaaagaaagcggccgggcgcagtggctcaactcctgtaatcccagcactttgggaggccgaggcgtgcgaatcacaaggtcaggagtccgagaccagcctggccaacacagggaaaccccgtctctactaaaaaaaacaaacacaaaaattagttgggcgtggtggtgggcacctgtaatcccagctacttgggaggctgaggcaggagagtcacttgaatccggtaggcggaggttgcagtgagccgagatcgtgccactgcactccagcctgggagacagtgagactccgtctctaaaaaaaaatgaataaataaataagaaggcacaccacaagttcgagaccacttctacaaaaaataaaaaataaaaaaaattaggccaggcacagtggctcatgcctgtaatccaagcactttgggaggctgaggcgggcggatcactggaggtcaggagtttcagaccagcctggcccaacatggtgaaaccctgtctctactaaaaatacaaaacttagctgggcgtagtggtgcgtgcctgtaatcccacttactccagaagctgaggcagaagaactgcttgaacctgggatgcagaggttgcagtgagctgagattgcaccactgcactccagcctgggcaacagagtgggactctgcctcaaaaaaaaaaaaaaaaagaaaatgaagatgaccaaatgggcttctagatggctaatgatattctgtttctttgatctgggtgggggttacatgggtgtgttccctttgtaatatgttatcaaga

SEQ ID NO: 1561973 - DNA, 4001 bp, Homo sapiens
cctgggcaacagaacaagacgctgtctcaaagtaaaaaacaaaaaacaaaccaaaaaaacccttgtggctaatggctatactcttatttgctgaatctttggaatttacatccatttccaacgatgtaatacaaaaccatgaaggatctcatattttgcattgcttcaaactcaggtgcttctcaaataaaacaaaactaggtgactgactctgaaaatggcacaggttaagaatctgttttccaaatctgttgcaagaagatggaaaaagacaaaagaactgaaaactcccaaacttttcacagcaaaatagaactacatttaatcatccatatcagagaagattcaaaaaagcagttgggtgactgggctaaggtagaagactattcaataaaaatctcacatcttgccattttccctccctctcacaatctgcatttaaacaagtcaatttcctgaaataggaatctggcaacacccaccaaaaagtccaaccatatgtaaaatggcatcacactgtaaagctcatattacagtatcaggacaattgatactttcaacagcagcaatggctgccaggcagcggtcctgaattgaagacttgtaaaggggagaaaatacacaacacagaaaaagaaacctaataaaatggggaaacggattctctgggaggagcgtatgcaactcccaaggcaaaattcagaaagatgttgtttcccctcaaaacaaagagccttaatgcccagaatgccacagttctgaatcgtgagtacctgcaaatagacagaaggaaaacggaggggatatgtgggtgagagatgacctggattctcacgagaagaagggcagccaccttagaggtgcacggaatacagtttcaggcctggtgcaactcaaggggcagttcaccattttccagtaagcccgaaattgacgaataaaagggacttaaagtattagagagcagctctttggaaacccacggaaaacaaacattggggattcaaaggatttgggaggaaaggaggtggaaatgagtcaaaagaagccttctcgaggataaaatcatgtgaccctcaggaagagaatgcccaaggagctaagaaaagggaggacaggtcctggggaaaagccctccactccaacaagcgggaagtgcataccaatgggtgcgggggggcccccgaaggtaccgctttcggagcacccgaggcctccagccggatgtcaggccacgcaccaacgagggaccaccgtgcggggacagtgtccgcgcgcgggaaaaacggcggcggggccggaaggggacagggtgggccggaagggggggcagggcgggccgggagggcgccccacggaacacttacgcggccgctttttcctcaggctttcgacgcgctggcgggagaccgaggtggggccgctgtaagagcccagtcgatcccgcctcgtgccctcagccgaggccccgaccgcgggcaccgacgcgctgctcgcccggcgccgcagtggctcctgccgccgcccttcggggtccccggccgcctgctccccagccgacgagacggaggtggcggaagccctgccgtggcgctccatgggcgcgccgagccggccccctcccatccgcagcagcagtcgctgccgcccgagcaagccccccagcgtcggattccttctcgcctcctccgcggcagtccagccagagcagaggcgcgccctcggccggccgcctcttccgttgcgccaacgcgcaggaagccaatccgacgaggctggggacggcccaaaggcctcgcgtccagtcggctccctaactcgaggaggattgaccgtgcctccgtccaatgagaggctatcgtgacggggcggggagagggtggtggaggaggggatccgggttccgcggaggaagagaaggcggtgtagcccagaagagagtgatggcggcgccgcccaatggacgcgtgggtggaagggcccgagcctcctcatccaccccctccttccgccccccacttgtgcatgcctctgcccccccgggccgcggaactctcctggggcgaccccgagtcccaccccgctgctccgtgccgtcctcgcagctcgagccctcctccagcccagcagtgctcccgcagcgtctggccgctggtcgtcggcagacgaaagggcttgaaccgcggctgaccttagcctttgtccctcggcctagttccgcagctgccgtcgaggccgccagcccctcccccagcatgtttgggctaagccgcctcctttccgcctgcgttggagagagaggtaccagaaggaatgaaaggactggggcttgtctccatggcaactgaaagaaagaggtgggttataaatccttcgccaccctcctgtggcgaaggaggggaagtgggagccgggaagtagagttggccttttgcaggagagtctggagcccctttctgggtgatgcattgggggccatagaaggatttggctgccgctttggagcatggattttttttttaatcatcttcctttctcttttggagagaaaaattggtcacctccaggactgagaccctgacccttccaagcatccccactaccaaaggctgcccaagcccggaaggatcccatcccgttctgtactctgaggtcacttcctcactccgtcaaatttcactggactgtgggctaattaaaagtgcctccgtattagcggggcgtggtggcccatgcctataatcccagctacttgggaagctgaggcaggaaaattgcttgaacccgggtggcggaggctgcagtgacccaacattgtgcaacaagagcgaaactccgtctcaaaaaaaataaaaaataaaaaagagtgcctccctggggagactgtaatgcccactgggcagtgatcctaatgccccttgggcagtgatccttattcccctctcccataatgattggttgtagcaggctgaacaaaaaggttgagcttcgcttgtgcttgctgaatagaattctcacgcccactccacgttagctcccctcactgtaggactagctctgaaaattctagctcctgtaggaagccaacacagacggatctacaagaaccaaaaacagctatagctactcttctaaatctcagtgcctgacattgcctctctttctgcctcctctctccaccccccaaaaaatgtggtcctccttgacctgagggagcttccgtccaagtctgagctctgatcatcctgaagaatcaaagtatcatcatcccttggctggcaagatgaactccaacatcaaaacacttgaaacagtagtatttttacacaatttgcccactgcctctacatctcacttagtccttgcagtaacatttggatgatgaggtaacttatccagaagcacaaagcctaaagaatgacagagcttggactcctgagaagttcagctactgcccgccttatgataaccaaaagaaagcggccgggcgcagtggctcaactcctgtaatcccagcactttgggaggccgaggcgtgcgaatcacaaggtcaggagtccgagaccagcctggccaacacagggaaaccccgtctctactaaaaaaaacaaacacaaaaattagttgggcgtggtggtgggcacctgtaatcccagctacttgggaggctgaggcaggagagtcacttgaatccggtaggcggaggttgcagtgagccgagatcgtgccactgcactccagcctgggagacagtgagactccgtctctaaaaaaaaatgaataaataaataagaaggcacaccacaagttcgagaccacttctacaaaaaataaaaaataaaaaaaattaggccaggcacagtggctcatgcctgtaatccaagcactttgggaggctgaggcgggcggatcactggaggtcaggagtttcagaccagcctggcccaacatggtgaaaccctgtctctactaaaaatacaaaacttagctgggcgtagtgg

SEQ ID NO: 1561974 - DNA, 4001 bp, Homo sapiens
actaccttaatataattctccccacccagtgtaaaccggtttttctgagtgtggtctttgagtcacctgtatttgaatatgaggagcttaactgggcccactgaatctgcacttttaccaggtcattctcatgctcaatatttggaagtacttccacagtatctaaaaattttcgcctcaagtaagtcagtcttgaacacaaaagatcaaacttatgcttggtcttagagcaatgaagaaataactaacagaacgtaaataattcagaaaaacacagtggtccaccgcaaaagctatgaagctagcaattctgagtttacatttctatttcacaacgcactagccatttgaccgggcaaacgtgtcccagttttctcatctgtaaaatggaatactaccacctacctcagagccacgaggctaatgagttaccaaagctcttagtagacgactgccaggtcgggcacaatggctcccgtctatatcccagcactttgggaggccgaagtgggaagatcgcttgagaccaggaggaattcaagaccagcctgggcaacataagagatcccatctctatttaaaaaaataaaaattgaaaaattagcctggcatagtggcacgtgcctttagtcccagcaatgcaggaggttgaagcaggaggatggcttgagcccaggaggttaaggccacaatgagccatgatcatgccactgcacttcagcctgggcaacagaacaagacgctgtctcaaagtaaaaaacaaaaaacaaaccaaaaaaacccttgtggctaatggctatactcttatttgctgaatctttggaatttacatccatttccaacgatgtaatacaaaaccatgaaggatctcatattttgcattgcttcaaactcaggtgcttctcaaataaaacaaaactaggtgactgactctgaaaatggcacaggttaagaatctgttttccaaatctgttgcaagaagatggaaaaagacaaaagaactgaaaactcccaaacttttcacagcaaaatagaactacatttaatcatccatatcagagaagattcaaaaaagcagttgggtgactgggctaaggtagaagactattcaataaaaatctcacatcttgccattttccctccctctcacaatctgcatttaaacaagtcaatttcctgaaataggaatctggcaacacccaccaaaaagtccaaccatatgtaaaatggcatcacactgtaaagctcatattacagtatcaggacaattgatactttcaacagcagcaatggctgccaggcagcggtcctgaattgaagacttgtaaaggggagaaaatacacaacacagaaaaagaaacctaataaaatggggaaacggattctctgggaggagcgtatgcaactcccaaggcaaaattcagaaagatgttgtttcccctcaaaacaaagagccttaatgcccagaatgccacagttctgaatcgtgagtacctgcaaatagacagaaggaaaacggaggggatatgtgggtgagagatgacctggattctcacgagaagaagggcagccaccttagaggtgcacggaatacagtttcaggcctggtgcaactcaaggggcagttcaccattttccagtaagcccgaaattgacgaataaaagggacttaaagtattagagagcagctctttggaaacccacggaaaacaaacattggggattcaaaggatttgggaggaaaggaggtggaaatgagtcaaaagaagccttctcgaggataaaatcatgtgaccctcaggaagagaatgcccaaggagctaagaaaagggaggacaggtcctggggaaaagccctccactccaacaagcgggaagtgcataccaatgggtgcgggggggcccccgaaggtaccgctttcggagcacccgaggcctccagccggatgtcaggccacgcaccaacgagggaccaccgtgcggggacagtgtccgcgcgcgggaaaaacggcggcggggccggaaggggacagggtgggccggaagggggggcagggcgggccgggagggcgccccacggaacacttacgcggccgctttttcctcaggctttcgacgcgctggcgggagaccgaggtggggccgctgtaagagcccagtcgatcccgcctcgtgccctcagccgaggccccgaccgcgggcaccgacgcgctgctcgcccggcgccgcagtggctcctgccgccgcccttcggggtccccggccgcctgctccccagccgacgagacggaggtggcggaagccctgccgtggcgctccatgggcgcgccgagccggccccctcccatccgcagcagcagtcgctgccgcccgagcaagccccccagcgtcggattccttctcgcctcctccgcggcagtccagccagagcagaggcgcgccctcggccggccgcctcttccgttgcgccaacgcgcaggaagccaatccgacgaggctggggacggcccaaaggcctcgcgtccagtcggctccctaactcgaggaggattgaccgtgcctccgtccaatgagaggctatcgtgacggggcggggagagggtggtggaggaggggatccgggttccgcggaggaagagaaggcggtgtagcccagaagagagtgatggcggcgccgcccaatggacgcgtgggtggaagggcccgagcctcctcatccaccccctccttccgccccccacttgtgcatgcctctgcccccccgggccgcggaactctcctggggcgaccccgagtcccaccccgctgctccgtgccgtcctcgcagctcgagccctcctccagcccagcagtgctcccgcagcgtctggccgctggtcgtcggcagacgaaagggcttgaaccgcggctgaccttagcctttgtccctcggcctagttccgcagctgccgtcgaggccgccagcccctcccccagcatgtttgggctaagccgcctcctttccgcctgcgttggagagagaggtaccagaaggaatgaaaggactggggcttgtctccatggcaactgaaagaaagaggtgggttataaatccttcgccaccctcctgtggcgaaggaggggaagtgggagccgggaagtagagttggccttttgcaggagagtctggagcccctttctgggtgatgcattgggggccatagaaggatttggctgccgctttggagcatggattttttttttaatcatcttcctttctcttttggagagaaaaattggtcacctccaggactgagaccctgacccttccaagcatccccactaccaaaggctgcccaagcccggaaggatcccatcccgttctgtactctgaggtcacttcctcactccgtcaaatttcactggactgtgggctaattaaaagtgcctccgtattagcggggcgtggtggcccatgcctataatcccagctacttgggaagctgaggcaggaaaattgcttgaacccgggtggcggaggctgcagtgacccaacattgtgcaacaagagcgaaactccgtctcaaaaaaaataaaaaataaaaaagagtgcctccctggggagactgtaatgcccactgggcagtgatcctaatgccccttgggcagtgatccttattcccctctcccataatgattggttgtagcaggctgaacaaaaaggttgagcttcgcttgtgcttgctgaatagaattctcacgcccactccacgttagctcccctcactgtaggactagctctgaaaattctagctcctgtaggaagccaacacagacggatctacaagaaccaaaaacagctatagctactcttctaaatctcagtgcctgacattgcctctctttctgcctcctctctccaccccccaaaaaatgtggtcctccttgacctgagggagcttccgtccaagtctgagctctgatcatcctgaagaatcaaagtatcatcatcccttggctggc

SEQ ID NO: 1561975 - DNA, 4001 bp, Homo sapiens
atggacatgcacattccttaaattgctgtaactacacgtcttttcttactaattctgaaactagtgccaatcctcatgtaagtgccaagccgtttttgtttttgttttgttttgttttttgagatggagttttgctcttgttgcccaggctggagtgcaatggtgcaaacttggctcactgcaacctccacctcccggattcaagcgattctcctgcctcagcctctcaagtagctgggattacaggcatgtgccaccacggccggctaaaaattttttgtatttttagtagagatggggtttcatcatgttggccaggctggtctggcactcctgacctcaggtgatccacccgcctcggcctcccaaagtgctggggttacaggcgtgagccaccgcgcccagactcaaatcacattttttaatgatgttacaaacgaatgtcgattttctcgatgtgattctcagttacagaaacttacagaactttgcttatcaaccctagacaataaaactattctacctagaggctctaggaagctttccttactccactgtacctcactcaaatcactccttgattttacatactccttagtagtcttaccatctatgatgctccattactttttttttttgaaattgatatactttcaattttctccttttctgtgttttggccttctcaattctattttaaatgttctcagggcccagccagtgtcctgttttgtattctgcaatgtctagaagttattaaaaaggcatgaaggctttgcaaaaaaacagcttgaggaagtcataacctttctaagcctcagtcttctcagagaattgggctagattatctaagctccttttaactcttcaactcaagaaacgcttgctgaaagtgttcccttggctgccgatcaccttcaaattccagctcaaaaccccctttggaaggcattccctaactaatccctccctacagactaccctgctcactgagccttgagatttagaaattcagtgaataccgaagtaattatcagcagattggcataccgttggtcaaggggaaaagcacttgatgtgagtaggtagcaggatggaatgaaaagagcatctagagtcaaactgtaaagtgctactccaacgtaaggtgatagtactaattttacagattaaatgcataccaaagttagtgctagaaagagcgccagcaggaagcaaagcgaacttttaaagggctgtttagttcactgggctctctccttcgccactcgatgcgccccttaaccacagaaagtgggaacaacggggtggtccagggccctttactcacagcccagcaggcaggattctcctacaccttttgagcagcctcgcatttcactcagtgtgcgccatccttggatataccttggcccctactcccgtccgtgaacacgggaatgagatttacggaatgagattaaatgctggactaggtcttcttcctgcccgggccaggggcggacactagcgccccctgacccccgccaccccctcctcggcaagtttattacccacagtctcccgaccgcaccgtccagaccccggggcagctcagcccgtcgcctcccccggcgctccgagcctggcccggcctctcccaggccccggccccccaggcccgccgctccgcccagcccgggccccgcgcaccttgctcttcacctccatagtgcccaggcagccgctgcccgccccgtgccggtggctgcggttcatgctgaacgccgagccccgcgacggcctcctccggccgggcggcccctcaggagcgcggggagcgagtgcgcgactggggatctcggaaagcggttgcggcccgggcgcctcctcacaggcacctgcagagggggcggccgcagctccggcgtccgcgctgagctccactccaccagctgctcacacggcgggaccgagggtcggactggtggcgcggcaggcggggaagcagctccctccctccgggccccggcggcgacggcgacagcgctggaggagaggagggggcggagcggaggccacaagcgccgcaacctctccctctgccgcctcccccgcgagcccgcgcgcgcgcacccgagcggaccacagccgcggcgcgtgcgcgcgctcacctgcagcccccgaagatgccgcaatccctcgcgttccgcccacacccaatagaaagcgcgcacctgcgcccgcggcgccaaccaatcgatacacgcctcgcgcggtgcgtgggcgggctgcctcctcaaaaccccgcctaccaccgcacgattggtcctgcgctacgagggaggggcgggatcacctgaagccatggccctccgccccgcttcaggccggagagccagaaggcgcatgcgcgggtgctggagtttccgccccgggaaggcacgcggggaggccggccggaagcgcgagcgcacctgaagaagggctcggctgggtgggccttttgcgcacgcgcgagcgcgcgcctggttgcccggctccgccggggctcgcgccgcttagcgcgcgccagtcacacgcacggtccaggggattggatgcgccgcccgtccggttgccgaggcgctgcggggctattcggttccagccgggcccccttcccgcttccactttgggatgctgcagcccccaacgacgcccctccaccgccccttatcgttgcttaggcgtcccgctgcaactcttggttgcaaaattcaagttttcccgcctctgcagcggttgctgggggagaagcttagggctctcttggcttcattttgtccgaagagactctgcacgccttaagtccgtcaggtcgagagggaaggaaagtgggctgaggcgcgggaaggctccttgcaggcccagcctccctgaggatttctagtccagtctttcagggctttttttttttttctttaaaagtcttccttttccctcctcccgccattccttggccattcgctgtttctacaaatgacagcctctaggttgtgttcgtttcccggagtgaccaagctgtgtcccagagcaacaaaacgctgaatcctcctctctgaacgtcccagagcccggcctctcttcacacagaccctgtgggtcatggggaggagaggagaagactgaagcttttggctggaggagattcccaggtcccaaggtctccctgtgggacccgggaatccaagagctgttgaaacctgcaagccaggaagggggcaggggaatggaggtggaggggaaggtccaacctgagatttggcaagaagagtggttagggtaccttcctcccctcatctccctgcccacctcggaggcctcctaacacttgtacccctgttgcccagcacttgttacaagttacaggtttcccatttttgtgtgcatctgagttttgtgagtaatctgccaccagcctagaatgaaagctcccgaaggcgcagggacggcttgtgctttgctggcattgagtggcacagaacccgactcccagcgggtactcagatgggtctttgctgggtgctgccactgagggtgtcccttctgcaggctctttgccccacttgggttcaaaggcgagaagctcatttttttccctctggaggattcaggtaaccagacgttttgtgggaggatttaaggtttttctggccacctgtggcagcacaggtggaaaggacaccaatccaagctgtataataaataagcaagctgcctccaccccctgtttgaaagcacataggaggtgactcaagttcagccggaaataaagtgcatgtcagggcctgtaactcccctgtttggactagcacagcagttcccaacctttttgttttcaagacccctttacactattaaaaatcatggaggaccccaaagtactttgtttatgtgtaatgtctttcaatatttatcttagaattaaaacggatgtgtccaaaacatgggagtacacaagcatgcattccaacagtcat

SEQ ID NO: 1561976 - DNA, 4001 bp, Homo sapiens
ctcgtcacccacttgacctatagtgtgttaagctttagttgcagataaatgacaaatccttgtgaaggtggctgcagccccaccagccatcaccgcaaactccaggacctgcaaggccacaggaccttagagatgtaggccactcaatcgaccacaagatcccttttcctttaactcagaagagccactgggcctgggagtgggggacagaacccttgggaaatcgtgaaggattctgagagctaaagaaagggtctcaaaattgagcgggtttttttcccccttagatttggcaacaggggcttgcatactttttgcaagaatgaaaaagcacaatttcaggcctccaaatttgtggtcggcgattgctcttctatttgggaaatattttccatatttgtcataaaaagttcaagatgtccgaggtctcttacaaaaggcccaggacccccagcctccctggccagtgtggagccctcccctgagccagaaccggtcccgggaggagagcgagtgtgagtcctctcctgcaagcctgcccgccccaggttctgccccttaatagaaggctacggaggccgccacaactgacctgtttgctccataaacgtccggatgcccaggatgttgctgaccgagtgtgccgagggccatgagcgcgggatgctgacgtggcccgccgtgcccgggaccccggggtggctgcccatcttggcgcccgtgggcgacacgggactggggtaggggtactggtagatgtggttgtagggcagcgtaggctgcgacggcggctgcttacttgcctcgtacggtccgggctgcgccaggctgccgatcttgttgcgcaggatgcggctgatggagctcaccgaaggcacattgtacttgtcacagacgccgtcggccagcagccggtcgcggatctcccaggcaaagatgccagggtctccttgcttgtagtcccggatgtgcttgaccacgttgggagtggtgacgcggggcttgctccccccgatggccccgggcagaatggagccggtctcgttgtagcgcgccaggatcttgctcacgcagccgtgggatacgcggagctgccgactgatgtcacagggtcggatgcccagctgcgccagctccacaatgcgcaagcggatggcgttgggcagggggcggccgttgacgaacacaccgcccagctggttcacctcgccatacgtctgctctgcggatgcgccagacaagagtgagccggagggggagaaaacacccggcgggttagccaagggtccccacgcggagcgagggactgcacccaggcgcacttccaaaggtgacctgtgggtccccagacagctcggagtccaagggcaaaccgcctgggtctggcttggagtgggcaagggcgcagaggagccgcggagtggagcgcggcgcattgtagccctccgtgccctttcgcgacttttagcgcgtctacttggaacactcccttcccagacttgctcaactgccccctgaaggctggggatcagaggagaatgcagcttctccaggacccaggactgggtcgcccagggaaagcggacgagagggaagggaggcaggcggacccgacccacctcatcagccctcccgagccctgcctgtcgcccgccccttacccatagcgagcgggccggccagctgcctggcgccggggtggccggggtggccggggctgggcccggcgcagtccgggagagcttgggcgccgccgccgccgcgtgagaggcatagagggagggcgcccgagagccgagagccgcggcggcccagccgcgggctggagacgcgctgtgcgcggcagcggagcgcgctgccgcccgctccagggcctgccgccgccgctgctgccccctcccaggacactctccacgcccgcgaccccaggcccagggtgaacttcatccgattgggagaaattcgtctgaccgggaggctgcagcgtgcgggaatcaatttgacgtgtcctccacgtcaatctcggcagtcacgccggagacgcgcgagttggcagctcattggttcccgtcactgcgccccagcgcccccctccccgccctgaaactctaccccctccttctatcctcccccctcggccctcttccaccacccccccggaacccacccctctacacacacacacacacacacacacacacacacacacacacacacgtcccaaccccagctgggcctgggaccttccactgctctgagcccctttcagcccccttcctcctctagctttgggaatgagggggaagtcatctcaaattgattagtgtgttagtactagtactcgttttcgttttggttttagttttatttccgccaccattaataataagatagagaataaaagtttatcgtggaaaggtgtttcgggtgtggctctctctacctccccactcccggggcagcggccggggaagggtgggatcagtaccccagctggctgggagtgtcaaggtgagcgtccagcgcggtgcagggctcctgtcaggaagacacaaggcggaacttgtgtcccattcctggccaggtcctcaatccttctctcaggaaatcttcacgtttaatagccaaccactcttggaatagtgggggtgatttcggtgatgcgagaggggcacggtccaaatcctgtctcctacagccaggcccagccaccagaactcatccctctccaagcagtgacagaaggggcaggaggcaaaaggatcccgatctgctgctaaggggcgcatagatccggcgccctcctgtccccaagcgcgaccggcgggaggccaaatgcatagctccagctctaggtctgaaggacaagttcctttctccctggcggtggaatctcgcaccactctatcccaggtggcctggcctcgtctttctcccagcacctgcagcttcaggaagtctctgttaaaccacagaatggtcatttctccttcatttaaatgaggttttgcgcagccctgaattattcacccctgagattgaacatcaacaatttctctgtttctaccctgcaccaaagcagttctgaactccccaacctgtgcagctaactgtgtccgggagccatgcggtgagggccaagaggaggaaactcgtggttttgaacatgaactgatttgagggggtcaggatctgagagctctgaggttgagcccagtaagcaccaaaggcattgggctgaatgtgctagaccaggaagagggcataggggagagagtaggaacagccgaggtttctgagactcccagcgctcccctggaggagagaaccctcttcccctccctcctgcccaccccaagggtctagctctccttagccacccagagttgagtatggcgccagcgcggtgacagtggctgaggagcacatggaccctatcagcccaccctggggagccatggctgcggaggccccgacccctttgcctccgctgtagggccagagagcatccctggctcctaatccacctgtctaaatgtatctgtcaggagtgactggctcataattcctggactctctagagagagcacgcggtggggccacagacaagaattactcctggaaaaagaaaaatcaggtttaaaagaagtgaactcttcctctccggcggcatgaacacagtacagtctctggctctgggaggtcctggagacctggaggaggtttgagggtcagtgcactggcaggagggtgcgagagtgggagcaggggaagctatgtagaagattaggcctgtccatgacagcgtaggtttggagtaaggaacagggaaagggaatggtttggattaaagtgggcacgcctaagccaggagttccgcgaaggcagcgaagagaggactaagcacgcacagtatgctcggggctccgggggtgcggggagtggggacgcaccctgcccagtgctctccattgcggaatctgctagcttcgtcgggcgcg

SEQ ID NO: 1561977 - DNA, 4001 bp, Homo sapiens
accaggtccttgtacacagccctctgaactgggaggagacagagatcccaaggctgaggcagacctcagcctgccccagctccttccaagtccaggaccccattttcccagggctgaggtgcccgacaccagctctgtggttgacttagacgcaggagaaaagatgaggttaaaaagtcctggcattgcctctgttctgtgtgcctcctggccagcagtatacagtgacccaagatcacctggcagaaattaagtcggccaagtcacccaggagacacactacacaatgcaacgctttcgtgatggaaattatggggagctgtcagggcgagaaatgctgagcaaggatgggctaaaaagtgcacaggttattacacctgtcaggactcctgtggaagatgtgtgggacataaaaagagaaaacctactggacggaacagaccagaagacagacaagagatgtgagatggaaacaaatggtccagacacactgaacgggctgcaaggtgtgggactggaagcgtcaccctagaagaggcactcactggagtcccccaagatgaccacgaacttgttgtgtagcagctgctggacttccgaggcctggaagtggaccatgtcgcttcgcagcgggcggcgcggctcctcgctcgacagacagaagaccatgccgccaccagcaacgacaggctgcagggagaggccactaagcagcgcgatggtggggactctgggcaggtcagcctcagggctagcccctccggggctgctcaatgctaaagggaggaggtgacggcagcagagccatggtggcgccagccttggtcacacttggtaccagaggcagggggtcgtccagccagcaggcctccagggcactggggagcttcccgcgcggcgccgccctgcgcctcgccacgtgcccgccgccgtcccgcgcatgcgcgcacccgctcgcgccaattaccaagtcccggggctccgcggtgttcacccgcgacccgggtatgcctgcgcaccgcgcgcctggcccgcagcgggctcctagccaagcctcatgttcccgcgccccagtcggccagtcggttctgcaaagctcccgccccgcagagaccgtgggtccaggttagccgtcggtgcacagcccagcgcccagcgctctccatgcgagcgtcgctgtggccccgacggcgcctcaggcctcggcgcctcgggctgcgacgctcacagcttccacttccgttcacccatgtcccgccctgagcgacccccagtgcccgaagggaaagcaaggcgatggaggtggccgccacagggcgcaggagccagggctgggcccacttggcgggcgcgaagcccaggtacgggctggggtctcggggcggcagccaagtgaggctgcccacagtggtgatggccgcggcggcggcctcgccacgtgacccggacgggcggaagcggaagtgccggcctggagcccgctctaggtgggtgtcccctcggtgcttcccagctgccgtctgcaccagccatggactgctacacggcgaactggaacccactcggggactctgccttttaccggtgagctgccccgccctcccgcccacggcctggcttaccctgctcgcccgccggctggagtctcccggcggcgttcgcccctgtcactactggcgctggggtccgccccgcgccggctctccccgagcgtctgccacttagcgcacagccgcctttgggcagggagccgggccttcccctgctccagaaaaggaaactgaggcaagcacagtggtcaccccgaagcccaggtctgttagcctccggaaagatgctcagatctcgctgagggaggcagctcgcgggtgacagcgagtgcccagtctcctgccggaaagtgctgctgaagtcagaccacaggggcgctccgaggggggcgggatcgcacggcgggcggggtaacagtgctgaccaaggctgggaaaagggggcgagtcgtccgtgaatcccggaacagcggaagtgggaacccctgggttagggcagcccgcccatgggagttgtagagtcctaaaccacggatttttctaaagtgtaaacccgttacatcgttacccagattaggattttcccatagcttccctaataggaaaaactacgaacttctcgtggaacgtctatctgtaaggcagcccgtttgtctctccaacctcatctaccgctctcctacccaaatcttgcgttccagctgcgcagaattacaaggccctaaccagtctgcagtttctgtggatactgccatttctctctttatctcactgaagaattttgcgcatccttcaggacttagtagttcaagggttctttctggaactgtgcctgattctcccccaatagaatcctgtgggcctcactgggcccagtgctagggtcttttaggtatggtctatttgtatatttaggcgacatttgtataggtttcttctgctaaaccaggctccttcagggctgaaagcattttttttttttttgacagagtcttcctctgttgcccaggctggagtgcaggggcactcggctcactgcaacctccgcctcccgggttcaagggattctcctgcctcagcctcccgagtggctgagactgcaggcccctgtcaccacgcccggctaatttttgtattttttgctagaggtgaggtttcaccatggtggccaggctggtcttgaacttctgaccttaagcaatctatccaccttggcctcccaaagtactgggattacaggcgtgaaccactgagcccggccaaaagcatgtttcttgcttctctttatcaccagtgcatatttagaacagtgcttgctatgtaataattgcccattaaagttttttaaaaatattttactgggccgagctttgtggcatgttcctatagtcccaggtactggagaggctgagttaggaggatcactggagcccagaagtttgagggtgtagggaccgatgttagaacctgtgaataaccactgcactccagcctgggcaacatagcatactccctctgaaaaattaaaaatattattttaggccaggcgcagtggctcatgcctgtaatcccagcactttgggaggccaaggtgggtgaatcacctgaggccaggagtttgagaccagcctaaccaacatggtcaaaccctgtctctacaaaaattagccaggcataatggcaggtgcttgtaatcccagctacttgggaggctgaggcaggagaatcgcttgaacctgggaggcggaggttgcagtgagccaagatagcgtcattgcattctagtccaggcaacagagtgagactccgtctatatatagatatatctatctatatctatctatagatagatagatatagatagatatatagatgtatctatatatatatagatacatctagatgtatctatatatagatagacatatggatgtatctatctatagatacatatagatgtatctatctatagatagacatatagatgtatctatctatagatagacatatagatgtatctatctatagatagacatatagatgtatctatcgatagatagatgtatctatcgatagatagatagatgtatctatcgatagatagatagatatatgttatggattgcaagtaaagatcacaaagacattgcatgggggtcttacttaaatagaagacatttgtttgtgctaatgaaactgtataccattctcactgacatattaaaacttttaaatgtaatttttggtacctaatgtgatatacttcctagatggacaagtgccctgtggcagtttttagagacctgttgcatttgttgtttatttataattctctcttagaaatatgcctgtgcaattggccgagcgtggtggctcacgcctgtaatcccagcactttgggaggctgaggcaggcagatcacgaggtcaagagttcgagatcagcctggcc

SEQ ID NO: 1561978 - DNA, 4001 bp, Homo sapiens
gctccaggttctcccggtagctctccattgagcagcgaccatatctgttggataacacacagggtgggcaagagcacaagggtggactgcctcagccgtacttccagccccaaccagtattcccctttccctcgccccaacctggagagatcccagaggcaggagttgatgatcaccaggtccggggcaggtccatatgtcagctcttccagaacatcctcaaggtactcggagtaaacacgagtgaggaagtagaagcgcacaaggtggtggccagagcccgagcagaactggcggacctcacgatactgtgtcccgttgtgcagctcgcccagctggcccccagccaccagctggtcctgttcaaagctcagctccccctacccaccccccccaccctactggtcagacccatgccagggaggagaaccctgccaggccagggtctgtgcccacccaccactgacatggccaccaagcttccctcaccttggctttcagctgggcagctgtgagcagtgagtctttctggagcaagagcaccaggtccttgtacacagccctctgaactgggaggagacagagatcccaaggctgaggcagacctcagcctgccccagctccttccaagtccaggaccccattttcccagggctgaggtgcccgacaccagctctgtggttgacttagacgcaggagaaaagatgaggttaaaaagtcctggcattgcctctgttctgtgtgcctcctggccagcagtatacagtgacccaagatcacctggcagaaattaagtcggccaagtcacccaggagacacactacacaatgcaacgctttcgtgatggaaattatggggagctgtcagggcgagaaatgctgagcaaggatgggctaaaaagtgcacaggttattacacctgtcaggactcctgtggaagatgtgtgggacataaaaagagaaaacctactggacggaacagaccagaagacagacaagagatgtgagatggaaacaaatggtccagacacactgaacgggctgcaaggtgtgggactggaagcgtcaccctagaagaggcactcactggagtcccccaagatgaccacgaacttgttgtgtagcagctgctggacttccgaggcctggaagtggaccatgtcgcttcgcagcgggcggcgcggctcctcgctcgacagacagaagaccatgccgccaccagcaacgacaggctgcagggagaggccactaagcagcgcgatggtggggactctgggcaggtcagcctcagggctagcccctccggggctgctcaatgctaaagggaggaggtgacggcagcagagccatggtggcgccagccttggtcacacttggtaccagaggcagggggtcgtccagccagcaggcctccagggcactggggagcttcccgcgcggcgccgccctgcgcctcgccacgtgcccgccgccgtcccgcgcatgcgcgcacccgctcgcgccaattaccaagtcccggggctccgcggtgttcacccgcgacccgggtatgcctgcgcaccgcgcgcctggcccgcagcgggctcctagccaagcctcatgttcccgcgccccagtcggccagtcggttctgcaaagctcccgccccgcagagaccgtgggtccaggttagccgtcggtgcacagcccagcgcccagcgctctccatgcgagcgtcgctgtggccccgacggcgcctcaggcctcggcgcctcgggctgcgacgctcacagcttccacttccgttcacccatgtcccgccctgagcgacccccagtgcccgaagggaaagcaaggcgatggaggtggccgccacagggcgcaggagccagggctgggcccacttggcgggcgcgaagcccaggtacgggctggggtctcggggcggcagccaagtgaggctgcccacagtggtgatggccgcggcggcggcctcgccacgtgacccggacgggcggaagcggaagtgccggcctggagcccgctctaggtgggtgtcccctcggtgcttcccagctgccgtctgcaccagccatggactgctacacggcgaactggaacccactcggggactctgccttttaccggtgagctgccccgccctcccgcccacggcctggcttaccctgctcgcccgccggctggagtctcccggcggcgttcgcccctgtcactactggcgctggggtccgccccgcgccggctctccccgagcgtctgccacttagcgcacagccgcctttgggcagggagccgggccttcccctgctccagaaaaggaaactgaggcaagcacagtggtcaccccgaagcccaggtctgttagcctccggaaagatgctcagatctcgctgagggaggcagctcgcgggtgacagcgagtgcccagtctcctgccggaaagtgctgctgaagtcagaccacaggggcgctccgaggggggcgggatcgcacggcgggcggggtaacagtgctgaccaaggctgggaaaagggggcgagtcgtccgtgaatcccggaacagcggaagtgggaacccctgggttagggcagcccgcccatgggagttgtagagtcctaaaccacggatttttctaaagtgtaaacccgttacatcgttacccagattaggattttcccatagcttccctaataggaaaaactacgaacttctcgtggaacgtctatctgtaaggcagcccgtttgtctctccaacctcatctaccgctctcctacccaaatcttgcgttccagctgcgcagaattacaaggccctaaccagtctgcagtttctgtggatactgccatttctctctttatctcactgaagaattttgcgcatccttcaggacttagtagttcaagggttctttctggaactgtgcctgattctcccccaatagaatcctgtgggcctcactgggcccagtgctagggtcttttaggtatggtctatttgtatatttaggcgacatttgtataggtttcttctgctaaaccaggctccttcagggctgaaagcattttttttttttttgacagagtcttcctctgttgcccaggctggagtgcaggggcactcggctcactgcaacctccgcctcccgggttcaagggattctcctgcctcagcctcccgagtggctgagactgcaggcccctgtcaccacgcccggctaatttttgtattttttgctagaggtgaggtttcaccatggtggccaggctggtcttgaacttctgaccttaagcaatctatccaccttggcctcccaaagtactgggattacaggcgtgaaccactgagcccggccaaaagcatgtttcttgcttctctttatcaccagtgcatatttagaacagtgcttgctatgtaataattgcccattaaagttttttaaaaatattttactgggccgagctttgtggcatgttcctatagtcccaggtactggagaggctgagttaggaggatcactggagcccagaagtttgagggtgtagggaccgatgttagaacctgtgaataaccactgcactccagcctgggcaacatagcatactccctctgaaaaattaaaaatattattttaggccaggcgcagtggctcatgcctgtaatcccagcactttgggaggccaaggtgggtgaatcacctgaggccaggagtttgagaccagcctaaccaacatggtcaaaccctgtctctacaaaaattagccaggcataatggcaggtgcttgtaatcccagctacttgggaggctgaggcaggagaatcgcttgaacctgggaggcggaggttgcagtgagccaagatagcgtcattgcattctagtccaggcaacagagtgagactccgtctatatatagatatatctatctatatctatctatagatagatagatatagatagatatatagatgtatctatatatatatagatacatctagatgtatct

SEQ ID NO: 1561979 - DNA, 4001 bp, Homo sapiens
gattacaggtgtgagccactgcgccgggcccaaataaaaaaaaattgcacctgcagtcccagctactcaggaggctgaggtggaagggtcacttgagcccaggagttcgaggctgcagtgaagtatgatcatgccactgtgctccagcctgggtgacagggcaagacctcatctcttaaaaaataaaagaggccgggcgcggtggctcacgcctgtaatcccagcactttgggaggcccagatgggcggatcacgaggtcaggagatcgggaccatcctagctaacacagtgaaaccccgtctctactaaaaatacaaaaaaaaaaaaaaaaaaaaattagcccggcgtggtggcgggagcctgtagtcccagctactcgggaggctgaggcagaagaatggcatgaacccagggggcggaggttgcagtgagctgagatcgcgccactgcactccagcccaggcgacagagcaagactccgtctcaaaataaataaataaaaataaaaaataaaataaagtacccttagaccagagaaaaatcaacaaacatacctatcactgatctgtgggggcacaatcccaagcctcccacagcaagtcaaagacacgctctgaataatgtcttgcaaaaacaaaaacatgcaaacacattatgtgacacatcttgttcgcctttattgaaaaatattttccccaagaaacatcctgtgatattgatgcaccgggtagatgaactttgcagaatacgcacaagcggcacagcttagtgtgaggctaaatggggacactgcagtatttccaaagccagctgtgcatcagaatcatcttggagtttgtaaaaaaaaaaaaaaaatcagactcctgtgcctcactgcgcatctcagaagccagaaataaatacggaggtgaggcacacaagaatttgtatttttaaaacgcaccgtaagagtgactgggagacaggatgactcattttttcacactatttgaaaaaatgtacccattttttgcaattaaaaccatttttaatttcctatgtgacttgagcgcagcaggtctgtggccgaagtaccagcccctgggttggacagacccggattccgggcccttctgctttccggcttataaaccggaatcactcgaccgttatatgtagagtccagcattgtacgctcccagtaagacataactgctcttaagttaacgtctttatttatcctgtggcttcccgacccccacgcataccgcagtttgagaattaccgctgctcaaggataaacaactctatctgcgcaaccagaaaaacccaccagaagccagagtccgagtccgggattggaggcacgtggggcgggaccatctccgcaatgtaccaatcagaattctccggcccagtagggaggagtcaaagggcgaacaaagtacgcaggcgcgacggcgcacgaaggcgagaggcgagctccagcgcgcgcgcgcgcgcgcaccttcccctccccctaccccagcgagggtgggctgtttggcgcgcgcgcgcgcgccggcccatctctcgggctccgccccccgccccgccgcgcgctcccgcccccgggctgaggcgactcagagtcggagcccgacacaaaggcggtggcggcggcagcagcggaggggccctagagcccgctccgctggggctctccgggcccacctccctcacttcggccaccggcgcggccgcccacccgcgggtctaagatggcggcggcaacagagacagggcaagcggcagtcccgagcagaaagcgccggaggggccgccgccccccagcttcggatccccagaccctggcgcggctcgctgcgggaccatggcttcctgggactcttacctgcccggagcggactggaggggacgcggctacacgttctgctcgaccgcccgttttgccgcctccgcctcgccctccccagcgccgctgccgccatcttgtgtcccgggccgggactccgcgctgcgcatgcgctggtaccgcctctgagggacctcgccgcggccgcgccgccatcttgagtgtggcagggtcggctggctcctcgcacccagcttgctttcggccccctccccttcttcccatccgtccctgctgttccttgtggcgctgaggaaggggagacagctttgtaggcctgcgggtggactgaggaaggaatgaattcactggcacgtccccgcctcagtttccccctcgagcacacacgcaggagccggatgttcgcggtgggcggtgcgcggcggggttggactgagcgtgcgcactggggggcgtgggggctgtcttagaacctgcgggggtctcgggttctgccgccggcccaggggaggcatcgtggtgacgtaggctccggacgtagcaaggacctgggtcctggcacccgcgcggctctgcctcttccagccagtctctttccctctctgggcctttgtgctgcgtggtgtccaaatgttaagaagccctgccccatgcccgggctacatatacatcgaacccaagctgtaaatgctcttgagtagaagcaacttaaactagccttcgggggcaagtaatagagatggctttcggcagagttgggaaatcaactaaatgcattgtagggcctttccaacattgacatctgtggccattagttgcagttcaaagcctcactgagccctcaaaccagctacagcgggtagcctggcagggaactggcagctgtgaggtgctcctcatccggctccctgcaggattctttttggtaggagcctgcaggcgtccgagtggtagctccacccatctccggtctccccagcaagcatcccttccagtgctagcttgagaagaggaaaagcttgccacctgctgtcagaccggcgcttgtgtggagccaggggctgtaggtaccccggctgagtagcctctcagatgtccatggtcctggctgcacgccagcgtgggggcaggcaggcggacgctcaagaaaaacggaggcaccgatatgagtagtaattgagaacgagggttcatgatcctcatctgatttcaatccctgctcctccacccaaaatgtgtggccttgaaggagttaaccaatttaaattttagtttcctcagtggaagataataaatccgcctacctcataaaggtttggtgagaattaactcaggtgatgcatgtgaagtcctcagcgcaatacctggcgcttcctaagtgctgaatcggttagccgtgatcatctcacagtggcatgagcattgctccaagtagatttgagccctccagaaataagccagctctatataggcacagcagttctgccctcgcagagcttctcgttcagataagaggcctgatgggaaaccagactcctgggtcctgtctcagttctggaagggtggggggccagctttgatttatgcctgctgccctggcataattactaatattgcctcctttttcagaagtgccctgctttgggccgggcgtggtggctcaccccggtaatcccagcactttgggaggccgacgcaggtggaccacctgaggtcaggaattcaagaccagcctggccaacacggcgaaaccccgtctctactaaaattacaaacatgagccaggcctggtggcgcgcgcctgtaatcccagctactcgggaggctgaggcaggagaatcacatgatcccgggaggcagaggttgcagtgagtcgagatcgcgccactgcactccagcctgggcgacagagtgagactcctgtctcaaaaaaaagtactgctttgggcagtaaactacgtggtcgctcttgacctacgggataaccagttttccatgctcatgccccccagctagcccgcgctttcactaaagtttaaaaaccatgtagtgattattacccttttttttttttgagacgaaatctcgcactgtcgcccgggctggattgcagtggcgcgatctcggctcactacaacctctgcc

SEQ ID NO: 1561980 - DNA, 4001 bp, Homo sapiens
ggtgggcgatgagcgtcagctccgggttgcagggccagttgttgaccaaaggctctgtgaacaaggacccctcccaagtcagtgcgccagggccctgcttgggggtccccgaggcactcactggggtttgcgttcagctttcttttttattttgacttttgattctgaaataatacacttactttgtaaaggcagagggcaccccacagaatggaggcatttgacaaactccccatcgcccactgcttccaggacgggcgtgcccatccgcgtcatgatccgcatgctggccaccacgtagggtgaatccgtcagctcgatgccgatctttgacagaggcgagcccagcggccccatgctgaatgggatgacgtacatggtgcgacctacagggtgcgatgggtgggcactggtgagaaatgaccttggacttcgaacacgaccagcatttttttcccaggtagacccattttcacggtgttccactaacaccaccacaccctgctggtcaccagccccctgggttagaagaggccactggaaagtgaacagcctgctgaaattaaagagttttcataaatgtgcaattgggtcccaccaagctatttaaaacccatatgcatggaactagttttcacgtttgtataagacagtctgtaaaagcagaagagggatgtgcattttcaatacattgccaacttcatgtatggaactgaaagacatctgaggtggtgggagcttccattattgtttgaattaccattaggatagatgtaaataagaaaaggctctctgctgttttacccaatcaaatcaatgttccgctcacctttcatgcaccctgggaacctggcattgaacgctttctcaaaatcctcctctgacatccagcgaccgagctggctgaggcctgttttggggatgggcactgtgtctctttgctcttgggtgacgataaccgtcttgctttcgatcctggccacatccctggggtcagtgagagccaaccagctgcaaaaatcacaggcttcctttcagccaagcaccacgggcagcgaaccatctccttcagtaccgtggctttccatgcctagcagagtgctgagcacgctaacaacagtccatcagtgtgaacacacagaccatctaagacatggccaggtggacatttactccactaggacctggtctgtaggagaggggctgccttttttttaatcaggaatctagttggcagagcttttgtgcacacacctcatttaaagcttgggctggcccactaatgtcacaaaattcaagtctgtatggttctgaccattgcattcatcttctcaagagtctgaaactacccgaaggccttcattcacctttctccaccaactcccaggagacgcaggggagccctgcctgcagggtgctgggacaggcagcgggggccgagcttaccagttgtcatacttcttcagccgcctgaggatgccctcttcctccatctggcccagaagccgcccattctcctcctcagagccgtcacagatgtggatgtgatcaggctgacacagctcagcgttattctcgagaaactccctcactgcctggggtaggctgtccaggcttccctggacaactttggccgagaggttcaggccgttttgcagctgaggaggcatttctgcagagtgctgctaaggggcacgaatgtgaggtcacctgaaatagaaaacgcaagcgtcctgaacaaaaacaacaacagacaccttcaaacacattcgacggccttttgccagggctgtgcattgccaaatagttattgctctcaggaaaaaaatgagttcatctttgtaatttttcaaaatgtaaatgcaaagctctacttacctttcttctctttggatgatctcgaagggagatccacaggtttctttccgggctcttcccgccagcaagtttgtgttcccagtgggaaggccgtgcttggtggcagaacctcccagctttaaatactgtggaaaagaatagccctgcccctcagctgcacccagggaggctcgccactgacgtcagggggcaggtctctggatcacggccagggtcagttatgctttgggccaactcactgcaacacgccccagggagataatcattgaacagatagttgttaatgaatgctgggagacttcgagccctcaaccaaccatagtgagttttgacacaacttccaactgactaaaccttgacccattttactgctgttgcaaaacacaacacccttttcttaacaggcaggtgggtcaaggacaaggttggccggggcacctgctagcagcacattttgtgtaccaagagctgctggttggcaaaacaccacagctataagatgtcaccccatagtcaaaggtcacagtcaaagttcatgggaaggatgcaccctaacttgggcaaatatgtggcttattggcaaagattggaaatgcctaacctaactgggggctaatcactgtattgattgtctgctctgtgccgcccccgccccctgccccgatgtaaactccatgagggcagggatttctccctattttgttcatttttctctctgtagtgcttggcatagagtaggcacaggatgcacacatgctgagcactgttctaagagcttggcatcattactaccctctgaggtggaggctatgaacaacccatgtacagatagggaaactgaggcagagattgtgtagccactcacagccggctggtgggttgcagagtgaggatctgaacatgagcaagttgggccctggagcaccacgtctctccctgtgaggtaccgccacctttccagaaccttccctgtgtcctccagggagttctgggctgagtgcagttactcctgcagtccactggccactgttctcttccctggcaagtcttagagtttagggagtggagggggcttggcagttttgctagattatatgcttaagcaatgaaacctttataacagttgtaaagaatttgctttgcaagccatcagaccttcagtcaaatttaatgagctatggaagctgcttgctggagtttggagaacacagggtgaaatgtcaaaagaacggggctaggtctcaaccccccacagccagcccacacttccatggaagcctctctacctaagatgaggtcaggtggggacttggcccatctccccgctggggtgtgggatgatccctgagataatcccaggactgggcttagaaagagctgctgtggcaaatacaagtcactgtgaatggcagcctccgaccaaactcacttagagaaccctcctgggggcttgggtcacactgtgttgggcgtgggtcacacatcatcaagttccaccaaaattatcaacccattgctatgtttcctgtattcagattttattcagccagttgtgtctttcaggataaatatgatatgaggtgctttttgtttcatttgaagttattccccgtttaggtcactggcatttgttattagtggtgctgtcatccatacataagatcgtgttgtgtctaaacccaacagtgacgtgatgctcagtagccgaggccacttcgttagcatctgacatcagtgaattagccatcccgatgcatgaccacaattccgtgacacacacatcactcccggcgagactcatcccaccaaattggtagaaagtcccattttgctgataaaacggtaacaggtttgagtacctgaaagagcacatagattgaaaacaaaaagggaaagcagaactcatttggagtcctaaatgcgacccatccattccaggtgcttatgttctgagtcttctgggagagaaacagctagttcaagtaaaacgtcagagcagtgagtcaccaacgaccttcatccgatcctttcattacctgcatttacagcgtggaaggacggtaatgattcccccgcaactgtcccttgtcaaaatgttaaaaagcaaacattggtttacagac

SEQ ID NO: 1561981 - DNA, 4001 bp, Homo sapiens
tctatacctattgccactggtaggatccatgtgaatagctgtggggtctgatatttattaccatctttgtctggtaatctaacactccctcgcactgaaaaccatcgatatgatcagtcatgatgtcaccaaaaacaccgacaacaaagctcttcgccaaaccaaatcctatcattttcacccagattctacaatctggtcaaatccaatttttcaaagtaaaagtgtagaatcatttttagaacgctgcactcgatgatactgtgcacattgtctgctgtaattaatccttaatataattcactactctgtggtaactagcaacagtccataacaacctggctgctccttacaatgcgaactgccagggcacatgaagaacacttgctgagtggcgacaggcatgggaaggtctcagaactgacacctgagttgtgattgtggctgtgtcaacacaagcatgaagctatggtagtggggttttgggaggcgacatacggaagatcacattccaacttggatgtcacttctttagggtaatatggacaaagtaattcattgtggaagatgagtggggaaaaggacccaaagccacatctcctttgggcagaatgatcaaacaaacacacaaacagatttctcaccttgaaaaccagaactcttacaagcaatgcaaagggacttttttcaaatacagatggtctccgacttcggatggttcgacttcaggtttaacgatgtgtttactgggatgcgaccccaccgtaagccggggagcacctatacttgaaaggctgtcacatgtacactattaatgggcctaacaaaagccagaccagtggtacatgttggagacaatgcctactaaatacacagagaagctttctaacaaatgaagttgcaatgaatgaaaggagctcttgataagcccagccaagttccactggaggtacgagctggggtggcgcagggagcaaggccctggatcggtcacctctgaggtctcctctcatcacctgagtgtagggctctatttcccccaagcgtggccacaacaatttctgagttgcttataggcacctcaacttcactcattcttgaatgacagtctatcaaacgcccagataggagctgtttagccattcccttgagaagaaaaatgaaaactattctagtcacacgagtaaagagggggtggataaagagggcgtggatatttaggtgacttatttgaggtgcaacgctggagcaaacattcatttaggagacacgtccctctcacaaaaacaaaacaaaggcccgaagctcaggcaagttctccttcctccaactaacaaagatctctttccatgcgtgaattgaagtcccagtgctctgctccaattcttactatctccaaggcacggggcgggggggcgcaattatttttttaaaaaatcctgtcatcttctgaaagggtccaaggcagactttgttctaaaccttagctcttggcttgccttggaactgcaaacgtttcccacttgggaagtcaaagacaagctgcaggtctggactaaccagacccaagagtgtgagtgagcaacgggcaccgggagagaccgacgggaaaccgcgagcgctcggagagagaaacgcgggacgccctggaggccgctggggggaggtgagggtgcccgaggtggggaggagcgacgcccccagaggagagctccgggcgcaggggtgccgggggtggggaaggaggagggaaggggccgaggggacacaccacccgctcgccgcaggccggaccgaggggcggcggcggcggcggcggctctacctccaggctcggccggccgacgggttcggaccgcctgggctgccacctgcagctcctcgggcgcgtccctcgtgtgtccgcggccgagcagcgccgctccaacctcggccgccgtaaacatccgccgccgccgccgccgccgccgcctctgcgcctgcgcacaacggcctgactgcgcatgcgccgcgggcctggcacttaaaggggtgatggcggcgcagggcgggccccactcccctgggctgcctgcgtccgcccgccccgctgagagctcgctgagccctaggccgggtccgagtctcgcgggcgcgccgtccgcgcagtgctcagccaggacggaccccgcacgggctgcctcagaagccctccctaagggtcacctgagacgcctttgctgacccacggctgggggcgttccgcatctccagggtgccctgcggctgctgactcggggccggcgctgccctcgggcggcctcccagcaccaagcacagccgccctgggacccccgccctgccacgcggacggccacccggccctggggccctcctacccagccggctttgtgaaatcagctgtgaaaggaagatatcctgggcccccaagatcactaaggaaaactccagcaggaaactgcttagggcaggcctgcttcccattccattcaaagtcactcctctgctcacttagatagatacatatctgatttgcctcctttgaaaaggcaaatgagaaactcaaaagaatttaaccgttggtgtctcacctatctgtggcctggacgctccctccccgcttggagtcttcctgcctttgcttcaagttgtcccgtctttccagaccgaaccgatgtgcttcttacatgtatcgatggatgtatcctgtctccctaaatgtataaaaccaagctgtgccccgaccaccttgggcacatgtcaggacttcctgaggctgtgtcacgggcgcgtcctcacccttggcaaaataaactttgtaaattaactgagacctgtctcccattttctgggttcacacagcccattgcccaaacttcgcgtggggctttgcagataggctgtagctgcagaaccctttcttcaagcacagccatgcaagccgcctcatatgtgcaagtgccagcgtcgctggggcggacgagtgggcctgggtctccggttcccgcctccctcctaactcggcattcctccccagaccctggagctccacttaggagcagagtttgaaaaccaaaggccggtgccttcaccacgttatgtggtcccagggagacctcacttctcttgttgatccatggtcctggatccacggacctgaggtggcccaccacctcatgaccttcatggggctctcagtgtccttccacctgagagcttgtggttatttgtgactgtttcaaattacagaagccctggagtcatccttgactctcttcctactgccaggggacacgtcctccatacatccctccttgccctgtcccagctcccctcacctctccccacccctcccaccattcccctgggctctggcgagtggtcctcctaaaacaggtgatcacatcactgctgtcttcagacactccctttgttcctggacccaactgagggtcgggctactacttctcctggcccaataacaagatgcaaatgagctggagagtaagagaggttttatttctgtaaccggttacaaggagaaggcctggaaattatcaccataccaactcaaaattacaaagttttccaaagctcgtataccttctaagctgtatgtctacatgtaagtgtgcattcatctacagacataagtgattaacttcttttaatctatgactaaggttgagtcctgaagaccctcttctggagcctcagtaagtttacttaatctaaatgggtctaggtgctggggtgattacccttatcttgtctcctgctaaatcataatgatatggggaattcctttagacccccataaacttgtttgtggaggcctggggagtttcttcagatccctaatacaacttgtttaatcctaaaaagggtcctgttaagagttccttcgttatcttgtcatgcttcaaggcccaggaagagcctaggcaaaactcttggtgggctctttgttacattccaacctttgtataagggcattggct

SEQ ID NO: 1561982 - DNA, 4001 bp, Homo sapiens
tgtctaaaaaaaaaaaacaaaaaacaaacaaaaagaaaacaaaaaacgaaaagagagagagagaagggctctaaagctggcctaaagccctattagcatcacttccaccagacccctgttcgtcacacagtactgacttcaggaatatacttgatctgagttccattaacctgagagggctgagtgtaatggatgagaagtttgttcagaccacatgttatccatcctagtaatcatgctgtgcattctataattctgacttatgtgcattgattctccaagcctccttttattaggctggatttgaaaaggagcagctgagtttctagaaggactgacatgacactcacttagatatgacctttcatacctacgtgcccctgaaggtgaagttctagacactaacatcttcacctgtcttagaagatcatcttgctcgagtgctgtggctcatgcctgtaatcccagaactttaggaggcctatgtgggaggattgctcgagcccaggagtttaagaccagcctaagcaataaagtgagacttcatcgctacacaaaaatttaaaagttagctgggtgtggtgctgcacacctgtagtccaagctactcgggcatatactcatatagaaatcaggaatatataatgctgttttcagaattctcactacctgccccaaaactcacagctcaggtcaaaattaccaataggaaattttagccaggcatggtagctcatgcctgtaatcccagcactttgggagacctaggcgggaggatctcttgaacccaggagttcaagaccagtctgggcaacatagtgagaccctgtctctaaaaaaaggagaaataaattaattaaaatttaaaaattgaaaagaagaaaaatgtaaaattatatttttttaaaaaacgaaattgcaattcttttgtgtgcaagtgtctcattgtgagattacagtatgcttaagttggggacgcagtgttatatgtgttttacatcacttacagggcagtgaatagaaagaacaggaaacaccaaaggcaatgctggagcaacacaagtattaataaatgcaggcaggcagtatagtatggtggttagagtgtgggctggtaacaaacctgtttgtgttctaattcttactaggcactttctagctgggagaccttggctaaggtccttttaaaagttttaaatccatccaacaagtacttacaatggatgtgtcaaagacatagaggatgcacagtaaacaaagtagacagcacttctgtcccaaaaaaggtctttccatagtccagaagacaaatttgaaaaactgaggaagggccaggctcggtggctcacgcctgtaatcccagcactttggaaggcggaggcggacggatcacctgaggtcaggagttcgagaccagcctgaccaatatggtgaaaccccgtctctactaaaaatacaaaagttagccgggcgtggtggcgcgcaccttggaattgtttgcgcccgggaggcagaggttgcagtgagtcgagatcatgccactgcactccagcctgggcgacagagcgagactccgtcacaaaacaaacaaacaaacgaacaaacaaacaaaccactgaggaagatcttaactgtaaaattcaaatcatacccacttccaagccatgtgtggattaaacgagataagccaactaaagcgattactcagctcagtgcctagtatacaattagtgcttaacaagtactagcgaccgcttggcaaagcaaagcagactgaagcgtgggtttcatttctcatcatgtgataagtgataaaatgctcttaaccaggtcggctcacctggcctttccattcgacctaaataacgtctacttacttgcgtaagggaagagctctggcccaggtcagcaagcatttgtcaggctagagcctccgggtggcgcttctcgccctcagtaaccggttacctccagaaccagggcgccagctccggccatccgcggttaagcgggagctcccattggctaatcgcacactgaaacgcacgccttttcccgcccctgacgctgccgtccaatgcgcgcctctcgactctgctccgccccgccccgcccccgtcgccctgcctccctggcgtatttgcgccattggtggatattccggaccgtgatggtggcgctgcgcgtgcgcactcgctccgagccctgctcccgggagagggagctctcgggtcggggctagggaaggctgaccccgctcggcccgggtgaaagggcggtgacggcactgggtggggccgagctccagggctggctgctgggctgctaagggaactgtgagccgctcagagccgcgcgcctcccgggcggggcggggccggccgtgggagtccgcgcgtgcccgcgccgagctgcctgctccggcggcttcgctgctagctcgcggcgacgtcgggccgattttcccaggatgacagagctgaggcagagggtggcccatgagccggttgcgccacccgaggacaaggtagcggcagcgtcggggtgggcgcggccgggacagcggcgcatccgggaggcctgcgggggacgcgcgcagaggggtcgtcttgttctctgaccctttgtcgcagccgacggcggccccgggcccgggtagcgcgaagggccctcgggtgcccggccttcgcggcgcgcgcgtcaggggtcggcgggtcggggtcccggctcagggtctgactgaagtggctcccccggggcgcaggaaggagcttctcgggagtggcgcacggcctcctgcctcgctgggctggctgcggggactcccctctcccccaactccgtgaggccttcctggaggtgaagatatgcagagccttcttagggaggcggctcctctgagcgcaacttaggctctccgttcccttttacaatgttattattttggggggtgggggaatcaggacaaggccatagcatttgcctcctgggagatgtaaatcccttcttgggcatgaaatcatcggctttgagcaaaggggtgttacccagtgagccagtccgtcatcagcaggtgttggagggcgtcctcccggttgatgggttgtttcctgcaccgtgtgggctctggtgggtaggggaggagagtaggaaggaggccatcttggcggggacagtggcgggggtgacgggtgggggagtggactcctttgggtgaagtgaaagatctgtgtaggggagttaaggaaggtagggattggttttattactgtggaggttgaatggcagtataggactttgtagcagtagttgtgctttccgagatagcagtgatcaggagccctgtgtttgggaaactgatcagacagtgatgtgtagaagggactgagggagcctggaccagactgagggagcctggttcactcgggattgcccatgagtgacctgtagatgttttctttggcccacatattgccttaaaaatcagaaagtttctcctaacaatctaaatttcttgcctgtcttagataattggagggtccaccatcactttgtcacctgctcaatggttggctggagctgaggatcatcggttcccaccaatccctgttgccttacaccaggctcacggcttcccctaatgcagcctgtaactttttgatgactggacgcaacggacattagggagacacccagaaggaagaaagcacaagatttggtgacaggatgtcaacagagcagttacactaggaggaatgtttttggtgaaagataatgagatcatgggttttttttaaacaactttcgtgttattgcagttgacagtggactatccaaagagaactgttcctaccgatttttagaacatatattttggccaggcacagtgctgctcgcctgtaatcctagcttctagggaggctgaggcaggaggatcgcttgagcccaggagtttgagaccctgtctcaaaaaacaaaaacaaaaacatattttggagaac

SEQ ID NO: 1561983 - DNA, 4001 bp, Homo sapiens
ttcttctctcctttggtgtttataaacctaacctggataaatttcttccaagtcagctttaaaatccacttaataaaaagcaagcattctagaaggaaacaaattttaaaagaggttcatggaagttaatgcaaatagacaactggcagtaaacaataaatttaacctgtgagttttagacttgtggtgaacaactatccaaatactaaaatctctctttgaaacatgcaccagtagatatatttctagaaaaagttgttatgaagtaggcttaaattatattaacatatcttgacggaggaggatcacttgaggccaggagttccagaccagcctgggcaagactgcccccacgcccacacacaaaaatgaaaaaattagccaggtgtggtgggacaggcccgtagtccttcctagccacttaggagactaaggcaagaggactgcttgagcccaggaatcccaggttagagagagctatatggcactactgcactccagcctgggcaacagagccaagaccctgtctgtaaaaataaacaaacattctatgacataactatcgtgcctgtgtacagcactctctacaatgagaaactgatactcactggaattccaagttgttcaacatctaaatccatcaacttcatttcatagtctgaaactttctcctggtctaccaaaagaaagcagatgcttttgagaaatactgacacagagttttgattttctgtagcttcgtgactcggtaaaaaggtacgacttacttggtgcttcaaatactagcgccaaggtatccgcgttatcttcggcccttagtgtaatgatatcttcattgccggcgcattttagtattttggacatactagaagacaggagacacatgctttaaaatcaacgccgtctgctgaagggctgtatttcgaacgcggttagaaggggttaccactctcacccatcaggccgtctcagaactggtggagggtaagcggactgctggaggatgccattattaatgcagacgttttgggacgcatctggcagtatttatactaaaataccaccagcagtgtcccttctggatagaaacaatctcctgccactaagtaggatgacaggctgccacatttctcgcaagggcattataaagcatttaaagtcaaccgcgactgagccgggaggatcgcttgagcccagaagttggagaccagcccgggcaacacaccgagaccgtctcagaaacaagaaagccacagctaaagcgtccattcaaggccaacaggatttagtgagcaaagagccctggaacagtgttcctggcactgcggaaaaacccttgattttcccgccaccacccgctttgtgactttggcgcgaaaaagcaggttcgcgcagcagccagcgcgggcttttccgaaccgcgcgctcagctgggccccaccccactgcgtggcaggccaatgagaaggcgcggatggcccacgccagccaatgagggctaggctcgaaagcgctcccgccaagcaccggaggtgcaggcgggccggggccggcttcccggggccgcgaggctcacctggtgaggttcacgcccatggccaggttgcggtcgcagcggtaggtgtcgaagccctcagaccgcagggtgagctgcaccaaagagacgtgggacgagtccatgctctgcaggtttacaccgctggagctaatatcccagcaggcctcgttgatgaggtccttgagtgcctccaacaccttcttgaggatggagccctggaccaggcgcgcctcgaacatggtggcggagtggcaacaacgccgctacaggcaggcgggaaggaggaaagtctagctggtttcggcttcaggagcctcagagcgagcgggcgaacgtcgcgacgaccggctgagacctagaaagacaacgaccactctgctacgcctgcaaccgtttaatgccgccgcgtccgcaagcgcgcgctctcaccctgcgccgcgttgcgacgtcaccacgctgtccagcccacggccttgcggggaagactttagggccaatcgtgtccatgctccccgcgaggcccgccccctagagcatacattggaggaagcgggcgcagggcggggcagcgtcgcgcaggtctccccgcctctttgactcctgaacccggccgcagaacaagtccgggcatatgtggagatcgggtcccggtcccggctcgtcaagccccagctttatggtggctcctcagcctcccactacgtgggtagaaagtttccagccacgaaagtgaaagtgaaatgcaaatcaagcctaccgggaggaaaagcctccttgcagcctgaagagagtacagctgctgcaaatatgcactttatttttcaattacagaattgatgcgctcgtaggtgtcacaagataaagaggtgaattgttctgttaaacttagctccctatcatcctcttaacattcccccgccagctcttataatcactcaatcgttcattgtataaagcttttaaagcttttttaaaagttcgaatacactttttttttttcaaaaatgcactcattccgtaaacacttggaaaagtacttaataaagtacatttaattttatgccacgtacatcttttatcatatcagtacctctttaaaacatagcatcacatgtatataacataatttatcaatctcctgttgtttaactacaaacacctttgagcacttaggcaattttggtgatatcaactccttgaagtaatacagctgagtcaaagagcgtacacatttaatattttttcttttcttttcctttctttttgagatggagtcctgctctgtcatccaggctggagtacagtggcgcgatctcagctcattgcaacctccgcctcccaggttcaagtgagtctcctgcctcagcctcccgagtatctgggattacaggtgcctaccaccacccccggctaatttttgtattattattattatttttttttagtagagacggggtttcaccatgttggccaggctggtcttgaacacctgacctgaggtgatccacctgcctcggcctctcaaagtgctgggattacaggcgtgagccaccacgcccagccagaaattttcaattgttacaggatggacaggatttgttgtttctctcttgctttcttcacaccacttctctttagttacttttaataccttggtcagcagaattctttagtttttctaccatgtatctaggtatggagttagttttatttgtcttgttgagggaactgaagattcatttcaagtctgacatattctcaatcattatggcttcaaatatctcctctccttagtctattctttatctctggaatgcctttctttccttttttttttttttttttttttcctagttcagctgtgactccatacaaggttctaagatgagtttcacagtctcttccctggattttgtggagacttaactttacccttctgtatcagcctcttaaagcactgggtcagccttaaaagggaacaggaaagggcatttctattataagatgccttcaattgtaatatgtaccattattttatgtagcacaagcaagaaaactgtcaaacttttttttttattattttctagagaggggagtctccctttgacacccaggctggagtgcagtggcaagatgactactcactgccacctccaacttctaggctcgagagatcctcttgccacctcccaaatagctgggactacaggggtgcaccactgtacctggctaatttttaaatgtttttgtagagagaaggtcccactatgtcgctctggctggtctccaactcctgggctcaagcaatcttcccaatcggtctcccaaagtgtgagattacaggcatgagccactgtgcccagcctcaaactgttacacaatgctttatcacttagaatttctttttttttttctttttctttttcttttttttttttctgag

SEQ ID NO: 1561984 - DNA, 4001 bp, Homo sapiens
ccaggggtgggcggtcgtgggcgggggtgagggcgcagaagttccgccccgattttagagaccagtttctttccaaatctagagtcaggaagccgttgttcccggagaggagcagggaccgaagtccctgggagggaagtcctcccggcgcggggtgggagaaacaccgaggtgaattgcagtgtccaaacgtccagcctcgtctgtaggaaactattctttctccgggggatgggggtgggggagacttccctggccaagtagccaacgccaggcttagctgttcagggcttcatccctccatccccaggcagcctcgagaacttggtacctcggacagcatccccggagcatggcatcctgtgaaaggtgttatcctattttcgccatcaagtcaaagagcagtaaattattttgatgaccttactagtacagatgaaggacattttaattacataaccggtgaaagatcaccggaggcaatatcgtgttaaagagcccatggcagaatatctgcatcgcatgagaaagagagaaaacttgcaaatctgcaatgagattgcgcagggctgcccccccgtccccccgttttgaaacaacatgcgaaatgcatgggagagcttacctttcggactccaaagccgtgttctgctgcaacttggcgagctttgtcctctccccctttatgcaactccacaagaaaatgattcgtgaagaccggtcgctcagcagatgcaaaaaccatgacacagaagaggaacccggcggccgccttccactgggagacacaaccacccttcatccttctttgggagtgaaaagtggtgctaggaggcgcgcaggctggcggagcaggggactcggagggagggtgcaaataaagaattcttatatatagtttttaaaaaaatctttgtatagagaaagagactgaacagggtcttggaaagcagcgaatcagtgtgtgttctccagcatctggctggaggggaagccgtgcagtcaggcggcccggcgcgcgggcaggggtgcgaatgtggggagctgtgtgtaccggagagaaagagcgagtgtaggtctgtgcttgatgctaaatctgcattttcagctcctcctcagctccaattccctaggggctgggggagagcaccagctcgggtgacgtgagtccgccagcggccaatgagggcgggggaagcggcgggccccgccctgggccgccccgggcccgcccccgcccacccccggcccggcccggcccggccgcctccgccttctgggggcgcagcgcagcgcagcgcagcgcagcgagcccgcgcccccgcccctttcagcaccggagagctcccccatctcagcctggcccgccgcgcgcccaggaaaatccccccagctgtaatcaggccagcggcggcggagtgatgtcattgtttgtgggaatctgtaggctctgggaagggaattacggtgtgtgccgctctcagaggccccgaggggagcaggggcgccggcctctgtgcctcttcctgcttgtttcccgctgcaaaaacacctctctctctctctctctctctttctctctctctcaaacacacacacacacacccaaggcatacttgcctccccttatccgaataacaaagcaaatattaaccctcctcccaccactttgggcaaatccccggggaggtttgctctccttggcaccaggagggttggggaaagcaccttctaggggtgatccatggggggcgagagtgcaaggacgagcccttgttttttgtaggctccaggcaggtccggagcgaagcggctgggaagcccagcaggagacccggctcgccccacccgcgatggtgactggaggaggctcctctaggagtcctggctgcacctccaagatctgccttcaggagagacgcggccggggtggacacggcgggaggtgcattctcagacctggggacgttccactgcacaaggacagcgagggtgctagttggggaacgcatagccaccgatcccaggcgccgggccaagtcgcccgctgaacgtcttctactggaggcgaattcgggcgcagcgacggggggcaggggcaactaagttatccggttaagaaacgtgcactcgcactggactctgctaactgctgacgacggactccgcttcttgcctgagagggaggaagcacgaacgttctgtatgtaacgaaatgaggacgactgtttcaaagctactcaaatattgttgtgttaaagagtatttacactgatctcattgtatcatttagcttcaaagctcaaaattctgctttacttagataagaggtaagagatcttttcttaggggcttaagtgcatgcaattcagagagagaggaagagactatttataccatcgacacgttacacacacattctcatgtatacacatattcctctctttttattttagcttgaagtccaaatctacacaagtcagaacctatgcaagaaaagcaccatcggtagaaatgaatacactttgaatgccatggaccaccctgtcttcagagcatgtctgtttgctgacatagttggctccctcatagccctttaaaaaattgtcacgtaaaaatgtgggcgttgctgaaggtttttattaaaacattagaagtctatgtgacattatttattattgttatttgaattcctctaagaaaattaagctatctgttaggacttagggccatggtggaggcaaggtttctggaaaagtattaacacggtgaaagtattaataaagggaaacagatcaactctgggcccctcagctcactactgctcagaggctcatttctgcctttgttccccctttctattactctattgtttaacagcttaccccctcatagtccatccgtttgattataacacaaggttttcatgtttcaccgtgttagtcagtatggtctctatctcctgaccttgtgatccacccgccttggcctcccaaagtgctgggattacaggcgtgagccactgcgcctggccacttcatttcttaaatagtttccaaatatgaaatgctggtaaatgttgaatctcatatagctacattttaaataactaaaactgtgtaaaattggccagaaatgatataaaacctgaatgactaattaaaataagtcctctttagtggtttacataaaatacagctcatcataatattgtcaggacagaatagcaaatggaaagataatttttttggttattcaaatactaaattttcaatacacaacaatgtagtaagcaagtggaagaggaaatgtatttatcccttggatatctattgatacattgttatttgaaatgctaatacacacccatgtgtgcacacaaattgctcttttagacaactatttctcaaactcctttttccaataacaatagtcaaggtggacagtagagagaatggcagcagcacattttgaggatagacctagaagcctgttgccagggaccctattgcaggctctgctagtactaggtatgtataccacttggctgtgggccaacatattgcacctctcaaagtctctatctttctatctgtgaaaagagactgttggattagatacctcagagccaaagtctataatttcaaaagagttgtgaaaacatacgctgtaatgtaggaagcatcatcaatagtttgagaaatgctgaggaccacaatactatttaataacatattgtggccaacaggcatacttatttttgtgtaacctcccccaaatggtctcatatttatcagttttgtgtacttgaaaaaataataactgacacaaacagattgacagcacgagatataaaaatcaccaatacctggagcttcttttcatttatttacttttgtatctgtaacaatgacgtcgggtgtttggttctggctcagatgtgccacaggcccccagagtctctttgaagatgttgtcctgcaaaacaagactagaactct

SEQ ID NO: 1561985 - DNA, 4001 bp, Homo sapiens
gcggggtgctccctccgccggcgccttctttcccctgctccacccacgctttccagagcaacaagttcctttccgcaagacccgcccgcgcgccaccggcggacccagagcctcttcccagacctctgtcaaactcgtcgccagacccttctggggtcgaaattccggtactgcctacgcccttaggaggagggagaggcccccacacctggaggagccctggcggtggctgggagagaggcgggaggcttgggaagtcaggacagaagagactaataagagcttcggtctgcgcggcccttcaaggcaaaaccaataaccaaaagcacccaccgctcatctcactcctctctcttcctgggatcaggagcgagatggagcctaaaatctcagggacctccacccagccctctggtagccacatctctgtcctttgggttcccctcgccccaccttctctctgcacccacactccaccccagcctgcgccaggtcccctaaggacactggagaaccctgatacatcttttgcaggagagacacgcaggtcagccacagcccccacccagcgcccttctctctgtcctcccaggatgagtaccctggagtctccaaaggagatccaaggtgtccaaagctgggaggctcacctatctgctcaaactgtcgaactctggcaacttcttggaatggggatccccacgctctagtgggaaagccaggctggccgcccacgcatcaggagaggacacctcgacttctccgtagggaatccccctcaaaatccacctctccagctcctgtagccgggagttgagaactagggagccaaccagaagtgcgctccaggggtgggcggtcgtgggcgggggtgagggcgcagaagttccgccccgattttagagaccagtttctttccaaatctagagtcaggaagccgttgttcccggagaggagcagggaccgaagtccctgggagggaagtcctcccggcgcggggtgggagaaacaccgaggtgaattgcagtgtccaaacgtccagcctcgtctgtaggaaactattctttctccgggggatgggggtgggggagacttccctggccaagtagccaacgccaggcttagctgttcagggcttcatccctccatccccaggcagcctcgagaacttggtacctcggacagcatccccggagcatggcatcctgtgaaaggtgttatcctattttcgccatcaagtcaaagagcagtaaattattttgatgaccttactagtacagatgaaggacattttaattacataaccggtgaaagatcaccggaggcaatatcgtgttaaagagcccatggcagaatatctgcatcgcatgagaaagagagaaaacttgcaaatctgcaatgagattgcgcagggctgcccccccgtccccccgttttgaaacaacatgcgaaatgcatgggagagcttacctttcggactccaaagccgtgttctgctgcaacttggcgagctttgtcctctccccctttatgcaactccacaagaaaatgattcgtgaagaccggtcgctcagcagatgcaaaaaccatgacacagaagaggaacccggcggccgccttccactgggagacacaaccacccttcatccttctttgggagtgaaaagtggtgctaggaggcgcgcaggctggcggagcaggggactcggagggagggtgcaaataaagaattcttatatatagtttttaaaaaaatctttgtatagagaaagagactgaacagggtcttggaaagcagcgaatcagtgtgtgttctccagcatctggctggaggggaagccgtgcagtcaggcggcccggcgcgcgggcaggggtgcgaatgtggggagctgtgtgtaccggagagaaagagcgagtgtaggtctgtgcttgatgctaaatctgcattttcagctcctcctcagctccaattccctaggggctgggggagagcaccagctcgggtgacgtgagtccgccagcggccaatgagggcgggggaagcggcgggccccgccctgggccgccccgggcccgcccccgcccacccccggcccggcccggcccggccgcctccgccttctgggggcgcagcgcagcgcagcgcagcgcagcgagcccgcgcccccgcccctttcagcaccggagagctcccccatctcagcctggcccgccgcgcgcccaggaaaatccccccagctgtaatcaggccagcggcggcggagtgatgtcattgtttgtgggaatctgtaggctctgggaagggaattacggtgtgtgccgctctcagaggccccgaggggagcaggggcgccggcctctgtgcctcttcctgcttgtttcccgctgcaaaaacacctctctctctctctctctctctttctctctctctcaaacacacacacacacacccaaggcatacttgcctccccttatccgaataacaaagcaaatattaaccctcctcccaccactttgggcaaatccccggggaggtttgctctccttggcaccaggagggttggggaaagcaccttctaggggtgatccatggggggcgagagtgcaaggacgagcccttgttttttgtaggctccaggcaggtccggagcgaagcggctgggaagcccagcaggagacccggctcgccccacccgcgatggtgactggaggaggctcctctaggagtcctggctgcacctccaagatctgccttcaggagagacgcggccggggtggacacggcgggaggtgcattctcagacctggggacgttccactgcacaaggacagcgagggtgctagttggggaacgcatagccaccgatcccaggcgccgggccaagtcgcccgctgaacgtcttctactggaggcgaattcgggcgcagcgacggggggcaggggcaactaagttatccggttaagaaacgtgcactcgcactggactctgctaactgctgacgacggactccgcttcttgcctgagagggaggaagcacgaacgttctgtatgtaacgaaatgaggacgactgtttcaaagctactcaaatattgttgtgttaaagagtatttacactgatctcattgtatcatttagcttcaaagctcaaaattctgctttacttagataagaggtaagagatcttttcttaggggcttaagtgcatgcaattcagagagagaggaagagactatttataccatcgacacgttacacacacattctcatgtatacacatattcctctctttttattttagcttgaagtccaaatctacacaagtcagaacctatgcaagaaaagcaccatcggtagaaatgaatacactttgaatgccatggaccaccctgtcttcagagcatgtctgtttgctgacatagttggctccctcatagccctttaaaaaattgtcacgtaaaaatgtgggcgttgctgaaggtttttattaaaacattagaagtctatgtgacattatttattattgttatttgaattcctctaagaaaattaagctatctgttaggacttagggccatggtggaggcaaggtttctggaaaagtattaacacggtgaaagtattaataaagggaaacagatcaactctgggcccctcagctcactactgctcagaggctcatttctgcctttgttccccctttctattactctattgtttaacagcttaccccctcatagtccatccgtttgattataacacaaggttttcatgtttcaccgtgttagtcagtatggtctctatctcctgaccttgtgatccacccgccttggcctcccaaagtgctgggattacaggcgtgagccactgcgcctggccacttcatttcttaaatagtttccaaatatgaaatgctggtaaatgttgaatctcatatagctacattttaaataactaaaactgtgtaaaattggccagaaatgatataaaacctgaatgac

SEQ ID NO: 1561986 - DNA, 4001 bp, Homo sapiens
taagccaggagctaacgacctgtcactgaagtgagcaggcaaaatcctgaaccacagtctgtgccagaactgcaaaatttgctcccccatctccccggactgtttcaatttcccacaaggctgagttatacagctgtgacctcctgcctgatctctatcaggaacaaggtaaaggccttaaaggaaaacggaacaggcctccagggctgcactgagaaaatttcaacttaccagagaggctgagatccttctgcagggccctcaggccctctcgattctgattccttttagtgtccaggtccacaatctgaaaaccacagggacaggagggaactcagctatctcttgccccaagctgtcacctcttgacagacaagggttgcagaggcaatgcattattcctgattacattcaacgtcctgcctaaaatggattgatgtgtgaatgtatttcttctctcactcagcttcctggtcttaaagacaatgctttgtgcagctgccctctccccagaaaagatgctgagaaaacatgtgctgactaaatgggaaattctgcattatccactcgaactttagggcatatcagaatcaccaggggagtggaaacccttcccctacacactgtgattaagcaggcctaatgtttatttttggacaaacttctccagctgattctgaactagtaatatgagaaacccaacaatactagattggaacagcaggattgggggcactgagacagtggtaacaacacaatagctactaaggaagtgacgcagtagtacagtatactgcacgagtgctggttctggatttggaatacccaggttcgaatcctgctatctgcctcaagctgtgtaatttcaccttcctatttactcctcctcaaaatggagctacggacagtacctaccttacaggttattgagccagcaattaaatgacttaacacagtacctggcacatagtaagtagctgataaactttaactgctcttattctcatccagcacaccctgatccagtacttaatttgacaggatcttgcccaagttttccccttctcagtaaatacctgacccttctaactggagatgagagggagtcacgactcccccggctccactaccacggcctactgagtctgtctccaaaatacatttctgaccccttcacttctctccaccaccactacctagtccaaatccatctctggtctggaccataccaatggcccctcacccatctccctgcctccgcccttgcccacctatattctgtattccacacagcagccaggggggatccttttaaaacctaaatccaattacgtcaccctccttcccccaggaactcccctcaaaaacttggcacttaaaacaagacaccccataaacagggcgccaccttcccccacgtccccacccctgcccggtcacaaggccccctcaggcttcttttcggttccagctctcccctgagggcctttacagggcggtgcccctagatcaaccatggggccgggaagtgcattttgaaacaggtgctcagggaaacggcccagagcatgatgggtcgagatccacagagcatggcaaggggcagagaaaggatgaagagagaggaatgtccagcatagcgcaggcgctcacttagtagcggccgaatatttatcggcccaggtctgtcgcctcggagccgttaaccgcctgtccaggtcaactcactgcgaccccgcgcgctttcccacggcgccggccgccaggccccagcgccgcggaggggcctctcacctgccgcttgtccgccagcacctcctcggcgagctcctccacttctacaaggtaccgcagcactcgctctgcctcgggtgatagcatagcgcccaccaactccgcttgcggctctcgcgcgaccccgggatctccgcttcgactcccgctgcgcacgcgccgctctctaggtgcttccggcgcgcctgcgcagttaaaagaacggtggtgcgcaggctctaacactagtgcgccagccggctgcgagaggcggggcctagctttgggggcggggctggagcgccctctgcaggctcagagagctcagtcctcgggctgcctctgacccgttactccctcggttcatgcttcttgagcacttattatgtgccaagcagttttatgtgcttaggatgcagcagtgaacacaacaaaatccctgccctcatggaacttcatcctagtgggaaacaccgacaattaatggcaaaacaattatataccgtggcaggtagtgattaggatctgggaaatattattcttcccctggctaagaaacaccaagaaggcccatgtggcagtgtgacttatgtttaatctctgacactttcagtttctaatttataaaaagggggtgaataaaaatccgcctcagtgtctctccacaggatcggaaggaagcaggaatcagctgggcgcagtggctcatgcctgtaatcccagtactttggaaggccaaagcggggggatcacttgagcccaggagttcgagaccagcttgggcaacacagtaaaacctccgtttctactaaaaatacaaaaaaaaaaaattagctgggtgagggggggcgcgcccgttggtcccagctactcaggaggctgaggcgggaggagcacctgcatctggggagtcgaggctgccctgagctatgatggcaccactgcactccagcccgggtgacaaaacgagactctgtctcaaaaaacaaaggaagcagtaatcacttttaattccgtttaaccagagttcacttgagcccctgtgttgggcccaatgtccagagtagctggcctatacataaggaagggacttgaaaactatgggcagtaagcaatgaagtgctagctcagaaaagcaggtgggtgtgggtggtaggattgggaggacttcccagagaaggcaggcaggtggaaaatggttaccatcagaaccagagggttcccacgaggtcttcacgcccaaactcctcattggatagctggaaaaaacaaacctcagagagaggcaaggctttgaaaagaaggtgaggggtgagccatgtggatgcctaggagaagagtgttccaggcagagggaacagccagcgtatgtggaacagaatgggcgggggggaagcaggcaggaggtcagagggaaggaggcattgagcccacatggctgtaaaaggcgctgggaaaggactttgaaagtctaaagagcagaaccgatattatcactctgatgtctcgcctccctgattccagcgttttattctctccttttgacctcttgtaaccaagccccttcacaccccttgccttacttgagtgtcaaagcaacctttgtatggatgggattattactgccccatttcacagctgcagactgaggccaggagaaaggcagtgcctcatcacacagcaagccaggagtgcctggtgtccatgccatttccggaccctgaaaaaaccctccccaaaaattgtggccccagaagccccagcagcacctctatgttgcctagccattggctgccttcaactaccagaggcagagctaatttttccttcagccacctggtgtggggaaggagggagattcattaaggattcctcactgagggtgaatttgtcgccaaacccaggatgttttgtataaacaccttctggttcagaaatgcaggcacaggccctgagaaggaaagggggatgtttgccaaagcagaaatggggctcaccaggcatccctcggcctggaccccagcactgcgtctcctccaccttgggacccacagagggctggaccaggttgacccttgacccctaccacatgggcctggatggggagaggctgagggaggctcccacattagcagcttcttggcggtaactggcctttagaggccacccctggccactggaaatgttggggaggggaatcatagtcatttccaagactttgaaatggt

SEQ ID NO: 1561987 - DNA, 4001 bp, Homo sapiens
agagatgtaaaaagagagagttagagatatagacacagagaaaaagacaggggcccaaaagaatggcagaggtgagaactgcacacacagaaaaagagaccgagacaccgagaaaaagcagagagaggtggaggaccatatgggaagaaaaaataagatgagacatagagatggggagaggacaaatgggaatagaagggaagggggtgaggaggaggggaagaagagggaaaaaagggaagggaagtgaacacaataagagagagagaagtggggagggagagtagattttgattcaggatgctgacataccgtgtgaatcacaaacaccaattctctccctcctgctgctctctgagtctgccctttgttcctagggaccagtgggcaagagaccctgccacataataactgctcagtaaaccgctgtcaagttaaatcaaatcgtccaggaataggacagggaccaaatggcagttcaagccaatgcatcaacaaattgcctcggtgcatatgtctgcggcttgtggccagccgctctggccagtgggatgacctggatggactcggaggagccccctgagccaagccatgtgcctcatggacctaggccatcgtcctcctgccaggagcatcagtctggatccaggctgggagggactgatgaggctgcgcttcacagcactaacagaccccactccatttcgagggtctgatcctggggcttacctgggtgtctccagccgatgttcactgcctaccacagtggccagctctgtctcagtgaaacaggtttatcactttgtcagacccagcaagattagccaacattcatgggctgagatgagtgaatacagtgagagaaatcagctgtgtaaccacactttgtcaggcatgcattgaaatcgaaccagtaactattgatctctcttacaatgatggaagagatctaataaatacgacaattgtgcaggaatgacccaaggaggtgggtagtgggaggtggatttagggagtatcgatcaaaaagagacttcatgatcctgatgcagcagatgaaataaaaagtcttctgctgggatggggaggggaaaggagcaccagcccctcaaatgaaaatattagacattagatcatatctcctggacatagcacacagcatgatggagtgggatgatcagcgatatgataatcgatggagagaaaggtccaacctcaccacttcggaacagtgaaaatctgagcagtcatgccagtatttattgagcacctactgaatgccaggcattttgctatatcccattggagacttgcaataaccttaggaggtgaatattattattattctcatcatacaggtaaagaaagtatgactcagagagggacttctactgttccaaagtcacacagtaagtgagtggtaggatctgggatttcagcccagcactgtttcaggtgttgtgagacacacgtgtagatgacagatggaaaattcctgcctcccaggagttacttcaagaaaccttaactccttccacgtgttttaagatcgcaaatctctcaaatagccccagagctgatccctttgcctgctcccttaaaatgtgctgccttccgccacatagccttgggaaccagtgtgacatccccctcccagctgccaacagaggcatagggtttgcctgccacctatcacacctctagctcagctggggcaaagcagtgggcttgagatcccgtcagtgaacgcaaaccacccccaggcagcataactcaccggcttgggctgctgcaacagctccccccacgcagatctcaaagcctgaagataaatgacctgcaaaaatagaacaaaggcaaggtgtggtgggactggggggagaagaggaggggaaaagagaaggaaggtgccacagaggggtgggagtgaggcctggggtgagaaagaacagaagaggatcgacattctgcaatgctttgcaatggatctcgactgggatgcctgtcaaattagaaaggcaagccttgtatatttcagcaacccttggaagaaagatgataatgaagactttcagtctgtgggaggggaattgaaatcagatccaataatcgaaagagcttgtttcccctgggaagactggagacttaattaagtaatgtttgtagagcttggagggattcttgatacccaggaaaaagtaagcagttgcagaatttactcttcaaccttggagtagtcagcaggctttttttttttttttttttttcctgaaactcatcagctttttgctagaatcaaactttgagacttggtacttttctgaatatgggtctctggaccagtgagcaaatggctttccctttgagcctcctcctggccttagactcctctggctgtagttaataggagagcaacaagtcctttccaagtaaaatggacaagaaaatgcctgctaagcctgggcctcctggcttgttgtcactcccttttcccattcccttccaacaaaacatccccaaacttcaacctgtatcaaattccatcaaaagaagccgctcaaaccagcaccctgtcagcaattaaacacaatccgaaaagaatgaaaaggccgaacctggccgtacattgatgtacatgttatgtgataaatgccagagccttggatctcattaatgtcctcaagccattgttctctaagtccagtgagactcattgacctttaaaatcaccctgattagtgaaacctctcacttctcccatccagggtgtcccattttccccagaccctgggaatggcatgggaactgctgtgtgggagactgcaagaaggagaccctggagctaaagccaaagggtggtcctcttgggagagagcttaccacctgtttaagccaggactgtgcagaaagggagagtccaaagagcagtctctcactggtctggcttttgtgaactagcctcctaactgtaaccacctttgctagataatcagacccaaacctaaaatccccagcccgagctcccaccatctctaggtccagaggaccaggaataagcaaataaaaccaagcgatagaattccagtgccccctctggatgttacctgcactctgctttgtccctgggcagcttctggccgagcaggtcggaggtggcagtggctggtccaaggctcaggggcctccttgactccggcttgggaggaggtgccaaagaggcagctgtgaacaccaccaaagccccttcaaatggcagttctggtgcctcttccccccttttatggacgagagcctcccctgtcgctcagcccttgctgagcacaggctgctgggagccaatggggaagtggctgagagcagtcagagcacagacccccaggcccttcaactcgaactccctgggcctgacacaataggcttctcttcgtgacagggatgtggaggaggaaggcagccgtgttggggagggggcggattctgggtgtagtgctgtttgtcacttgaaatccggccacttcagtttttgatgcgtttccaggagagtgtcacaggaaaaagaagacagggaaggacagagacagaagagttagagaaagagagagagagagagagactcagagagaatcggaaatcgagaaagaggcaatgtcggacctagggagtgatacaaaggaggggagaaagagaaagaaaaacagagacagagagtggcagagatagggagatgggtagaaacacaaggagagagggacagagcaagaaaaaaggaaaccagccaggtagactgtcagactcaaaacacactgatccacagacagacagacgtggagacagacagaggctgagacagtcttctgatcacggaagagagtcggaagatgacagccgagtcagcaggcacgtgcatggcccgctgttgcgtgccgtggcaactctgtgttggctggtgcacgcgtgtgctggaatctttttgtgtgtacatttgcctgcaaacggcattc

SEQ ID NO: 1561988 - DNA, 4001 bp, Homo sapiens
gacagatggaaaattcctgcctcccaggagttacttcaagaaaccttaactccttccacgtgttttaagatcgcaaatctctcaaatagccccagagctgatccctttgcctgctcccttaaaatgtgctgccttccgccacatagccttgggaaccagtgtgacatccccctcccagctgccaacagaggcatagggtttgcctgccacctatcacacctctagctcagctggggcaaagcagtgggcttgagatcccgtcagtgaacgcaaaccacccccaggcagcataactcaccggcttgggctgctgcaacagctccccccacgcagatctcaaagcctgaagataaatgacctgcaaaaatagaacaaaggcaaggtgtggtgggactggggggagaagaggaggggaaaagagaaggaaggtgccacagaggggtgggagtgaggcctggggtgagaaagaacagaagaggatcgacattctgcaatgctttgcaatggatctcgactgggatgcctgtcaaattagaaaggcaagccttgtatatttcagcaacccttggaagaaagatgataatgaagactttcagtctgtgggaggggaattgaaatcagatccaataatcgaaagagcttgtttcccctgggaagactggagacttaattaagtaatgtttgtagagcttggagggattcttgatacccaggaaaaagtaagcagttgcagaatttactcttcaaccttggagtagtcagcaggctttttttttttttttttttttcctgaaactcatcagctttttgctagaatcaaactttgagacttggtacttttctgaatatgggtctctggaccagtgagcaaatggctttccctttgagcctcctcctggccttagactcctctggctgtagttaataggagagcaacaagtcctttccaagtaaaatggacaagaaaatgcctgctaagcctgggcctcctggcttgttgtcactcccttttcccattcccttccaacaaaacatccccaaacttcaacctgtatcaaattccatcaaaagaagccgctcaaaccagcaccctgtcagcaattaaacacaatccgaaaagaatgaaaaggccgaacctggccgtacattgatgtacatgttatgtgataaatgccagagccttggatctcattaatgtcctcaagccattgttctctaagtccagtgagactcattgacctttaaaatcaccctgattagtgaaacctctcacttctcccatccagggtgtcccattttccccagaccctgggaatggcatgggaactgctgtgtgggagactgcaagaaggagaccctggagctaaagccaaagggtggtcctcttgggagagagcttaccacctgtttaagccaggactgtgcagaaagggagagtccaaagagcagtctctcactggtctggcttttgtgaactagcctcctaactgtaaccacctttgctagataatcagacccaaacctaaaatccccagcccgagctcccaccatctctaggtccagaggaccaggaataagcaaataaaaccaagcgatagaattccagtgccccctctggatgttacctgcactctgctttgtccctgggcagcttctggccgagcaggtcggaggtggcagtggctggtccaaggctcaggggcctccttgactccggcttgggaggaggtgccaaagaggcagctgtgaacaccaccaaagccccttcaaatggcagttctggtgcctcttccccccttttatggacgagagcctcccctgtcgctcagcccttgctgagcacaggctgctgggagccaatggggaagtggctgagagcagtcagagcacagacccccaggcccttcaactcgaactccctgggcctgacacaataggcttctcttcgtgacagggatgtggaggaggaaggcagccgtgttggggagggggcggattctgggtgtagtgctgtttgtcacttgaaatccggccacttcagtttttgatgcgtttccaggagagtgtcacaggaaaaagaagacagggaaggacagagacagaagagttagagaaagagagagagagagagagactcagagagaatcggaaatcgagaaagaggcaatgtcggacctagggagtgatacaaaggaggggagaaagagaaagaaaaacagagacagagagtggcagagatagggagatgggtagaaacacaaggagagagggacagagcaagaaaaaaggaaaccagccaggtagactgtcagactcaaaacacactgatccacagacagacagacgtggagacagacagaggctgagacagtcttctgatcacggaagagagtcggaagatgacagccgagtcagcaggcacgtgcatggcccgctgttgcgtgccgtggcaactctgtgttggctggtgcacgcgtgtgctggaatctttttgtgtgtacatttgcctgcaaacggcattcggctctggtacatgcctgagctggtgccaggcacactagccctggcagaagcacagctcttccccgacagccaggagctgcagtttagttttctctggcggcaacacaaaatgaatagcaggaaaaacccctcaaaatatgggctgcaatatgcctcagcacacactctgggtgagggatggacccacctcaatatacccttggcctggaccagcagcagcttgaaggtggcactcttcattgctacagagatcttccagaacataagggtctttgagtttggaagagaacatgcttctcttctcagtcaatagcagacagtttgtggtgggaggcacaactatttcagaagtctggcagggccgcccattttgtgggcacctggctgcaccaggcggttaggtagagttgtcagatttaatcctcatgacctagccagttggttaatattatccccatcttgcagatgagaaaacagaggtttgagagctgagaaactttcctagagacacacagcaagtaagtcatccagctagaacctaaagtcaggtccatctatcctccaagttcctagagacacacagcaagtaagtcatccagctagaacctaaagtcaggtccatctaccctccaagttcctagagacacacagcaagtaagtcatccagctagaacctaaagtcaggtccatctaccctccaagtttctgccccctcccttgcctctccccaggcttgaatctgcccacactgaggggtggggtcagttttcttctctgggactcagcctctccatacacaggctgtgcttaatgacatttaagatgtgagtttgactctcaggtctgccactcaccatcggagagaccttggataagctgccaacttcaacctctgattgctcatctgtacagtggggacaacagtatcatggggctcttgggctcttgtgagggtgaaaggaggatgtgtcaatagcacttaaagcagccagtacggagcggatgttctgctcccatcattcctgataaaccacatccctccagctttgatgcagcaggttctcctgggcatcctcctctccctgcacctggctcgttaaactctcacataaggaggagggtagaaggggctgtttgctgaacacctattatgcctcagacatttccacattccatcacatcctcacaacaagaaaacctgtggtgtggatctcacaatgcgtcctcagatggagaaggcagcagaagttcagagaggccccagccacccagggagggaggaagaaccgagacccatccctcagatcctgaagctgcagccccaccacactcccctctggacccacagcctcactttccttctcctccctgtctcctcttcccgaggcagcacaaggggtctgactggcgggtgcaagcgactcctggtgccctatgtggaagcccctgcccagttggtgatagccagtgcgcagggt

SEQ ID NO: 1561989 - DNA, 4001 bp, Homo sapiens
aagagatctaataaatacgacaattgtgcaggaatgacccaaggaggtgggtagtgggaggtggatttagggagtatcgatcaaaaagagacttcatgatcctgatgcagcagatgaaataaaaagtcttctgctgggatggggaggggaaaggagcaccagcccctcaaatgaaaatattagacattagatcatatctcctggacatagcacacagcatgatggagtgggatgatcagcgatatgataatcgatggagagaaaggtccaacctcaccacttcggaacagtgaaaatctgagcagtcatgccagtatttattgagcacctactgaatgccaggcattttgctatatcccattggagacttgcaataaccttaggaggtgaatattattattattctcatcatacaggtaaagaaagtatgactcagagagggacttctactgttccaaagtcacacagtaagtgagtggtaggatctgggatttcagcccagcactgtttcaggtgttgtgagacacacgtgtagatgacagatggaaaattcctgcctcccaggagttacttcaagaaaccttaactccttccacgtgttttaagatcgcaaatctctcaaatagccccagagctgatccctttgcctgctcccttaaaatgtgctgccttccgccacatagccttgggaaccagtgtgacatccccctcccagctgccaacagaggcatagggtttgcctgccacctatcacacctctagctcagctggggcaaagcagtgggcttgagatcccgtcagtgaacgcaaaccacccccaggcagcataactcaccggcttgggctgctgcaacagctccccccacgcagatctcaaagcctgaagataaatgacctgcaaaaatagaacaaaggcaaggtgtggtgggactggggggagaagaggaggggaaaagagaaggaaggtgccacagaggggtgggagtgaggcctggggtgagaaagaacagaagaggatcgacattctgcaatgctttgcaatggatctcgactgggatgcctgtcaaattagaaaggcaagccttgtatatttcagcaacccttggaagaaagatgataatgaagactttcagtctgtgggaggggaattgaaatcagatccaataatcgaaagagcttgtttcccctgggaagactggagacttaattaagtaatgtttgtagagcttggagggattcttgatacccaggaaaaagtaagcagttgcagaatttactcttcaaccttggagtagtcagcaggctttttttttttttttttttttcctgaaactcatcagctttttgctagaatcaaactttgagacttggtacttttctgaatatgggtctctggaccagtgagcaaatggctttccctttgagcctcctcctggccttagactcctctggctgtagttaataggagagcaacaagtcctttccaagtaaaatggacaagaaaatgcctgctaagcctgggcctcctggcttgttgtcactcccttttcccattcccttccaacaaaacatccccaaacttcaacctgtatcaaattccatcaaaagaagccgctcaaaccagcaccctgtcagcaattaaacacaatccgaaaagaatgaaaaggccgaacctggccgtacattgatgtacatgttatgtgataaatgccagagccttggatctcattaatgtcctcaagccattgttctctaagtccagtgagactcattgacctttaaaatcaccctgattagtgaaacctctcacttctcccatccagggtgtcccattttccccagaccctgggaatggcatgggaactgctgtgtgggagactgcaagaaggagaccctggagctaaagccaaagggtggtcctcttgggagagagcttaccacctgtttaagccaggactgtgcagaaagggagagtccaaagagcagtctctcactggtctggcttttgtgaactagcctcctaactgtaaccacctttgctagataatcagacccaaacctaaaatccccagcccgagctcccaccatctctaggtccagaggaccaggaataagcaaataaaaccaagcgatagaattccagtgccccctctggatgttacctgcactctgctttgtccctgggcagcttctggccgagcaggtcggaggtggcagtggctggtccaaggctcaggggcctccttgactccggcttgggaggaggtgccaaagaggcagctgtgaacaccaccaaagccccttcaaatggcagttctggtgcctcttccccccttttatggacgagagcctcccctgtcgctcagcccttgctgagcacaggctgctgggagccaatggggaagtggctgagagcagtcagagcacagacccccaggcccttcaactcgaactccctgggcctgacacaataggcttctcttcgtgacagggatgtggaggaggaaggcagccgtgttggggagggggcggattctgggtgtagtgctgtttgtcacttgaaatccggccacttcagtttttgatgcgtttccaggagagtgtcacaggaaaaagaagacagggaaggacagagacagaagagttagagaaagagagagagagagagagactcagagagaatcggaaatcgagaaagaggcaatgtcggacctagggagtgatacaaaggaggggagaaagagaaagaaaaacagagacagagagtggcagagatagggagatgggtagaaacacaaggagagagggacagagcaagaaaaaaggaaaccagccaggtagactgtcagactcaaaacacactgatccacagacagacagacgtggagacagacagaggctgagacagtcttctgatcacggaagagagtcggaagatgacagccgagtcagcaggcacgtgcatggcccgctgttgcgtgccgtggcaactctgtgttggctggtgcacgcgtgtgctggaatctttttgtgtgtacatttgcctgcaaacggcattcggctctggtacatgcctgagctggtgccaggcacactagccctggcagaagcacagctcttccccgacagccaggagctgcagtttagttttctctggcggcaacacaaaatgaatagcaggaaaaacccctcaaaatatgggctgcaatatgcctcagcacacactctgggtgagggatggacccacctcaatatacccttggcctggaccagcagcagcttgaaggtggcactcttcattgctacagagatcttccagaacataagggtctttgagtttggaagagaacatgcttctcttctcagtcaatagcagacagtttgtggtgggaggcacaactatttcagaagtctggcagggccgcccattttgtgggcacctggctgcaccaggcggttaggtagagttgtcagatttaatcctcatgacctagccagttggttaatattatccccatcttgcagatgagaaaacagaggtttgagagctgagaaactttcctagagacacacagcaagtaagtcatccagctagaacctaaagtcaggtccatctatcctccaagttcctagagacacacagcaagtaagtcatccagctagaacctaaagtcaggtccatctaccctccaagttcctagagacacacagcaagtaagtcatccagctagaacctaaagtcaggtccatctaccctccaagtttctgccccctcccttgcctctccccaggcttgaatctgcccacactgaggggtggggtcagttttcttctctgggactcagcctctccatacacaggctgtgcttaatgacatttaagatgtgagtttgactctcaggtctgccactcaccatcggagagaccttggataagctgccaacttcaacctctgattgctcatctgtacagtggggacaacagtatcatggggctcttgg

SEQ ID NO: 1561990 - DNA, 4001 bp, Homo sapiens
cttaatacactgcctggtatgtggtagacggtcaggaatcaatattcattatttaatttcttgcttccttgaaccttccgacacatccactgtgctaatcatttgtcctagtctttcccactgctattaatacaatgtaagcccctaatgaagaaccggacataaaaggaaaaaaaataaacacacacacacacacacacacacacacacacacacacacacgttattttggttcttcagctctaacttccaaataaccacttttccactctgtaacacaatggtgcttagtcctgtgttaaaattctctgggttacttttaaaacattgttgaaccaggtccccatccccaggagattctggtttaaatggtctggggtggggaccaagccttagtcacattgtaaaaactttccgggaacatttgatgttcagttagggtccaaagccaagctctaatccatccctacccaaacccttcaaacatcacttcactgacgtcagatcatctgtcatactaaattttactccatctcaagttttcccaggatcaacatcttttacttttccttgtaagaggcggaagtcttctgcctctattccaaaagccagccccttaggagcacattttaatcccaaatctctgatctctcctgtgccctttcattgttaagtcatctcaacccctcgtcaaaattcttgtaccatcacatgcttcctctcttctaatttccacagtctgtgaacaccaagaacaaagacctcatccacttcatctctgtatatcaagcacatagcacagtccaaaggtctgggtaggcaaatcaagaaaagactgtttactcttgattcatccagtccattattttcacccttggtgaactaggttcaaccccaatcactgccaagttgttttctgaaaattcaccaatgaccctgttctcagcaaggtcgtgaatcactgatagactctggaagagtggagtttccttatctttgtattcccaaggtgcttagtgaggtagcttccacacagtaatcacccattaaaggtctgtcaacttgaataagaaagaaaatatgaactgagaggacagaatagtcactgctgatcagcaggtcacggatatttcctgaaataaaagtaccaaaaaaaaaaatctggagactgttatctctatcgttcccagattctagtttccatagcaaactgttcatttaaacgagaagtgcaaacatctcaccaaattatcttggtcaaaggcatggagagtgagtacggggaaggggggctcccttaccatgggataaaatcaatagcacgtaaaacacattaggctttaaccccaaccttgggccaggagggaggctggtagcttgcagaatgcaccccaagaaactccttccccaccttctattttctagcggcccaagtgagatgtggaaaggtccgcaccctgcgggccggctgtgacttgaaaacagagccactgggcaccccaaaagcttgcgtgccgtgcctgtgcggagcaaggccccttcagcgcggagctccaaaggcgctaagccgggcagccgggtcgtcctgaatctgcgggctgcacacgcccgccgggagctgcagcgcccggagcccagcagagcggccgccggccgcagccgcaaacgcgtggggtgcagggccgcgccaccgcgggggaaagacacgaagaggagctgaggaaccgagcgggcagagaccacgagaggccccaggtcgacgccgcgcgcgcgggcccggaagagacggtcacgtgacaccgacctgctggtcccactgctgcttcacatgtacgccggccactgtggccgccgtcagcagcaccgagaggcccagcaccaccttcgagctcctagacatccccacgctggcggccgcggcctctctctcccgcccgcccgaggcgcagaggccgccgcagagtgcgcaccgccgcctgtactgcccaggctcgacccctcgagcgcagagccccagccgtcgcgtgcgccgctcgccgctgccaggcgtgagcaatcgagagccgagcatagagcggcgcccaggctctacgaactcttggcttcactaggggcctcctgcacaccccgcaggcgacagcgttagaccacccccgattcaaattctaggagtcccggcccaaactggccccggcaccttaccagggtggagggtgggggttccatgcccctcagtcagttcagtaccaacctcaccccgggcggggtctggataccgtgctgacccctctcccacagacgtcccttctgagcccctgactgatccagaagcttcgcccaataccggcttcgcctaaacgcagccccctcattgctcctttggcggggcaggcgccaccaggagaccgcctcgttaggcagcttcagaggcgcggggttcccatccgtggagtttttgcctgaggacccattattaaacgctgtagtcgcggtcacctggtttcaccttgacgctgtggggcgactggtcaggctcggattattattattattattattataattttgatacagagtctctgtctatcgcccaggctggagtgcagtggcgcgatctcggctcactgcaaccttaccggattcaagcgattctcctgcctcagcctcccgagaggattacaggcgtgagccaccgcgcctggccccatgtaatctttgtgatcacttttacacccaagtttccgcgccagtaatacaagggaaataaatgatataaagaagtcttgcgttgggaatagttaagcaattgtgcaagacgcattttcacttcttcctcgggtaaaaaaggcaaggcctcccagaaacttttaagtatctgatagagcaaccagtgaaaacgtgttcatcattcaatcattctttcccactagaattcacagagaacgagcttcttccggtggacacggctataggcagtattgattaagcctcaccagggagttttacaacattcattactgttcatagtgctttgctattccagtctcttatgtgagcgtaaatggcataaggggactattgctcttaaaggtatctttaaagataccttttccaaatgtcattttgtccacagcattttttgcagcctagagagaatgtaccactgaattggaaaatggagttcttgctgtaatgaactttgagaagaaattcagttcagggtgtatttgcatatttctctttaaaaattatattagacttctttttattcgtggtatatcctagatattttcccctgtaaatcagtgagccttcaacagagctgtatgtccttagagtgtacatcagggaattagatcaatcgcctttcattttattgtgactaatttttcaacttgttttcttgaaatgtactcttttctttattttcaggatactagaagcaaaaaaaaaagtattctacttttaagaaatcatttattattaactgtgtcaaataaaaaagtgggttgggggactgagggaggtcttgcaaaaaaaaaaaagtatgtttatctgtttaaatatttataagcctaagcagtatattttccgtgattattgtcgcataaattactgatttgtgagagtgactgcatatcatcaaactgagaagcaactatttttttctttttcttttcttttcttctttttaattgagacagggtctcactccgtcgcccaggctggagtgctgtggggtgatctcactgcaacctttgcctcccagattcaagcgattcttgtatctcagcctctggagtagttggggttacaggcctgagccaccaggctgcactaatttttgtatttttagtagagatggggtttcaccatgttggctaggctgatctagaactctagtactgggtgctggtactgggtgtttgtgaaaattggtccagtggcacaccaaggctgtgtggtcacacatacatgcatgatacacttctatacaaaat

SEQ ID NO: 1561991 - DNA, 4001 bp, Homo sapiens
tctcatcagagaaactagttttctgtctgactatctgagtaatgcctgctctgccctggaacatacgttctttggggctatgagattaaggggagaagagctttctcactggtcaccacagttgtctccacttaaaactgagactacgccatattacgtgcccccgaaaatttactgaatcaatgaaaggaaaaaaaaagttggtaattagaaattttgcaatcaaaatccaaggttcaaatcattcttctgccatttcctcttctaccatttacttcacctctctgcacttcagtttccatacctataaaacggagtgaaccacaactagtatcttccaaggaattaaaggccatacctaacaccagagggcccaatttaacaaactagaggtgaagtgaatctcacaaagtttcatacttttttgaatcaccatggccctagaccctactctgggacacagtaagaatttttggatggcagaatagtagggtgagcaacacatcctgagttggctggggctttcccatttttggcagtccctcaatttcatataaaagggggcaatgggtcaccctacaccaggcacagatggcatagactatgtggtactggataggggcaaagcaaagaagttctaatgtggtcttaaaagtggaatgaacgcaaatccctccagccaagagattctcatcaaagaccccctatagcagtttaaaacacagactccggagtcagaatgcctgtgtttaaatgctagctttgcctccgcgcctgttttctcattgttaaataaggataaaaacagtatctccctcaaagaacataaaataaacaatacacgcaaaacaacttacagctgtacctagcacactgtaaagctccccaaattatcagccgttatctccttccccctctccaattttctttttcttctatctgactatctttacacatctgggaaggctcacgggattaaaaaccccacatggaagtttagccggcttagtggttacacaggcgtgctttgagaaaaacaaaaacaaacctgagtttgaactccagctctgcttcttactagctgagtcactttagggcctctaactgctctgtgtctaagtttctctacctgcaaagtggagaggaacccattgcacttgctgagttgcggggaggataacagataaacggccggctgctgggcccggcacatcttccattctcaataaatactggttttagcctgaaggactcaggggcatcaagcgtggaaatgggcagctccaggttggacacagggtctctggggcctgctaatctggggatgcaggaacctgctgtccccgttatgagctgcgtaacctcgggcaggtgactccccatctctgggcctcagtttcctcacccgtaaccacgctcccagcagcagctacccataaccagtgaggctaatgcgatcatgccggtgcaacgcccgagtcaaggccaaccacactcaacgggaccttcggcttcccacacctcaggggcgaggccggggctgcaggttcctcagactccccgggggcaccctcggcatcgcgggaggcggacctgcgtccttcgaggctcccggccccagccccggcgccccgcctcggctggccaggtgcctaggaaaacgctcagggcgccaggcgcgagcaggccttgccgcgggaccgctctcagggcctcggcctcggcctcgggtcccacgccgggcttcggagctgcgcacccccagcatcccgcgcccgggccccagcggccgagatccggcgccgcccgagcatccagagccccgagctccccactcaccgccttcttcatggtggccgccatcttgggactggactaccgcaggcggcggggagggccgcaatggcgcgcttcgcccccgagcgttctctcgctcccggtcggcctagaactccccgcaaaaatacaacactgtctccacattccgtcctcttggacttttggccagtgagtccaaacggctgggacgtagggaggaaatgtgacctggaaggacttggtacatgccaattaaagggacaggcaacccccgtggaccgacataaacacgggggtgtggcgaacggctccggccgcgggcagcagggggcgcgcccaaggctcagcgcggcggggcccagctggggcaggatcaaagggctcggggaatttttctccatccgtcccacagacttgcattgagaaagctaacctacctgtaaaacagctaggaacgaatggccttggcaaatagggtgtgagatttatgtgccatgataattcaggtggtgtaaaggaggtactcctatcttttaatgtaatttttttttaatttaaattcggggggtatgtgtgccggtttattacatggatatactgcatggtgctaaggtttgggtttctaatgatcccgttgcccaagtagtgaacatagtaccccacaggtaatttttcaacccctttcccctgcctccttccccgtttttggaatccgtagcatttattgttcccacctttatgtccacgagtacccagtgtttagctgtcactcataagtgggaacatgagtggttggttttctgtttctgtgttaattcacttaggataatgatgtccagctgcatccatgttgctgcaaaggacatgattttgttcttttttatggctgcatagtattccatggtgtatatggaccacattttctttatcctatccaccactgatgggcatctgggttgattccatgcctttgctgttgtgactaggcaatcctattaattaatttacagcaatattactgaacaattactgtatattctgacacttgtgtctcccaattagtaatttttttttttttttttgccttaggacctctttatactcctggaaattactgaggactccaaagaacttttgtttatgtgggttatttatcgatatttgctgtattagaaattaaagcagaatttttaaaatgtatttattaattcatttaaaataatataaaactccattccatggtaataaaaatcacactttaaaaataactatattttctaagacaaaaataaattgagaagattgtcatcattttacattttcactgatctctttaatatcaggcttaatggaaggttacattctcatgtctacttctgcattcagtctctccaaatacactgtttagttgcctagttgtaggtatgaaaaaccccagcctcatacaaatcatgtagttgggaaagggaggccctcatggatccctgaaaaggtctcagggacccccgaggttcatgggccacagcttgagaactgcccctgacaagcctcctcctttctcaaagtcccaatttcctctttggttaaatgaggggaatgagaccttatagcaccctgtgccctccccaccgaaccacctagcccgccacgggcatcgcctgttctcctgcctattctgggctctccaggcccttagtattgggactttccagtgtgtagctcatatgtgctcaaaaaagtatttgttgaataaagatgtttttccagggttaaatcttagcaccgggtctggcacataggagatgctccatcagtgatatctgtttattccagagctcaatgtaaaagcactgcaagaaacaaatggtggagagggagacagaaataaagggcaaaattgtcacaaatggtaccaagtgcatgaaggagataaatgaggtgctgaggcagagcacagaggggaggggtgggggccagctctggagctggcctctaagctaagagaaaatgggaggcctcagcatggggagaggagacgaaagtggaccccaggggtggagggctgagagggaaagagcctggtgagacatggtagaaaggacagagcagcatggagcgaggctggggtgcaaggcaggggccagatctgggcatgttttagaacttggtgaggccaaactggg

SEQ ID NO: 1561992 - DNA, 4001 bp, Homo sapiens
gggcttccagcctcaaggaccctcctattccccagtgccatcaagtgaattctcacctcagggcctccctgctccccgcagcatcccagcatctagatcagtgcctgaagcattttcaatgatgaataatcatttgctgacccactgacaaaatattccgctttctccttggggaaagtgggtcagcagtggctgagccctgccatccatccatcaaggcctagacagaggccgcagaactattttaaaaatgcccagcgactgaggagcacaaggaacaggtgaggagttgcgtaattactgcaggcagaacatgggctcctggtggccctgaacacactgccaagctgccgaaggttaggactgggaacgccctttcccaaaatccaacccagaatatgccccactgttcttagtactcatgcactgccaaaaacaggggtgctttaggggagggcactgacacttgtgggcacttactctgtgcaggcactgggggaggggcttctgccccattagaggggagcaccctagaggggcctcatctccctctcccgactccaccctgggagctcagcactgggactggcgctcagtaggggctcaatattcctgatgagtggattcagctgcccatcctctgtgcctgagctcagcttctgccacgagcttctcctccaagggcaccacagaaggcctggcagatagcgggctctcaagtgtcccccaaatccccatgtcctcctttcttgactttgtgactccatgtatccctgtatctcagggtttcccaaccccagcactagcctgtggactacaccatgaccgcctcgtggggaaggagggctcctggcagtgcgggatgcttagcagtgtccccggcttctgcccactgggtgccagtggcgttcccccaggtgtgacaaccagaaatgtcttcaagggaaggcaggatcaacccgtttcgaggcactgaaaagaaccacggatggatctaaaccagagtttcctggtgctttggttaaaaacacagattctcccaggagattgcaaggggcaggcctgggtggggcccctggaacaatctgtaataagtgcccccggtatcctcaccaagggccagtgcggaaacactggcctagctctcctccaccccactccgggctctgcctgctggacacctggtactcatgcacccatggccactgagcacaggcaaaactctagccttgtcaccaggaggcctgaggccactccccgtcctcaactcctcttccctggcccagctggggccctggccattttctggattcctcaggcccctcttcctagatcccatcccttgaactgcagctggaccctctccagggtcaggtgtctgcccagcagggggcgaggggccagtcccacgtgggtggaggcccatggccctccctggggaagaagggcgatcaagcacagagccctcccttgggtggccagcgctgtccatacgatcccaactgctgcccccaagacacaggtatcccccatttcacagatgcagaaactgaggcgcagcaaggtcaaacgccatgcgcacaggctcatacagcgggcagaggggaattccaaaccccagactgtcgaccccaacgccagcgcttctgaccctgcggacactgcccttgtttagggagagactctggtgactttgctgcgagggggaggaggggggcggtaagcccgagacccggggcgcccacctctgtggctgggggcgcagcgggcctcccggccacccgcaacggccaagggcaagggattcaggaggagtcgtcccccagcgcctcgtgcccggcgggcaccccgggccccacgtcccgcgtcccctccccgcagcgcgcgcttaccttgcgcaggatctcgggcggcggcggcagcgtcccgggccccgaaggcgcccagcagcgagcgcaggggcgcaggacagcgggcgcgccccccgccacggccacgcatcccgccggagggccgcggagcggagccggggccgcggggaggcgccggcggggcgggaccgggaccagggccgggggcggcgccgccacgcgaggccggcctctccgccgggcgggggctccgaggggctccgctgcgaccttgacccgcccggagccgcagcctcgcccgggcgagcgggagcgggagcggagacctcagcgccgtgcccgggccttccagggatgccctagaaacgttaaagggacagccgggcgggaggtgtagccgccggttccccgcgctgtaaacaggcagcagcgctggagccgctgtggggcggcgggcgagtcgcttggcctctctgagcctcagtggtctggtgtgtaaaatgggctggggctgaagtgggatgggccgagactgagccgggcctggcgctccctaagttggagactccttggctgcctttaatgtaagggcggtgggaggcactgctgcctttcgaataaaccccatatatttaccttttttgctatgaaacaaaacattcgtatttagcttaatgagtgctgcctgggggacacctttgtaaccaccaaccagctccagaactagaactgtgccggccccgtcctctgaccctcccagcgccctctcacaaaacgcccgtccacccaccagcacctgggcctgaaggggttggggtgactctccagaggcctcagcagcctctactgactttggggtttttgtagccacagccctgcccttgaggcaggatcctggcctgagatggactcagggtccccatcagcacccacacagccacgtccccagcagagttccgggtaaccttcctcctgacactcaggtcctcagagccccaaaggaacaccactcccctcctccaccactgaaggctttcaaagtgcactctgctgagggactaggaacccccgttccatcccccagcggctcccccagcaggtgcaatcagtgggccacacagcggccagggcagtgctgggattgggatgtagccaggcctcccagccacctgcctcctccctggcagcctgcctgcttcccgcgtctcccgcccagacttctcagcctcatcttcagaactgcttaacggtggtaacagtcggcagccagcacgtggtggcactgcgctgagcatacattccctgaacctttagaaaactcactgaggagggcgctgttactgtgcccactttatggatgagaaaatgcaagctccatgaaagatgaaactgagtccactgctccaatcccctcctacttcatcctgtttgctcctccatcagctcctggagagaggcactatcatcatgccctcctttctagaggaggaaactgaggctcagagaagtgaagttacttgcctagaaagtgagaaaggtgcagcgtctggattcaacacctggccagtgttgcggtgcttcctagctctgtgcccagctcattggtttgccctggtgaactcctacccaaccttcaagacctggcttaagtgtttgcctcttttctgaagactttaatccttcagtctccctgcctgtcttccccaggcctttggctctcccttccgcaggccccctgcactgggtgcacactctgttggccatacactgcatcccattgagatgatttgtccacccatctgccctgccccacactgggctggaatttgagaggacaggcattggtcctggtcactcagggaccatgtgttttgcaggctttgtcccactctgctgggaatagcatttccatttcctgctggaagcctccttccccactctgtggacccagggcccctccctaattccaggggagggctcatgacctagtccaaccaaccagcatagatcatccacctgacctcaggggctgggccagaaaagttggttcacagaggcacacatttgggactttgctggactgggagagagaagcccatgttatccactagtcctgagaaggatggtctg

SEQ ID NO: 1561993 - DNA, 4001 bp, Homo sapiens
cacaaaacacagattacaaaacacggtaagctctgcaagtagatgagattcagctgcgacatgtcgaattatgtcaagatgcagggaagaaaggaagctaaaaatagcagcacaggctcagcaccaagagcttcggatcatcaacctcaggactggagagaaactgcctccagccattcctcgggtcctaagaggccctagacaggaggaacgcactcccatccatatgtcatgtgccttcatgccaacaactccacggtgcaaagcgtgtggctcccagggaggcaggagtgagcaggctgctctgaagagtggtattttatactttaaaaatagaattttctgagcatccacgatatgaacagtcaccccacaagcaaaactactgcattatataacaacgatgtgttgaagccctgtaagccacgggctgaaggtgtataatatagactcagggctcaacagcttggcaaccaaagagttaatacccaaaacatacaggaaaaaaaaatctatatctattccgtgtagacagagaattgcaaactgccaagctacctatgggctcggctcaggaacagaagaaaatgtatggggaagaaagagcgcattttcatactggcctcttattgcagcttgtggggtgaaagttgtgagattcaacggcagtacgttttcagaacatcttattgggaatgcttccttctgctgagagttgcacctaggtgacaaccgaaatggtggctctgggactgcattcctctgatcctctccttaattaaacaatacactcttgattatttctgaatgaacctcaccatggatttttctgacttgttattcttcgattgtgtatgtggttaccatcattatacacgcacataattccgtaattcctcctcaaagaacaacacgcaaaccacactccacaaaaggactgttaatttcccatatttcctgtcctctaaaaagaaagcaagcatttcagggaaggggttttagcattcagacaacctctcctgaagtccttgggatcctgaatcgccattttccactgggtcaaaaaaacataaaaccttgcagcttaaaaacgcagcaggcacctttggaaaccaatgttgcttccaagaacttaaccatgacccatattaactgtgaattagaattcacttctccatcgccttcttgggccccaactccagacatccaacttcacttgcaaaccatttttcagaaccaaaagtccacaaatgataccaaatgtaaaaccacacaaaagccaagtgtgccttctccctcacccactcccacactcccacccagggttcagtggtggagatcccggaaggacaatgactcctgatagtggagcatatgttcctgacactaaatgaaggcttcaatctccactgtgggaaacctcctctactttgaatttttataaaacctggcttaagaataggacaccatgcagtcaaaacgcacatcaatgacaatctattatttcctggaaacgatcttacaatctacagacaaaaaggcatctgaggggaatttttatttttagcccagaagtaataggttaaaataccattcacatgcaaacaaaagaccttcgtgactctttctggactctgtgccagaaacccagggctgatcctggtctgactcccttgatacataaaaatgacccatctgtggctccaagaggggcagcccccacccctcaccccagactccaaatgcagtcatccgattcaagaacaaaaaaaaaaagccattctcttagggccctgctgctgctagaatttgcaaaccctttgcctttaagaagcctgctccctaagcagagtccctgccctctgcctcaccagagatgtggggcaaagcaactcaccttatggtcacagagggatcctggatgaagggctttatcttccccagaacccctgctctccccgcgggcttctggagtctttctctcaaatctccctgaaaggtcaagattggcaaagagccctcacagccctggcactctcacttgctcctggggactcgctccgctccctgagaaaacctccaacccggcgcagcactgcaattgtcaggaagctcctgtctgcattttggggctgaacaccattattatctgtcaacatttttaaatatagatgttgcaggaagcagagatgaggtgggggtgggggtgaggagggcaacccagggtctgagggtccggctcagtggatcaagtgctggcccccaacaagcctcccctctgctcagggccaggcgcccactcctctctgtgcccgagacgtgtcactcagcactgccaggacactgcctaggctggcatctggccagagcctggcagaaaccacctgaaccaaagtcctgaatcccatatacagaacccacgatggcagcaacttctcctggccttaggcaagttccaggaactagtgggactggagtttttcttagggccctctcttctccttccctaccacaatgaccttggtgacctggggcagaggggaccttggccatgcagagtcctgaggcggctgctgaagtcttagatcagggaggctgcctggagccaagtcccaagggacctcaggaggcaagaaggagtctgatatgcaacctgaaaacaaaaaatgctgaagccagggacccttggtgcaccttttattccgggcccaggcccaggcccaggtggcagacagatggggaggtcgaggacctagggtcacctgtagcaccaacacctgctgctgcaggtatgtctactgctggcttagttgcaggaacatagggtcagctggggaggggcctggtgcagggtttctcagcctcagcactggtgacatttgggaccacacaattctctgtggtgggggctgtgctgtgcattgcaggaggtttagccgcatccctgacagctacatgccagaggccagaagcaccctccaccccagttataacaaccagaatgtctccaggcactgcagtgtcccctgggggaaaaatcaccccaaagaaagaagtgctgctggcaagaaagacagccatgggtctgaaccaggacccctactccataaccatctgaacccaggcaggggacttcacctctctgatcctcggagacagggacaatagcccagaaccaggaacttaacgaatgaagctttgctatgaagaggtagttgccccctgacaccccaagagcccagatccttcctgcaggggatggaggagctggactcagatccaggtccaaattctgctcccagcacattgtagtgggggcatctctcccctcttctgtgtacccacctgtacaatggggtacccttccccagggatggtgtgatatgagctaagagagctacccaaagttcctatcacaaggtacagcctcaatacaattagctgggaagagggagaaggacagggagggagaggggtaagtggaggggaggagggggaagggaagagggaaaagaatagggagggagaggggtaagtggaggggaggagggggaagggaagagggaaaagaataggaaggggaggaaaagagagggggaaaaggaggaacagggaggagaagggggaggaacagggaggagaatggggaggaacaggagaagggggaacaggagaggggggaacagaaggggaggaacaggagaagggggaggaacaggagaagtggggggacagtagaaggggggataggagaaggcaggagaaggcagagacaggagaagcgggggacaggagaaggggcaacaggagaaggcaggagaaggcagaaacaggagaagtgggggacaggagaaggtgggaagaggagaaggggggaaacagaaggagggggaacaggagaaggagggaaccagagaaggggggaacaggaggagggggaacaggagaaggggggacaggagaaggcaggaacaggagaaggtgggaagaggagaagtggg

SEQ ID NO: 1561994 - DNA, 4001 bp, Homo sapiens
atggatgttgctctaatagaaccacttggtctaaaatgaatataatgttttcttaagaaagtttaaaatgaaaacttgacgtctactttaatggaaatgcaatatttttctaatgaaaaattaaacaggctgggaacggtggctcaagcctgtaatcccagcactttgggaggcctaggcgggcggatcacctgaggttaggagtttaagaccagcctagccaacagggtgaaaccctgtctctactaaaaatataaaaattagccaggtgtggtggtgggcacctgtaatcccagctactcgggaggctgaggcaggagaatcacttgaacctgggaggcagaggttgcagtgagccaagaccataccactgcactccagcctgggggacagagtgagactccatctcaaaaaaaagaaaaaagaaaaattaaacagacatatacctgatatgaacgttctttataaaattaatagttcatttaccacctaaaatcatctcacacattgccaggaaatcagtgtcatgattgacactaatcagttgactggaaagtggcaaccaccaggacacacttgcccgtgggctgggctttaggacctggccctatattcatgcattctgcaggaaagtttcttctttcctttggctgcatggaacccccttggctgcctagaacccctggtctacagccacacccacgggtgtcatttaatgccatcacggggagttgggtgcttccttctagtgacttgccatcagtcagtgggaagacggaaggccacagtggctgtcttgacaagcacgacactcattcggtgccacccactgcaactgtattgaggacaattgtgagattaagagaattttatttcatgagcactaagctccaattccagagaggcaaccgtgtttattccgctccattgtctgataaggagcagaagatggaagcctccagatcttctggggacaggcatggagctcataccctggaagggcaggatgatcatgtgaagagaaccagggagaaggcggccactcacagccacagagagagtcctgggacgggtcctgccctcacagccctcagaaggaacccgccctgctggcaccttgatctcagacctccagcctccagcactgcgagagagtaggtttctgctgtggaatcccccagtctgcagcacatgctagggcagccacaggagatgagctcagccagaacagcggagggagaaggggaaggctgggccttctcaggcagccagggccttcctgggaagaagggaggtggggtaaaggcttgagcctccacaggcaccagagaagcagaggcctgggggccaggaggaggctgcccctgccactggagcatggtgggggcacaacgtagagaaaaggaagcaggtgggcatccagtcagcatccacacacgtcgcccatgccacttcaggagccaaggggcctggcgcctcattatttaaaagtcaagtctcacctggttgtcgtgaagctataggtgtgataaaatttcattcaattattcactgaaaaaacagcaaaagtgcttgcaaaacctggtggaattcgctaaggcctctggtttagttggtttagttaacctcactgtaccaatgtccacctcctggtgccaaccagtgaaccatggaaaggtggatgctgtcattgagggaagctctgcaacccccacgtgagtctaaaattatttcaaaaaagtttagaaagtgtgaacaattgtattaaaaacaaacaaaaaacaagatctaacctccgtggctcttcccagcgcagggctgtggcttctcagtcctcttcccagccttccagggtcccacaaatccatccttctctggcccacctagtaggtactatggggaatcttccagagcacaggcaacaggggaggtcttgagaccaaccaggagtcaggagaatgaactgatcctctcccgtactttttgtttctttgtgtttttgtgaattttgtcaaacagaactcggggagagaacagggctcgcctctctccctgggagccaggagccagaaatgcctgcacgtggccccatgcacggctgcactccgagggccaaagcctccattcacgtgcaggctgcggggacagtgcagtgcttgctctctgtgaaatgcccgatttcagcctgcagccatcgctagcttgcacagcatccctggcctgcctcaatggcaacccttgtccccgagaagcacaaagccgcctctgctcgggagccagggctgcagctggggggcgtctccaccccatgactgggcccattcttccccagcacacaggcgaccctgccagggaacacgcatggctcggagctcccaagtactctctcctggcaagtgaggagtgtaaataaatcttgggaggaggacatgagagagaaacacagtccctggaggacagcattctggagtggccacatgagttggaaacttccatgccgaagccttaagaggttggtgagtttcctgtcactgaaggcatttgagcagggacgagaattttcctgggcagggatgggctaaggagggggcagaaggaagcaagcactgcctggatagatggatggatggatggacagagagagagacgatagatacacagattgatagataatggtagatgatcgattagcagatggatgacagattatagatatattgaaaaatagattatagatatattgatacataaataaaaatagataaatgattgatgactagatgctagaatatacatatatttatagatgatagatatattgagagataaataaaaaagagagataaatgataaatagatggatgatagatacatacatagatacacagacgcttcctaagcaggagggcacaactgaatcacagatgcaggtgggcacctgacctaatcagtgttgtccagtcccagatatctctatccaaccacacacctctccctaactccaggtacaatttccacctggggatctgataggtctctcaaacagaacctgtccacagctgaacagagcattgatttgcccaacccccatcctgctcatctcaatggttcctccccattgccgccagaacctctccatccttccagctgctcaggctggaacgcttggagtcatccaggactcttctgtctcatcccagccatctgatccctctcacaccacatctagctctaccaccatcttaattggattctcctaaaagcagagctgcaggcgggcttaggtgaaggtagcttatttgggaggtatctcaggaagcagaagcaagggagcaatgagagtgagggagggaggaagggcaaacccacacacgtgcatttccagggtcacagctgtaggcagcaaggttgcattctctgaaagctccaagaagcacccacctaaaggatgcatgcctgggatgtttactcccatttcgtcagctgaggattgtccttcagacattagctcccctcatgtcctggctgcactttgatgcttgggagaatatccacagcactgggctcatggctgtgctgtgctggaaagtgtttgggtggtataagggagctgatatgtacatttgccaattgccatggtgtaaatacttcccactgcagccagcttgcagcattcctgaaagtgtagccacctgctccaatacagcgctcatcacccaacatgctggttgattgaagccacagctgaagaccaaggcagagctggtccaaggaattgtgatgcaggcacaaagaacatctgctgtgaacaacctgctccaaaccaccagcatctctgactaaatgaccttcgaatcctccagcacaatctcatctcactctgcagccattcaaatcttcaacgggcagctctgaaaataaagcccaagtcttcccccaggcctcggcacctccctgggatcctcccctggccacctcttggcattgtgggcatcaaaaac

SEQ ID NO: 1561995 - DNA, 4001 bp, Homo sapiens
gagtgctgaaggctgaatcccccattcctagtaaaaggattaattaaaaccttaagggtcggccatggcagcctctgcttgaaactctaaggaaattaacctgccctcccagataaagaaaagtcagagatttattcaggccggtaccttagtttgaccaagtgacacagtgtcaatagtcttaacaaagaaatcttccaatacttgcccgggtttattgtttaaattttcaaatgggggggggagggatccagtgcccacacagctgcctgtaatgagtcctctaggcagtttatcgggaagctctggtgtgttccagtgcaggaatccctccccacaaagccagccttcacccgggccccagggattctgatgcccaccatttaacatcatcaagtccccatctggggtcgttgcatttagagagaataagtcttcaaaggcaggcgaagcaacttgttatcaaaacagaatctacgaaggaattgtgcttctctaagatacaaaactgagtcctgtggcttgataccaaaacaccagctttgattctttttttgaaccctacatttcagaagcccagacttctccctgtgaagtgaaaattgccttctggtggagagaggttttaatgatcactttgcttcctgcgtctccatggtgacaggcgcacacagcccacccccccccccacctccccccccgctttattaggcctttcttcctctctggaaagtaatcaatcaagccctatagacgcctttgtgaccggtttatcacctaaacaatcaacgctgccatgggggtggaagagtggacggagtccacacgctgtcacgaaaccgggctctgtcctggcgcacgcccttcgtctccctgccggcggctctgcccagcacacctgtccgggggctagcgcgcccaggtgcgccaggccccgctggagtcaggcgcctggtggaagccctcagcgcggtggcctcagctgcggagcgctgccttccaggagcagatgcccaagcggggacgtccggagctggggcccggcagtggggagggagggaatggcccagaaccggcgctgggcggaggcggccacgggtctgcctctcttcccccagccggtcagcacccgaggaaaggaagcctccttcgaggggacggcagagctcaccagccggagaggaggggaagctgcagcgcccggctctacccaggaaatcagctcttttatggacaaagggctccgaggcgccccagccctgcgagactggggataggaaccgcggggccgagcgcgggttcctgccgcggctccccgaatgcaggcggggcgcggagcctcgcggggtcctgctctcagcgccacctgcctcgggcctccccgacccgcccgccgcccccgcccagcccgttacctgggttctccccggcgtccgcggaggaggtggccgaggagtcggtgaggacgctggggtcactctgcgagcggccccgcgacacgaggcagccgctcccgtcctccgacgcggccatgggcccggccggcgcgggggcaagttagagcgagccgcgtggaatcagagcatccgaggcggccaaggtcaccggcgagggggctggagggggcgtctttttaaaaaagaaaattaaaaaaaaaaaaaaaaaaaaaaggccgggaaaggaaacgagctggagaaagacgccggggctggcttcagggcggggagacaatagcctcgccggctgcagccaggcgcatcccggcgtgcgcggcctcgctttgttatttattcgtgtttattcccattcttcagtctatattccagggaaaaaaaaaaaagttgaaccaggaaataaaaactttttcttgtcagtgtttattgcgtgcttggggcagggggtgatgtcctggaatgtctgggggcgctccctccccccaccccaccccccacccccccaggaaaaaagggaaaaggaagaatctttgctcttgcaattgctttaatctgaaagctgttcttggagcatctgttggaaaacattaggattctcccatcatgccgcgcgagaggagcatgacgtcacgggagaggggcgtgagaaggcgcgtggccactgggaggggtcgcacatacctggaccgcgcgccggggtgggggaggaggggctggaccccgggttaggagccgcccaccccaccaagccgtgctctagaaacaggaaagcttcctagtcccgtttcctcccctcccggaggaaagggaaccctgagagcccctaatttccccagcagctgcagacagctggtttccctggtccttcctctcctgggactgggaggccagtgggtcccgacgcgcccaccccggcaccggaggggagcgacctgaggcttcctccccgcaaccacctggcctgggcctgctagggcaccccggaccctccgaaccctcgctccgaaccctcctccctgccggggggcgggggggcgggggagagggaggagggcacgggcgctttccaatgaggcttttcctcagacgcccttaggaacctgaggggccaggcaagggaggcgacaccccccagggctgccactcacagaggtgtcctccagggtgctaaggagcgattctcacaaccccagcggtggtgtggggtgaacacaggcaggcagccgctgcttccccagccagggcagggaaggaagaaagtccaggaaaggggtagagacgggggtggaatggtggtgtcacctggcctggtcctggaaggtgcccagaggaggaggcatttcaacagacaccaggattcaaggaccacagagacacctgggggaggacacccccatttcaatttctcaaccccatggggcagccccgctctaagccccctttgcaggtgctggaaggggtgggggcaagcggggagagtcgctcaccaagggtcctcctgctggggacagagccctccctaaggctgcccccatcagattagcacctacagcagggcctgggagtgcagtgtgagcgctggcagtgtggacgaaatcccggttaagcgccaaggacagaactgagcggggtggtggtggggagggggaataaagtggatgttcactccacacagagctttgggctcttagcagcagttatttcagcagcatcagtcacctctaaagaaaggactcattcattcattcagactgtgtgcagagtcgagtgtgtgccaggcaccacaccaggcattagggacctagcagtgcacaaacacagagacgccccaactccttgagtcttccgggaaagggggagggtgaagccgagaatggtcaccaacacactaataagatgcccaaataatcatttaattacagttggcaattaagatcaggaaacaaagaggaaactggtgggaaactgctaggaatagatacgttttatccacataaaaatgtgctggctggatggtgaagtggcctgccagccttggactgagcattttgcatggggacctcattccttcctacaactgccctggtaggtgagagctactgtggtctccacttttgagatgaaggcaacttcaagaggtgagcactcttgcccaggttacaagccagcacgtggaagagctgggccacagccaatgctcttggcccagggtctctccaagtgggtcttcaacacctcccactccaagtccccaggggctgtcctgacacactgagtactggccccatgggaaggtttctgaatccttgcccccaaccatgccttgggccccttccgagtctgggtgagtgaacacctgagacagttcagttccattggaaggaagcctgcagctgacccagccacggcaggtgcagaaatggtggggatgggcaggaagggatagagcccagagactggctataggtgggggggaggagaaagatcacaccagaggtctccagctgtctgtcatttgccaaccatccctatgatttttagccttcc

SEQ ID NO: 1561996 - DNA, 4001 bp, Homo sapiens
cacaaacccgtgagtgtagcaaaaaccacagaactgtgaactgtataagggtgaattgtataatatgtgaattatagttcaataaagctgaagaaagaaagaaagaaagaaagaaagaaagaaagaaagaaagaaagaaagaaagaaagagaaagaaagaaagaaaaagagaaataaataaaaaagaaaaaaagggaagaaaaccaagatggtcagggcctgcccacatcctctctcagggccataggctgagctggttgagagccacagggcgtctttcccagcacaccatataggagtccatctgatagcacgtgggacccagcagccacacaagcttgcctcttacaagctgcggtgctcaccaccacccccatgcccccaccgtgagcagaggctcctcccaaaacaagcatgagtatttgctaacctctcccaaacccctgagggctcctcttccgccatggctgcccctcaagcccactccccatcatgtgtggcatgcatgatggcaagagtgtccccctcatcccctgcccatcccagctgccattctggccacttcccggtccactgaccttatggaagcaaagagatccccagcaatgcacagcaggccttgccgtcctgtgctgaaaccctccagggcatcctcccacccctccattaaggatccaatccaaaccccctgaggagcctctggcctcacttggtgccttctccatcatgctccctccattccagccacgctgactgcacagggaagtccctgatcgtgccctgtttgttgctgcctcagggccttccaatcagccaccctctctgccaggaataccttctcccaacactgccacagtgctgactcctcacccctgaatgcccactgcacagaggtgcccaccctgcccacccactgtagtggcttcctgtaccttcctcagttcaatctgaggtgccaccttgttttacttttttttttgagacagagtctcactctgctgcccaggctggagtgcagtggcatgttcttggctcactgcaagctccgcctcccaggttcacaccattctcctgcctcagcctcccgagtagctgggaccacaggtgcccgccaccacacccggctaatttttctgtattttttagtagatatggggtttcactgtgttagccaggatggtctcgatctcctgaccttgtgatctgcctgcatcggcctcccaaagtgctgggattacaggcgtgagtcaccctgactgggcccttgttttactttctttgggccacttgtcactctttgacgtcgtcttgtgtatttcttttcttttctgttggaatacaagttccttgagaacggggactttgtctgtttgtccaaccattgtatgcccacagagcagcaggggctcaatacatttcagttgatagcaaataactactgtgttcaagttcctccgccctcaggatgggaagcccccaggcagcagtatcctccccacgcaatctggtccttgtcactctccagcctcccgactcatcaccctttgctccaaccagactggcctcatctagattccttaggtatctctagtttcaagaactttacacgcactttgccttctagaacccccttcccaactcctggcctggccatcttctactctgggtaacaacttacacttttcttccttcaaaaggcgttcccgacatcagtggacaaagttgctttgtgctgccacatcccccaccatcgccccatcatcatgtctcacccagagctgggagtcactggtttcatcaggtttcttgctggactgactccttccagggggagagacaggcgtgtcttgccccgccacctaccagcacagaatctccacaaagtcagtcctaggaaggacctctggagagaagaatggccaccgcagatgcatcctacacagcctggggcagcagagcaaggcttgggccccatgagccagaatggactgggtttgaatgcaagctcttattaactgttcaaacttgggcaagttacataacctctctgagcttccgtttcctgtcatgtgcaatggggataatactagtacctgccacaaatagtggctgtaagaattaaatgagctaatgcataggaaagggttgacatggtgcctggcaataacaatgttaataaatgctagccagccacagcaccacctccatcatccatttttctaagcaccgtggtgtaccacggtccctgacacccagtacagaaatccacggtgcctgacacccactacagaaatcctgggtgaaaatcactcgattttcaaggacaccacaaaaagcaaacattttttatcaagtctttaattttcaacacaataaatgttcccttccgaaagcaaatgactgaagataaattaaaaaatcagcagttccttctggaatctgcgaggactgggttagatgtttttaggagaagtggccactttggcaagattcttaaatccttcttaagaggattctggaaaaaaaatgcacggcaaacacaatttggaagagctgatgtacttggatcaaaggagacgtaggggattgtgtgcaccttcggcttccccttgaagtggactttggcaggaggcctcgggctgcatgagggagaccagccctgagtgggcacactcagagggtagagtcaagcacagcgttgcgcttagtaggtgccatcagcaccatggtctctggtggagcaccatgagataaaattactggactacccccagcaagtgcccccccagtatgcaaaggggacaggaattgagagacagaagagcccgtggcctctgcctgtctgagtttcccacgcccatccgggtgaacacctggattcattgatgggcagcttttgtgtttattgatcatgtattatggacacaacacgggcctgcagagcccagcagaccaccctgtgagatgtggaccactttgtacaagcccacccaaagaaatggcgacttttcggaccagatatgctagcctgctcgagagatgttatggtcttcaagatagcactgtgccacaccgcaaggtaactggtcacggtgccccttcctcgttttaggtctgcccagcacagatgcctgttccctgtgctcatcatatgcctcctatgagagagctggaagggcaggaaaaccaagaaatggaaacacaggccccactttctggcatctacaatatcatttggaaaaacaaaatgcaaccagctggcattttgaaaacatggagaaagcctgggcttcagaatgaggagacgcaagccctcggacaggctccatttcttcctggcctatgaccttaggcagccccagggccctccaagcctttccagggtcatcatttgtaaaacggggcaacaataatgttaacatcagtcacaccagtgatgcaacgggaagaagaaggggtcactaaaaccaactagtttgggaagccgaactaattcccctgaatctttcaaattccccaatccttgcagattccagaaggaactgctgatttttttcaagtccaatctttcaagtaagctaggggttgcatgttccatgctaccattgccctgggggaaggtgggctaaaggctactgagacatccttttggctgaaagcacaacaacccttcaggttctggcaaatttgaaactctctcaagaagaaaaataaaaggtaggaaattccccttaagaataagctaagagaccgggagcggtggctcatgcctataatcccaacactttgggaggccgaggtgggtggatcacaaggtcaggagttcaagaccagcctggccaagatggtaaaaccctgtctctactaaaaatacaaaaattagccgggtgtggtggcaggcgcctgtaatcccagctactcgggaggctgaggcagagaattgcttgaacccgggaggtggaagttatagtgagctgagatcgcaccactgcactccagtc

SEQ ID NO: 1561997 - DNA, 4001 bp, Homo sapiens
ggattcctccaaacgacatcttttcttcataaaagatagtaagaaagccaatatagggaagaagtttatgggctagaagcagtgctggaaaaatctgagagttttgtttgtttttgttttccagcacaaggagataaagcaaaggagaaaacagtatgcacctaaacagaatcttaggtcttctagaagtaaaccaccaggaggattcagagtcctgtgattaaccaaagaaatggtttccactttgaatccagcgctgggggcccaggcagtcctagacttgaggccacctccagcacaaggaaaatctttatagccactaggtaaacagaacaattccaaagaaagacagaaaccagaaaaatgtttggggattgggcaagccaagagagaagagatcctgctagcggaaagataaaagataggcctatcaaaaacaatgtgctggtagccctttaggagaggaatccttccctgggaggagaggagaattcaggaggtgtgactctgggaagtgtgctcagaagaaaagcccgcagaagcacagagaaaagtgccgtgctgaacaaagatacgcactcgccagaggaagaggaaatgggtgcactgaccagactggggaaagcacctcaaggggagtgtggctccaaaaagggaaggaaactgaggaatgaaaatgtcttggatgacagaaaagctaaacagggtaggaaggcatgctcaaaaccacagaccactcgccacctggaaatgagaggactcacaaaaaggtgtgccccccaaatttaagaagcatctggaaagtggctgcactctgagagttgtataactaaaaggggttcacctcgtacatttggggggcacaagaaacaaatatactcccagatatgaaaatgagtctccttcaggaaataaggtagtttgatttggggaacacgtgaaaagtgtgtaaccccaataatacagtctcgggagaaggcagtgaattcccttatttgtgaaactggaaataagtacccataaacttcaaaatttggacattgttttcggcccaacctcaggtttgaagggctgaggaaaggaagtggcccctaaatgtaagaaattccagaaggcatgctgtcagatttgggacctggaaaaggggaattcttccttggagtagaggggatacaagaaagtatcccaaaactttagctaatggaccccagatctgaggacccgataacagggtgaacctctaaattggaacggaaatgcagaatcaaattggaggcccgaaaaaaggaatgtgctcccactttgggggctgacggaagagggtacgccctaaatttgggggggggagggcttttagaaatttagataaaattccagagctagagcttaagaaagggggtgtgccgcccagttttcaaaactatagagaaaagggacactcccatatttggggtcttgagaaaggaatgtgctccccagaataggataaaaaaagccaattttaaaaaacatattcccaaagcgcaaggcaatagcagaggctgctgatgaggctctaggtgcccacacagctcaggctcgggccctagggcttacccgcacccccaacacggcccgctccgcgccccgggcccgcaccccacggcccagccccctcgggcggcgctgattggcggcagccgccgccactcttgcgggtagccccggggattgggcaccgctcgcacgcccgccacgctctcagcagcagtcccagggcctccctccaggctgggcgagcggggccaggcggggagcggggccgggcaggggaccgaagcagcggtggcgtccgtcgccgtccccgcccgcacggcgcgcgcgcagcgcgggcccggcccaacccggcccggccggccggcttcgcctggccgcgagctcacctcacggccccactccggctgcgccgctccaggaccaaccgacagaaggactctgcgtgctctgcaccacgtgacccccgggacgcgcccagcgtatgccccgccccccacacacacgcatcatcgccaccaccgagtgacgtaaggtcccagctgccccgccccctgccccgtctgcccgatcactgtggcaacggcctgcgcaggccacgcccactaccctgacgcgcgggaaacaggcccgcgccctagcaggaacacgaagtccccactcactcgtaatcactgagatcaccgaagccggggaatggacgctatccatcacccgttaattttgccacctaaatgcgtctcaaagcttcccatttctccatcgaagcgaccaccatctctctccaagatgaagatggtttccaccctattactcttcgccgttctaatccattcttcgtacaccggcagagaggtcttttcaaaacgccatcccctgctcaaagctcgtttccctccctactccggattaagatctaactcttcacctagactatctaccaggctcttcaaagtctggacctgacctgctgctttcttatcctcacgaatccagctcccccacattctcagtgtccttcaactccgctaacaatccaggttcttctcatctcagagcctttgcactcatttctcccccactttatcattaactcctagaaaggtttccaattgctgctaaggataaggagctgtattttctctggggacgaaggtcggagttgaagccaccccaaaagaatatgagaccaggagcagtggctcacgcctgtaatcccaacactatgagaggctgaggtgggtagatcacttgagctcaggagttcgagaccagcctgggcaacatagctagacccccgtctctccaagaaatacaacaattagccaggcgtgaacgtgcgcacctgtggtcccagctcaaccttctgagtagctgggactgcaggcccatgccaccatgcctagctaatttttttttttttttgagacacggtctcactgtgtcacccaggctggagtgcagtggcgcagtctcggctcctcataacctccacctcctaggcccaagcaattctcccacctcagtctcccagatagctggaaccacaggtgtgcacctggctaatttttgcatttttttgtagagacgcagtttcacgatgttgcccaggctggtcttgaattcctgggctcaagcagtccacccacctcagcctcccagagtgctggaattaacaccgtacttggccactttttttttttttttttgagatagagtctcgctctgtagcccagacgggagtgcagtggtgcgatcttggctcactgcaacctctgcctcccgggttcaagcaattctttgcctcagcctcccaagtagctgggattacaggcgcacgccgccacgcccagctaattttttatattttttttagtagagacgggttttcaccatcttggccaggctggtcttgaactcctgacctcatgatccgcgcgcctcggcctcctaaaatactgcgattacaagcgtgagccaccgtgcccggccgagtttttttttttttttttttagagacagggtctcactttgttgaccaggctggtctcaaactccttggctcaagtgatcctcctgcctcagcctccagaaatgctggaattacaggcctcagccagcaaatccagcctgaggggtgctttttaaaccagggctggaaactaaggagggtattgcctcagttgaggtagtcagggcaaagagcagcccttaggtagagacactgtggaaccagggacaaaagcttcagctacacttgcttgggcagtacatgtattctattaaaattgtaacatggctgggcgcggtggctcacgcatgtaatcccagcactttgggaggccaagacgggcagattacctgaggtgaggagttcgagaccagcctggccaacatggtgaaaccctctctctactaaaaatgcaaaaattagccaggtgtggtggtgcatgcctgtagtcccagct

SEQ ID NO: 1561998 - DNA, 4001 bp, Homo sapiens
ctggtaaggccgacagtagccaggtcaggactgatggtggattggaaaaaaaagacctgcttatggtttatgtaatgtttatttattttttgtgttttgtgtttttcctggtccttggccaaaggcaagatttccatatttccatttcctggtgaaaaggagctggcagcactggggctgattattggatttgtaatatgaagccctagcaatgtgcctcctgtttcctccccccgccctgctctctttcaccatgggaccgtttcccctcttcactggagagaagaagtcccaattctacatccatttccccaaagcatccaggagcccagaagtcataggaaccagaaacaagtggagcagaaggaactctttattggaaagtggatgagagaggcagctccagccgtgggcatcctgaatgggaggaagaatggacagtgtgggaaggggaagggcagcagggacttaggaccagatggggcctgtagctctggggacggcacaggtgcagcaaggaccggctccctctgtggaagagaagagtatcagaggtgagagtcagcacatcaaagcactcagaggcagtgaggaagacagatcatccttctaggcactctggttatagcctctcagacccctcagtctcccagtctttctgtcacctcccacaacctccctcccaccaacctgggatgcttccccaccgctcagccttcttttgtgtcttcaggggtctcctcgttctccagctagtgctcacctcactggggaacgaaacaggccatcccgcaagagccttcacagcacttcttgattcctgggcagtcagtatctttcaagcagcggttagggggattcaacatggcgcaccggatcaagataatggggcaggagccaggcttagtggagactggacctttgactggctcttgcgctttgactttatcttgacctttaactgaaacttgtcctttaacgggatcttgtccattgaatggaacacggcctttgacagtgtcttgacctttaacaggaactgttaaaagaagaaacgagcccacatttatacccagtaagcctctgcttcagctgccatgtctttcctctgggtctgggtccatccactgcttactgcagcatcctcaaaccatggcctgagtagggaaggtacacctctgggagctacactcttggaaggctcttccttttttggggtggtctactggaccagagttcccttgagtatttgtttcttcccccttcctccactccaagtctctcaggagcagtggtcagactggggtgacacccagcagtgaagaggacacattgtcatttgttaggaagtgcattggagtaggaaagaaccctgagccacatactaggagacttgagccccatcctggctctgggaattaccttggcaattgctcactcatttctacatttttggttccctccttataaaatgggggtcctcaaacaacatgattcctgaaggcttgttgtttcttaacctccttttagagtactgattactccagtgcttttatggggcagagaaacgggggactgtgtccacacccaaggtttaaaatcctggagttcattattttattgcacattctgcacaggtattgacatctgaggccaaggccacataccaacattacttccacaaacagtcctgatatctcagtcactgaggtggaaagcacgtggagtccaccagccaaagtcctattttttctgaatatgatggcaaagaacagaaagctgaaatctgggctccagtgctgcctactgcttcagaagtgctccctgtcctggcccagggtgtcccagagggtctccccttagtccaacccagcccagcaggtcacctgttcactcacctcccgtgacagctgcctctagaaccagcgtcccagcgatgaggaacaccaccacgatcaagaagctgctggccctcatggtgtcaggaaggtgtttggctaagagctaaggccataccaatctttatgcagtccagcttggcctggctccaggggcgggtctgtggtatttacaagggataattccttagctgtattgggaaatatccaccccattctgggagggacctgggggctttccctcaggattattcacaggaagaactaatggacattacatcacatcatctctgattgtcccaagagttttcctactttctcacagagtagaagtgctggctcacttattaggtaacattacaatgaaattcttcatgttttgaaatacagtgagacccaagaagagaaaggaatcaccgaaggttattcagcaagtcactggtagatccagtcttgattacaaaaccaaggtgtttctccattatgctctggtgctacaaaccccacccagatctactttatcattttaccactcccagcatcaaactgggcatttccttccttcttccctggtcctgcaaaaaactctgtaagacaaatttgccttgaatacataatgactaattattgcactttgctgtttcagagacggcctttcagatgcatcaagaaagtaattggaaggtggaattctaggtctgaagagggatgatgcccttgaaatcacagtggtagggagaaaataatcagaaagtagtagaaaacatgtatcatgtatacattggacatctacagtgtgtgtgtccagcatgcctccccacttctttgaacagcaccctgtttcttgtgaagaattgttgtctctttgaaccatcaacttgtgagtctaatggggactgctaatcatgaaagcctgacccctgaccacaggtaggggtgtgtgtgtgtgtgtgtgtgtgtgagtgtgtgtgtgtgtgttgtgtgtgagacttggtctggtctattaacatattttatttgaatgagtaatgaaaggggaaaacgggggttccttcttctggaaaaggtgatatatatgaaccagggaattccagaagtggttatctaagtctgggggtggagatcaattgtctgagaaaaacgactctaatacactgagacaaggagagaagtgatggtgagagaagattcagatgacacagccaggtttccctcctttaccttgagagcagttcttcacacacccttctcatggttgggttatgaggcaataaattagccctctgcttcagctagtctgacttactattctgtcattgttaccaaaagttctgagtaatagaaatgaatatcctgaagttgggtattgtcagggacagaatctgagttaagaaagtcactgagttgaggtggagttaaggcagggaaggtaacaaactaattattggacactaattcagctggtgaaatccccaccccttgtcgatttagactctgaccacatgcccaccaagcctgaaactgagggagacataaacgaatgtcagactgtggaagcctttggctaccttacacaaaagctcattgtacaataagccatacaaacaaataaaaagctcacagaaaatacctatattctttaaagaatagcattaaaatgagctgccaggtaaaggaggagaatatttgctatatctatgctccatgcctctcctcagttgcttcattctccttcctccccagagataactgcttcctaagattttatggtaattagcccttgctttcctttatagttatgccacttctgtctgtattctgaaatatatattcagtttagtatactttttcaatttgtatgtaaatgaaatctaaggtatagtgttcatatgtcctgcttatgttgctcaacattatatttttgagagtcatccattttgaagtctacacctgtagttcatcattttcactgctgtacagtattctatgaaaaataccaaaaatgttatatattcattctactgtcaatatacattggatatttctaggttttagctattatagtgttgctatgaatattcttgtacatatctcttgcagaac

SEQ ID NO: 1561999 - DNA, 4001 bp, Homo sapiens
tctcagtaatagagaaagcataaaacttaataagcactagaaagaattctaagcatttgctccacatttcaggcaattacgggctgagggaagacagtgacagcagagtagacaggaaagggtaggggagccagagttgaggcaagagagaaagtcttggcaagctggggagttactgcttattccttattccttagtgttgtccaggagcttttgataattctatgttcagagcttttcaactgctccaatccttaagcctcaaataaaaatggcaaacttgaagccggaaagctctactcaaaccataaacatgcttcatttggtatgcacaacattgacccgcacagcactcaaaaaatttttaaattacttgctgatatttgaatttgccaattttcacattaaattccagatttctggtatctcttgaaaaatgaggccaggtgtggtggctcttgcctgtaatcccaacactttgggaggctgaggcaggaggatcgcttgaacccaggagttcgagaccagcctgggcaatatagtgagaccttgtttctacaaaaaatttttagaaacatttgactctgaccacattaggcctctattcccacatggcaacaatccatagaagctgagtggcagagctgtcctcgttagaatgtcacacaaactctctagcctgccacaattcctgctgctcctttttattgccctaaaacttgttatatcatacttgcactattgatttcttatagtgggattaagaggaaaatgagatatatttctcattcctgtgtttgtcaattttaaaaatacctttattcattccttacctgtgtggcccatgtagacctgtttgcaaccactgcacagaaaggttctattctaaacaggatagccacagcagccactgggaaatagcggtttgtagtaggcacagtaactagacctgccccctcccaaacaaaagcagttcctctaacactgtgatgtagcatcctgttggccagttgtaacccacagatatgttatggttggctttcgtggtatttattatcatttaaaaaatattaatgaatgccttttaaaaggttatccagttgccagttttctactgccttacctccaaataagcattaattgtttgctatttgcctctccagggatatgcatgtgctacctcaggtctgaaagttttaggattgggaagtttattcatctgtggtaacatttcttacttccaatgccagctctacccccatggaatcgctgcctactggaagtgctgtccccaagagcagtggcaggatgacaacactctcccagccacattccctccatggcctgcaacagggcccaaggtgtgcactcactcagtgacagtgtcttggaaccagacccacagctctgcacctgatggggcctgcaggaagggtggcccccagtatcgggtcctccaaaagccttgtgtgaatgacaggtgcagctcccgtagagaatacttggagatcagctgccccagggctttgggaaagagcctgtaatgggacactggggaaacgggagcaggtgagtgacgatccccacctcgtcggggtccacacccaggatcccgaactctacccaggaattaggccccgcccccaaagtttgccttcatcccacggccggccagccagcaggcactacggaaatctttccctggtcagatctcgcgccctcacctccttcccgctgaagctccgaatcccagcgcgtgcggaactggaatgtggcggctacgtccccggaaggcagcggggtgatgacaagttcctcccgcaggctgtcgcgtgggggttctgcaaggcaccagccgccgggccccaggagcaacaggacgagcagagcaagcggcatagccgccgccatgcctgcggctacttccgcctacccagcggcgctcggccccatgaaaagccggtatccaataagaaaggcgtgtgagaagtgacttccgctgtcgtcccggaaaccgggatgcggttatcagagcgaccgcctgcgcaggtcgcgaagattccctcagagctggtgggtctaagggggtactgggaggacacgagagggagtaggcagggcgagtaaccagcttgaggccgcacctagttcatggcgtattccacccaccaggaaatgcttaataatatgaagctccttcactgccattttacccatttgatagttgaggaaacattgactgaaaaagatcaattacttttgggaaaaccattgtggttttaatttgcatttcccaaagtaagaggaacctcctgcccctcttagcttctagtgtctccatttgctgcaaaacccccaaataagtggttcttttattacgaaaatgttcaaacaaaattgaaagaatgagcacctgttacaataaacctattttccaccacctagattctactatttacattatactatacttgtactttaccacatatttgtctatacatccatcattccatcttgtgttttggtgcacttcaaagtaaattgcagacattagtacactttcctttaagtagttaagcatgcatataattaactagagttcagtattcgattgcattttgatgtaaaattcacatacagtgaaatgcacaaatccaaagtacacattcactgagttttgacaaatgcacacacctatgtaacccgaactcctatcatgatacagaacattcctaaaaccccagaaaattagcaataccctttcctagtcaatccctgctcctctatcaccttccagaggcagttagtaccctgattttttcccacaatagattaatctgttccagaactaaatataaatgaaatcatatagtatgtatactgtgtaaggcttttttttttctcatgggaagaatgtttttgagaatcatccatgttcttgcatgtatccacaattctttttattactgcgtagtattattaatttatccattcaactcttgatgggcacttttaaagtttttggttattattaacaaggctgctgtctgtgcaagctcctttgtagacgtatatttctcatatcctttggccaggtatttaagagtggaattgctgggtcagagagcaggtgtatgtttaattttataagaaactgtcagacctttctccaaaatgtatcattttatgtttccataaactatgagtctccattgtaccacatcctggtcagcatttgaagtttctaattttttgtactttttagttttgaccacttgggtatgtatgtagtgtttgctcattgtggttttaatttgcatttccctggtaactaaaaatgttaagcatctgttcatgtgcttatttgccatttattttttaatttaatttttatttttttgtgaaaggtctgttaaagtcttctgcaccctcacccctttgtttactggcttgtctttttattgactttttcggagttccaaagttaaagtcatgctttagtttttccacctgccctatgggaaacacattcatgaaggatttcatgaacagtctcttggtgacactcatgaccacacttctagaaagagccaatttggtgtcaggcaggtctgccaagatatgcgccaaccaaccagacatttccagaaaggaaatgtcagaaagatgtctttatctcattatgccttcattctgcctgcattcagtgttcctgccccattagacacgaaatattaggaaggccatgggcttagatgtcagaaagacaggagtccaaatccctatgccagcctttaatccatatgagcatgatcaacccaagtgtcacttttcttcatttgtataatgaagaaacctactttcaaggttgttgttaagatgagaaattatgtacatgtaggatatggaatgtagcaagtgcttaatagtaacactcaaccctgtcacctaggcactaatatgtaaatgtagataatagtgcctaagtgatagggttgctt

SEQ ID NO: 1562000 - DNA, 4001 bp, Homo sapiens
gtggaaaaaccggatataaacaggtaattatgagataagaaatgctcttagtagggtgtagaggaagaagggcctaatactgcctcaggttttcagttatccagaagaaaacaggaaccaaatggcttcgattcatttcaacagaaaaataatacgcagaggtaacaaatccaagctcttacaatctcagacatgaattattactatctttattaccattccccaactaggaaacctgggcaaattaacttctctaaatttcagttccctcatctgtaaaagggggaaaataacaccatctatcacatagaaataaatgtgaggactaaatgagaaaaggtatatgttaccatttttagaaaccttaactctattcataaaacacccattcattatgccgttccccataccaacattctatgggataacatcaaaacgttagccttggccaggtgccatggctcacgcctgaaatcccagcactttgggaggccaagtgagactgcttgagtccaggagttccagaccagcctgggcaacatagaaagaccctgtctctaaacaaaaaacaaaaacaaaaacaaaaaaactttagcatttaaaggacacaaaggggacttctggggtgctgatactgtttcttgaactaggtgctggctacatgagtgaatacagtttttaaaaattcattgaactctacacttacttaatatgcattgtatgtatactgtacttcagtaaaaaaaaaaaaaaaaaagttgtttgtttttttttaatcatcaaactctggcctaaacctagcttccaccccattactcccctgctttggacatttcacatccttgaacgtttcttcatcctatttactttctgctacctggaactctccttttctctaatctccctttcaaaaccctacatccttcaagagtcagctcaaatcccacattctggaaaactggaaaggtaggggatagtttattcagggtcagaatactaaggaaggaactgggtggacacataaagtatacttttcatgaattattataacgatttgtctccctcactagcctgtgcagctacttcaggccaacttcgctttctcgctgtaggcgttagtataaaacaatgttcggtgaagaacttagtaaggaacagtaacaaaaattgccctgcaagtcccagactgagaagagacgtctaaagcacacgcacactctcctcgcttaagcaaaattggtcccctcatcccggaccccctcacacataaccttttatcccagggagcacccctggcgatcccgccccaaatcccaaactcctctgcaagccgcgctccacaagcacctcctcctcttattccaacccttcccacagaccacactcctcggctcaggacactgaatgggacacgccccctcagatccccaccactaggtggtccggcccccagggcccaaacctcacgacactgtccccacgccccggtccccacgccccctcccctcaccagccccgccctcaggccccgccctctccaagaaccccacgagacagtcagttagttctctaggaaccgcgcgctggcggtcactgcccccgcctcccattcacagaggccgcgggagggcaggtggggcctgacagtctgctcgagccagtggcctcacctctcttccaagagctcagtggggacaccacctccacccgctcggaaatgaactcggccagactggagcggaacaaggccgcccgcactgtcacagccaccaccagcaccaggaccaagggagccgccatgataactggggcgggcgcgcgggcggggagggaaggcgaggcggaggagcctcgcgcgctgtgcgccacgctctgtagttccgcgggtgggcgcgcgctgccgctggcgccggagaggccagacgtggggactacggctcccagaaagccttgcggcgaggcgggccggagcgacggaaagcgggcgcctcaagctgcgtatgcagaaggtggggcgaaaccttctacgatcgcaggtgttttgtgaagccgcgccgctatagcggggctgaaacgctgctgaaagtagaagcggaagtagtcgccttcctgggattgtgagagacttttaaacagatgttaaattcactcttgcgtgtatgttttcaatgccaaaatgtttatttttatttttatttttattttttttgagacggagtctcgctctgtcgtccggctggagtgcagtggcgcgatcttggctcactgcaacttccgcctcctgggtagctgggatgacaggcgcccaccaccacgcgcggctattttttttttttttttttttttgtatttttagtagagatggggtttcaccatgttggccaggttggtctcgaactcctgacctcaggtgatccgcccgcctcggcttcccaaaatgctgggattacaggcgtgagccaccgcaccctgcccaaaatgtttatgttttttgtttttgagacagggtctcagtgccgtcgcccaggctggagtgcagtggcgcaatctcagctcactgcagcctggacctcccgggctccagagtagctgggaccacaggtgcgcgccaccacacccggctaagtttttgtacttttagtagagacggggtttcgccatgttgcccaggctggtaccttttatgtttttaaagagtgttaaatgtgtattttttaaaaaatttattctggcagttgtttgttaaacgccaactattttccaggcactatgttaggttctacagatgcgttttggagtagtagactgatttattagctagttcaacaagtcgcttaacccttgtgtgctgaaaaatgtgctgattataggctaactagggacagttgaggaaggcttagaaattttttttttgttttggaaacggagtttcgctcttattgcccgggttggagtgcaatggcgcgatctcagctcactgcaacctccgactcccaggttcaagcgattctcctgcctcagcctcccgagtagctgggattacatgcatgcgccatcacgcccggctaattttttgtaattttagtagagacagggtttctctatgttggtcaggctggtctcgaactccagacttcaggcgatccacctgcctgcctcggcctcccaaagtgctgggattacaggcttgtgtcatcgtgcctggccggaaggcttagaaattttgccagtcgcttttaaacacaggcatttttgaaaattaagacatataaacctacagttaaataacttatattgaaaacaacggaatacatattcaacacgtcactttctaattattttactacacttttttttatatgtgcttttgagattatttaccaccgctgtatcagtacagcaaatactatctctttctcttcccaaatggtggtgttcagtttcctcaggttgatagattgaaaatccctcccaatgcgagtgtttacaccacaggaatcagcaaacactacaaatcaggggtttggggtttggagagcccattgataagcattaagcagcacacttcattaattaatgtatagtaagtgcttaaatattagcaataataatattaaatgtgcaaggaaatttcatatttgtgaagaaaaggaaacaggctggacgcagtggctcacgcctgtaatcccagcactttggaaggccgaagcagccggatcacttgaggtcaggagtttgaaaccagcctgcccaacatggtgaaacctcgtctctattaaaattacaaaaattagccaggcatggtggcctgtgcctgcagtcccagctactcaggaggctgaggcaagagaatcacttgaacctgggaggcggaggctacagcgagccaagatagcgccattgcactccagcctgggcgacagagccagactctgtctcaaaaaaagaaagagagagaagaaagaaaacgaaacagtgtatgactgagaataactgctggt

SEQ ID NO: 1562001 - DNA, 4001 bp, Homo sapiens
ttctctagccatttcttttagtgtagactaagtgcatggctcattcttccaagagtatgcaatgcagtagccctgaataatctcagcctttttttttttgtcaacctctctggatggatctctttcaatattgatctttaagttccagttgtagtggactgcttttggctccatgaatgtacttttgaaaatgtttggaacatccccacgatagctaactcagactacaccctccatacattttatcaaaactctacctgaatctccaaactatgctagattgatcttaacatgcgccccctttcacaattctcatcacaattataatcacttgtttgatgaatattttctccaccaatctgtgatctccttgagggcagggacctgcttccttactacctacacagtgccttgcacatagaagaagatgctcattaaatattttttgaattagccaggtgcagtggtgtgcacctgcagtcccagctgcttgggaggctgagacaggaggatcacttgagcccaggaatctgagaccagcctgggcaacatagtgagacctcatctcaacaataaatacatacacgcacacactgtcacacacacacatatatatgaatcaccacaaatgaatgcctgcaaagtgaaaaacagatgggaggaatgataagaccaagagagaaacacaaaaaactgatctttctgaaactatacctctgatcaaagacacacacctccggcttaaaaccctttgatggcttcccactgcccccaacacaaagcccaaactcctccacacttacagtctttcaggaggagcacctgcttgtctctcaaacaccatctagccagaccccctccaactctcataatctgctctccagctagcctgaaatccttgcagattcccaagaagtctgcactctctccccaaggcttttctctacctactttctctacctgctttatctacccacagcaaggtacactccaccagcctcatcttctggccaacataaagacagccttcatgtctcattttggaagtcaccttcttttggcatctctccctgatcatccacactaacctcacctccagaaatccaggttaactgttttctctgtgcattcacagcccccctgtatgtccaaaatcataaccggaatcactgtgaattcttgtttacgagtctgtctcctccggaaaactgtggagttccctcaggacacgatgtctctcgttcacttttttaccctggctatcagcccgggccgtggctcacaataaatgctcagtgatggtcctccttgtagtagtagtaataataaaagctcccatgtattgagggcttacctccacgaattttaaatataaatttaccttgtaataacgtcatcagacaggtgctaccatgattcccattttgcagacgataaaactgacgcacaaagaagtcaatcctctctggccccagaagagtcacacacacaaataaattttctgcacagttttgagttattttctggcccccaaacaagaagggattttttttttaagaaactttcgaatgaggtcgaccaatggctacaaatataataaacagccgaaaacggactctccctgaacgcggggcggggtcaaagggcgtcgggggcgccgtccccggcgcggctgagggacaaagatcgggccgcagcctccctccccgggatccccggcggctcagcccctcgccccctgcgacgtgtcgacgccaggcccggagcgttggggccgcaaccggccgcccggctcctgctcacctgcggtctcgccgcctctccgtgcctgggccgccggtccgcagcgcctccccggggcagcctagcgcccgcagcccgcaacccgcagcggagcccgttgccttggcgacctgggctgccgaactcccgcggcactcgcgctacggcggctcggatgggaccaggacggttcgcgtccccttccgcagccgcggagggggcagaggagggacgaagtgggagtcgagggctgagctgcgaaggagggatccgggttggaacttggcccggggaagatacggaaagggggacagtgaggccaaggggaggtcttgggccgcgggtgctgcttgtgcctcagtttatctctctgtaacctcaaatggggaccgtgcgaggaggagacagggcctcaggtggtggcttggtagactgggtttttgttattttgtttttgtttttgttttgagacagaatctcactctgtcgcccaggctggagtgcagtggcgcaatctcggttcactgcaacctctgccccctgggtttgagcgattctcatgcctcagcctcccgagtagctgggattaccggaaggtgccaccacgcctggctaatttttgtatttttagtagagacgaggtttcgccatgttgaccaggctggtctcgaactccgacctcagctgatccatccgcctgggcctaccagcatggtgggattacaggcgtgagccaccactccctgccaagactgggaatatttaaagacaagaaaactgatgtgggaagggtggcagattcctctcttttatagtctctgaaggggtggtgtggcaaagagtgaataaattggtttctttgatggagaattagatcaccagatttaatttcaatatgaggaataatttatttttccttgtgtctagcaactacacttcttggaataactctgcagatatgctgaaacctgagcacaaaggatatattcattaattcatttttgtaaaagcaaaagggttgcgaccagtctaaatatctatcaggggctgggcgcaatggctcacacctgtcatcctgaaaccacctttgcaaaaaatcataactgagatatcagacctaactgaccccatcttgcttctaacctctaaagtgtcctgttcattcctgggtataggctaaaccagttttttttgtttttttgttttttgtttttttttttgagacggagtttcgctcttgttgcccaggctggagtgcaatggcgccaacttggctcaccacaatgtccgcctcctgagttcaagtgattctcctgcctcagcctcctgagtagctgggattacaggcatgcaccaccacgcccagctaattttttgtatttttagtagagacagggtttctccatgttggtcaggtgatcctcccgcctcggcctcccaaagtgctgggattgtaggtgtgagccaccatgccaagccaggccaaactagccttgggaaggaatttagtgtatcatttaaacaatagccctttccagaaagctaaactgttcttgtaaaacaaatgaaaggccacaggccaccagccaccaagccaagatgagaagggctggagttctaaatagtacccaccattattcttattctagaggtcataagatttttttgttttgtttttttgagacagagtcttgctctgtcacccaggctggagtgcagtggcacaatcttggcttattgcaacctctgcctcacaggttcaagcaattatcatgcctcagcctccacagtagctgggattacagggacctgccaccacgccagctaatttttgtatttttagtagagacggggttttgccatgttggccaggctggtcttgaactcctgacctcaagtgatctgcctgcctcagcttcccaaagtgctgggatcacagacgtaagccactgtgcctggcccccaattactcttgaggtaaaatcgctattgtgaacctaagatcagccttttgagatgtcttttcaggtttttgcatttctaacaaccagatggccccactggacctgccaaccagttctgtggccctcatccaggaactgactcagcagaagaaaacagctttgactctctgcaatttctggtttttttgtttgtttgttttgtttttttgagaaggaatctcgctctgtcacccaggctggagtgcagtggcgcga

SEQ ID NO: 1562002 - DNA, 4001 bp, Homo sapiens
cggcaccttggaaactcaaaattcaagatctgacgtcttttgcttttttttttttttttttgcactctggctgtggctatccttcccttgtggcaggagagggtggctctatgttaaatgatgaaagaggggcaaatagagggattttcccccttcttctccctctttcttgccaaatgaggaactaggatggcgggctttaagtttaaattaagttgtgtctcctttgtacctatgtgccaggctttctactaggcagtggggcatagtgatgggctagacagacacgcagagaaggtgcagatggtctagtggagacatggggaattgaagttatgccagtaattatgtaaatacagtttagttcaggataatatgaaaacatataagtagatggttgtcctcagtcaatggggttagggaataatactgaccatctagtgctctgtaaagggttgagcataacatagggcctagtgcttaagagatactcaataatgccaattccttctttcctctctccccaagtgtatgtgctagtgtatgcgtgtgcacatacagttaccactgagactttttctttctctttcttcaagaacacctaatctgaaaaagacccataaaaactcagaagtaacttaatgttgcctgttttatgtcttcttttaactgtcctacaggcacccgtttttagctactctgggaaactgaaaacctagggtcctttgctcctaaagccataagggcccaatacaaagggaaaagaaatatggacagttcatttcatactgaatttggaaatacagagatcatctagttttgtcccctcattaggtacaaataaagaaacaagacccagagagtgtgaaacacttgcccaaggtgacagtttccttgggtgacccttctaatatatggtagctttttgttgaagctgaaatcttcccgttagctgtaacttttcaaatatacttaacctgctaagaggggacacctcccctgttagcacactgcaagccatctcaagccacctaggaatcctcctcagttcagggacccaccaagtaagggacctgggtacagcaagggccccctctttccctctctacagagtagcttgcttagtttcaaaccctgaaaacagataccaacaaataaaatgcctaaaggcttacatgtcctgtttatattccaggcataaacagcaaatttttaaaaggaagcaataaaaagatcgcaaacccaaggttaaagatttccaacccctttccatcttggagttttccacacagctgctgcagcactgggtttatatgtggtaaattcatggagtctgaccatatctgtaactgaaatttaacacaacaaccatgttcctgagggggaagataatagggaattttcactactttcggagacttttctttctagaatgtttaaaaattattataccacctttgtaatcagaaaaaaagaaagggttttacaaacacgaatttcttagggaagatttatttcttcacctatatttggagcaaggagctgcttttaaagctctgaatactctgtcaaagttctttgagtaaaaatgaaacagcatctgaatggagcccatttgtgagactggaggctccgactagccttaggcagtttcagacaaggccataattttcagagcaagctcacatatatcattatataaaaatagacattttgtggccaacaggctggaaagcaagctctccagagagctctgcctccaagctctgcttctccctgggggtgttgggcaggggaggagagtaaagttctacttacaagaccaaagtttcctcaaaatccagtggtcctcagtcagaagcggaggcagaatttaagaaaccaggattcaaggttagcagtccagacctgtggtgcgggcaggattctcactttaccctcctctctgtctcttccccgtgtctcctaaatgaaaagcactttgaggttttagtgggtgtttcccatgtctcgggccaagtaagtccccatttgttgtaatccaatgctcagcctgatgatgtcaaccacacaactcactcactcagtttccacctctctgtccacaggagagatccatttcctttggacaatgagccagggggctgtaactgcatcccaggccaccacgcttgcctaatatccttccttcaattttcaaccctgcagctttagtgacaaaaggcttcctatccactcactgagccagggttcctgggtaaattcctttgcttcttagtgggttgtctgctttcctgtgtgtttaattcctttctttggtatataatatactagttagggtggagatcttcaccccaccccacacccatctctttcttcctgcccaattttccaagttgtttcatttctcccaggtctcctaggtacatgctgggcacagtacatgagtttgtccttcatgtaggggaggtgatgtgtgcccccggggaaggcttggaaacagcactggtgtgtcccctgggaaactgggttccagtcttggtcaggccttcaactgaatgaatgacctcaagcaagtcacatccctctctggacctcagtttccctatcaacaaaatgctggctttggtgctttccacttctgagattcaatgagtaaaaatcagtgactggggaacttataaacaaatgcattatagagcattttactacaagctacccaactacatgcttgagggaaggaagaaccctggagaagtcagaggccactgcccaagatgccaggctcagctgggcacctttaaccccctttatgaaggagatgaacagattctctgggagtaaaaccaaaagaattcactgaacaagtccttagggacatgaaaagcagcagcataaactacaagataagacaaacaagtaacaggctataagtgtccttagggaccaacatggaacagcagtggttacgagagatcatttcttgcatttggagagtgcttgatggtaaagacaaagaacatctctctactttcgtgtacaatggggagcgagtgacatgcatagtggttaggaacatcatttgggagccacagatgtggatctgagtcctgtctgacttaatttctctgaacttcagtttttttaactgtcaagtgggatactagtgcctctgttttaggattgtgagaattaaaaaacacatgtaaggaaactgaaagtatttggtacatactaagtattgaataaatgtttgctctcgttgtacataatctcatttgattctcataacatccttaggagaatcagataagtgctatgaggctacattattaatctctccttcctggataagaagacatatacagagaagttaggtgacatgcccaaggtcacacagctcaaaacgaaagggacagaattagaaatgaagcctcaactcctaactaggtcagcacacatgccacacacatgccaatgccaatgccatttctcaaagtggttgccgcagccagcctgggaaaggaaacactcaggccactaggtcagagaggctgctttccttgctttgctacccaaatcctgtgtggcctgaagcaagactgggcttcaactaactccctcaaaaggagcagatctgatctgtttcaatgccactttgatggtgatgggaaggtaggaccggagctttactgggaaagcggctctctataggtaaggaagaggctgtggtaatttgtggtttaacaagaatttttattagttctcagaaaacacagatgcttatcagaaaacatccaagaaaacaggctatattaggagggagtttgtcaatctgaaggcttttcaacaatgtgacaatgtgacgtaggactgctgtggaataaaaaccacaccagcctggccgggcgcggtggctcacacctgtaatcctagcactttgggaggccgaggtgggtggattgcctgagctcaggagtttgagaccagcttgggcaaca

SEQ ID NO: 1562003 - DNA, 4001 bp, Homo sapiens
agagcttggcctgctagaagtacccaacaaaagagagctattatctttgtctttgtattgagttgcatgtttccaccttctgctgccacactcaaattctcctcactcccccctaaaaaacagttgagagataacacccctgcacaaggaaagggttaatctttgagtgttcttaactaaagagacccacagaggattaacagctccacttcagtgactaccctaaaatagcttttatcctcctgcccaagagttacttggggatctgaagaactcaattcaacacctgccggaggaaatagacccagaacgttccttgggatagaatcttcccttaagcagaacccaaaatagcaactgggaaattataaatagacttagaggaaagaaaaaacaaaacaaaacaaaacaaaaaacagatcctgatctcagaaccagaaacaaatcctaaaacacactggttggctggaaaacagtgagaagaggggaaatgggaatgctgtcgcccccttcccccccgcccactccagagtggtgggagaattaaattacagggaggctggagagtctcaatgacttgcaccattccaagaaacatcaaacaggattaacaggggttggatttactctcaggctgctaattcttctgtcagtgtagatgggccctctttggagtctctttgattcactatttcctcagattcctgctgcctcccactcctggggaggccttgaacaaatggctgcaactcatcacaaccccattttcatggggagaaaacgtgattcgacacccccgctcccaatctggtggcctcaccttaggagagaaaggttagaaacccaagaccagactctacacacagtcccatggctgacaggtggaaaaacacacaagccaggagacaggctaagcttgcaggtgaaagcaccgattcccccacacaggtgtccccatatcctccacctaacaggcccctttctccccaccaaggtgggccacagcctggtcccaggccaacttttagatcaccccactgtggtgtgggaaaggttcaattccccgagcctgggagagatgggagtggatgagggctggagaagcaaaggaaatccagggagaagtctggagggagtctctgggatgggaaggaagagcgaggatgggaaggaatcatgagcaactttcctgggtctctaagggatccccacaagaatgaaatgggggattataagggctggaaggctggggggatggggatagtcagaagtgtatcctctgaatttcaagagggtctcaaaatgggtaacgggatggaagatgtcgaaagcctgggagtatggccactgaggagggaactacaggtggggcttattcgacttctccagacccagatatttgagggaagcctcaaagggagttatgtaagtctggaaaatgaaacagggtacagagcgggctatctggagcaggaaagggggttatgtgggtctgggtaggcgtgtcggagggagggagcaggtgcagcttatctgcgtcccccagacccgggtccctggtaaggtcagcagcgccttatctgggtctccagggagcctaggggtcgggaatgggggaccctcaggactgcgtctccaggtctcggaagggaggggaccggtggcttcctcgggtcccccagacacaggtatggggtccagggagagttttcgtcaccccagggcctatctggggccgggttggcgcagaccgggccccgggtcgggggtgtgggcgaccgcgctgaggggcccgagatgaggcgcgccgccgctccgggtacagggcgcgcggacgcagcgagacggcctcccgcccctctccccgccgtcccctggggccctcgccggcactcaccgcgctcggggccccacgctgcgggccgggccgcgctcgggctccgccaggccccctcaggccccggtagtggcggcggtcgggccattgtgcggtgcattgtgggagccgcgcgagcgggcgctcgggtcgtggagggggcggtgccgcgggatctctatggtcccgcccgcccgcgggctagagcggccggggcggtgcgcgggcggcgcgcagggaccgctgggagcggggcgggcgctcgcgtccctccttccctccccgactgtgcgccgcggctggctcgggttcccgggccgacatgggcgccgccgcgtgggcacggccgctgagcgtgtctttcctgctgctgcttctgccgctcccggggatgcctgcgggctcctgggacccggccggttacctgctctactgcccctgcatgggtaaggcctcccaagccctctgctcagatggagaaactgaggccgggagaggaaaagccactcctcagatgcgcccagagacaccttcacaggtccaggagagaacctcagagcgggacggggcatgctcttctcctctctgccttagttgcaagggcacagaggggccaacgtgtccaactttccatttgacagatgagaaaactgaggctgggagaggttacgtgacttgcttgaggtctaagccagtccagggtccagtaaatggagttagtggggcaggacttgatgtcactgacccacgctggctcctggtgatttttcattgattcagcaaatatttatggggcacctattctgtgccgggccctgttctctgtactgggaataccgcagtgaataagataaactccgtgtccttgtagagccttcattttagttggggaagacaaacaattgagaataagtaggccaggcgcggtggctcacttctgtaatcccaccactttgagagaccgaggcaggatcacttgaagccaggagctcgagatcagcctaggcaacatagtgaaaatccaatctcaaaaaaaaaaaaaaaaaaaaaaagcagagcgtggtatcgtgtgcttgtagtcccttgggagttatctgggcggctacttgggaggctgaggtgggaggatctcttgagccgaggaattcgaggctgcagtgagctctgatcgtgccaccgcactgccagcctgggtgacagagtgagaccctgtctcgaaacaagcaaacccaaaaaggggtaaacataaaacaataaatacatagtttcatagaggatgatgaatactaagggaaaataaagagagcagggtaggggagaatctaaagaccatgccaggtgcacagttgaaatgggtatggtggatcatcattgtggaagtggatgatcttaaggcccccagtggcttccagactcctgaccatgactttcagggccctgaatgatgtggcctccactggccatctccacaactcccttctctgctgatcctccagctgcagccacacttaactcctttgcgttcctcacacatgctcaggtcttccagtctgcactgctgcaggtggcggtccctatgcctggaatcctctcctccatttctgcctgaccagctgtttcccatcctttagatctcagcctaaatgtcaccagaaaggatttcactgacctctacccaagtaatctcctcattaccctatcaccaaacttttttcatctctttctggcaattatcaacatttttcatgtatttgtttacatgtttagtgtctctgcagtgaactgtgagtgccttaggggcagaggccttgtccttcttgttcattcctgtatcccagcacctagcacagagtctggcacattgtggcctctcaatcatatttgtgaaatgaatgaacaggtgccatgctgggattaagaaaaggaatcacacagggtccttgcttctgaggcattcacaggctgaggaatcagccagtacgaaggccaggaagtgagcaaagatacttgaggaaaattgaagaactgaagtagctcagagccaaggtgggaggtaaaggagggagagtgagtatggcaggggattggtgaaaggagcccagtgaatgaggcattcgagttgccc

SEQ ID NO: 1562004 - DNA, 4001 bp, Homo sapiens
aagaccgtcttgtttattgctgaactgcattttctttgtcttttttttccctgacacaaagcatttaatctgcgtctgaatttattgtttagattctattccatttacagaaacattcagtacaattagactggaacagaaagaagaaaagtgtgaagcccatggtaaaaagatgtatgtttacatccttgcctacagcatttaataattggcacgagctttcaaggaagctgtggttcatactccaagttccgtttgcgcttccagctggacaaaatatagacacagacgcactcagctaagtaattggattcactacctggaatatttaaattgttttcagacactggaaaatggcttaagaagattaaagaaaaataccctagaggataacaggctataatttactaggtggaaaatcttttcggcaagaagaacgcctcattctcctataattccttctgattaagagatgtattagtcatttggacttaaatttgcttagagcctggcaactcgggtttatttcagtaggtttttcttatcgaacctttagaatgacacccaggacataaaactgataccataatgttctccatccgaagattcgcatgttttcagctggataactaatttacgtgttttgaagacaactggggtagaggggaaggggaagtcatttgaagtcctggggtctgggccgctcgtaaagcattagagaccccggcgctgggctaggctctgccctacctggcaaacggtgcaggtaaatcgtggggcaaactctcaacctgtctatttcaggcagaagactccaatcagctcagttctcaaaagtcagccctccccacttgcctgcaggcccatgagccctccaggacccctcaagggcccccattctgttcacgccctccccagatgtgtccccgcagcccttttcagggaccctcactccggagccaggcgctgaagtttggcatcaacgaccacctgttggctggaccgttgtgtcctccgccgccttggctcccacaaaagcgccaagagggttcgcaatcactaaagtgttttgaacttcaggtccttccttcttgaaatcgggcaaaagaggtaatagggggtgcgtccgcaggcggagagggacgcgatttgttcacaccaggcgctttccagttggtcccaacttcacactccctactttccgaactctcaggacctgtcaccaggcaaagcttgcccctccctctccactggcccaaaagatgtaagaccctcagggggcgcctgccagacccagaaaggatggcaactactgaagcccgatgaaacaggagcgcgcgcaaagcttctgcccttggacatccgctttggcagatgccaacctgtgcgcccgaggctgcccctgcccgctcccagtgcgcccattgcataacgcgccccttgccccacccccacgacgcccgccctgcccggtgcccgagccagcgccccgactcgggccgccccaatacttacatcatcccacttgacgaatttggtgcccttcttgaggctgtcggacacgcacacgggcttgagttgcaaggcgtgcactccgggttgagccccggccatctgggctcatctgggctccgggcggcccgggcgagcgcggcagggactggggaccgtgcgcggggcgcggggcgcggggcgcgggctcctttctctgctccggaggcgctcgactctgctccccgccggcctccccggcctcccggcctccgcacctccctccggcgccgctcagcaggcagagcgcgcgggggcgcagcgcccggccatgccccgggcgggacgcgaggtctggagcccgcggtggatgaggagcctcggaaggcgaagagaagccgagccggtcagccgaggctgccagtcgcggcggattctgctcctccgccgccgccgcctcaaagcgcaccattcagcacatcctctatacacagagggagagagcgagtgacacacgcccggcgccccccctaaccgctcttttccctcctccctcctcctcccccccgccccccttccccgccaccctcgctcgctgggtccttccttccccccgcggctcccagcccaactttgcacgctgggtcaggcgccaggaagcggggacgcagcggcacctcctggctcccgagccccattgcagccaacgcctgcctcccgcattcgctctgagcatgccccgtgccctggttgcagaggtgctaggggtccccaggagccttacgctctttggggttttcttgggaatttgggctcgagctccggagcgtctttggatcccaactggctgggaaaaggggcccatcgggaggaaccaaagaggcaacccctggcttttggctctagctggagctctccagcgccagccacaaaccagctttttgaagagaattatcatttatcagcagagaagagcgcagttgagaggctctttgaggaaacctggccgcgcctgagagtttgcagcgcgctgatcttgaaacccgggcaaacggttacgttgtgctttcgagacagaaagcccatcctaaagaaagcaaaggttttattttccgaggaagaaagagggtgccctctcccgctcctctccttgagtgtgtaggatgtgtggcgggtgggggagagtcttattaatagaaacttgctcatttaggaacataggtccaggaatgtttgtcttcactccttccacaaacatttctcaattcaagaaagaaagggagggagggagggaagaagggaaagaggaggaccagaatggataaaattttaaagactggtaataccaaatgcttgaaaggatgtggagcaactggaactctttttttttttttattaaggagagagaggagagggagagagagagtgagtgagtgtgagagagagaaagagagagagagagagacacacgcgggaggtgggggggcggagagagaaatagcttggaactcttgttcattgctggagggaatataaaatagtaaaaccactttggagaatagtttcttataaagtaagatatttacttatcatacaacctagaaattccactcctaagtatttgtccaaaagaaatgaaaacgttcaagtctgcagggacttgtaaagtgatgtgaagaactttcttcttagtagcctgcaaatgtcaatcaacaggtgaatggataaacaaactgtggtatgcccaaatattggaatactattccacaataaaaatgagtgggcatgcaagatcagggatgaatcgcgactttaagctttgtaaaagaagccggacacgatagactgtatgctgcctgattccatgtgtaggaattgcagaataggcaagatattctatgttgacagaaagcttgcctgtggccagggataggtagagatggacagggaagggctacgagcacctgatgagcatgtcggaaatgttctatatcgtgtgtgtgtttatcaaaacttgtaagttctgtaagtacgcctaaattgagtgcagtttgttttaaataaattatatctcaaaaaggttgatttttaaaaagaagaaagaatacgaagagagaaaaatggagagaaacactacattctcttaatccttcattctccctgttctctgccctcaggactccaaggcccaatgcttatgaactcagtcaaaagattaccaaaatccaatacagaaatttgctattaaatatttcaatgcatttaaaatatacttattggtagccagctgtatactagccactattgtaatcaccatggataacctggtgaacaagacccatgactcttgctgtcatttgagggtcttgccttgtgcttggaagccaattgctacaaagaatttcatgaaaaactgactggtttcattttgatcacatgtccctaaactaaaacctgaatggtccacagtccctctagccagcagccttggcttgctaattacctcacag

SEQ ID NO: 1562005 - DNA, 4001 bp, Homo sapiens
gaaggattcaaatgaatctctggttcatcaaatcacatttcactgttgtcaagtacttttttctccaatagctttttcttacataacagtaggagatatactgaaccaatgattgcatgtaatctcttcaaaattaccttctctgaattattagtctgaattggaatcaactggatctaaaatcattttagatgctagacatccacaaagaatttggtggttacaggtattctgctagtccctggagagaaaaagataagtaaaatatgatccctgacttcaagaaactcagaacatagttggagagaaagaaacattaaataaaatgtgaaggcagtgtaaaatatgcaaggataggttagtggtggcaaaaaataagttatcgcctcttattcattcaatgggtcaaggaagatatcacagaagtggacatttctcatctgggttctgagatgagaggagttcaccaatcaaaccagttggaataaatacatttcaggaagagggagtagcataaacaaaccatgtagtagaatagtttatgggggaaactgtaagtggtttgctatagttgaacatacgctgtatgttggaaactggagagaaatgaaggtgaggtaattaagcaggagccaaattatagaaggccttgtatttcattctgtgaacttccctttacgctacaatgggaagtgatggaagcattttaaacacaggagaaatgggatctgctttatattttaaaaatattactctatgatctcaaccatgggagagagaaaaaaaagaaaaacaaatatgaaaaaagactagaagaaaactgcataagaattaacagtgcttgtctctggatggcagaatattattctgtttcatcttatagcagaatgcagttcactgttattttaatttcagacatatgaacagctattacttcaatattttaattcaaacaaggaatagtaaccatgtttaggtccatccttagcatttgcaattttgtttacttaaaaagtgactatcctgtaaatctagagatgcaccctgcagaaatatcaagtcaacaagtattaagctatgtcagctcacagaagacctagtttctgcatctgacaatctggatctctgggaagatcagcgaattagccacttcatacatttcattgattttgaaaggaaccaactctgactctaaatgaagttttaatatgttttactttcaacttcttggtaaaggaaacatcaatttcattatacactccttcccaagtcacctcaaattcaagtacaacagaagaaaaatcatgcatttacaatgcaaatgaggctttaattcacctacccagccattctgaacagattggtggcccaaagcccctgctctatagaaagtctggagtcatcaccaccttgcaagggcacagacaataaatgatagaatcagaggcatgcaaagctttggtcaaaatggtttatatcaatgaaatgagcaaagcaatgactggcacaaagttcaatcactattacatttataacacatacaaagttaaatgtagaatgactgccaaaagcactgcattaagcaaaaactgttactatataaaacccatctgtaaactgagaatattaatagcaacaaccttgtaaggttgttgtaaaaaattaaacaaataatacacataaaatgtttagaaggtcatctggcacatagtgagcgctcaaaaatttatagtatcattatcattattactctagctcataacttgcctcttttcaacaactccaacctataaatcctaaagatgttcttacttatgtcaaagaatatttactcaatactgtaattaaaatttaataattattagaatgttttgagagaaaagattaataacacttctttacctcctcgtatctgtcaaaaactgctccttcttgcaaaaaggagggaacttccttctgccagttaaattcataaggtttggccatgattatattcaagacctaaaaatgaaaaagaatagctcgttagtatataaaatgaaaaaacaattgaggatggttaatcacttcgcatttctgtgtttgcagaagatttactttaaatatgtggaatacgtttttttcttcttccctttgtctgacccccaacttgctttcttttctctaaacctggagatatcataatcaagaaataccagaggtgatcatttgggaagtttccattccctctccaaatcctacaaaataacaagatgtgtgtgtgtgtgtgtgtgtgtgtgtgtgtgtgtgtgtgtgtgtgtgtgtgtattctttttttaaaatctgaaggcaccagataaaataaggaaaccgtagaccaaaatcaatacataagagaggcctgctgtaaatagctaagggcactatgggcttgaaggtgaacatatgggcaggaggagcccacagggtataagttgcagaatcacgtaggaatagccagaattttttatagctcttggtcctctctttagccctctcttaggctccctttcccctacccctttgttcctcaccccttgggccacgtggggaacaagagaacttctgattttgagacagccagctcatagggggtccctggagaaactccaaccagcctgcccactgaggtggggcctcggggtgttcacaatgtttgtagcagagaggagtctggcccctcctccttctgtgtggaacttgggattccagtggcctagaatgaagccctctagcagggattctgggcttgcaagagtccctgttgccccattttcttcctttttacccaatgaaaccctgtcttactcgccatttaaattgcctgtgagcttgaattttcatggctgtgggacaaagaaccctgtttttagctgaactaaggaaaagtcctgcaacagttttattatagacagtgagtaggacatttaaagagaggctaggcactgttcagagtggctccctgcaactaggaagaactcagcgttccttttacccatccttgttggcaacatgcaccatggtatgtatgcaataactacaacccaaacatcttgcatgacaggggagcatacaacaatgagtcaccaaatagttaagcaatgcaaagaacatggaagaacaccaaacacatcaagtaaaacttacacccaaggaaagagggtgagcaggaaaaacaggacctgacttcagcatactgattttttcagagggaagagagagtatattctgttcctaaaatataattaaccacagatactagaaatttaaaacaagattgttgaaataaaacttaatagatgagctgaattgtaaagaaaactcagatgaagtgttgagccaagggattcttaaaaatgcaacaccacgccgggctcagtggctcacgcctgtaatcccagcattttgagaggccggggtggggggagggggtggatcacctgaggtcaggagttcaagaccagcctggccaacatggcgaaaccccatctctactaaaaaatacaaaaattagctggatgtgatggcaggcacctgtaatcccagctactcgggaggctaaggcagggagaattgcttgaacccaggagacggggattgcagtgaacaaagattgcatcactgcactccagcctgggtgaaaaagttagagatatagaaaatagaaaggaaaggtttaccaaccttatatggagacaatggagggatggaaataaagtaacagtagaagaacgtttctgaaacctgaatatttgagtcctcaaagtgaaaaaatccactgattccacgtagtataaatgggggaaaaagatatacacccccaaatatacctcatggtgacactgaagacacaaaatatgcagaaatgatgaaatctctcaaagatgcaggaagagaaaagataagctagaggtaaatgacgatgagactgatatcaggtacatcatccacaacactaaatgcagtaagacaattttgaagtt

SEQ ID NO: 1562006 - DNA, 4001 bp, Homo sapiens
acatcactcacattttcaggcatataaatataaaacttccaatagagtattttagaacaaagctttctgcgtgggtatgcatttgcaaaataaaggtagagttattccgacagatttaaatgtgcacccagtgatcaaatggagttagaaattctgttttgacagttacttgtagaacagcattttcaacagcgattaattcagagctgggtagtaataccatcaaaactaagttccaactgttgagtaataatatagttggaaggaagtgtagtccataagctaatacatggtacctttagatatgttataatacgtcacattcaaaaggttactcgtctggcagcaagtcttacgttcataaaagtgccaataaaaatgttttgccatttcaaaaagtgattttttatgaaaacaggtgctctccaaagatggcaatcatttattaaactactacagttcaaaaggaagatgatataatagatcaatacaccagctaaggatcatgcaagactgtcctatgaaaaacagcattctggattacataacacagatagtgagggattacaccacatgcccctgctgagctagacttttgatcttctgtatgattctataactgaggccactcaaatttgaagagtataaaatatgagggtctcagttcaaccacacatttctgaaaacagccgtcttgaaaacaataaaagaataaagttaaaattttaccttcccccgcaacacacacacaatttttctattctgaaaaacacagttgttcagatactttcttaacctccttggagcctccccaggtaaagtcaccagttgcttttcctggtcatgtttacattataaatctgatttctctttaaggggaaattcaatatcattttaaaatgatacatagctgcctatgtttgaataacgttatttccagacaaaaagaattattaaacagctatctccacatacctataacttaaatatatagaccactaagtattacgtatatggaaaaaaaaacacctttcctgaatattctggccaaaattaaatttcaaatacatgttttagaacaatagctagaatcactacagaagttaagaggaaaaaaagttggaagagtagggtcatctttcagatatatccatatttatggaaactatagtgggcagttgtatttctctctaggaaaatgctagttttatgattctagataaagttgcacttaaacacacttggaaattagagaattccatatttccatacttcgattcagtaccatatacgaagtctacactcagaagtattgtactatacagagtctaattggttaaagcaaaagcaactttaaaattctgaaaataaggatttccttcactaacaggcttttaggaggcccgaaccctgcccccaatgagtgctaagcctgtcagtgttgttttaagtggaaacggtcaatcatttctatgatttccccagaagaggcaagaagatccacacgcatacacatttacatgcgttgcacggtgccaactatttccaaccaaaataatcatatacacgtcgagccgagctatttctagcccagaagagggtgaacgtctggagagagtctgaggaaacccagcaggcgatgactgcaggggaagggggatggcgtctgggtcccctgcctcccgcgcgcacagggcgcctggcacccggcacctgcacggggtccccgctgggcatccgggtgcgcgcgcgcgcgcgtccgggacgcacccgcggaaagcaaacaagccctgagggccaaggcgggcgggagcatcctcgggcgggacccgaaatgccttttcctacctgtcactttgcctggagctgctgccggggatgcggcgacggccgctgcctggagacccagtgtgtacgcgcgtgtgtgtgcgcgcccgtgtgtgcgtgtgcgtgtgtgtgtctgtgtgtgagagatcttgttggcggtgcagctcacttactgctcccggcgcggcgccaccaccccctcctcgccataaagagccgccgccaagccccctcccggcgcaccccagtcccgccctcccgcctgcctccgcaccccctccctggcctccccgcctccccgtctccgcgccgcgcggtccttacctcagttgagggcgggggtctccgccgtggctccccagcgagcccacggggcagcgccgacccgcccgcccaccgccgggccctgcgcgtcccccgctccgggccccgccgcccctcagcggccagccgcttcctcctcccctgcccccgagcctccctcctcgttctcgcctcccggctccagagcccgagctgtcgcctcgcagccccaacctgcccaggctacggagcatgcccagtgcggcgcgccgggctgggctgggggtgggcaggggccgggccggccgcccagttgccgcgagcccgcagggcgaggagtgggcgccgactgggtcgggggcgcagcctcgcgagccgggggccgagcagccgaggcaggtggtgggcagcgccaagaggaggtgggtggggcatccggggaagccggcccgcggcgcgctcctctggggtctccctggcggctccccgcggcatgtgccccatgcccaagggtcgggggcgcacgggatggcgctgggcgcagaacccagggagcgggggcagaaaagcggcaccctcctcggatgggagacccgcagcccgccgtgggccgtgtggaggggctcaggactggccagaacggggcccccaaagccgttggctgggtgggggacgtgcttatttgtttatattcggtttcataaacccatacagcgcctacaatgcgtcctgcagtgttctaaacgctttttattcatttaatccctaaaacaatcttccaaagagtactactgcctctttttatttcgcgggtcttacacagagccacagagattaagtggttccaaaaagtcttcccacaagtgcaacctcagacatgcaaatcccccagactttggtccctgggatgctggggtgctgctccagccagttcctggcttttcccggccctacaacggcccccaggtgcctccgagtcacactcacacccaggccctaatggtgttcggtctggcatcacccttgtgtggaccctcacaacgtgctgctcccgaactccggagggctccctcctccccactccgcctcctccttctcccggccggcggccaccaaaacccggagacgtggcacctgcgcattggggactggggccatgctcgcagctgcactaggcatgctcagccgcctgagccggtccggctggccaggaggaaagaaagggccagacggggcgtgaagtgtaagaaatggagggggaatgtgtgtgcaaacaatagtccaggctctgatgggcaggggcagttgtagatgcaaaagactcattcccctggcacatcctggccatttccaggcagggctaagagatgggggtaataatcatcaaaagtttaaccaactgggcatccttaagcaagagggggctgaggccccactgaccactccccagctcaactactaagctgtaattttagctgagcctggaaaaaaagctcctcagcagctgaagctgtctgcctgtgaagaagccaagaaaaatatcccagaccaagtttccccacaagattggaaaggaaagatagatcccagggaaaggctggtggctcttcactgttagggatattaaagatgtggtgattttggctgggcgcggtggctcacgcctgtaatcccagcactttgggaggccaaggcgggtggatcatctgaggtcaggcgttcgagaccagcttggccaacatggtgaaacctcatctctactaaaaatacaaaaaaaaaaaaaaattagccggtcgtggtggtgggcacttgtaatcccagctattcaggaggctgaggcaggagaatctctcgaacacgggaggcggagg

SEQ ID NO: 1562007 - DNA, 4001 bp, Homo sapiens
ttcatgccattctcctgcctcagcttcctgagtagctgggactacaggcgcccaccaccatgcctggctaatttttcgtatttttagtagagacggggtttcactgtgttagccaggatggtgtcaatctcctgaccttgtgatccacccgcctcggcctcccaaagtgctgggattgcaggcgtgagccaccgcgcccagccaaggctttgtaaaattaaatgcatggcatttacactccttaatgtagaggaatttcttctttgaacttaaaatatttaacaaaacttctgagctctgctggggttctttttttggactcttgaatcaagtgtttatattcaataagcacataactcgtcataggaaccatttataaatacagctgatgaaaaatgacctatttaaggataatacaactcttaaacagagaaagtggatagtccagattaatgtgatgaaggagtgaaaagcagatgatgtgtccacactgatttaaagtcccgagagaattattcagtccctcctactccccaactcctctttgcctactaagacatggtttatgagtcatccttggggagtagtaaaagatagcgcacttgactaaaaatagataggaacattcaataataaatctactttctggatatctcttgtcatcattaaacactgatcacttagagaagtgtcaggttgtgcgattcttccttcccctcatggaaaggccggaagaaaatcagccacgggcactgccagaagataatgaagtatctcacatgatatgcaaaacgctggaggaaaacactcagccattaaatgccaacagcccagaggaacagatcctccaggaggacctattaggagaaacaataaagttgctggttcacgccattactataaaatgacctcttgttcctgaaggtaagaaatgatacatagtccaaatgctttacttgtaacagcaatttaaaaatagcaatttgagccaggttcggtggttcatacctgtaattccagcactttgggaggccgaggtgggcagatcacgaagtcaggagtttgagaccagcctgactaacatggtgaaactccgtctctgctaaaaatgcaaaaattagccaggcgtggtggcatgcacctgtaatgctactcaggaagtggaggcaggagaatcgcttgaacccaggaggcagaggttgcagtgagccgagattgcgccactgcactccagcctgggtgacagagcgagaattccgtctcaaaaataaataaataaacaaacagcaatttgatcaagggattataaaagaacatgtctcatattcactaggattctggctctggaatacaagtattggcaagttacagtttataaataaaacaaatcagccatataaagatatttccagttcccctttttgcgtttctttaaaagtttgtaaaatgaaccattaggggagcactggaagaatttatttacatcatcccctggtagttcccccaaaatggaggatttttgctgataatgtacacagttgtgatttttcacatcagtgggaatcttcttaagcaaaatctgcacaggactgaaaacaagtcacagaaacatttctccccagaaagaattgtagacaatgatcacttcaaaaacatgtgatgcttactaaatgcgggcaacactattgcagagagcaagtagaaaatctagcaaagggtaaagtgcccaaggttagtagtgaaattaataaaattgaacctagaaagtgctgggagatcctgcttaatgctctgccgcatcaaggaagatgtctgtgaatcagttttgagaggcatttcagaagcagcatcagccagaatgaagggattcatcttacagactgaaagttctagaaacctacaaccaaagactctccacacaggcggtaaagtactcactgggcagctctggactgactgcaggtgatgtccacttcgtcaaactcacagcagcactgtcctctgaaacagacacagacaagacaaatcgatgtaaaggacttttagagttttcatggagaaaaacagtcctttgcacttcaaaatcagaatctaatgtaaatttaaaaacgtcagaaaaacaaaaaaaaattagtggcataagttgcaaacaaatgacacagacacacagtcatcatatcagaattattactgctatactcagccaacagagtttatacactctctctacaatgctgctaatatcctactcaccctcttaatctattaaaataattaagcagcaatagaacaacaaggctatctaaaaccttctcaaagtaaatataattatcttttcctgattagcagtataatgtccttagatgaactgtaattggaaaaaactctttttataacagaattacatctatttgcaaagagagtctttttttatggctgtttccgtattgtctttgttattaagttgtttatgttgattctggatttgacattggatttctgatttggctgaaatctagatttcaggatcttttcaaggtggagtgggaggaaaagttccaggtggtgtcagaagtacacaaaagtggccgggtgcagtggctcacacctataatcccaacactttgggaggccaaggcaagcagatcacttgcctcaggagtggagttcaaggccagcctggccaacatggtgaagccccatatctacaaaaaaatacaaaaattagccaagtgtggtggtgcgtgcctgtaatcctagctactcaggaggctgaggcaagagaatcacttgaatccaggaggcagaggttgcagtgagcaaagatcatgccactgcactccagcctgggcaacggagtaaaactccatctcaggccgggcgcagtggctcacgcctgtaatcccagcactttgggaggccgaggcgggcggatcacgaggtcaggagatcaagaccatcctggctaacatggtgaaaccccgtctctactaaaaatacaaaaaattagccgggcatggtggcaggcgcctgtagtcccagctactcgggaggctgaggcaggaaaatggcgtgaacctgggaggcgaagcttgcagcaagccgagatggcaccactgcactccagcctgggtgacagagagagactccatctcacaaaaacaaacaaacaaacaaacaaaaactccatctcaaaaaaaaaaagaagtacacaaaagtaaggggaagcccatttccatatggtaagaaggcagaggcaactgatgacacctgggaaaactgtgtctataaagtttgaattgaaatttgtgaaggtcacgatctatgtatagagatgactacagcacagtcctttaataaggtctcaggtaggttggtacattcatataatacaagactacaccatgaaaaacaagagaggaaatctgtacctatatgaaaagacatagaaacaaattctcaggtcattttattaatttaaaaagtctgaagtagtgtagtaatatggatactatggctccattgtgttaagacaaacctcactaatctatatgtaaatacacagacatatatatcgttatacacaaataacgcatctggagggaaaacaagaaacactgagtgtggctacctctagctccctctaggggaccagtactaaaaggagatttttaaagggtaaggtctttgattttaacctaacatttaaccattatgtaatattttaccatgaagcaaataatttttataattaaaatggaaaaaaagccaattcactccaaagtctctacagaaagcaacatcccacttcaaatatacagaattagggaatacacagcatcatgtaccctgactttactaatttagtgactatttactatgatgcaggctggctctaagcatggattgaatcatcatttataatccacataaaaactcaaaaatgtatgtactctcattttatagaaaagggaatgaagaagttgaatattcaagaatcc

SEQ ID NO: 1562008 - DNA, 4001 bp, Homo sapiens
atatatgggcttcaaatccagacttgccatcaaccactgtgctacatttattgcctgctaatatgcgtggtttaaaatgcagtctgttacccaggagatctctgagaacttccagccagtgccaccaactcaacacagcatagggagtaaggaaggggaccatgcctggagcctgatgcctgagtgatgttcccagggttatctcagctctttgcagtgtcgattcttcctttactttggaatccacaggctctcaagtcactaaaatgttctcccaatggctgacagggtcagtgggggcactgaggaagggggctgccatttctaagttgagcagctgcattagatctgtgtcagatctggagtttgtagctgaggatggttggctgcctcaccacaagaccttccttcctcccaatctcctcaactatctacacacatgcacaccatacccaagaaggtttgtgggacccccccttggggtgtcacttcctgatctccctccttcacacagacctggttctgagcctgggtctctctaaccctagtctccgggggtccctgcaagaagcaacccagtctagagttgcagacacaccatctcttcacactgagaggcgggggaatggagggcagagcagagtgcccatccgaccacagcacaggcacgcgctaagtggaacaactctcaaagatctggggtttttcaaaatcccccaactccctcctcccactagagaccagcgcaaaagcagccaagctcaggcctgggaaggcgaaaaggcaggaaactaagagaagccgctcccgctccctgaagccaccggacagaggacaaagggctagactcacaaactagctgcactcctgagaagaatacctgactccaaggcgctggggcaggcctttatggggcccatctcctgggaacgtgcttcccagggcaaggggagtccctgccctggcattgagtgtctgcccacccacataggcctccaaaacccagctttgggacaaaagtagcagaaaaaaaaaaaaaaaaattccagccactggcttctctcaggcttctccaaaccaaacaagaccaccttcctccctctcccccagagggagatgagtaggcccagctctgctccaagaccagccctacccaacatctgcctaagttctacttagggaacccaaagattcctttgcaaataagagcccagcctgggggcccggagagtttcacagactgctctttctggataaagagtgggcggggaccgtctggtcaggccccaggttcccgtgcagggtgggggccactgccttagctcccctcgccgacgccgccaccactcccagggtctggggggcccgatgcctgcaccgcaggtctccagcccgcgaggatttttaggcctcagggcaaagcgcctggaacactccccccagctgggggagggggggtgtcctgtcaggtgaccgaggacccggatgccccccgcccccagtgaccacccgagacgaagcgggggcggggcccggagggagtctgggagggcccgaaagtttgcccaagtcgctggggcggccggccggggtgcaagcagtcgggccgggctcccacgacccccgcgcggggcgggcccaggcaggaagtgggcgcacttactggccccctcgatcttgtcggcgccccggctccacgtgatctggcgcgtctccagcttgacctggaaggtcttccgctcgggtcgctgcgacttcttggagtagaacaaagtcatgacggtgcccacctcgaggctgcggcagaggtgcagcacctcggcgtccgagggcgcgccgggcccgcagccgttggcgcaaggggacgcggcgcccgccatggctccgacgctgggggcggcggcggcacaggccaggaccgcccgggagcaagcgcaacggcggcggctgaggttggggctgaggctgaggcggcagacgagcgggacccggcggcggctcctgcaggcggacacggggcggggcctcagcgcggcggggcggggctgccctgaggccccaccccgcttcggcgccgggaacaaaggcgcccgcgcacccgtggggaggacccccgcccgtcggcccgccgcgcctgcgccccgcgacccccagacaggccgcaggcggggacggaggcgcgatggcggcgggagcgcgcgccgttcccggtcgacccacccagccctcagtcccgcagagctttctcacgcggccccggacacagcccggcggccacgagcggccctgtcacgcacggcagccccgcccacaggccgcaggcccggcggccggcgcgtcagtcaggcgtactcgcacgggcggccgctaccccgcggtcccgcacagacgcagcccccgcgtcccgaacaccgcccatgcagcgaccgggacgggacgtgaggggatggcgcgtcctccgggaatgcccggccaaactcagttacctgggcgggcttcccggacaagggagccaggacgggccgcctcacaccggcggcggcgggtcctccgcgcgccctctcccgggaggggcgggggcggggctgcctgcggattggtcgcgggcactgatggacagccgacatgtcccgcccccccggcagcgcggggctggtccgcaggcagttctggcgacggccagacccacgtctgtctgttccgcccctgctgccagggtggctttcagtggtcctctctttcggagagttccccccaagcgtgagcaccccttacaggggcgttaggtccgcggccgcgctgtccagtggtctgacctgcagctcccagggcctttgtgtctgtccctcgcatgggcctctgcacgctccgtccccacgcgacaggactcgagtccgattcggggctccgactcagaccctaccccgcagcgccctcctgcaaatgctctcctgaactttggttttccccgccttgctttcttcctcctcctgtagccgctgcctctcgatctcagaagcttctcttcctctgcactcagtgctaggccagatcccaaggcgacctgacctttcccctggctttgcccaacaacacaggcaccggtgactccaaacctgcatctcccctacgttccaggccccagcatcccactgcatgttccacatcccccccccttagacagctcgccttccctccccaaacgattccttccacagtcttcactttctcagaacgcggcgctaaacttctctaagttggaaggtcaaaaaccttgcagctaactttgattcctccctttgcctcacctccaatccatcaagaccttgtcactcagcccacaagctgaaggccccatctcctgtcacccagactactcaccttgtttggttttgcctggatctatcagtttggttttgcctggatttatcatgctttaaatctttaaaatgaaattaaatcatgatcccctacatccaggctaaaaccctccgtgaattcccattgcacctaaaatccacactccctgcttggcctagcaggttctatatgacctgcccatctcaccagtttcatctctcacaagtgatccttcactctccattctccagccacaaggcctttttctggttatggaatataattcatactctttgtctttctgaagccattcttgaaactcacccctgcaatctatctacccttgtcagcaccgccaaaattgaggacacccacggtcgcggtggagcctgtctgacatgttgagccaggcagtgggtcggctgccaggcacagcaggacaacttactgcatttcagaggtgagaagcccaacagagcttccagctgatgccagagaaagagccaggcttcctgggaattgtgagatagtaggactagactagagtttgtaagagcgtgtgctcaggcaacccactcagctggatagtgacctggggctgctgcttctgactttgtcttgctgtagtggaaacttgtgtg

SEQ ID NO: 1562009 - DNA, 4001 bp, Homo sapiens
cagcactttaggaggccgaggagggcggatcacttgaggtcaggagttcgagaccagtctggccaacatagtgaaacccgtctctaccaaaaatacaaaacttagcagaccgtggtggcacgcgcctgtagtcctagctactcgggaggctgaggcaggaaaatcgcttgaactcgggatgcggaggttgcagtgagccaagatcgcgccactgcactctagcctgggcaacagaacaagactccctctcagaaaaaaaaaaaaaaaaagtcttgtttgcttgcaccccctcccctcccacaccctggggttgctacacccggtcttttaatagagtccgttcactttgcctccatcacctaagctccgtctcacatctcaattccttattccccctccctcatcctaaaccatacttagagccttcagtttctccacccctccgattaactccaccccgtgcccgagactccactctcatctattgggaagttccttgactccacctttctgttgttcttcgaccacgcctcacatccactggtcctgcttccttcttggccccctctacattttcaaggccacgcccatctgcctggtcccgcctatgatgactggcttggcctttatcttttcggccccatccggtttcttaagtcttgcctcatcgatttggccacgccccatcccactcagcctccagtctcccgagaccctgagatttctcgggccccgcctccaccgccgaggccccgccccggatcgcgaggccccgccccccacttactcagagatgttgtagtagaagtggccttctttgccccgcaggtccggaatggtgatagtctccagctcttgctccagaaagcgcagcccctcctgcttcactgaagcagcagagaaacccttacttagctcccgtgcccactgttggggcgaccccaaccccgtccgctcccgtccgtccctgtctgcccctgcgccttacccagctccagcgccttggaggtgacgcggatcttgcagcctgggaactctgcatgtgcgcctgccagcagcgctaggaagagggccccgaagagggccatggcgagcgggcctgggggtggggtggggtcgcaggagttatctgagccgcttaaacccattccttggacgtccaaccataagtgggaactagcctggatcgttaccctccagataactcttcggggaacttggaaccaataatcttgcctccatatggcagatgtggaaactgaggctcagagaggcgatgcgacttgcgttctggctcccagaggatttgggacacgggggaggggacgttcccagttccctcgtgctaccgccgcgtgatgagtttggacctccaggggaccagcccccacacccccaacaacctcccctttcctttagcggtgggcccatgcaggcttgcacgttgccacggcaacgactgcacgcgcattcttggagggtggcttgcggtctcctaggcctcgcgcccggggaggagaggaggtggccgaccagaccgtgggctcccgggtctcccggctccctcaggtcctaaatctctcccattagagattctgcctggagcccccatgttagcgttctccttcatcggctctcctccccacgccggcttcagtgcaccacgcggctcggcgagggactgggaacgggatagggacgcgccccaactcactcagcggtggagctggggggcggcgcggtcacgtgggatggcgggcagctcaggggatccgggcgacggggtctggcgggcagggttgttccagccgcctttataaagccggcctccccgacccctcctcctctctgcagctctcccctcctcccttgggggctgggaggggacggggcgggacgctggcagccgggagagtggaaaaggctgcacagagccccgtgacaagcccggccgctgtctggacaagtgggagacccaagcccagggagagggaaggaaatgcaggagccggcccactcagccccaacaatcccactttgctgggaccttggttcaaattacaattatccatgtcttcctgcatgatcttgggcaagtcacttcacttgggtcactgaccctcagtttcttccttcagcgaaatgtgcacgatgataggaactacctcttgggcctttattacaaccaggtccaggcacaaagtcaaggaatattttttctttccctgccacccacaatcatctcgggacctccttgcctggctttgctatgggcccccctacctgtctctgtgtcaccacctggggaccttaaggtcccagagacctttcccacttgggaaagcaagactagacaagtgctgtcagcccaggaacataccacaccggctgaaatcagaaggaggtctgccatttatcgtggctggtggattgttttttctattttttttatttttattttttgagacggagtctcgctctgtcccccaggctggagtgcagtggcgcgatctcggctccctgcaagccccgcctcccgggttcacgccattctcctgcctcagcctccccagcagctggggctacaggcgcacgctgccacgcccggctaattttttttgtatttttagtagagacggggtttcaccgtgttagccaggatggtctcgatctcctgaccttgtgatccgcccgcctcggcctcccaaagtgctgggattaaaggcatgagccaccgcgcccggtccactggtggattttttaatgaacccttggagcaaggtgctctgaacagcatccccgcccccacccccacccccacctccatctactgcttacagggttcccggaccctaggacagggcacagagtgggtgcttgccacctttttgttgccaaatggacgaaagaaaggggaagcaataatcatgtctgctgagcatgtatttagcaccaaacactcatctaggaaggatgactaactcatcctgatttgcctaggactttccccattgtgtcttttttttctgatataatccacagattcacaaaaatagttccatttccttttttatttaattaattaattaatttttttgagacacagtcgtgctctgtcaccaggctgcagtgcggtggtgtgatcttggctcactgcaacctctgcctcctgggttcaagtgattctcctgcctcagcctcccaagtagctgggactacagccatgtgccaccacacctggctaatttttgtatttttagtggagacagggttttgccattttggccaggctggtcttgaactcctgccctcaagtgatccgcctgccttagcctcccaaagtgctgggattacaggtgtgacccaccatgcccagcctatttatttatttttatttatttatttaagatggagtttctctcttgttgcccaggctggagtgcaatggcgcaatctcggctcactgcaacctccgcctaccaggttcaagcaattctcctacctcagcctcccaagtagctgggattacaggcacccaccactacgctcagctaattttttgtatttttagtagagatatggtttcgctatgttggccaggctggtttcgaacgcctgacctcaggcaatccacctgccttggcctcccaaagtgctgggattacaggcgtgagccaccgcgcccggccgcctatttatatttttagagacagggtcttgctctgttgcccaggctggagtgcagtggtacaatcacggctcactgaagcctccacctcttgggctcaagcgatcttcccacctcagcctcctgagtagctaggactacaggcaggtggtaccatgtcatgtccagctaagttttgtattttttgtagagacaggtctcaccatgttgcccaggctgatcttgaactcctggacccaagtgatcctcttgccttgggctcccaaagtgctgggattacaggcgtgagccacacatccagccatccccattt

SEQ ID NO: 1562010 - DNA, 4001 bp, Homo sapiens
ttgctctgtcaccaggctggagtgcagtggcacgatctcagctcactgcaacctccgcctcccgggttcaagcgattctcctgcctcagcctcccacgtagctgggactacaggcacgtgccaccacgcccagctaatttttgtatttttagtagagatggggtttcaccatgttggccaggatgatctcgatctgttaaccttgtgatccgcccgcccagacctcccaaattgctgggatttcaggcatgagccaccacagccagccttgttctaaatattttttacatataccaacacaaataatcctgacaacgatcttataaaataggatcttataaaatgaggatattgaggcaccaagcttcagtgacttggccacgttcacacagccaggaagtgacagagctgagctttggacccagttggtctgattcccaggcctatgcactttgcattgcgctaggcagatgagctgtggggctcgaaaagggtgagctggggttggggctggggcttacttgaaggttcccccgaaggccgcgtgcattctggagacagaggcctggcaggagacattggacactttcatccgtccagcgggatcccgggagagctccagaccagtgcggatggacacaccctcagctgaggcgttgatgtagcccccatcatagctgccaggggggttaatattcactccaggtaggagctcaattgagtcttcagtgcccccatgcatcaccatacctcttaataaggtttcacctctttccacacatcctaccaaaccttcctatcaactcgtatgaaatgcatatgcctgtttctgttacacagatgaagaaacggaaactcaggaaggctaagggggctgcccacagccccacagcacctccagccctcctgacccactctccactcccctgagggtgctgggtccttacaagaaccagtagagcagctgtctccggaagcgcagccccaaggaggcattggtgatttgaagcatcagctcctgctgtggctggaaatcgagctcggaagatgtcagttgcagctctgtgaccttcaccctacaggaggcctcagggtcagatccagggccaagaagagggaacttcccccaacgacaggaaatttgtctgctcccctttcaagtccaggcctggggaagcgggagtgggtggaatgaattcttccattgtccctcaagtgcccaacttagacttgggtggctcaaagttgaacttgggtggctgagagaggaggtcttcctgatccaggtgttaaaaatgagcttcaccccatcgcttaaaagtcttgtttgtttgtttgccaggtgcggtggtggctcatgcctgtaatcccagcactttaggaggccgaggagggcggatcacttgaggtcaggagttcgagaccagtctggccaacatagtgaaacccgtctctaccaaaaatacaaaacttagcagaccgtggtggcacgcgcctgtagtcctagctactcgggaggctgaggcaggaaaatcgcttgaactcgggatgcggaggttgcagtgagccaagatcgcgccactgcactctagcctgggcaacagaacaagactccctctcagaaaaaaaaaaaaaaaaagtcttgtttgcttgcaccccctcccctcccacaccctggggttgctacacccggtcttttaatagagtccgttcactttgcctccatcacctaagctccgtctcacatctcaattccttattccccctccctcatcctaaaccatacttagagccttcagtttctccacccctccgattaactccaccccgtgcccgagactccactctcatctattgggaagttccttgactccacctttctgttgttcttcgaccacgcctcacatccactggtcctgcttccttcttggccccctctacattttcaaggccacgcccatctgcctggtcccgcctatgatgactggcttggcctttatcttttcggccccatccggtttcttaagtcttgcctcatcgatttggccacgccccatcccactcagcctccagtctcccgagaccctgagatttctcgggccccgcctccaccgccgaggccccgccccggatcgcgaggccccgccccccacttactcagagatgttgtagtagaagtggccttctttgccccgcaggtccggaatggtgatagtctccagctcttgctccagaaagcgcagcccctcctgcttcactgaagcagcagagaaacccttacttagctcccgtgcccactgttggggcgaccccaaccccgtccgctcccgtccgtccctgtctgcccctgcgccttacccagctccagcgccttggaggtgacgcggatcttgcagcctgggaactctgcatgtgcgcctgccagcagcgctaggaagagggccccgaagagggccatggcgagcgggcctgggggtggggtggggtcgcaggagttatctgagccgcttaaacccattccttggacgtccaaccataagtgggaactagcctggatcgttaccctccagataactcttcggggaacttggaaccaataatcttgcctccatatggcagatgtggaaactgaggctcagagaggcgatgcgacttgcgttctggctcccagaggatttgggacacgggggaggggacgttcccagttccctcgtgctaccgccgcgtgatgagtttggacctccaggggaccagcccccacacccccaacaacctcccctttcctttagcggtgggcccatgcaggcttgcacgttgccacggcaacgactgcacgcgcattcttggagggtggcttgcggtctcctaggcctcgcgcccggggaggagaggaggtggccgaccagaccgtgggctcccgggtctcccggctccctcaggtcctaaatctctcccattagagattctgcctggagcccccatgttagcgttctccttcatcggctctcctccccacgccggcttcagtgcaccacgcggctcggcgagggactgggaacgggatagggacgcgccccaactcactcagcggtggagctggggggcggcgcggtcacgtgggatggcgggcagctcaggggatccgggcgacggggtctggcgggcagggttgttccagccgcctttataaagccggcctccccgacccctcctcctctctgcagctctcccctcctcccttgggggctgggaggggacggggcgggacgctggcagccgggagagtggaaaaggctgcacagagccccgtgacaagcccggccgctgtctggacaagtgggagacccaagcccagggagagggaaggaaatgcaggagccggcccactcagccccaacaatcccactttgctgggaccttggttcaaattacaattatccatgtcttcctgcatgatcttgggcaagtcacttcacttgggtcactgaccctcagtttcttccttcagcgaaatgtgcacgatgataggaactacctcttgggcctttattacaaccaggtccaggcacaaagtcaaggaatattttttctttccctgccacccacaatcatctcgggacctccttgcctggctttgctatgggcccccctacctgtctctgtgtcaccacctggggaccttaaggtcccagagacctttcccacttgggaaagcaagactagacaagtgctgtcagcccaggaacataccacaccggctgaaatcagaaggaggtctgccatttatcgtggctggtggattgttttttctattttttttatttttattttttgagacggagtctcgctctgtcccccaggctggagtgcagtggcgcgatctcggctccctgcaagccccgcctcccgggttcacgccattctcctgcctcagcctccccagcagctggggctacaggcgcacgctgccacgcccggctaattttttttgtatttttagt

SEQ ID NO: 1562011 - DNA, 4001 bp, Homo sapiens
tgccaggcagagcctcacattcattctccctaaggaatcacggcaaatgctcacattcccatttgacagatgaggcgaccgaggctaaaagaggtacaggccttggataggcaaacactaagcctagagccagggaatcaaactggagattctgcctctctcctgggtcagtacttggagcttcttgtcactaacggccatgaggacaaggtggcttcggggatgttcccgcctgtcctcccctttacgaggcacccaggcatggtgagcattccctgagcgggtgggggtgggaattctgcatctttccccaggggtttctttggctcagacctggctgagcgctgcctctgggccttcgatccccgctggcagcccgccccagacttattggcacaggctgtggggttttatttagacggtgtcagctaaacagctctgggcgcatgggcccgagtgggcgtcagcttgattgggtttcaaaacgcgtttctgtttgggagctgcctctatcattagaaattggtgcacgttttgttggtagggctggtcactcgctgggcaggcggagggagaactggccgcctcctttgaagccagtttcccctcacccactacccaccccctctcttctatctcggcccaaatcccactttctggggccctcccccaactcctgacccttcggaacaaagggagcatgagtgtctagaccgccagtctgaacgtgagaagggggtattgtgtgaccaggacagaggcctggccttcccaggcagaaaggtcggctggggagtggggcgaggtgaggggtgactctggcctggtccacctctgtggcaacagacaccaccccgttcctcctggggagtccagcatcggacccagcaccgggaatcggacctaggtcagtgccaagatgggacagtctccaaatgaaactcggggaatcctctttgcccgtcgctaaaggaactagttcaaggagagtcctcacaactgtgcccacataaatagctgtttctcatgatgatcagcttagaagcttcaagtacattcccagctccggggacaaggggacccaggggccgccctgaatctgcctcccagggccatggggagatgctcctgcctcctactcaccctctctgggtctcagggacctgtcgtaaaaagagaggctgtggcctttcagacgtgtttgaccacagaagcctttgattgtgaatcaaagtctgattcagcagctctatatatcggagggacacagacacggcgctgctggggctgacgtgggtcccaggggccagtggctgcatcgcccggcagcagccgaggtccatggggcacttactgtgtgcgaggcatttgctgagcttctcccaacacccgatgcactcctcacctcagctccacgagctaggaactgtcggtgtcaccccattttatggataaggaggacgaggctcttgggtgaaggcagagccagccagatctaaccttcccacctgcctggctttcagcctgggggcctccatgtggaaccctccctgcctctgccagctgggctgacagggaggccagagaggttcccaagcaagcctctgacctcacctcttagcgaagagacgctgggcagcggcttggggcacagaccacccgggggggccgggcccagtgcctgcacccacccccaccactgccacccgccctgcatcagcgctacacatgcaaatgctcctgagaatatccccagagaagaaacttacctccatgtgctggaattgcaggcattttgacttttcgcctgtcatttatcaaattctttgaatttttcgttaaataaggagtgtatatcactttttacaatcagaagagccatgctatttttattgtgaagcaaaaaagaaggattaattaactgtagcaggaggcggggtctccattgctatggcgggtgtagagggtcatgtgcaaacaggtggcaggggcctggagagcaggcgcgcaccccagcctgcgcttctcctgcttgggctctgtcctgggaaacactcggtgcagatgaagatctggcttcttctgagttttgtaagtgacacgcccagccgacccccacctgccggaagtctggggtggagcctggccgtctactcctcacccaccagttggtgaggatccaggagccgggggttctggaacttgcacctcctgggagaaaatgtgtgagcatgcaggttcctgcactcgccccatttcagctcacatccgaggaaagaactactgcgcctgataaacgctgatgcctctacaccccgaggcctggggatcccgcttacaaggctaccagagaagcagggttagagaaagctggtcctggtgcctcctcctcgtccctaccggcccctcggtcttttcctacgggacttctgaaaagctgttctacagtcattggttttctggccgatttccagtctgccacactaggagctggcctgtctttttcacggttgtgtgtgtccaaaacactaggcccaccacacagtaggtgctcaatgaatgtgtcagatgagttcatgaatggcgtgaaatattgagtaaaattacccattagcgaggttcctaattgtgcaaaatggcaaatgccacccagccttctggtgtcccctcccattaacatggcatgaggggagcctccttctccccaactcttccgaaggtccctccagcagaggggctgcgctaggggttcttgtgcaggctctgaaagaggaggaacagaccgaggaccagtcaaggccccagactgactgagagttgaatcacagtctctgggctggtctaggagggcgaaggtgtccaggctatagcagccccagggacaggcaccactggcaccgctcctctcccctgagctgatgccagctcctactccccaaaactcctttcctgcttcctcagggatggggtagggagaacgttttcccccgaagaaaatcattactctgctgttgagggttacacaggttgcagcagaggtgggaataggacaggggaggcaggaccctcaccctcactctcacccctctcagaggaagaagctgcgagctaaggctgggtgcaccatctcccggtccagactgtccatttcatgctcacagaggagctcagacccacctcactggtgcccgcagccctcgttccaaagccacccccgctgtgtggtcttgaacaactacctccatctgcagagaggggaaacagaaccctgggtgtgcctgggacgggctgcttcctgaaacctccccctgggcagaactcctactcacactgcaggcctcattctcacatctccttccccgacgagcctcccaacttttcacatcccatcaccctcttctcccttttcacgggtaggtcccggggcttacggagccaccactcctccaatactggctacgtcttacaaacagaacaggctttgtttctcgagcatttacaaagcacccaggactgagctgagcccttgccacaaactgtctcatttaattcttacgatgccccctgtgtagtgggtgcctattacaatccccattttacagatgaagaaacagaggctcatagaggagacgcaaccccgaggacactcttacgtggtgaccactcactccctatggatggggtgtggcctcccctggacttgggcagctgcaagcaccaaggcacagcccaccaggtgtgggaagagtcatgggggcaggtgagcaatggtctgtcagggctggtggcaggaactcacagggcggcccagacaggggagcgaagctcccacctcatgaccaggatgcccagtactcctgagcccggtccccctgaagcccctccctgccaggccactgctccttccaagggcccaggtctgtacctggcctgcagctggcgggtcacgagcacggccacttttggccccaggaggattcaattcctcgagggctgaggct

SEQ ID NO: 1562012 - DNA, 4001 bp, Homo sapiens
gctagtctggcacaggccagctaaggtggggtagggggagagctttccattccaggctgggagggagtgtggagaggtggatggatggaaggacccaccaccaaagcccggccagcctggttatttttaccacttgaagctcactgtataggctcaggggccacaaactggcagccgcctgcggacacttgcttatgagccgcccagacactgccttcattccacagcggctgcttctcagctccgggccccagctaggggcagcctggcccccagcagggaaggactgtgtgccccttcacctggcgtgcttcttcagggtggggatggggaaactaaagctcagggaagcaaaaggtccccgaaaaggtgggctgggggacaaggtgtaggctagaagctagaagccagaacccgggaggtagtggttcaattctccactcaaccaaatgtccacctaggtgggctgtgtgtgcaggaggtagagacttacttatctgaacttttgggtgcccaggcggctgcgttagcgacaaggttcaaaaccccactccccaccgttggtccactgatcccttatttagggccaggcagtcccaaacacaaacagccccaaactttgactcctttgtaaccatggtctcagccagactgaaccaagctgtccagacagaggctatttataggtgcgtcggggacacagacactggcacaatgacacacacacattcaagatccacgctgggccagacgggccagagctgagccctggattcagacacctggacacacacggtccccagatccggcccaaccagaccagacccccagaaagatggacacgctcaagaaaggcaccccggcccggacacgggaaagacacacagagagaggcaggaagactcggtgacacgcactcttgggcaagaccgcgactcagacccccagacaccccgagagacgccgaagacccagacagagccacgcagccacgcacactccacagacgcacggacatccactcagagcccgagacacagcgccgcgaacactccagacacacgcccggagccccagacacctcgcagaccagacagtgtctcacacgcccctccacccccgcccaaagttgataaagagccggcctaaatgctccatcgcgactgccctcagggaaataaaatggaaacttcacggatccgcccgccccaaccctcccgcgccgtgcgccgccgctgagccccgggtccgagtccgggcgggcggggcgcggacagcgggggccgtgccaggctcgcagcgccgcgggacaaagccgggccggccgccagctgccgcgagccgggagggcgcgcccggggcgcggcgggcgctgcccgggcgcagggcgttcggtccgagggggcgcgcagggcccggacccccgctcgcagctgtgccccgacatagggtccgagcccgatggagtctccggggaggggggcgtggggtcactcactgatctccatgctctggaacaaagagcgtttgcagttgcacgtgcaggagacattgggctgcccggcggcggcggcggcggtgctgttgacccccatcaagcggtgcatggacggcgcggcggcgcggcgcggggcgcggggggctcgggggcggccggggggggctccggccggcgcccggagctggggccccgcatgcaggaggcgcgcggcgggggaggcgcgccccggctcgccgggctcgggtcgccgccaagttcccggggcgccgcggggctcagtgcgcgggaccgcgctccgctgcgcccccccggcctcccctcggcagccccgggggcgtcggcagtgcccgcgggtggcgtccggaaaatgggctggcagcggggcgcgcgctgccgccggggctgagcctctgccgctagctttccccagccgagcgcctccgccgccgccgccgccgccgcctcctcctcctcattcaagtccaaggagatcgggtttcgctccgagaccgcggtcggaggcaggcagacggtctgacgtcagcgctagacggggctgccggttcccaccgcgcgggggccggggagggggcgcgcgctgcgccaatccccgccgaggttcccccgcaccccctccccgagccggggggcggggtgacgggaaacggggcgggctcttaaagggccagagctaggcggcccacgtagacccggcacccgcgcaacggaggaggggcgctgtgccctctccccaacggcggtcagcttggaacgcctgcccggcgcacgcccggggccggggagccgaactcggtgccagccgcacccgggcgggttgctggtgcgccctcccctcgcccccgtccctggggtccttgacccaggctcttggggctagcctatcttctgaggagcacaaggtccctgggggctcagggaagagaaattggagaaagggggaggaagcccccaagatggatcacccattgcctggtttcgcaggagactgtccgccttcagttctccagcagctcggggatcatggcccactgaacccccaagcgctttcacccgaacccaaggaggacgaccaggaaagacgggaactcgcgtagacacgcccggaagcccttgtcatgtaaatagctgtcggggactggtgtattgtcgccgccccagccggcgggacctggggcgaatccacacccattgtctgctgcccaaggggcctccggctggggggcgcggctgcggagttcaaaaggggtatgagcaggaggggtgtacttttagttcattaagttttaattacaggagtgctacaagaacacattcttcaggtttaaaaagatattaaaatattacataagagacctcccctccctggcccacctccagcctcttaaaaatttagtgtgtcgccttttagacactttctcaaagcttcacttatttaacaggcacttaaggagcacctacctgtgccagaaactctccaaatattaactcaacctgacaccgactcagtgtggccgaatattactctccccattttacagagcgggcagctggtcaaggaagtcgcttgttgaaagtcacacagtggtggagcctgtgtgccaacccaggaccctggggagctgcctccccctctcccacgtagtcctgattctttaagtgtccacatattcctgtaatgcctggagtttcagtaattagcagggacttagtgtgttcagagaaaaaaaaagcttttaaaaattattgttactgtgtttgtaacagtttggatagagaaggaaaagctggaatttgggaagtgaaggtggcctcggggtagaacttacctagaccagagcgaattcatcctgaagaactcagagaaagccggtgcaggaagtgggttcccgctctccctgcacaggcacagtgatgctgccagagctctcccagaaagaccaggaggcttgttctggagaagtcaagcccagggatgtggctcaggctggtccaagctctttggaggagtccaagcgtgcccagcccagagggaggttcagaggcactgaccgtcttctgtttgggaggagaagctcactcttggagccacagccagcactaggtcaggacccaggccccggcccaggagtggggcaatacccagcgtctaccccagatggcaccctgctgtgaactgggcgccctcagcccctgccttgaggaaggggcaataccaccagcgtgtcttttatcagggaagatattgctgcagtttggccgctgcaacttaagagaaaagctaaggggtcccccagcatcccttggggtgccactgcaaatactggctgggcctggagatgacctgggtcccattcacttcctagggtgaaggaggtcatcattaccacccctgctttcagccatttcttcattcattcaatcaacaaactggctgagctgcaaccctgagccggggaattcagccactccagacacagcc

SEQ ID NO: 1562013 - DNA, 4001 bp, Homo sapiens
gtctcagccagactgaaccaagctgtccagacagaggctatttataggtgcgtcggggacacagacactggcacaatgacacacacacattcaagatccacgctgggccagacgggccagagctgagccctggattcagacacctggacacacacggtccccagatccggcccaaccagaccagacccccagaaagatggacacgctcaagaaaggcaccccggcccggacacgggaaagacacacagagagaggcaggaagactcggtgacacgcactcttgggcaagaccgcgactcagacccccagacaccccgagagacgccgaagacccagacagagccacgcagccacgcacactccacagacgcacggacatccactcagagcccgagacacagcgccgcgaacactccagacacacgcccggagccccagacacctcgcagaccagacagtgtctcacacgcccctccacccccgcccaaagttgataaagagccggcctaaatgctccatcgcgactgccctcagggaaataaaatggaaacttcacggatccgcccgccccaaccctcccgcgccgtgcgccgccgctgagccccgggtccgagtccgggcgggcggggcgcggacagcgggggccgtgccaggctcgcagcgccgcgggacaaagccgggccggccgccagctgccgcgagccgggagggcgcgcccggggcgcggcgggcgctgcccgggcgcagggcgttcggtccgagggggcgcgcagggcccggacccccgctcgcagctgtgccccgacatagggtccgagcccgatggagtctccggggaggggggcgtggggtcactcactgatctccatgctctggaacaaagagcgtttgcagttgcacgtgcaggagacattgggctgcccggcggcggcggcggcggtgctgttgacccccatcaagcggtgcatggacggcgcggcggcgcggcgcggggcgcggggggctcgggggcggccggggggggctccggccggcgcccggagctggggccccgcatgcaggaggcgcgcggcgggggaggcgcgccccggctcgccgggctcgggtcgccgccaagttcccggggcgccgcggggctcagtgcgcgggaccgcgctccgctgcgcccccccggcctcccctcggcagccccgggggcgtcggcagtgcccgcgggtggcgtccggaaaatgggctggcagcggggcgcgcgctgccgccggggctgagcctctgccgctagctttccccagccgagcgcctccgccgccgccgccgccgccgcctcctcctcctcattcaagtccaaggagatcgggtttcgctccgagaccgcggtcggaggcaggcagacggtctgacgtcagcgctagacggggctgccggttcccaccgcgcgggggccggggagggggcgcgcgctgcgccaatccccgccgaggttcccccgcaccccctccccgagccggggggcggggtgacgggaaacggggcgggctcttaaagggccagagctaggcggcccacgtagacccggcacccgcgcaacggaggaggggcgctgtgccctctccccaacggcggtcagcttggaacgcctgcccggcgcacgcccggggccggggagccgaactcggtgccagccgcacccgggcgggttgctggtgcgccctcccctcgcccccgtccctggggtccttgacccaggctcttggggctagcctatcttctgaggagcacaaggtccctgggggctcagggaagagaaattggagaaagggggaggaagcccccaagatggatcacccattgcctggtttcgcaggagactgtccgccttcagttctccagcagctcggggatcatggcccactgaacccccaagcgctttcacccgaacccaaggaggacgaccaggaaagacgggaactcgcgtagacacgcccggaagcccttgtcatgtaaatagctgtcggggactggtgtattgtcgccgccccagccggcgggacctggggcgaatccacacccattgtctgctgcccaaggggcctccggctggggggcgcggctgcggagttcaaaaggggtatgagcaggaggggtgtacttttagttcattaagttttaattacaggagtgctacaagaacacattcttcaggtttaaaaagatattaaaatattacataagagacctcccctccctggcccacctccagcctcttaaaaatttagtgtgtcgccttttagacactttctcaaagcttcacttatttaacaggcacttaaggagcacctacctgtgccagaaactctccaaatattaactcaacctgacaccgactcagtgtggccgaatattactctccccattttacagagcgggcagctggtcaaggaagtcgcttgttgaaagtcacacagtggtggagcctgtgtgccaacccaggaccctggggagctgcctccccctctcccacgtagtcctgattctttaagtgtccacatattcctgtaatgcctggagtttcagtaattagcagggacttagtgtgttcagagaaaaaaaaagcttttaaaaattattgttactgtgtttgtaacagtttggatagagaaggaaaagctggaatttgggaagtgaaggtggcctcggggtagaacttacctagaccagagcgaattcatcctgaagaactcagagaaagccggtgcaggaagtgggttcccgctctccctgcacaggcacagtgatgctgccagagctctcccagaaagaccaggaggcttgttctggagaagtcaagcccagggatgtggctcaggctggtccaagctctttggaggagtccaagcgtgcccagcccagagggaggttcagaggcactgaccgtcttctgtttgggaggagaagctcactcttggagccacagccagcactaggtcaggacccaggccccggcccaggagtggggcaatacccagcgtctaccccagatggcaccctgctgtgaactgggcgccctcagcccctgccttgaggaaggggcaataccaccagcgtgtcttttatcagggaagatattgctgcagtttggccgctgcaacttaagagaaaagctaaggggtcccccagcatcccttggggtgccactgcaaatactggctgggcctggagatgacctgggtcccattcacttcctagggtgaaggaggtcatcattaccacccctgctttcagccatttcttcattcattcaatcaacaaactggctgagctgcaaccctgagccggggaattcagccactccagacacagcccctgccctccgggaagtctcgggagacctggctagtctggctgggagaagtcacacgttgattgtcttggaagtgagatggcatttacacaatggaggctgcactgccagcaggcaaaaataaccagttaattcagtggcttaaagaaaccaaacctacccacaacgcttgacctcccattgatccatctgcgacaccggcagtggctaccatttattgagtgctgatggtgtcacctgggattgacttagtggtctctggcgctagttccgaagttgattctgtctggagagcttaatgcagtgttcagacctcagggtccgaacctgagggtcacccaaagatgagtgggacatagctgtgtgacctcggctgagtgctttcacctctccaacctcagtttcctcttctgcaaaatggggtggcttcatggcaccttcacgtggtgtgattgcgaggaatgaagggatcgatgccttgcaagtagaggagaaggggccggatacatcttagttgttatgttatttaatcatcttggcaaccccgggagggaggaaccactatcattttattttccattttgcagttgaggacaatgatgattccagcacagacagggcccctgacggggcagtagga

SEQ ID NO: 1562014 - DNA, 4001 bp, Homo sapiens
cggcggcggcggcggcggtgctgttgacccccatcaagcggtgcatggacggcgcggcggcgcggcgcggggcgcggggggctcgggggcggccggggggggctccggccggcgcccggagctggggccccgcatgcaggaggcgcgcggcgggggaggcgcgccccggctcgccgggctcgggtcgccgccaagttcccggggcgccgcggggctcagtgcgcgggaccgcgctccgctgcgcccccccggcctcccctcggcagccccgggggcgtcggcagtgcccgcgggtggcgtccggaaaatgggctggcagcggggcgcgcgctgccgccggggctgagcctctgccgctagctttccccagccgagcgcctccgccgccgccgccgccgccgcctcctcctcctcattcaagtccaaggagatcgggtttcgctccgagaccgcggtcggaggcaggcagacggtctgacgtcagcgctagacggggctgccggttcccaccgcgcgggggccggggagggggcgcgcgctgcgccaatccccgccgaggttcccccgcaccccctccccgagccggggggcggggtgacgggaaacggggcgggctcttaaagggccagagctaggcggcccacgtagacccggcacccgcgcaacggaggaggggcgctgtgccctctccccaacggcggtcagcttggaacgcctgcccggcgcacgcccggggccggggagccgaactcggtgccagccgcacccgggcgggttgctggtgcgccctcccctcgcccccgtccctggggtccttgacccaggctcttggggctagcctatcttctgaggagcacaaggtccctgggggctcagggaagagaaattggagaaagggggaggaagcccccaagatggatcacccattgcctggtttcgcaggagactgtccgccttcagttctccagcagctcggggatcatggcccactgaacccccaagcgctttcacccgaacccaaggaggacgaccaggaaagacgggaactcgcgtagacacgcccggaagcccttgtcatgtaaatagctgtcggggactggtgtattgtcgccgccccagccggcgggacctggggcgaatccacacccattgtctgctgcccaaggggcctccggctggggggcgcggctgcggagttcaaaaggggtatgagcaggaggggtgtacttttagttcattaagttttaattacaggagtgctacaagaacacattcttcaggtttaaaaagatattaaaatattacataagagacctcccctccctggcccacctccagcctcttaaaaatttagtgtgtcgccttttagacactttctcaaagcttcacttatttaacaggcacttaaggagcacctacctgtgccagaaactctccaaatattaactcaacctgacaccgactcagtgtggccgaatattactctccccattttacagagcgggcagctggtcaaggaagtcgcttgttgaaagtcacacagtggtggagcctgtgtgccaacccaggaccctggggagctgcctccccctctcccacgtagtcctgattctttaagtgtccacatattcctgtaatgcctggagtttcagtaattagcagggacttagtgtgttcagagaaaaaaaaagcttttaaaaattattgttactgtgtttgtaacagtttggatagagaaggaaaagctggaatttgggaagtgaaggtggcctcggggtagaacttacctagaccagagcgaattcatcctgaagaactcagagaaagccggtgcaggaagtgggttcccgctctccctgcacaggcacagtgatgctgccagagctctcccagaaagaccaggaggcttgttctggagaagtcaagcccagggatgtggctcaggctggtccaagctctttggaggagtccaagcgtgcccagcccagagggaggttcagaggcactgaccgtcttctgtttgggaggagaagctcactcttggagccacagccagcactaggtcaggacccaggccccggcccaggagtggggcaatacccagcgtctaccccagatggcaccctgctgtgaactgggcgccctcagcccctgccttgaggaaggggcaataccaccagcgtgtcttttatcagggaagatattgctgcagtttggccgctgcaacttaagagaaaagctaaggggtcccccagcatcccttggggtgccactgcaaatactggctgggcctggagatgacctgggtcccattcacttcctagggtgaaggaggtcatcattaccacccctgctttcagccatttcttcattcattcaatcaacaaactggctgagctgcaaccctgagccggggaattcagccactccagacacagcccctgccctccgggaagtctcgggagacctggctagtctggctgggagaagtcacacgttgattgtcttggaagtgagatggcatttacacaatggaggctgcactgccagcaggcaaaaataaccagttaattcagtggcttaaagaaaccaaacctacccacaacgcttgacctcccattgatccatctgcgacaccggcagtggctaccatttattgagtgctgatggtgtcacctgggattgacttagtggtctctggcgctagttccgaagttgattctgtctggagagcttaatgcagtgttcagacctcagggtccgaacctgagggtcacccaaagatgagtgggacatagctgtgtgacctcggctgagtgctttcacctctccaacctcagtttcctcttctgcaaaatggggtggcttcatggcaccttcacgtggtgtgattgcgaggaatgaagggatcgatgccttgcaagtagaggagaaggggccggatacatcttagttgttatgttatttaatcatcttggcaaccccgggagggaggaaccactatcattttattttccattttgcagttgaggacaatgatgattccagcacagacagggcccctgacggggcagtaggaaaggagaattgctttggaaggagcataggctggactgccagcactcataggaggcttcgtgtgtgcccaggactgcgagaattaaatacaggacacccagttcagtttgaatttcagataaactatgaataatgattagtgtaagtatatctcaatttaactggatagcttgtatttttctttgcgaaatctgataaccctagatgtgccagggactgtgatgctggcattttgggcatgaagggcagagcccactgtcaggcacaggcagagaaggtcacaactccctgattctacccaggagaaatgggcagagccaaggtgttaatgggctgaggagggagggctcactgctgggagtgggagtggggagggggcaccgcgattgggcaggcctgagtccctgggaagaatgccacaagtcagaggcaaaaaaaaaaaggttttgttcactcattgaacaaacattctgctcctattcagtgtgaagctctgtgctgggtatggggcacagggctgggaagaaaaccaactccctgacctcgtgtgacattgtgggggacaaagggactaaagacacacacacacatgcaaactcatagctcaatgaggtcaggaggtcatttcagacatggtgataacaggccaaaggccagagttggggtgagatcaaggaagccctccctgaggaggtggcatctcattccacctgcagttaccaaccacccacaggtgcagccccagccatactgaggctcacaggtgaggctgacatcacatgtgtaaaaagatgagtccaggtgataatttcagagagggacgagacctgggaagaatataaaaggagagggtttggaggcgacttgagcccaaagggttgggcctcctctctggggagatgtgggctgggcatgtaggggac

SEQ ID NO: 1562015 - DNA, 4001 bp, Homo sapiens
ggtcctgcaacaactgcttccgccactccaggtttcttgctgtttccccaacatgctctacaattcccatccccacccaatgcctctgatcttgctgtccctcagccagaagagcttctacctctatctccattcacctgcacatggacgggcaactcgaatgcctcattcactgggctcctttcaccaatcccctgccatactcactctccctcctttacctcccaccttggctctgagctacttcagttcttcaattttcctcaagtatctttgctcacttcctggccttcgtactggctgattcctcagcctgtgaatgcctcagaagcaaggaccctgtgtgattccttttcttaatcccagcatggcacctgttcattcatttcacaaatatgattgagaggccacaatgtgccagactctgtgctaggtgctgggatacaggaatgaacaagaaggacaaggcctctgcccctaaggcactcacagttcactgcagagacactaaacatgtaaacaaatacatgaaaaatgttgataattgccagaaagagatgaaaaaagtttggtgatagggtaatgaggagattacttgggtagaggtcagtgaaatcctttctggtgacatttaggctgagatctaaaggatgggaaacagctggtcaggcagaaatggaggagaggattccaggcatagggaccgccacctgcagcagtgcagactggaagacctgagcatgtgtgaggaacgcaaaggagttaagtgtggctgcagctggaggatcagcagagaagggagttgtggagatggccagtggaggccacatcattcagggccctgaaagtcatggtcaggagtctggaagccactgggggccttaagatcatccacttccacaatgatgatccaccatacccatttcaactgtgcacctggcatggtctttagattctcccctaccctgctctctttattttcccttagtattcatcatcctctatgaaactatgtatttattgttttatgtttacccctttttgggtttgcttgtttcgagacagggtctcactctgtcacccaggctggcagtgcggtggcacgatcagagctcactgcagcctcgaattcctcggctcaagagatcctcccacctcagcctcccaagtagccgcccagataactcccaagggactacaagcacacgataccacgctctgctttttttttttttttttttttttgagattggattttcactatgttgcctaggctgatctcgagctcctggcttcaagtgatcctgcctcggtctctcaaagtggtgggattacagaagtgagccaccgcgcctggcctacttattctcaattgtttgtcttccccaactaaaatgaaggctctacaaggacacggagtttatcttattcactgcggtattcccagtacagagaacagggcccggcacagaataggtgccccataaatatttgctgaatcaatgaaaaatcaccaggagccagcgtgggtcagtgacatcaagtcctgccccactaactccatttactggaccctggactggcttagacctcaagcaagtcacgtaacctctcccagcctcagttttctcatctgtcaaatggaaagttggacacgttggcccctctgtgcccttgcaactaaggcagagaggagaagagcatgccccgtcccgctctgaggttctctcctggacctgtgaaggtgtctctgggcgcatctgaggagtggcttttcctctcccggcctcagtttctccatctgagcagagggcttgggaggccttacccatgcaggggcagtagagcaggtaaccggccgggtcccaggagcccgcaggcatccccgggagcggcagaagcagcagcaggaaagacacgctcagcggccgtgcccacgcggcggcgcccatgtcggcccgggaacccgagccagccgcggcgcacagtcggggagggaaggagggacgcgagcgcccgccccgctcccagcggtccctgcgcgccgcccgcgcaccgccccggccgctctagcccgcgggcgggcgggaccatagagatcccgcggcaccgccccctccacgacccgagcgcccgctcgcgcggctcccacaatgcaccgcacaatggcccgaccgccgccactaccggggcctgagggggcctggcggagcccgagcgcggcccggcccgcagcgtggggccccgagcgcggtgagtgccggcgagggccccaggggacggcggggagaggggcgggaggccgtctcgctgcgtccgcgcgccctgtacccggagcggcggcgcgcctcatctcgggcccctcagcgcggtcgcccacacccccgacccggggcccggtctgcgccaacccggccccagataggccctggggtgacgaaaactctccctggaccccatacctgtgtctgggggacccgaggaagccaccggtcccctcccttccgagacctggagacgcagtcctgagggtcccccattcccgacccctaggctccctggagacccagataaggcgctgctgaccttaccagggacccgggtctgggggacgcagataagctgcacctgctccctccctccgacacgcctacccagacccacataaccccctttcctgctccagatagcccgctctgtaccctgtttcattttccagacttacataactccctttgaggcttccctcaaatatctgggtctggagaagtcgaataagccccacctgtagttccctcctcagtggccatactcccaggctttcgacatcttccatcccgttacccattttgagaccctcttgaaattcagaggatacacttctgactatccccatccccccagccttccagcccttataatcccccatttcattcttgtggggatcccttagagacccaggaaagttgctcatgattccttcccatcctcgctcttccttcccatcccagagactccctccagacttctccctggatttcctttgcttctccagccctcatccactcccatctctcccaggctcggggaattgaacctttcccacaccacagtggggtgatctaaaagttggcctgggaccaggctgtggcccaccttggtggggagaaaggggcctgttaggtggaggatatggggacacctgtgtgggggaatcggtgctttcacctgcaagcttagcctgtctcctggcttgtgtgtttttccacctgtcagccatgggactgtgtgtagagtctggtcttgggtttctaacctttctctcctaaggtgaggccaccagattgggagcgggggtgtcgaatcacgttttctccccatgaaaatggggttgtgatgagttgcagccatttgttcaaggcctccccaggagtgggaggcagcaggaatctgaggaaatagtgaatcaaagagactccaaagagggcccatctacactgacagaagaattagcagcctgagagtaaatccaacccctgttaatcctgtttgatgtttcttggaatggtgcaagtcattgagactctccagcctccctgtaatttaattctcccaccactctggagtgggcgggggggaagggggcgacagcattcccatttcccctcttctcactgttttccagccaaccagtgtgttttaggatttgtttctggttctgagatcaggatctgttttttgttttgttttgttttgttttttctttcctctaagtctatttataatttcccagttgctattttgggttctgcttaagggaagattctatcccaaggaacgttctgggtctatttcctccggcaggtgttgaattgagttcttcagatccccaagtaactcttgggcaggaggataaaagctattttagggtagtcactgaagtggagctgttaatcctctgtgggtctctttagttaagaacactcaaagattaacccttt

SEQ ID NO: 1562016 - DNA, 4001 bp, Homo sapiens
gagggcacaagattcatagcccagctcaagattgaattcaaagagtgaattcaatcttcctctgccactttgttctatttaggccctgaatggattggatgatgctcacccaactggacccatatctactttactccgttcaccaattcaaaatgctaacctctttcagaaacacccacacagacactccaataaaatatttaactagatatgtaggaatcctgtatcttagtcaagttgacatgaaattaaccatcacaactacataataaaaaccagtgataatcagcatatcagtaattatgcaaaatagttagattcaccttaccatagacaacaacctattgatggctactgcccgctgctgggcttctatatgaggcatttcattctgaattacttggtctgtgattccatgagggaactggtgacataattctataatcctagaaacaaaggtattaatgttatccttcatggttacctgtttcaagagacagtgggggtaaaaatacaagtagaatagtttgaaactgtgcctttttcacatttggcagacaatctgggtttctgtgatggttttggatcaaagcatgttagaaattgaagaagatgatttctaaatacatgtttacagtattattgttatttaagaatatttcttttcctcactaataagaactttaaattagagcaaaagtctaatgaaatcacagaaaaaatattaaagctgagacttcagttttctcgggtgtaataagcatgacaaagttaagccataaatctgcaagcaggaggcaaatgcagatgtttctggtaggaagccaaaatttgttatgacaattcaccataatggggcctgtttttggaattatacctaccaaacaaaaaaagtcaaaatcttcacctagtcgacatcaacaaatgtattattcctaacagtctgagaaagttgagtcttttaaaactacgtgaaaatctaagagtggcagtgcctcggtaaaatataaaactgggccgggcgcggtggctcacgcctgtaatcccagcactttgggaggccgaggcgggcggatcacgaggtcaggagatcgagaccatcccagacaacatggtgaaaccccgtctctactaaaacataaaaaattagctgggcgtggtggcgcgagcctgtagtcccagctactcgggaggctaaggcaggggaatcgcttgaacccgggaggcggagattgcagtgaaccgagatcgcgccactgcactccagcctggcgacagagcgagactctgtctcacaaacaaacaaataaaaataaaagtggcagaggctttgggtgtcctaaaagtcttgagttcaatactgcactgaaaccacctggcttaatgttacttcgtaatcaccaactgcgccctaactccgcctaaacgttttgtcatagacgttcccttagtgacaagagcgatcctggatcagaacatgtattcacaagtgttctacagggaaagaaagccgagggctcctctcaaagcactgatcgcgtcaaagtaggaaggcagcacgtcatcacaacttccccaaaagtatcagggcaaagccagccagctacacaaagttgcaagctgtcaaacccattttgaacttcttgagttctgctctcccaggatgggaaggaacaagtgggtccagaaccccgcaatcgtttttcccgcgtgctcacctaacccgctccggccactcccaagggatcccggagaaggggtccagctgcccaaatgactgggcgcctgatggagtgccaagccggagcctcactggtttacctgttttctatttcgaccggatccgcgtcaggcggctgcaccttcaccttcacctccgccatgagggcgcagttcctgacgcctggggggaaagatgcacggagcagcccggtagcaagccggggaacccggggaaccagtggaggatagcgctctgctgaggccgaggggccttcttcctcgtgtcgcagccggtccttccttgcctttcggcgggaggtggccaagctgcgcctgctccggcccacttacaggcgccgctacagcttcttattcttgttttccagaatgtcaatgcccatcggacgcacaagcctggttccttcattctgagttgggaaaccaacttttagcacttggcaactctgtgaaggaatattcttagatgcctatgggaaagcactgggaaaggaactccaggcgggtaccaggctccctgcggagcggcaggggccggtctagttgctaagaagctgagtctccaccaatcatctgcccagcacccagtgggcggggcgcggctcgccgcgtctgtggtaacccgggcggcggcgaaggaggaggcaagaggcggtgagaggctggcgactgggttgggcgcggcagagatgcattaggggtcccgatcccgggccccgcggttagaggaagaggagggcggctagaggaggggaagagcttcccttactccagccgaaaggatgcaggtgtccttggcagcccctgatgggcgggaacaaccaaacgggattccggatccgggctgcgagggggcggtccacgttgggagagttgaggggtctggggatcctgttgactgcacgttgccatttgggcctggcggatccgccttttttcttgattccctttgcgtggggcccactggccaccccagcttcctaagggcagctgctagttgacgctcgcgaattacttcctctcctacatattttttatttagaatttttcaactacttttattttatctgcctttcacttaaatggaaatgcgactatgggcaagtctcaagtccagccacactcccgtaggagctattgttgtgctgtcagtatctgtagtttatattcttggccctagatccggaactatccaacaaggcattaagttcaccccttaaatttaggtaccccatttttgagaatacagtctgtgacaaagctcaaactgcagacatgttcagatcagcattattagaactgcaacaggcaaaactaaaaagaaactagaaatagcctaaatgcccagccacaaatggataaataagtacagggaaaactaaataatacagtgagaatgcaagaagtagactataaaaatggaatgaatatgtagattataattgggcaaaatctatggattattaatgaaatttgaaaaggcaatacagagatgtaaatggttgttgtgttaaggtgagcgttttttccccctgaaaccttctgtgcattaattatgacaaccttcctccccaccctcacctccaaaaagaccagtaaggctttcatactggtagttaattattaataccaggatttataaatacagtagatgaaacgggaggcttgtgtttattggtcactgtttatattcttgcaaacttcctttccactgagaagtagtactctgcagtccttctaaagtgtctttgcagctttcaaatactagaactgctctggtgataatggcaaggctgtgaacccggagctttcccaaaaaagttagctctaactaacattttgtggtacacacagaattacttctgttccccttgtatgatgacttgccctgaagccaagagagctgacacacaccagaggcaggaaaaggcgataatgatttacagggaactcaagtcagagcgttagtgatagtctctgttttgccttactcatttaatttgtccttttaaagtaacttctttcttttccccatctcattcattcatgctcctttcgcagaagtgaggtatttagataatcaaaaccccacacaagacctcaacagcaaatacagatgaaatgtaattattatttcaattaaaaagggaataatatttgtagtgccatgttaacagtattctctcgttttaactagttttgctgcatttaaattaagtgctgctcttcagcttttgtgtacattggaatttatatgtata

SEQ ID NO: 1562017 - DNA, 4001 bp, Homo sapiens
cccatgcactcctgtgtgtggacccccatccctgccagcctgcagcactcccggactccaacactccatgcctataccaggccagaatgatgcagccaccctcactttaagctgggctgcctgtggcaggaagacccctccacggtgcctgcagcccctacccctcagcctgtcttggggcaacacccctatgggaggcccttgggagacacctaccagcaggaaccaggtccctccagagtgagggcttcccagctcacagccagaggctactccccgccccgcaggccctcgggtaaggggcctgaatccctcagaggaccagccctccctgctccctttccccccgctaaaggtggcacgggggcccacctcagtggctgccctgggtcctgcttgtccagctccaggactgcctgctgtccaaggctctccagaagcagcagtgaaccccacccttatcagccccagcaacagcctcacagcgtgaggaggcccagaaaggcctgggagcagggccagcccccacaaggcagtgaggtcgggagggattcagccatttctcacactcaaatggaacctcgggccacacagctcaggcacacaccatcggggctactggctgcttggagtttattttccgcttggtgccaggtgcacagttccaggtgtcaggaaagctagcgagtgctggggccgggcggtagagagcggggctctcactggtttttggtgtctgctgtgttgatgcgaaggtctgcttgctgcagccgcctagtttacagggtggggggtgggaggtggggaggggggcgagggatgcggagtggggagaggggcggggaggggctctggtggactagcgcctccgcaggcctggggctggtggtaaccgctcaggtcaggacgggggcccagcgctggctgtgctggactgaccgccgggctgcttcctcggggcgtcccgagccaggccacaggcggtcatgctgctggaggcctggggaggttccgagtgctctgcggactccaacaccgtggccatgaacgggagggtggacttcccgaaaaagaagctggcccaccaatgacccgggtcagccttggggagacctgagagaagcgaagtggggtcttgatgctgccagctcctggaggagcggggggagaaaggggcgatcctgcactcacctggggggtggggaatggcttccccggggcactcggtactgctgcaggagctgttgctggaagtggaacccaggcggcctggagaggagaggtcccgtcagcaacgcggggcgcggagccccccagcccaccggccttcaggccgagcgctggttccgcagcctgcacggggccggcactggcgccagcagagcatccgcgtggatggggggcaggggctactcacgccggtagtagtcgtgggtggccacgagcgagccgctggaggggatggccgccatgctttagcttgctggctggtgggatctgcgcatgggggtggaggagcccctcgggtcagcggccttccgtcatgaagggcgctccccagcgggtggagccgccgcgctgggttatttaccgaggcggggctccccagctcccggcaccgccttcgccgcgcggggcgcgggcggctccaaccagcccaaaccggccgagcgggtggaacaaaggcgctttgtgcgcggggccccggcccagacgtcgggaacctggtgggcgccgtcccaacccgcccgacccgagaggagcccgccggggaccccgagcccagcgctcgccaggcggagaggagaggagcccccggcccagccccgcccctcgccccccgcccctcgggcctgctcgtcccacccgcgcgcggcgcccctcacctgggcggcgacccctcgcgggcctcggcgcacgatcacgggtggcggggacgggggcgctaggccacggagcccatttgcagagaagaccgcgggaagccgcgccacgacagagaggcgcgcgcggggtgcgcacgcgcggacgcgcccacttatatgcgcgggggccgcggcgcgtcacggagggcggggcgcacaggctcctccccgggccccacccggccccgcccctttcctggccccggcgaggccgcgcccccagcttccacctcggtgcgactctcgccgtctggcttgggctgagcccagccctgcggcgttcgtcttggggcggcccggccggtcctgggtctgcaggggttaaaaggccccgcgcccgggtccgggagcccagcccccgcccctctcccgggcccaggcccccgtctcggacgcgtctcggagccccgcctggtccagcccgcccgtcctcttcagcccttgtggaggcgacgggggcgccgggcgggccaaaaagtgctacgtgcgcggagccctccggcccggcctccagggacttcgcagccagaggaacctggatctctcccgagtccccctcacagctctggcagctccggaacctgcaccccggttgcccagccccaggacgcgcctgctgcccgcagggggcggtgaaagggtgggcggatggcggggcagtgggaggcggggcccagtcggagagcggggcggatttgggcgggtgaggtgagtctccagtcgccggaggcagaggctgggccccactgctcggagaccccatgtttggggagcccagagcgttcccggcagggccctggggcccgggggacggcccgccatgccaatcaggagggggcgcgttttcccttcccaggcagaaaggcgtcctccctctcctcctccccccagcgcagaatcctccccacacctccctcggccccgcaggggaaatcggcctgcccctacggaaatcccgtttctttatacacccggtcctggctgggcggtgtcttccccgtggaagagagggtccgggaggtccgtggggcggaacagtccgagggcttcgggagtcagcccgggtggatttgtttcgtggctctcgttgctggctgggacggccgtgtgcccgtgttgttccggagatcgaggccaacggatgccgtactctgtcctcgccgggtgctcagtgaggacccacagctgggcagggaccctgggaggcccctgagcaagacttggagggacgcccttgtgccccctgagcacgtggggaaggcgctgtcctgggccctgcaccgctctgtgtgttcattgcacgagtgtggtaagcacctactatgtgcacatggccgagccaagcgcagggaacggtaaaccaagggagaacggccttcccgtggggagcagtgcagaggctggcgggggcgggtggtggggagagctcaggtttcagctgaggtctaaggacggagggcagggaaccgcctgagccccacctgggagggggagctcggtgccggagagcagtgccaggacctgcgatgggagaggtgtgcagccccgaggggtcactgatgaggcagacgggtcagttgggttgacactcagagggtcctcaggggcagacgctgagacggggtttggggtttggggtgcagagtgagtactggtgatcagcacctgggaaggggtggggagggtgcagggccgggcagggactgtaggggcggcctgcgttgggcttggctggcacagcctttgtggcttgcttggacccatatgcagccgcccagggacgggagaccctggtgaggtgtctgtggtccaggcccaccctgaaggagccgtggggccgactgccgaccacgcctgacagcacggccttccaggtcacccgcttccctctaggctggcctgacccagctcacctcattctcaacctcaccagtcaacaccggtcaacatcagtcacagagcgtctgaaaggaggaattttcattttcctttaaagtgaaaaggtaaaaactgcatttactaaaccaggccggtgggggctctgtgagcccctctgcacaggaagcctcagagacg

SEQ ID NO: 1562018 - DNA, 4001 bp, Homo sapiens
cctggttgacatcttgcccccagcatcctggggactcagccaggaagatgggatttgggtgacaggtgggagagaagggcatgggagatttgtgtgggaagggccgtgtgagcaggcagccggctggaaggatttgctggcccccaccggcctcctgcaagctggctttttatgacagagctgggggaggaagatgtggaaactcccccagcccctgcagaaccacccaccagggctccacttctgcacctgtctaagagagacacgccccactcaaagccaatcccgagggcggccagtattggccaaggagtgttcatcctcccgctctgctgcacccagcctctccctcatctccccacagcctggcggctgttagccccgtatcttagaggcagttgagactccagaagccaagtaccttgcccacgagtagacagctagtcgctggctgggctaagaagctttattaccagccttggaggaggcctcctagatggacggtttttctccggtgcttcaccagccgcaggaaatggcagggtacacagggaagtacccctgcggactgaggccgccatcggcaggccctttccagggagagccctgcgggaaagggcgcctgtacctccgggccccgggtcctccacagagggtgattcagaggcggcacctggtgtccagagccgcggagagctggggggctcttctgacagtgaaaacaggggccctttatgtgaaatgcaatcacatgggcgcgcaggcagctcggttttcggttcctagaagcgctgatgaagccacatccctctccctccgctcctgaggtgcccgggagcaccgggacccaggcctggcgcgcggcagcggcgcagccctggggtctcaggagggccagattcaaagctctcccaggctcaattatcctccaagggctgggagctgcatcatcagcatctccagtgaagctggaggccgggccggggtgggggagcggaggaagggagtctacatgggggaaggaggagggcagcgagcgcctgcctcccggctctccacccggggcggtctgggcagctcagcctgggcactccgggtgaccttggggagacccctctgggcgacctctcaggggcggctgcacgtctccgcccatcctcggcgcccgggggcgctcctctgggccggaatcgatgagccggagtcgcccagaggggagcgctcctggcgcgggggacccagccgccggcgcacggggccctgggagaggccgggcgcgcccctcccggggaactaccactcgcggggtctccccgggctggctggtgctgtcagccggatcctgaggcggggcgggtctgcaggtggaggcgcctgccttggggatctttcccgcccgggcaggagcgctctctgcgccctgccgctgcccgccaggaccaagccccgccacgcgagggggcggcaccaccatgcccggccgggagagtgcgcgggggggggttgtttggtgtccgctgtggctcccgccgcccggcattgcacccccggcagacggcggccccatgagtccagaacagaccgaggaccccacctccccgccccaagatcggtctacgacggccgcagccaacaacctgccaatgcgccccctcccctggcctcgtcaaggaattgcgaggccggggagaacgcccccattccagcccgactcccggacctagcgctctcggtacccgtctttccagagtccccacactcccatttatctcaagctatcgtcccttggccaaagcgccccggcccccagctaggtgatagcaggctgggaccacctccccgccccatcctcatcccccgccctgcgaagccgcagagcgcaaggagggtggtggcgccgccggggaactcacccgctctcccgagccctgccccgggcggctcccgaccccggctgtgtctgtgggtccccgagccgcagctgctccagcggcgacagagctggctctgctcggccgcgagcctccgcgccgcctctcggctcctcccccaaggcggggcctgagctcctgggactggggtgggcgcgctcaaccccatccggcttgggaggcagcgcgggacagggtcccggcgctctcgggtggggacccctcttctgagctgcaggaagttgaaaccggttgggacgtggccaggcttcggaatagttttcctaacgctgccccctcctccaaaatagttttcctaacccccaccccgaccatggaaagagggaagccaaggacggtatccctgctcccatttgacagacgggaatcctgaagcccagagaggagtggtaacctgctcaaggtcacacagaatgaatgccagggccaggaactcagggttcctagcttgaaggcctgcgcggcctgagtctgaaggcttcccaggaggtccaggggccggccctggccttgcgctggggacagatctgtggggccaggtcccccagctgctggggccgagacatgggggctgtggcctgcggtgtggactcgcatcatttcctctttctggaaagaagggaggtgaagcgctggaggaaggaagtggtcgtacctctgctgacgtctgacgccctttgagatgtgcaggatgaagataggggctgcttccctgagatttaacgctaaaaataaaaagcaaaacatacccggtggcttctgtcacctcattcaagcctctttctggggctgaaggcctctgcactctgtgcaccagcctttctttacaacacaatgggtttaactatttaagttgctgagagtcaccccccaccatcaccaccccaggaagagaaaagaaagttcataaacaaagcagagaaaacctccccaaacattctctggaatccacatttgctgaaccctggccttagaacaataggtttctcttctccacaaaggccttgtttcctgagctttcccggcctacagatgagagccctaggcaccccagggccagccagctggggaaattcagagtttaagtttggggagtttggggatggtacccagttaatttgattctcagctgtcatgtttgaggaactcgcccgaatcctttttttttcactggcaatattcttttgaggccaccagcatcacctgagtttagtgattttctgtttgctcagtcacctttcttgggggagagaaaatctgtgggttgaacttgttccaggcccccaggccctctccaggaactctgtaagcccccttcattggctccctggctccctctcagttcattaataatccagttgtgaatgacactgtttcaggaaaagcaattagacagtagagcatgtggggaagacttaaagccatgtttaaaataacccaagggaatcattgttctccgaagaatgtttccattgattgataatgaagagccatgggctgagaggatgggaacccatctctccaaggcttgtgtggcacttggggcctgtgttcctaaaataaggcctttggagggagggggctcccaactccaatgtcatgctgttcattcacctctcacactgtgttcggtatcaaaagttaaagtaaattcagaataagttgggggactcacaagtcctgatttcaaaacttactaggaaacttcagtcatcaaggcagggtggtacgggtataaggatgggcatacagaccaatggaataaaactgagagtccagacagaagcccttacacttactgccaattgattttcaacaagagtgccaagacaatttaatggggaaagaatagtgttttcaaaaaatggtgctgggacaactggatatccacatgcaaaagaatgaatttggatccctgcttcatactatatgcaacatatagatctaaatgtaagagctaaaactataaaactctctgaagaaaacataagcctaaatcttcatgactttggattaaacagtagttgcttagatattagcacaagcaac

SEQ ID NO: 1562019 - DNA, 4001 bp, Homo sapiens
taaaagtctgaagcttttccctcctccccagctgttaatgtaggagacacacagcctaaccaggacagtctcaatgcccaggaatggttgtgtgatgactgataaagcagaaatttcttgcctattaatagtttcccactgttagaaggctacagccgttggcaatcagatgtgggctcaggttttccttatcctggggcaggaatgcctggagggaccacgatgtgggtcacactgtacattctgtttactgtgggcacaaacacagaactttttttttttagcttattaaatcgagaatattcctgaggaggcatccgctatgggctaaaggtcccaacatcacaataataaataacagctatgtttacagagacacattcaggacacatgcaaaagcttttcctagcaggaggacttgggcctttgcaaaacaagctgcttgggcctccccagagggcccaccctcccatgcacctaccccaccaccctgccccaactcattacacaactcggccttctggccacctgaggctactttttagaccaagtgactcagacgtttcaagtagaagacaggatgggccactgccaggggaccttgcagcagaaaattaggtcagaggacttggagggtggtgaagaacaaccagatagatgtgagagcccagcagggaaatgacaggaggcgcagcttaggtgtggaggctccaggtggccggtccccgcgcggctcagatgaagtggatccagctctcttcgcactccccgcgaggcatgtgcagcgcgtggttgcgacatgtgaggctgtagtctcggtggtcgttgttgtcccagtactcggcacccgccacttggtagcgcaccgcgaagtgcacgcgggagccgagctccagcaggaagggcggtactggaaagccgaaggtgaaaacgtcctccgtgccctcggggcctgcgggcccgcgccaccgcgccaccgcctcgtgggtactgcgccagcccgagaaagtgtagcgcacagccacctgcttctcgaaggccacgttgcacacgcgcaccgtaccgctgatgccaaggtccgagcaagtgacacgctccaggcacacgagctgccgctgcaggcgctcgccaaagtcggcggcctcgacgggcggcgggaaatcgggcaccaggcaatgcagggtgaactccaggtcctggctgctgcagcacaggtccgagttgattgcgagccgcgacagcacgtgcagcggcacggacgggtcgtctcccgcgttgaacaccttgacctgtgccagctccaagcccagggcgtcggcgaagcgcacgcggagcttctggctgcagcccggccgacacgcagcgcccggcgcgcccgcggccttctggcggcgctcgggggagctgggcagtgagcgcgcccgccgcaggatgatgggccgcaggcgggggtcgcagcccgacggcgctggcgttggcggcggcgcgcggcccgggctcccagggggcctacaggcccgcggctccagggccacgccgccgtccaggtccgacaggcagctgaggctccgggggccgagcttccgggatcccagggcgctaggcaggaccgcggagctcgggcctctggacatggccccgccggccgtcggaagatgaggcagggatgagagacgacctcccgaccccgcgacagctccctccgtgctcagaagccgcagagagtccaccgtatctgcaacctgcgggggacctctcgggcccggtgcgccctacccttggttcgccaccttgctcctcgagtccttgtccaggtcctccgcttcttgcggttaaagaaattgtaagagtggggagtttttctctagtggaagctttcagaggcctcccgggagcgcagggtagcgcctcttttttcttcttgcttccttggaggttcttacaagaaggctgcgttccgggagcggcccctcccactttcccggtccgcggcgttacttacaaggctgcaacttgaccgggtgcaacttcctagcgagcctccgccccgcccctcgtgacgccgcctgcaggcgggcccccgccggcctcagctcagccagggagctcagcggagctgcgcgcctccgcctccagctcccctgccgcagcgcgccgcagccgggcgtccccgcgcgggcgccggagaggaaggaaggctggcagcctcgtcacgtgtccgctgcagtcgcgaaacaggtctgatcaatttctgtttacgtctgcctggattgcgcgcctatcgatcatagactttgtctgcacaaacggaggacaaggaaaatgcatgctgcgtgtccttagatttctgggttgtggatggggggagcggtggtgcaaaaaccggccttgccaggagctggtctcaggctaattttaaacatcgaggccagcccacactttggacaggttcactgcaacctggacccttggtcagaccgagggagcctcactgcgtagaggagcagcgtcatgtccacatcacccagaatgctttgccgcaccgaatggccagcagattcccttgagggtggggaggggaggtgctgctgttgtcttcctggactccgcgccagagaggaagacaggggaacaagagttattacccgctgatgacttctgcagctgcccttaatcagcctctggcgcttggggagcatatttgtagccagaatctccgacttttagctttgtttccaagcaagccagaaacaccagcaaggcctggagcttgttttctgcctatttagaaccctgcaggcattcgtgtctctcacccggtagctttgagcacaaaaccccacagcctttggtgtaaagcataccaggtgaaatgaagtagaaaagatgcaagtgcactttccagagagcagtttggggccagccattccattaagaaggttcctttttattgtccagagggacaaagcagaaagaaaaccagactaatgaaagggggttgattcaagaacattcgttgcatctaaaatgagtcaaggctgttgattgtggtataattcatgaaatgtgagagaatgattttatttatcattggatgtaagctaactaaaaaggcttacatgattaatgtgggaaaaatacaggaaagtttcaggaagaaaataaaaatcttctataatcatctcttttattttacagagacaggtgatacgggaaagagaagtatccaatttccattcagtgcacttttaataggccactcaaaatgagaggggaataacagcaatatgtggtataggtcaacaatgcttcataaagagatgatatataatatgtaatatgtatgaatatatggaaagtcttataatggattgatgtgatagagaaggccgaaaaattgaatgggaacgttcctcctagagtttaagctccttctgaacagggacgtgcataatcattgccatttttctgggtactcctgtaattatttgttgcatgaatgaatgattgggcaatgcaatgattgaacgctgtaataagacctgaccttatttagccttccagatttcttcaacatattatttccaaggaagattatacctgtgtgtgaacagggagagagagagagagatggaatccattcacagtatttatagtagtgtgatcctgtgatcctgtctctaatatctactgtaataagcagaaaagacaaagctgtaagcataagacaatgtctcccttccccagtatttcataacctagagtgcaaaccactatatgatcacagccttaatatttcaatattatacaagtattaaaaaacaagtgaaaaaccaacccgatactggtggtaggaccatttgcaatcaatagttactgacagtattctgttgcttctagttccggtggtgaggagacctttccaaatataagaggaataaagaagtcacctccccagctgtcatcatcttccagcagattgagcaagaatattttgagca

SEQ ID NO: 1562020 - DNA, 4001 bp, Homo sapiens
agaagaagggatgggaaagaaagccaatcctgccttattcttacaggccttcctagaagggtcctttagccaaatggttttcaatgcttctgcacaaccccctctcccacatccccctgcccccagtacatctcctttcacaggcagaagggctctagtctaaggctgtctcctccctgagctggaactctgatctcacacagcctcagctgcacccctaagccatgaggagccccagaggaccccagagtctccctctttctcccaaagactaggagctacaaagcctggctctagggtctttgaaagagccacccccacaccagcccttcctgaaccaggattaaaagacttcctagagcagagaaggggagtaaatgaggccccagcaggaggcatggagattaaagactttagagtctcctaacttccatccaaggctctgccccgtcccaccccctccacccgctggccacttttctcacttcctaggagagtagggaagtggccccttcctccctctcacagaaaaaaagcaaaagaaaaatgcagcatagaataggggtttagaacaccagctgggatagtcccggttcaaagcccagtacccccacttaatcagctgtgcgatcccagacaagctacccggcccctctggagctaaactttcccaatcttaaaaacggaggaggcaggacccagtagctcacgcctgtaatccctgcactttggaggccgaggtcggcggatcacttgaggccaggagtccaagaccagcatggccaacatggtgaaatcccctctctgataaaaatacaaaaattagtcggccgtggtggctggcgcgtgcctgtaatcccagctactcgggaggctgaggcaagagaattgcttgaacccgggaggcggaggttgcagtgaaccgagattgcgccactgtactccagcctgggtgactgagggagactccgtctcaaaaaaaaatttttttaattaaaaatgggggaaatactcgtccctacttcatagaccgcctgtgaaggttaaacctgctaattaatgacacatgtaaggtgtctggcacatagtaagtggtcggttgttattttacaaagtctgaggccgtggttttgcacttggagatggggagttggtgggggtggatgcagttagggagcctggactgccgagttttgagttcgaaacccactctccccgaactccagcaaaaacctgtgcatgggggattctaccctggggttctgtcaatccccgcccctcctctgagcttcaggttttatcctactccatcaacgcgcagggacgttgggctctggggctcctacggtatgtcctagatgagtggtgcaccgggcgcgtagttattcctgggaaaaagacgcaggagcgccagctcccggcgccgccggggtccccaagcccctgcatcgcggatgtaactaattttaaaactatttgaaaggcggggacggggaagaaaagacaaaagggcagcgcgcgccgcggggaagtggagtgcgggagagccccggtcggagcaggaccgtgcgccggccagggagggaggcgacgcgacagctctggaggagctcggatcccccccgctttccgcgcgccctgcggggcgcccccgaggcaattctccacccacggggaccacggccacaggttgtggggaccgcagcggggcgagcggctggagggaaagctgtccccaagctcccgagcgacactcaccgactgcaagaagcgcaaggtgcccacgtagtccctctcggtgcccaagatctcgttgaggacgcagaggcggaggcgcagctggcgctcggactcccgggcggccgcgcacgggccggggccggagctgggcgccgcggcgccaggggcccgggggtccgggtgggcgcagtccccggccccgtcgccgccgggctcgctgccgctgggcgcctccattctagcgcggccgcgcggcgccggctccttccgtcgcgccgagcggcaactcaggcgtccaggcgccccatcccggacggggcgcgccggcgggccgggctcagcggcgggccgggctcccggcgcggcgggcgggactgggggccgggcggctgggccgggggcggaggcagcgcgcgggggccgggcgaggggcgggagggggcggccctcggggctcccagacggctggccccccgcccccgcgccagggaccgtctgccaagtgccacgccgcgctcggccgcagaggcgctctgcgcgtgcacggggcccctggggacgcggcgcggcgctcggcgcctccgtcggaagctcgggggtcgggcgggagcctccggaagggccccgcggagccgggagtccgaggccgcgcgcacgccgaaccgagcgtaccaactccgcgcccggacgcgtggcgcccccccaacccgcagtcaccgcgggctacgccactcccacccggcacacgcgacacccgccgcgcgcaggctcctgcttgcaggtccggccgctgctcgggccaagtaaacaccgggctgggaaagctcgctgcggagccgctcgggggcaagccagccccgccacgcgcgcctccgcggccccgggaagtcaggggcgaccgctgcctgggcagtgacggcccctctctgggcagtgacggcccctcccgggaacgccgggccctcgcggtgccctcggtgctaccacgaccttgggaaggaacatgcgtggcgcgcgctcgctctcacttttctctttcccgtttcctttcccatctctctctttccttccttccttttctttctgaacttctttgccccctgaccctgccctttccacctttcccagaagaaattattacctgctcttgagttattgatcaagtggcaggtaccctgcctgctcccccttccatccacccaccccatgggataaggccttgggaaacccagcttcttgtcaggttgctctgggcaatgttgatcatcacccgccttatcggaaggtatggagaggggaggaagttctggggcctagagtcagctgctcaggttcaaatcctagctccccacttgctggccgggtggccttgggctggtttccttgcttcaagatcctcagtgttttcatcagtataacgggaacgatcatggtacctagctccaaggtcctccccggggttccatgggaagtacttagcacctagaaagttctctgtaaatgtttgttcttactattattgcatgtgtgaagcccaacacctagaaagttctctgtaaatgtttgttcttactattattgcatgtgtgaacggccctctaagcctggccccactctcaaatggcccatacaatccctaatcacccgtgtttccggaccagagattgtatcgtctctgcaggggataaagtgatccacatagtatccgcctctagactgtagtcattttatggacagaaacattgcttatttattcctgttccaaaagcctaggattttcctcccattggcctctcaatactgtaagtgcctaaggacacagggagagaatggggtggcttctgccctctctgacttctttctttgggatcatgggcaaggtagcatttgatctgggccttgggctgagtgaagttcccctgggcagggagtaaaggacatgagataggtgagcctgtcacgcttgggtagtggagtcaattgtgtccaaaggtagctggttttttatttatatttttattcctaataaaggcctctggagtatctctgctttgtgactttaaactgttcacggtacctttctgagcctccgtttcctcatctttaaattaattctgtctaccacgaggggagaacatggctggaacataatggaccatggaatgaagcgggcttgcatttgtatcccagtccaaatccaactggcagggtaaccttggccaagacacgttatttctctgggcctcagtcgtctaatctgt

SEQ ID NO: 1562021 - DNA, 4001 bp, Homo sapiens
gctcaagcaatcctcttgcctcagcctccggagtagctgggactacaggcacacactaccacacccagctaatttttaaatacatgttgtagaaacggggtctcactatgttgcccaggctcaagtgatcctcccacctcagcctcccaaagtgctgagattacaggcacgagccactgtgccgactttagattgtactttcaatctcccctctttgttctttattgctctgagctggcactgtcttgggggcattctgccatccattctgaggaattcactggctgctgatcctaaagggctttgcagtaatgagagagagaggaggaggaaggaagggaaagatggaaacgtagcaaagggacccctgcctcccctatgtccaggggtcaagtgtgctccaggcatcctttccaatctcacccctgggggacagtgtgaccatctgcttatcctactggctttttattgcatactttcttcatgcctgccaccgtgttaagctcttctctgacattgcctaacttaattctcacatagagtaggtacattattatccccatgttataaatgttgtcctgggattcagagaagttaagtaatttgcccaaggctgcacagcggggaggtggcagacctgcactgggctctgtctaatgctgcactgcatgtgtccactagccatgccccactgcccatctgggtttcaggagaagacagtgctcacacactgtgcttttcactcactgggtatgatgccccctgagctgggcaaagggcaaagggcagggcccttgaggaatttcggagaaaacgagatgaaagggaagacaggagggcctgggggaacaccaggagggtcccgggtcaaggtggccctgggacatccgaagggctgccactgatgtcatggaaaagcccctcaccccacaccttaaggttgcctgtcacattcggctcctgaatctacaatagccatcaaggaaatccacttcccaaggccgactgtcagggcattctagcacctgggtctttgcctgtgtggattagggaaatggaaggagttcccataccggagcttgcctaagctgtctcctaggcaaagacttactgtgaggccatggggccccagagctggaggaggctgacagggagcttgtttcgcccctcacacaccctccaccaccctgctgcagcttccctaaaagtggctaatgttcctctgataaaatgttcaactctgatgccacattgctccttatattaaaaaaaaaaggcaaaacacagctgaagtgatctctagaagcacatccagtcatctctagaagcctgcaaagaggcctcactgacctttccttgcttgtagacatcgcctcgtctttgtcccagggtggctatgagcatctggaccccctcaccccactctctctgcctcctgagcacagtgaactcagactgactttctccaaagagatccaagcatgaagcaaatattcattagtctcctaaatagggccatactccacatcattccttttttaaggagaaatcttaaataagattaatggcataatagatcatttcaggtgagtcaaataaaaaaaataaaagcacagcattcttgagaaagagattagttttcataggcagaagcttaaaggcaaaacaaaatcccaacccacaaaccctaaagtagcattttattatagcaccaacttagagaaaggcaagcccagtgatgactgggtatcctcgcaagtctaccctgaacttgggacccatccccaggtgtgggagtaaagaaatcattgcatgattttcaatctgggatcgagccttgataagaaaccagcagtcctgaccacagaagtggccccccacgtaccttggctctctctggagtgtgcctctggagcctcgagctgcacagtcccccagcacaccctcttggcagccaggtccgcccagctatataggagctgccgggggaggtggcattcctgcaggtctccaaataaggcagcccttccctccccggcagaccaatcagggcttcctggaccactccttcatcctgagaaggatggaccttctcatcacactttactaaggaaaccacgtgaaaatcttgatgaagttcagcaaggcttcagaggtgccttttagaattggaatgagatgtgttagaaggaaaatgcttttcccatcaatatctatgacagatgtggcttcaacaagcctcgctggacatgcatagtgtcctgtacctaaaggccggccttggacagcaaagcagtctttgctgacagcctctgtggggaggttcagctcaaaaagagggcaagcgttcacctggaccaccacgccctgaggatgggaccaacagggtgtgtgtgtggtggtggggggggggggcgccggggggcggttacactttcatcgggtagtgggaaaacagaactggtaggtatggggtggaagacacgtgagaagacttcctggcatgttgggcgaggaatgcttgaaggactgaattagcccaaaggccaataagttaaagatctgcgggaaccccgggagcagagacacattgacacgcagccagtcccctggacaggtggtgcgggctgagggcgagttctgcagagtgccttctcctctacatggtgtccgagcgctgcgcagaaggggctggaggtgcattcctgggctttccaaagcaagagactcattggtattgggtgaccattttgggccttatacagaagggacttgctcaggtgtccctgttacagttagtactgcaaggcaaagtcaaaagtgaatatgggagcaagtatggggccagattttcctgtaaacagaatgcgatttttatgctgaatgtgaccccgtcagtgttcacggtggatttgcgtcagagcaattttgcaaaccaaattaaacggttgttatcgagaaggacagcagatagcgccagagagctgacaaagaccgcagccggtcggtgggaaacccgggcttctgggctctgggtggatttggggcctccggttgggcctttctttctcctctgactttaacatttgtttcacttccccacttttttttttttaagaacttttctatttcctttctagaaccacagactttttgtgcttctgaatacacacaaaacagaaacacagtagtgtaatcttagtacagactgtttgcaaaatggagatgaaaaaatcaaaatctcctaatagttcagtacccagagacaaatgtcaggacaattttgtttcacatatagatacttagggccacagtgtttagagctagaaaggactcagaattctgtggtccagctcctttgcatggtgagctcacaggcccagataggctcaaggtcacccagccaggccggcagtgcagcctcggcaggctcgttgtcccattgtgaactctgtgcactatccccctgcctgttcccactagacacaatcatctccaaccccctccacccctcttcttcctattccctttctaagcaggactttacccagagaatggtgggaggttggtttagagctgacgtggcagcagattcctcttgttagtgaacaaaaggctgtttacaaaggcacagaggaatggggaagactgaaattgctacagaagcagggaggagctctggaagctgcaaacaaggcaagaaaacaataagcagatgtggagaatgtggagccgacccaatgctgcctcgcatcctccctccctgcctgtaaagatcgacaaacagaccaaggaattagtgtgagaacattcatttcttcaaaagaactgagagaccagggccaagtgaattacactatgttacataaagtggattatattatatagtctgggaaatagaactgtgtgtagatcatctttgagaaagcaggaagaatgagatggagaccacagatctgggtgttctatgatgcaggggtctatgacatagttctctagat

SEQ ID NO: 1562022 - DNA, 4001 bp, Homo sapiens
aatgactcatcattttgccatttatctattataatcttaatattttcctttcggtgtggaagacttgtgttagatataaataacatacaaatcacatcctacccctctgcctgcttttccccttactggttagctttttttcactgtaagaccttctctgtgtttgtgtaagtaaaattgctcctttccactggtgattttttcctttcttctacaaatctaagagcgttgttgatttttccagaagtttaacatatttatccaattccctgttcctatgtttttgataattatatttgtaaaaatccttaatcctattctaccaggagttttccctaaggaaacgggaaacacttcaaatcatatggggaactgctaattaaaccgtgatgctctcagaacaagaaaataacgcggccatgaagatcctcatcattacagcagtgaaactgcactgtgttgtgtgagaatctggaggctaggaaacaaaaacggagagctgtggctctgcgatggcgaggatggatgtgaccgtggtggaattgcgaggttaaaaaaaaaatctatttcctacagccacctcaaagagaagagcaaaaaattccttaaaaaggacagtaaacatggatttctccccattgtttaataatgaaacgtgaaggcgcctgccgcacaggtggggagaccggtgacccaagggtcgtcatccgaggctggttgttccttggagccccccatggccagcgttctccctccagggggactgggaggaatgtgactggccaagctggggtccgccatcgcacctggggccaggccgcagacctgcagctcctctctccccgcccctggagaacagagggtggggcctccccggaccccgcccccgccgaggcccgaggccccgcccccgcccgtcagtccgcgtgggccgcttctccaggcggtggcaacggccgcaaggctgcagcccccctcggagaagctcaggcggcgaggatgaagggctgggccgcctcccgggaggaacgctgcagctgcggcgggaggcaccgaggctcccggaactcccccggcgggcgcccctctctccatccccccaagcaccctctgggcatcgcggaagcgccaggccttgccaaggggcgttctgggccccgatctcggcctccgaggggcggccaacgggcggggagcgcgagccccgcggcccccaggcgcccctccccgccccgcgccctgcggagcccgctggcggccctcccggagttccctgggcgccagcgatcgcccgctgggccggacccgcgcggggtgcagggggcgctgagacaccccggcgccaccgacctccctaacggggctccgccagctcccccagccccccaacgcgcagtaaagggagctttcctaacctgaaaagcgaagccaagccgcctcacccgagcggagaccagcgcagccgggcaggcccgagacgcgtcacgcgcccgcggggcagcccccggcccctcctcactggggtcccgaccccgcccggccgggcacccttgcgcctgggacccgaggcccggggtcctcactcggcccccgcggctcccctgcccccgcccgcgttcctcccaccccgggcgtttacctgcctcggtcgtgaggagaggagaagctcgcggcgccgcggctgtcagcgactggctcggaggacaggcgacgcgcggggccgagggggagggacgcggggcggggaagggaagcggcggcgctcgcgggcggaggtcggcgcggggaccaattgccgcgcggcccggcgcacactctgtgcccccggcgggcggccggccgaggtttaagttaaagggtgcagcgctgccaagcagggccgggaatgagtcaccggaaaaaacgagttgagattcgcttgaacacttgcatcagttgataccgcctgcgggtgccatcgctccctgacgtggctcattgactgtaaaaatcatctttaattggaaattcggcccaaagctccagctccccgttacataatggagaaatcgagaaaatgaaaggctcaggaatgaggaagcaatttctggaactttggcaaccagaaatttctaaagaggagagcaaaaaattttgcttaacctggattgagattaatatttatgaattttcacataaactcttaaattttgaggcgtagaaaggacactgaccatcacctgttccttccttcattcactttctactccttgttttaggcaagagatgatttaggtggtgatattaacaaatgagaaaaatgcgctccgtttaaaaacccgtgtttgcacattacctgagatatcttctatgaaacagggtggtgtgttcttgcgcaggattcctgctgacaactgtctcattttaaaggagagcgaaggatgaagtgatagaaggacaggatttagagggagggggatcttataaattattacccaaattgggcacttttaaagtgaaatgggcgtaaaccaggcatgccctggggaaaataggacatctagtctcctagttttgggtgagaggtttaggaagcatgtaaggaaagagatttaagaatgttgacagccaggtgcagtggctcaggcctgtaatcccagcactttcagaggccaaggcaggaagattgcttgagctcaggagtttgagaccagagtgagcaacatagtgagaccccatttctacaaaaaataaaaaaaattgctgggaacggtggcacagtcctgtagtcccagctactggggaggctgagatgggaggattgcttgagcccaggaggtagaggctgcagtgagctttaattgtgccactgcactccagcctgggccacagggctataggccaagaccctgtctcactctttgtctctttacaaaaaaaaaaaaaaaagctgaggctgcattgtaaacatatgtgcatcaaatatttgcatctcaggaccaatcactgtcactcaagttgcaggggaggggtacaaatggcgagagacaggagaagccaggagaatgcacagaggagagctgctgtaaacagtgcctgggccatgtttatgtgagtgtgggtgagcacttgaaaggtctgctgggaaagggcaaccaggaggcctggaaagcgccgcctttggagggagctgactcagtgcaacagggaggactggattgtggccagttagaatgagcactaggcagcgaggccattttacaacctatcagtgttatgtaatgcttaggttgacatcgcattcagagccttacctcctttcctcagagatggctcactgggagatgaattcagcgggcagcacagtgtctctttgagtctcctagaggctcagggcctgcagggaggacagagctgggtgggaggacagagctggggtggggctggaagtaggtgaccagatcagcctaggcaaggggctggctgcccactggcagaaggcgctctgtgaagcttggttccaagacgctaaaacccatcttttcctcaaaagaattgtattttctggtcgactgctttcctcccatcaggaaagggctcaaatggcctgggatttcttggagggaaagaactagggaaccaaaggggattgacttatgacctattctggttattactgatgtgctgcaaataccccacaacttaggtggtttaaaacaactaccattttattatgccaatggattgtttaagccagggagctggacaggcacagcggggacttgattctgccccattatgtttggggtgtcagttgagaagactctaagtctaggggtaccttgatagccgggggttgcagtcatctgaagcctatgcacttgcctgagtggcacctgggctaggaggacttgaagatcagatgtgctgattgcggtgcctagctgcggcttctctgtgtggcctggtttcctcatggtctggtggtctcggcttggatgaacttcttacatgttggctca

SEQ ID NO: 1562023 - DNA, 4001 bp, Homo sapiens
tctgggtcacagcttccagcttcttaatgcatcaccagattgcttaacaaaatgtttgtcactggttcgaaatgcccccaataactcatacatacagacgcagaaagtagctatcatttcctccattctatgaatggacaaaaggaggatcaggaaattaggtagcctgtccaaggtcacaaaattgactgcagaaccatctttgtgaccccaaagccctgccacctccccagacacttgaaaatgccaagttttgggcaaccttccagcaagggttgctgttactattaattattttggttattttaatagatgtaaaatgataacccaaacatgctctaatttgcattttattgtgtaaatgactcatcattttgccatttatctattataatcttaatattttcctttcggtgtggaagacttgtgttagatataaataacatacaaatcacatcctacccctctgcctgcttttccccttactggttagctttttttcactgtaagaccttctctgtgtttgtgtaagtaaaattgctcctttccactggtgattttttcctttcttctacaaatctaagagcgttgttgatttttccagaagtttaacatatttatccaattccctgttcctatgtttttgataattatatttgtaaaaatccttaatcctattctaccaggagttttccctaaggaaacgggaaacacttcaaatcatatggggaactgctaattaaaccgtgatgctctcagaacaagaaaataacgcggccatgaagatcctcatcattacagcagtgaaactgcactgtgttgtgtgagaatctggaggctaggaaacaaaaacggagagctgtggctctgcgatggcgaggatggatgtgaccgtggtggaattgcgaggttaaaaaaaaaatctatttcctacagccacctcaaagagaagagcaaaaaattccttaaaaaggacagtaaacatggatttctccccattgtttaataatgaaacgtgaaggcgcctgccgcacaggtggggagaccggtgacccaagggtcgtcatccgaggctggttgttccttggagccccccatggccagcgttctccctccagggggactgggaggaatgtgactggccaagctggggtccgccatcgcacctggggccaggccgcagacctgcagctcctctctccccgcccctggagaacagagggtggggcctccccggaccccgcccccgccgaggcccgaggccccgcccccgcccgtcagtccgcgtgggccgcttctccaggcggtggcaacggccgcaaggctgcagcccccctcggagaagctcaggcggcgaggatgaagggctgggccgcctcccgggaggaacgctgcagctgcggcgggaggcaccgaggctcccggaactcccccggcgggcgcccctctctccatccccccaagcaccctctgggcatcgcggaagcgccaggccttgccaaggggcgttctgggccccgatctcggcctccgaggggcggccaacgggcggggagcgcgagccccgcggcccccaggcgcccctccccgccccgcgccctgcggagcccgctggcggccctcccggagttccctgggcgccagcgatcgcccgctgggccggacccgcgcggggtgcagggggcgctgagacaccccggcgccaccgacctccctaacggggctccgccagctcccccagccccccaacgcgcagtaaagggagctttcctaacctgaaaagcgaagccaagccgcctcacccgagcggagaccagcgcagccgggcaggcccgagacgcgtcacgcgcccgcggggcagcccccggcccctcctcactggggtcccgaccccgcccggccgggcacccttgcgcctgggacccgaggcccggggtcctcactcggcccccgcggctcccctgcccccgcccgcgttcctcccaccccgggcgtttacctgcctcggtcgtgaggagaggagaagctcgcggcgccgcggctgtcagcgactggctcggaggacaggcgacgcgcggggccgagggggagggacgcggggcggggaagggaagcggcggcgctcgcgggcggaggtcggcgcggggaccaattgccgcgcggcccggcgcacactctgtgcccccggcgggcggccggccgaggtttaagttaaagggtgcagcgctgccaagcagggccgggaatgagtcaccggaaaaaacgagttgagattcgcttgaacacttgcatcagttgataccgcctgcgggtgccatcgctccctgacgtggctcattgactgtaaaaatcatctttaattggaaattcggcccaaagctccagctccccgttacataatggagaaatcgagaaaatgaaaggctcaggaatgaggaagcaatttctggaactttggcaaccagaaatttctaaagaggagagcaaaaaattttgcttaacctggattgagattaatatttatgaattttcacataaactcttaaattttgaggcgtagaaaggacactgaccatcacctgttccttccttcattcactttctactccttgttttaggcaagagatgatttaggtggtgatattaacaaatgagaaaaatgcgctccgtttaaaaacccgtgtttgcacattacctgagatatcttctatgaaacagggtggtgtgttcttgcgcaggattcctgctgacaactgtctcattttaaaggagagcgaaggatgaagtgatagaaggacaggatttagagggagggggatcttataaattattacccaaattgggcacttttaaagtgaaatgggcgtaaaccaggcatgccctggggaaaataggacatctagtctcctagttttgggtgagaggtttaggaagcatgtaaggaaagagatttaagaatgttgacagccaggtgcagtggctcaggcctgtaatcccagcactttcagaggccaaggcaggaagattgcttgagctcaggagtttgagaccagagtgagcaacatagtgagaccccatttctacaaaaaataaaaaaaattgctgggaacggtggcacagtcctgtagtcccagctactggggaggctgagatgggaggattgcttgagcccaggaggtagaggctgcagtgagctttaattgtgccactgcactccagcctgggccacagggctataggccaagaccctgtctcactctttgtctctttacaaaaaaaaaaaaaaaagctgaggctgcattgtaaacatatgtgcatcaaatatttgcatctcaggaccaatcactgtcactcaagttgcaggggaggggtacaaatggcgagagacaggagaagccaggagaatgcacagaggagagctgctgtaaacagtgcctgggccatgtttatgtgagtgtgggtgagcacttgaaaggtctgctgggaaagggcaaccaggaggcctggaaagcgccgcctttggagggagctgactcagtgcaacagggaggactggattgtggccagttagaatgagcactaggcagcgaggccattttacaacctatcagtgttatgtaatgcttaggttgacatcgcattcagagccttacctcctttcctcagagatggctcactgggagatgaattcagcgggcagcacagtgtctctttgagtctcctagaggctcagggcctgcagggaggacagagctgggtgggaggacagagctggggtggggctggaagtaggtgaccagatcagcctaggcaaggggctggctgcccactggcagaaggcgctctgtgaagcttggttccaagacgctaaaacccatcttttcctcaaaagaattgtattttctggtcgactgctttcctcccatcaggaaagggctcaaatggcctgggatttcttggagggaaagaactagggaaccaaaggggattgacttatgacc

SEQ ID NO: 1562024 - DNA, 4001 bp, Homo sapiens
tcaagtccagagtctttagcctggcattcaaggctgctagagacctggcccctgctgccttttctggccgcttcccgctgcttatatatcaaactagttgggattcctcatgctgcctttggctgacacatgaatagcatgtcaggattgctctgcctccctttttctgcctggcgaagtttattcatgatttaagacccagctcagagactgggcgcggtggctcatgcctgtaatcccagtactttgggaggccgaggcgggcggatcacttgaggtcagggattcaagaccagcctggccaacatggcgaaaccccatctgtactaaaaatacaaatattagccaggcgtggtggtacatgcctgtagtcccagctactcaggaggctgaggcaggagaatcgcctgaacctgggagttggaggttacagttagctgaaattgtgccactgcattccagcctgggtgacagcacaagactccatctcaaaaaaaaaaaaaaaaaaaaaaaagaaaaaagaaagaaaagcaaagaaaaaaagacccagctcagttgccctcttcttggaaatttttttctgatgccccacgagacacagtgtgtctgtttcagtgatcccagaccaccatatattagtgtgtatctcacgggatactacctggctgtctccaaacacacacaggccacactggactcctctaggctatggaaccatgcttggtaatctctgcttcctacacccagaaaagaggctggcacagagttgatgcccagagcacatttggatgagtccggggttgtaaatctgtgtgtgtgagtgggtcctgtctgtgtttgcatttgagaagttgtgctttgtatctgcagatgtgaataagtatatttatggataaccctagacatggtccttaactactctgtgacccagtttcctcctcataaaatggagatagtaataatattacccacctttaggggtttgtgcaagttaaatgggtcaatacatgtattaaccatagtgagcactcattgaatactggttattatttgctgcctctctgagggggagactgaagttacggggattgtgagagaggggaaaggaggcccctgtgcaattataatggagggtaataactcccttttctgcttaaacagggccacttcagtagcctgatcgcccataagttctattaggcacagcatctctttctccccagttccaccagctgcgaccagtctccttccattttccctagcctcccctaacctctctctgccccactcttcccccacttcttccatcagttttcccagggtcttcccattccctccatttctcttctcttctgagcctcttcccgtctcccctagatgtacccctatctaccatcaccctcagttcccctttctcccctctccctggggctgattctcctaccctctctgctggtttctttctcatgtttccagtcatcctgtttcccctagcctctttcatctcccccttttcaggggcttaaatgtactaactcaccttggctttgggacacgaaccagtccccaagactctgcctgccctgtagagagatctagccagctgcagacacagatgctgtgagataagctctcctgtggtcttgccatgtgcccagatagactgagattctccagaaccatcctgaggcaggagatgtgcccccgactcaccatctgaggcgtcttggctacaaaaggcccagccagacagcagcagtatcggcagcaatgttgtcaacatcctgaagttgaggctccggacctgggttcctggctcgggccggctgcgggctccgctggctgcagtctagggaaaagagaagtgaggaccgtctgggaggggcggagtctgggcagaggaggatggaaggaggccaggagatgggaggaggaagaggcttataaagtgttatttctactgtgtctcatttcctactagggggccggcctccctcctgccctccctctgccccgcccttcattgctccctcctgcccagacctgccttttcccttctccttgggctgcttcctaggaaccaggaacagggagcggaaaagggggagaagggcttggtgagaagtcctgccggcgctgactcagggggtggggcatctactttcaacttagagcacactcctgggagtaggatcagcaggttgctgatggggagattgaggtccagagaggtgcagggacttgcccaaagtttatatatcatggtggtgacagatccaagattaaaatttagttttccagtataatggctacattttaccagaattttaagtaaataacaattacataatccgggatcttggtctcagaagtagtcataaaatgagtgtaaagcagttcactgcagcatgtttttaaaaaataggagagaattatgagcaatctgtataaatctcagaagatgattggttacctaaagcaatctttttgaaactgaggtcataatttattagtggacaatgaaatcaatttagcaggtcatggttaccatttttaaaaaatgaaataggacagaatacaaaatttcagcgcgtcacccttagtaagagaaagtgttatgtcatgaaatatttgctcagttgtatatgtgtgctttggttttgtgtgtgtatgtttctatgatgagttttggatagcagtgtaaaatgcgtcccttactctaggaagcaagtagaaaagctttaaagtcactcctccgagcatgctgctggcactttgggaggccgaggtgggcagatcacttgaggccaggagtttgagaccagcctggccaatatggcgaacgtctctacgaaaaatacaaaaattagctgggcatggtggtgcatgcctgtaatcccagctacttgggagaccgaggcatgagaatcgcttgaacctgggaggtggaggttgcagagggccgagatcacaccactgcattctagcctgggtcatgcggcaagattctgtctgaaaaaaaaaaagaaaagatttcacttctgttcaaataatacatatgtaatttcatcctcatatatatatataaaatttattattatttttttgagacagggtctagctctgttgcccaggctatagtgcagtgaagcaatcacagctaattgtaggcttgacctcccgggctcaagtgattctcccacctcaaccacccgagtagctgagactaaaggtacgtgccactgtgccaccacgcctagctatttttttttatttttactagagatgtggtctcgctatgttgcccaggctggtcttgaactcctgcactcaagcaatcctctggtataggcaggagccactgcacctggccaaaattaactttcagtgtgtatctgtgtatttgtatatacatagggaaaatatctggaggggtactgtcaatagagattacctctggggaataggattgggtaaaggactgagagggattttaactttttattttatatacttctccccggagagctgacgtcatagtgaaatctgggacaaactctggacataaactaagcacccattctctgaactgaatatatgcaagagcttccatgctcacctctcagctgttgcaaactggctaagaaatagcatcaaagtcttttctttttgcagcttatcaaaatggtctagttggaacaaggataggaactttgttttcctgcactgggcctcaggaaaagtagaatgacttaaataactaccaatttatattgtcttgccttttattaaaaattatgaaacatttcttttttctttttttttttcttttttttgagatggagtcttgctgtaatgcagtggcgtgatctcggctcactgcaacctccacctcccagattcaagcgattctcctgcctcagcctcccaagtagctgggattacagtcacctgccaccacacctggctaatttttgtatttttagtagagatgggatttc

SEQ ID NO: 1562025 - DNA, 4001 bp, Homo sapiens
gtgctgggattacagacgtgagccaccgcacccgggctgactttgtgtctttccatcaaatgatactttgcaccattttccctggagaattgtgtgcagttggttgataggtacacatttcataagggatggtttcagggctggtgagcctgagttgtagcaaaatcgtttttcctgcagaaattatgttatacaaaggaaggaggatgcttcctacacccgtctgtgtattttattactaaaatgaaaaatattaaactggctgaataaagagaaaaaatctaagcagcactgagaacaggggaaaaatttaagagttgaaaagatgaaaggaaaaaagatgactaagcagatcatcctaatgagcacagcttacaatggtggacagcaaccaagagaaggtgaccactgccccctcgaacagagccagtgatggcccgatgctggcctgcaactgttcacataaacaaaatgtgtgtaagatttgtcataaactgctattatacattttactttataaatttaaaatagagcaagggctggtgacgaggaataagttctagtgttctacaggtctatagggtgaatataattaccacaatttattatataatttccaaatagccagaagagtggattttgaatgtttccaacacaaagaaatgataaacatttgaggtgatggatatgctaattaccttggttgatcattacacattgtatacatacatgcatagaaatatcactctgtatgccattaagtatttacaattattatgtgtcaattaaaaataataaaagcaaaaaataaaataataaatacataaaggaaaggaaaaaataaaatagagcaaggacttctggaaatatctcatgcaaatgtatgcaaatgagcacaccaacatatgcagaaaagcaaaagcaagcgtgtcctttcctcttttgcacaaacaaaccctgttatcttattttaaaatgagctctgcaacaaagtctatcagaaacaacagcacatacgttatgtttttttatgacattaaagaacaggtgaaactgaactgtaatgatagaaatcagattggtggttgcctggtgggggaggattgactggtgaggagcacagaaggttctctagctgatggaaatgtttcacatctccacctggagggtggctacaggaaaagcctagtacatgttttcctgactggaagctgccctagttaactctcatgtggcttctaggtagtagctgcctgccctttctgctttccctttgtgttggtgccacatactgtcatgtggcatgcctgtatctgaagcacatgtggtatctgggggcatggcccagagatgggccactcagcagccccagtcttgctcacatctgggggaacagaactcaactggagaaacaagacctcctcttgccctccaaagattggtgagcattcctatctggagcaatgtcagcctgtcagagcctaaatgaggaaagagacagcctggcccagccccaccactcaccccacccaccatcctcacctgtcaatggcaatggccagcaaggcattggtggagacgtagagggagacggtgcgcaggtagttgacggaggcacagagcacgtggccatgctcccaggagagctgccgtaccacgtagtagtccatctcgaaggggcagcagatgatggccaccaggaagtcggagatggccaggttggcaatgagcagattggtgaggttgcgcaacttcttatagcgggtgagggcagcgataaagacaaagttaccgatgccgcagaccagcatgatgcctgccagtgcaatgccaatgacgatcttggctgcgaagaaggtccgggtcttggtcatgtcctcatcctcatccatagggaggtcataatcaccataactgaagttaaaggagagggaggaggcatggtcttggggtggattaaagttgggtgtgaaactggtgtttccattctgggctgccatggtgatgtctgcaagaaaagtggtgtgagggaggtgcgaggggtgagggtccagaccttctgctctttcagggtcagtgagcctagcaccctgcccacatccttggggagagttgactcaccgtcctggatcctggaaggaggcacaaccagtgggcaacatgcaggagaacatctggtcacattccctgagttccccaagtataggccaaccagacccactgcctaaccagatggaactacccgggatgcggggagaggagacctgagatctgtaagttgggaaaccctccgtggctgcccagctgtcaggaaggacagcataggatggatcagactgtccagaactctcaagaagaatgtgcacctttgccctttgcccaggggccagggcctctttgtctgcccagtcacatcctccagcccccaacacatcagctcccacaggggcttctggaacatttccaaggatgctcccatgagctggccaggctcctacagctgtcacaacgttgtggcacctgttggccagggacaatgaagcaggagggccaggatgctgcggggtcttctctccaaagcaggacaccactccttctgtactgaccaagccatagacttggaaatcaccaagttcactttcacatggacagactgagtcaccctgggccagtgatttatgctctctgagtcctaatcttcctgtaaaccaaattcctgctgcccagtccagtgcctggtgcatagtgggggctagacagacatctgttgagtgcatgaccagggcgctgtaggtggaggaggtggtggtggggtgggggaggggaattcccctgctgctccccgttctgtgggaaccagctccagaaagaaatcctctgccgcccttcccaccctactccaactttggatctgctctctgacctccttcacttggccctagttctccacccagagtcaaccctgcctgaaaggcaccatgtcctgtcaccaaggtctcaaaatagggaaaatagtctctgaagccctcagcccgcaggagatagggcaccccagggtacaaggcttcaccgaggggctggaaaaagagcccagatcccaacacctatagaaaggggccctggctgtccagctgtgagtggccttcccctcgcctctcagcacacctggaaacgactccacatgtgggcgccgcgggatgctgggtagcaaggagatgacccagctgaacaatgcatttggtccactcctgcgaggggaggagaacgccgagggacaggaactgcgcgccagcaaaagacaccctaacctggggtgcgcccgccagctgctttcccaaggtgaaaacctccaagaggcgagatgcaaatcccagtggcgtccacacccggaggtgtcttctctccaggtcgcccctccgtctcatgcgacaccccaatccccgcagcctctgctcagcgtgggaccaagaatggggagtcctacccctcctcggctttccagccccctaacccaagacaagagggcgcgcgcccgggctgggacaggtcccagccgcattttcgtagattgcactccccgcccgggagcgacccgttccagcagcccccttcccgccccatcaacgcggccgcactgtcggcgtctagaggcgacatcctggcaaagacaggaatcaagtcagaaattcaggctctagaagcaaaggctgcggtgcctcctggctggaagaaaacggcgggtgggtggaggatgcggtgcgcgggaatttccccacggacgcttgctgtttcctgctcacctttcaggaaggtgcccctctacctgcaccctcccctgcaatttggagctcgtccgcgagctcagctacccgctggctccctctgcccgcgcccgcacaccacagactccgcttaccgtaccctacccggtcctagagggcccagaggggatctcctgaaaccaactcgcctgcttggagccagccccgacgcatatctcg

SEQ ID NO: 1562026 - DNA, 4001 bp, Homo sapiens
caatgtctgaccgcgtggtgaagccagtggcgctgcaggagacccccaagacaccgggtgtctgaataactctgttcctgtgctcttctccactcctggttatcacttactaacacctctttttctaacacctttgggaaacctccaaagatcctggtgacaatgaactgcagtctcaaacacttctgatcttctctgcttacctgaaagtttcagcctaccctgatgatgttaccaaggcaatctctctccaccctaaggcttcgatcatctccccctccacatccaaccaggcccttaaacccaacttggcccacactgagctcttccgtgcccaccttacagctgctctggggggtttcagctgataacagctgtcccagatgccacgggaccatgatgtaatttttgcctccctctcccactttccccatcctgtctgtccccaagtactaatgaatccactttcaaaatccctccttcccagactatgactcccatcacagctggaaaccaagttacctctccctgcctttagccttcctctacttcaacccatgctctgccagatgattcttcccaaaacacagctctgagtaaaaaattctgggccgggcgtggtggctcacgcctgtaatcccagcactttgggagacggaggcgggtggatcatgaggtcaggagttcaagacccccctggccaacatggtgaaaccctgtctctactaaaaatacaaaaattagccgggcgtggtagcgggcacctataatcccagctactcaggaggctgaggcagagaactgcttgaacccggggggcagagattgcagggagctgagatcgcaccattgcactccagcttgggcgacagaacaagactttgtctcaaaaaataataataataataataattctgaagggtcatgatctttctaacgtctccaggagctctagcctgacgctcaaggcccctccaacctcctgagctctattctattcgctgtacattccactcacactggactccctcctgttccctgggcttcctccttgcctcactttttttgaactcccacacgcagaatgtcagtttctcttctatcgtcaccgtttctacagccctaagtccagctctcttactaaacttggctccaatgctactctccattaagcactgggttctaaatctggtcctctttacgtacttatttatggtaatagcaaaccctccttagtgagcttgtgtgtgccccacagattccaatataataccaccaccaagaaaaacccagtagtgttcctcatcaaatgaatagccaaataggataataacgactgctcacttatccagcaacgcacggtggtcatctgtgttgcaggcatagaggacccaggcacgcttaaggcggggcgggcgggcgggcggggggggggagtgtcagcccgacctgaggaaggtggtcgcgtgtttccactacacgtcagattcctctactcctcactgcagaccgtatacagcattacccatcttacagaccaaaacactgggctgagagtcaatgtgtcacatctaggcggcaagcagggtgcacacacaggtatgtcctgaccccaaagcccgttgcttcctgcagggattaagccgatccaccaagcgtctttcagactgcgcggccatagacccccgcccccaaacacgccccaaagcactgcgctcctgtagccgggtccccgcccctcgcgcgccgccccaggcctcacccccggcccagccccggcacgtagccgaggggcgcgggcatccctaggaacggtttcttcttcttgttcatggtggcggcgacgaccaaggctaggaaggaaaggaatgaggcagcggaagagggaaagacgcagagactctaggcttcgacgtccgatgcactccgtagcaaagtgtcgccgtcgtcgcgtcacccgcgccccggaagcagagcgctcagtccgcacacgccccgcccacttttgattccctgggcggaagtcccgacgtcctggttcgacgacttccggccgcggctagggggcaggaacgtggtaggcgcgtgcgcgggagcgcctcctcgtggagaggcggaagaagctaggtcgagcttgcactgggaccctaactggcccctgggggctaaaaacagcctggggcattgctgcttcccgagtgctctgatgcagtccggagacctgtctgtgagagtgggacccatggtcccctccctctgaacccatggccccctccctctgaaccagcccagctgcccgccctcgcccctggtgcgccctgtccgagcagagctgtaccctgtccagttgtgtagagcttgtgtgtactggttatgggcacacctgtctgtgtgcgtcctgtgcgcacactgctgccctacgcttttagcactcatattcttgaacccccattcaggcatctgtccctccagtgggactagagaccccacccacgcccgccaacatgccttggacattctggtgagggccacatccttagctcctggagagctaattgacgaaataaataaccgcagctgagctgtcgggaacacgtcagtacatgaacatggctgtcaagcatgtgggtgaattctgtgtgtgtgattagtggggtgtgtgcacagaggtcacgtgtgctcgtgttttgggtgcaagtgcatgactgtactctgtgcatgcatttctacatgtctgtgtgcatctctggtcctcctgctgtaagacatcctccagagcccctacatacacccagggagagcacccaggctcctgggcagagcaagccgaatagctggttgcaagcctggcctgctgctgcaccaggcaaccacagttccctagcccagccccatctcagcacttctcactggagtcctggagcaaacacaccgctccggcctgctacagcctccttggagttcccctctgccccatctccaggcaagccaagcccctttcagttacagagcactgtaccgccccctctcccccgggcactgagccaggttctggggctgcagagggaagggagaaccaccctgatgttcacagtggggtgggcggtaagcaagagtcaagctggtttctccggggaagcgggtgcctatttgaaggcgagtaaagacgtaggagaccgaggaaagtgtgtgggaggcgttgacctgccccttgtcctggccccggtaggtagaagacccctgtgagatgcccctcagcccacccccacgcacagaggggcccgacctcagaggacgcccggcaggttcacggggactctcctccgcggagccgtgcccaggggcgcacggacgcccctcgccctggcggacagccttggtgcacgcaggcccgcgcgccgccgacacacctcggagctcccggagcgcgcccggcacacagggctcggcggcaggtgcctcgtcgcgcacactcgcgggccgcggggaccggctcgggcgcggggccggctggggcggggcggggcggcggcgcgcgttccccgccggccacaccggccgccctgcactcggcgaggggcgtgtgcgcgggcctggcacccgcgggccccatgttcaccgagctgaggtccaagctgagccccccgcgtggccgcgccggggccgtgcgcgcgggcttcggggagcgccgggatgtggacggtgagcggggctggattggggagcggggatttctcgggcgggggtctcagggacccagaggcacgggggcggggcgggacccggcgggcttcgagcggcggtggctgggggtattcggcggatgtctcggctcaacggggtcccgtagcctttgtcctgctttagggggcagccagcctcaggccttgggggtcagcgcgcccttggcttggggtgagggggtgtcaagccggggcgcctgtgtccaggctggcactacgctcgggtcaccttttcctgcgcacggggaaaaccctccc

SEQ ID NO: 1562027 - DNA, 4001 bp, Homo sapiens
atctactgctggtagagctagcccaggcgtgctcacctaggtgcccaacctgggcctttcaaatactgagatgtagttttagttacaacatagctagtaagtaaccattatataatcggcatgtgtttcctttcaacccaatgaatcagtcccatgcaaagcctggaagcctgagactttcactcaagtctggtgttctgaaggcagtgtttctgtagttgtgaaattatattgagccacaatgcactgtttcctgcactgtgacatactcatgtgacagccatgagaaggggcctgatttgccgtcagtggacaaggtgtcaagtgttatcccaaactgtttatggctgatgctggagaaggatatggctgttattaaaagcatgaacaatcactgacagtcaacccgagtcaagccagaaacaaagggaaccatcattgggataaacagcgcctcctggtttagagcagggcttctccagctcagcactgtgagcacctgggcagggggatctccctgtgcctgccgccctgagcacgggtgggatattgagcagcgtccctggcctctaccctccaaatgccaagagcacctctgcaaggtcttaccactggaaaagtctccacacactgccagtggctccgtgtgggcccaaaaccatccctggctgagaagtattgatctgaagtgtttgggttttctgggagctttctcaggtactgactcacttgaccttcgactgactcgaggcccagagaagctatatgggttcgttaaagccagcggcggccagctggcgggggtggcagtattggggtgggtacaggggtcagccgactcctagtcctctttaagctgagttagatcacctgatgaatactgggccttcatttcaaaacaaagattcagaaaatgaaaacaaatcaaaatttacagaaccgtgtgtgctgctttctctgcctgctcaaacctctgaataccagatgataaaagaataacgatctcacagactgaccaattaaactgacacgtcttgatggtacgaatttaagtttcaaacaatgtcactaaggtcaatgtacacgagccctcgtcaaaacgaaacggccgcgtccaaaccagtcctgacccgggcggctgcagcccggccccgggaaggctcctcccggcagagtgcggagacctgggaggcgcccgccaccggccaggccagcgagccgctttgttctcgaagcccacctgggcctagagaataagtgttgccccggagcgggtgggggtccccataaggggggtttgagtagttcgctccccagccacccggctgcgtgaacagccccccagcgagcgcacggcctaccccccgcgctccgcggcccagagcggccctcgcccggcctctgctcgccggggcggcggcgcgacccacgcgcccggccggggccaggggtgctcaagatggcgtcgtcacggcccccgtgcccggggccccacgcgaggccgggccccaagcgaggcgctgagtggggagaacgagcgctcgcggctcacgccaaacgccgcctctgcaggcactcgtggagaccggcagcggggcccgcgctcagctacagccctgaccgcccgcgccgctgccccgcgcacgcccgcgggcgcccacagcgccgcgcccggccccggccctctctgggctccccagccccacttccgcccgcgtccccggccccgcgcaggccccgccgcctcaccgcggtcgagcccttcttgacggcctcctgcgcgtactccacttggaagaggtggccgtcgggcgagaagacggtgatggcgcggtcgtagctcatgccggcgggcggcggccgggctccttccgccgcgactctcaaaagcgcacactcacggcccgcgcgcacccgcgactcccggcgccactacgcccgcgccccaccctcggcgccgtgtcctgcgctgccggcgacgggcggcgtcaggcggcgacgggcagcgtcaggcggcgtcgggcggacgtgatggcgcgcgccggggcggggtcaggccgaaccaccggtggccgggggtgggaggcggtgctccggcgagggccgggcgctgggtgcgagggggtcgccgggggccaccgttcggcactgggccgcagaccgttctgcagggcggagcggcggcgccgcgggcccggaggcgcggcgacggcgacggggcggacgagcccacgacgcggcgccccccgcgctcccgcccccttccccccctccgcgactgcggataatgagcgcctcgggccgcccagcgcagccggagtatccacctcgatgaccacgggctgagccccgcgccgccaccatgtccgtggccttcgcgtctgcccggccaagaggcaaaggggaggttacgcagcaaaccatccagaaggtgggccgggccggagcggcggcgctgggcggcgggtctgcgggcgggcgcgcgcggggacggggcgcgggcagctggcgggcgcggggcgcgaacaaagccggggcgcagccgggcggccgcgagccccgacggcggccccgtgcccttccccgcgtcccacgcctgcgcgccggcgggcacccggccgtgtggggggcggtccccggagagcctgcgccaactttgttggggcgcgcgggtccctcgggccggggcactgggcggtgggggccgggcggacgctggaggctgccggcccccgagcgcgctgtcccccgagtccgcggcgcgcgctgggaactgtcctgggctatgccgggcgcacggggacccctcggggccggagccgcggcgagggcttgtcgcgctccgcagccagcttcggtggcgacggcgggcggtactcgttttctgcgctcattttggttagtggtgaggggcccgggtcggcctccgggcgcacttgcgaccgcggggactgtggccggggctgcccctcttgctcctggagcgaggcgcgaacgatggaggcacggaaggacgcgtcccgatccccatttgcggggcatcgttacgcagcccggccccgtagggagcgcaccgccccctccgtatcctcgcggctacgccgggtttcagcgtgacaccctcgccagccgcctcgcctaacaaacttgacggatttgctccacaacctttcttctagctccgtaagttcggccttgtggttttcaagagacagcgtttatgtgggtttgggacaccgttatccaaagccctaagttttgaaattgagactttgtattttctgctgttttttctgtagaagacagattcggaagaaaatcagcattagccatacccgtttcagttgtcacaacatctgttggaatgacattggttttttttcctaaactctgactccgtcttcaccctggtgggattgcagggataaacagtggtattcctaggttcccaggagccgcttgtctccctaagggggttcaccttgaccttgactgaggctgttattccttgatgacgtgccagtctcctgtggaagttgtcctaaatctatcgcctattttgagactacctttgctgttgctagttttagaaatttgatggtcttaacaaatgagaaccttggccaactctgaacaggagagattgagaatagcagaaatacagatttacaagtgtggcattttaatttacttagtaaacacttatgtggcgcttaccgtatcccagacactgttctaggggttttataaatcttgattcatccaattcttcatagaagctactggcatcccgtttaatagctaaagaggctgcggcctagggaggccgtgccttgctggtaagtggacactgaggcctaggggggctaaatgccttgctggtaagtggcacagccaggtgtcgatcccatacggtggctccagggtctgctctgttggtgccccttgatctgggaacatttggccaggcggaggtcaagctctaggctcagaggcaaatg

SEQ ID NO: 1562028 - DNA, 4001 bp, Homo sapiens
tgaagagctgcttaagattaaaaagctggagtaagacaagtggggagacaagatttctgttaggggaactatgcattgaaagaggggcctgacgctgaaatgggggtgctgtctctacctggtcccaaggtctgaaatgctggaagacatttggaaggtatgtggaatgaagagcagcacaaagagaaaggtcagggacagatgtgtttgggaaggtgaaatgattcctgcttccaggtatgtgtgtgtgaaaggctagctgttcttttccatcctcatatctagtcttagagcccatttgagagatgaagtatgtgtgagtttggaggtgggaatggggatcctgagtgtgtacctggggtcccagtgagataattgaggtctggggaaaaaaagagccagaaatccctgacggttcttgtgttctgattcctgctggagggggtaaagtgtgagaggggtatggtggtcttggtctttagttctaagagacagagaggaatagggacagcagtgaggggtgggggaaaggggatacttgtctaagtgctcagaatgtacaaagcaagtttgaagagaggtccctaaagctatgtcaggaggggagaattaagactctatttgagaagctaaaaaaaatgattagaggagttgagaactgaagcagtcaaaaaggagaggaagggtgaaatctcatggcaagatgcaataggtggggtggtctgtttcccatggctagtcttggttctgagagtgagagaacagtgacagtgaggggcaggcatggaggcaggcccacttctcccaggaagcagatgtctaggatgatgtggatgttggggatgagggtcacagggaagagacaggaaagaaagaagaatgccagagcaaagaattagtgaggtgggttgggtccagcagtcctagaactctgtggggatgacaacgacgtccctagctgtaagaggtggagcctggggatgggagaagaggggctggccctatggggacaactatgaggagaaaatcttatatgaccctcacacccagggtgtatgtgtgtacgactctgggggtgattgcttcctagagcttgagttggggatggcagtagcgagtggactatgctgggcccttcagtaaagggtgaaaggcgtgtgaactctctgggcccatgctaacgggtgaaaaaagggccctggcctggggctgagtaggtcaaagctcactcctgtacctgtgcttggatccagatgtttggtggaggctctactgtggtatgagggcggaactgagtcagtcccctcaccccgaggctgggtggtaaggagttcagacgggatcaggtgggtgagaagtgctctggggagctaaactcctgtctagattctttgccattctatggaatgctagatccacacagtcctggcctgagaggctgccaggctgtgttgaagcgagtgtccgcccttgagtttacaaatcatgttgtgccagctgtgccgtgagggactctgggctgggatggggcaggtgagcaacctccgacccgcaggttttaccaacgctgccatctgccccagaccctgcactgggagaagcggggaaatcgggcgctctggaccaggcctccggtactctgagtttgggcagaagacagttccctcctccaccctggccggctccgtggcgtacctggtcaccgacacccaagccgaagtaaccgtgtgtcaccacttcccaatgcaagaagcagacgagcgcgtcctgcctgcaggtgatggccggcgctgccgatgcgaacagtacctccaggcccgccatgagcgcccgcgacttcggcgtctggaggaaagaagggggcgggggtagtgcagtgagccggctccgcggccggggtagctataactctgcttccctcttgcgctggttcttgccgagtccacacctgagaccaaaatggagacgcccggggacggggcggggcggggaagccggaagtagtcccaacagcgggcgcaactgcgtgaggcgcgccgggttggcaacgcgagcgcagcactgaaaggttccgccagggagtgcgagcggggcgtggcccctcaaagccggaagccgggtcttggcggcagtcgacaggatcgcctgacgcgggcacagcgtcctccaagaggccaccttgctgagaggcagacttcccatccacaaaatggggtatgctaggccggggaaggggctgggaaatgtggctaaaatacattcttaataatcgttaacacgttcgccgtgcttgctaccgtccacattattctaaacgctttacttgtattcatttatttaatcttcacaacccaactctatgcagttgatattaacgattaatgtgcctcattgcacagatgaggaaactgaggcgcagagggataatttgaccaagatgacaacagccagccggtgaacggctgaaatggttatgggaacctggcagtctggcttctaagataacatttattaagtgtttattgtgtgctacatcgtgcgctaaaacctttacatcaccctctcaacaactctatgaagtatggaccgttattatccccattttgcagatgacaaaacggctcagagttgaaaccacttctccaaggagacacaactgctgcccgcagagctgaagctcctgacccactatcaaatttcaatcatttatttgcctaccccctttatgatttttaccacccgttacttcaacaagtttcatgaaatccacttattgtttttacccaaataaatttagtttccccatcccagtcactaacctggttcaagctcctgtcatctttcacttggatgcctggcatcagcctcagaactgccccattccattcctgtctctctctagtctgtactgcactccgcaaccagagagattctgttagaaaacaagtcagatcggccaggtgtggcggctcatgcctgtaatcccagcactttgtgaggccgaggcaggcggatcacttgaggtcaggagtttgagaccagcctggccaacatggtgaaaccctgtctctactaaaaatacaaaaattagctgggtgtggtggcgcacgcctttagtcccaggtactcgggaggctgaggcatgagaatcaatcgaacccgggaggtggaggtggaggttgcagtgagccaagatcgcaccattgcacttcagcctgggcaacagagcgatcttctgtctcaaaaaagaaaaaaaaaaaaaaagaaaagtcagatcacatccgttggctcaaaatcgtcacactcaatggaaaagtaaagtcctccccatggtctgcaggaatctgcatgtggtctgccatctcctgccccagccctgccagccctgtacctctctgattcagtctccttcaactgtcctctcatcccctttatacgtgcaataaccttggctccccctcttctctcacatctacatctggtccaacagcaaagctagttgactccactctcaaaatatattatgaatctgaccacttcccatcaccttcactgcttccactctggtctgatcctccagcatctcacacttagactattgcagtagcttcccagccagtttccctgtttcatgtgttctgtttgggcctttgcgttcctcttcctggaatgctcttttcccagatatctgcatgtcttgcttcttcatttcaagtggcttcatccctcactcctaccatcctcaacagagggcttcccagaccattccatccaaaataaccttctcccgtctttaatccctctctggctttttttttttcctgcaaagcattaatcataacctgaaactatgttaggtgtttatttctttgcttatttaatgactgtctttccactagactgtgacaaaggaacagggagcatgtctaccttgtgcacatatgtacctgagtgccttctgggatcaatctatacttattgaaagacagaatgaatactga

SEQ ID NO: 1562029 - DNA, 4001 bp, Homo sapiens
ctggtttgcatacagttggttgtagctggcatcttacagggcagacagctccgtcacccccaccccgtggttcaacactgctttgcatacagttggttgtagctggcatcttacagggcagacagctccgtcacccccaccccttggttcaacactggtttgcatacagttggttgtagctggcatcttacagggcagacagctccatcacccccaccccttggttcaacactggtttgcatacagttggttgtagctggcatcttacagggcagacagctccgtcacccccaccccttggttcaacactggtttgcatacagttggttgtagctggcatcttacagggcagacagctccgtcacccccaccccttggttcaacactggtttgcatacagttggttgtagctggcatcttacagggcagacagctccgtcacccccaccccttggttcaacactgctttgcatacagttggttgtagctggcatcttacagggcagacaggtccgtcacccccaccccttgacactggtttgcatacagttggttgtagctggcatcttacagggcagacagctccgtcacccccaccccttggttcaacactggtttgcatacagttggttgtagctggcatcttacagggcagacagctccgtcacccccaccccttggttcaacactggtttgcatacagttggttgtagctggcatcttacagggcagacagctccgtcacccccaccccttggttcaacactgctttgcatacagttggttgtagctggcatcttacagaacactggttccctcttctacaccatcatccctgtcttaacatgtattctctcagaagcccgtggtgagacagggatttgagtggtttatttgggagctgattccaggaaatagcggtgggggcagtggagtagggaagtgagacaggaaggaaagggagccagcagagggagtgtgatgaagccagttacctctacgggcaactggaccgcactcctacccgggaactctgggaggcagtgtggggcatgtctcagagctattgcatttgagggcatctgccacaggctgagagctgcttctggggtcctggaaggccctcaggcacagagttgcataatttagagaaagcagtctttgcgtctagaggtgactgctgaagggtgatgagggtgttgtagtgcgatctgctctgtcctcccacacccctgaccgggggtaagccatgccttagaaagtccgtaacccaggccgggcgcggtggctcacgcctgtaatcccagcactttgggaggctgaggcgggcggatcacgaggtcaggacatcgagaccatcctggctaacacagtgaaaccccgtctctactaaaaatacaaaaaattagccgggcgtggtggcgggcacctgtagttccagctactcggaggctgaggcaggagaatggcgtgaacccgagaggcagagcttgcagtaagctgagatcgcgccactgcactccaacctgggcgacagagcgagacgccgtctcaaaaaaaccaaaaaacaaaaaaaaagaagaagaagaaagtatgtaacccagcagccagcatggaataggcactggcatcagtgtattgaaagaatgaggtgagctctatctcttgcactaggctgtgaatcccctgaaggccaggactatgttccacctgtcctgaaccccagggtcctccagggatgggaacaaatgggaggaactcctggggctggtgtgtgtgtgtgtgtgtgtgtgtgtgtgtgtgtgtgtgtgtgtgtgttgcccctgatccatccagcactttctgtggacttacctacatcagcaagagtcccattctgccctatgagggctgtgggtggctgagaagggaagcaggtggcaggtgcctccctgtctgggcccccactaccaagagcctatgccagaggtgagggcccaggatgatggaaagaacttggctggtggctgcagccaccagttcctggttgccaagtgacagcaatgtgggtattccaagctccctgcctccctggaaaccatgaagaactgaaccaaggggcagcgcctagatgggcactgaggcgaaatcgttcactactgtaattcttctttggcctagcatcagcccaaccgtatcacctcctccaggaagccctctatgattaatattgttctttgtttctaccaagtagctgatatccaagacttcccaacttcccattccccttgtccgtggggtacctagcatatttgacacccatagcagatatctcttttttttaaaaaaatgataatttttaggctgggcatagtggctcatgcctgtaatcccagcaccttgggaggcgggcggatcacaaggtcaggagatcgagaccatcctagctaacacggtgaaaccctgtctctactaaaaatacaaaaaaattagccagccgtggtggcaggcacctgtagtcccagctactcgggcagctgaggcaggagaatggtgtgaacccaggagacagagcttgcagtgagccgagatcatgcagctgcactctagcctgggcgacagagcgagactccgtctcaaaaaaaaataaaataaaatatatattttttgtaactctgttagttttttgaagttttttattgtggtaaaatacacatagcataaaattgatcatcgtaatcactttaggtctacagtttagtgatattaaccacactgttttccacggaggctgcaccattttacattcccaccaacagtgcacaagcgttccaatttgtccaccttctcagcaacacttgttattttatgtttgttttgttttgttttcatagtagccatttagccattctaatgagtatgaggtggtatcttttattttttaaatagagatggggtttcgccatgttgccaaggctggtcttaaactcctgagctcaagcaatccacccgtctcagcctcccaagtgctgggattacagccgtgagctaccatgcccagccagtggtatcttattataattttggtttgcatttccctaatgattagggatgctgagcaacttttgatgtacttattggccttttgtatgacttaggagaatgtttgttcaagtcctttacccattttttaactgagttgttgggtttttgttgttcaattttaggtgttctctgtatattttggatattattcccttatcagatatacgatttgtaaatattttctgcctttttgtgaattgccttttactctgttgatagtgtctattgatgcacaaaagcttttaattttcataaagttcaatttgcctgattttccttttgttgcctgtgcctttgatgtcacatccaagaaatcactgccaaatccagtgttgtgaagaatttgccctacattttcttccaagagttttatatttttacgtcttacattcaggtctttgatccatcttgagttcatttttatgtgtggtgtgaaggagaggtccagcttcattctttttatatgaatatccagtttccccagcatcattggttgaaaaggctgttctttccctattgaatggtcttggtgtctttgttgaaaatcatttggccatacatgtgaaggttcatttctgggctctctattctgttccattggtctatatgtctgtctttatgccagtaccataatgttttgattatgtagctttgtagtaagttttgaaatcaggaagtatgaggatgtcaatgaagcagatcactttttaacacctccctcctcatctatgaaattattttcagcaataaccacatgataatcagtaaaaattattatttccctgattcattcttcaatgaaaaaatatatatgatttttttttgagacagagtgttgctctatcacccaggctggagtacagtagcacgatctcggctcactgcaacctccgcctcctgggttcaagagattctcc

SEQ ID NO: 1562030 - DNA, 4001 bp, Homo sapiens
ggtgagccgagatcgtgccattgcactccagcctgggcaacaagagggaagatccatctcaaacaaacaaacaaacaaaaaaagagcccataacgtattcacatgatggaagactccagagaggatcaaaagaatggattcgatctccttgtagcaaaaagatctgcttgtagcaaaaagaacagatgtcaaaactaaaatctggagtgaaaagagcaagcaacataatgtctgaaaacatttctatacagtgtattgagaaagcctgacaggaaaaataattcatttcttccctgagacatttattcactgtctttttcttttcttgttttaaggcaaatgattgactacacagttgtaaatttcagctgaaaagatgtctggaggttgaagaaaaatacagtgagcttattgtttgaaaattcaactaccatattgtttaaaaatcaaaaagttcccaaggtttccggaattttcagacacgaatgtaaactaactctctcttacgtggctctgtattagctacaagctcatgtctatgtatgtaagagtaatttttatgtaagagtaatttttaaaacatctgggagactgaggaggtatgaaaactaaaggcaatgtggtaacttggggccggatcctggaacaaaagaggacagtaatgggaaactggataaaatcccgtgaagtttgaagtttagttaagagtaacggaccagtgttggtttttagtggcgacaaatgtcccataacaatgtaagatgttaacaatagggaaaacggggtgagagaaatacaggaactttttgtactatctttgcaactttctgtaaatcccaaactagtctcaaataaaaagtatatttttttaaatatggaaggttctacccagactcagcaacaggagaggcccagagagggagagaggactagacttcaggggctgggggagggttaaggggcttcggtcttacctataacaggataaatatttgtgttaagtcgaatgtattcagctattccttatgcaattcaagttaacttaaaaaatattttatgaaaaggagagctacagctatctccttgatttgaggctgtctttactttttctcctaaatcacagatgctcaatggagctggaaaacctttgggaccaggaggctgtgacatctgaccctggctccgttctgtccaggctgtgggacctcaggggaaggtagagacttcataggcctcagtttctccctggcaaatgaaattactaagcccaccgacccccgtcttccagacggggaatcccggggtgggtggttccagggcatgatcaagacatcccccaggggctctacactccgctggctcaacactcccatctgtgtaatgggttgaggagcgaggctatccctataggactgccgaaagcaaggcagggtttgacagcgcgtaggtgggtgccaggtgcaggcagaggctggagagtggagagcgcttcttccacccgggccacgcagaggctgtccccgcacggctccccacccacaaaccctcggtcctcacctgaaaccccctcctaggtccctgccgtcgcgctaagggccagactcggacttgtcgcggtgggcgattcgccccgggggacctaccggaccccgcaccttcccaccttgcaccttcttggcagggggagcacggcctggccccctcacccacgtgcggggccccgggactcccacctccgagggtctcgccttgcccgggatactggagcgggactcgggccgggccggccgcgggctccgagacccttgggctgcagcccgggcgggagccgccccctttgtctggcggggccgagcggagcaggacactcaccgcgtgcggcggcggctcagtagcagcagcagcaacagtgcggccaggaggccgaggagcgcggcccaagccatcgcggggctggcggggctggcggggctggcggggctggcggcctggcccactcccaggtaaagttccccgcccccacccggcgcgcccctcccactccgcccaccccagcccgctttggggcggggtggggggggtgggggatggggccctccgaggtccgcaggggtcggaccggggcgctctgttagaaaccctgctccccccagctcaggcctgatggaaaatgtgggagggaggggaggggagaaggagggggagggggagggggcggaagggatgtggtgggctggggagtgatcaaggggaaaggagatagatgggggactgagggggatgtggtggactggggggtgatggaagggaggggagagggagaggatttacaggaaggaagagattatatgcggggagggaagagggatggggaagatgggagaggacttttggggaagggaagaggagggaatgtgggaagacggcgggacgatggggaaacagccaaggaggtatggggaggagggggcacagtgggaggagaaaatgtggtgggaggggacgaacatggaggaggagtgtaagggggtcaggaggagctttcccaccacattccacattccacctagacagaggaaaccccccaaggctcctcctcaccccatcccccaccccaggcgtgctggggacctggagttttccattctgtggtctgggctgggagggctggtctggattatatcgcaccctatagtatcttcagtaactactgggcagggggtacaagggtgtctcagggagtcccctcatcctcacctgctttggggacagatagtgcccgtgaagtatgcaccctctacctggtgcacgttagggcctccggatgtggtggccattgtcatcgctacctggtgcttggggtgccagccccctgtgcccgcggctctgcaatgtaccaccccagggtgctgatgagaactgggggtcaatccagcctcactccacgcccctgcccccaccatccccattcccaccctgggaagcgttgggcaggtagctcaacctctctgagctcacctcattatctggaaacagggagggcagagttgtgcttacctctggggctgttgtgaggaagtgatgagagcttgacactaaaaggaatcacaaactgttgagtgcttggcacactaagttttatgaaaccatgggctgaacctggaggtaagacccaggaggtcttgttctagtcctgtatccacccattcagtgccgggtgagcttaggcacgtttcattccatagtcccagcagagctctggagaagctgttgctcctcctggtctcctggcttccatccttatcagccagggtcctgacaaggcccttcgagaaccagcatgatccgccccttctcacctttacctgcctgaccctatgcccccgactctctccctcacccactctgctccagccacactgatctccccatctttccctagaggtcccactgcagggcctttgcacgtgctgttccctctgttcggagcattcttcgcacagcctgctctttccaccacctccccggtgcctctatctctgctcagctgtcactgcagagaagctgtctttggccacctggtctaaaacagtcatctcctcttactgatttttgtttctttgtttttttgatagtttttttttctggcagtacttcacatgtcctgctatcatactcaagattcattcatttgcctgcttaatgttggctgtcgaggcagctggatgacccccttgtggcctcagcagattcagaacagcaggaggcaaaaggagttttctgatcctcttgtttatttttccagcttatctgccagagaagccaacaatcccaagaaggccatagaacgggtccagaggattttctccaaatttggggagctccaaagggctgtctgctagcagtggggttcacagctgggcttggccgatcctcagctttgtgaccccaagcagactgctccacctccctaagctgaggttcctcattgacagaatggg

SEQ ID NO: 1562031 - DNA, 4001 bp, Homo sapiens
agagctgcctgcacacacccatgtgtgacgcacgctcacacacacacagtcacaaacccccacacatgcgcacagttcacccgcacacctgaacacacacgcgcatgtgtgctcacttgcccacacgctcacacgcacgcacacacagccactcgcgcgcactaactcccggctgcggggtgtgggccagccctggactgtggacttccaggtggagcttgcagaagctccaggtgacctgcgccctttgtgtgtctgactccctcaggtcactggaacacaaaccccacacagaagaccacggcccagcatggagcccctggggtccaccccctccacttccgcacacctggaagcactgccccacctgcccctccaaccacctggcctcccgccccccccctcacctggcctcccgccccctcctcacctggcctcccgccccctcctcacctggcctcccgccccccccctcacctggcctcccgccccctcctcacctggcctcccgccccctcctcacctggcctcccgcccccccctcacctggcctcccaccccgtcctcacctggcctcccgcacccccctcacctggcctcccgcccccccctcacctggcctcccgccccctcctcacctggcctcccgccccctcctctcctggcctcccgccccctcctctcctggcctcccgtcccctcctctcctggtctcccgccccccccacctggcctcccgccccccctcacctggcctccagccccccccacctagcctcccgctcccccccccacctggcctcccaccccctcctcacctggcctcctccccacttctcacctgggcgagttctcaggactcagggtctttgcacctgggagctgaccagcctccggccagaccccacccctgcacccctgctcactaacgaggtcgtgggtctgcgcgtgaccctgctaacgaggtcgtgggtctgcacgtaatagaggggtctccaccatgggcccctgcccgacggcctctttacagcctcccctgcttgttgcttgggtcccccgggagctaaccctacacagcctgtgactcacgcacacacacagtgggtgcccaatcactgatgagaaacgcgggatctcaggagcgtgaccctcctcagcctgagctccgggcagctgtggaagccagggccaggccacaccagctgctgtctggttccccgcagggcacagcaggcaggaagtttgcccggcagccggcccgctcccctaactaggtcgtgtgtctggttccggcactttggaaactgggcaagcttcaagcttcgtttcccccaaaggccctggaacgctccgacagaccttgtcactggccaccgggccccagaagtccaccctggaccctctgtcctccctgggtcccggcaatgcagcgtccacccccgagctgtgacaaggatgagcccaaggcaggggccgtgccctctgacccccgtgctccaactcccgcagggacagtcctgggcactcctgggcgccagcgcatggggcctgcagggaggatcaagcgggatgcccagcctggactttggggtgcaggaagatggaaccggggtccccaccttcttgggcctccctgagcagcccagagccctgtccctcccctgtgcctagagggtggcctgtgccaaagctcccagcagcctaggacacgcacggttccgactccaccgtctccctctcggccaggtagttgtggggcacatagccctgggccacggccccacccgcctcgtccagcagcgtggcccaccaccactgctcctccttcctggccacgtggaagacgtcccccgcgcggaagctcagctcctcgtccgtccgggacttgaagtcccagaggcccacatacttggggcccaggtgagcctggtcccgggacaccatggcgggcgggcgcagcggcaggaccaggctgtggcccagctggagcacccagagctgggcgtggcaggcgggccgtcccacttcctcatgacaggccgggaagcagccacacccagcacccacaggcgctccagagcaccccggctcctcctgagggcccagccggccccacaagtcctcaggcccactggggcccatctgagcacttagcgcccgcactatgggaacccactgggcaagcaccgccagggccggcctgagcgcaggagagggggaggaggacctcccggttggggcttcttgggggtccaacttatggacactcaggcactcagggaagccaacggccctctgggaacaagcctcgcagcctgagggcaggaaggtgagggctgcaggcgctgccttcccaaccctcagagctgcgggggcacaggtgggggccgcctctctccccgcttccggcagcttcccctccacccgtcggtgccctcacccagccccagactccacccctgagcacagggcccaatgtcaggagctgctgtgggcaggcgtcctgagagcggcctcatgggcaggcccgccctcgggtaagggccaagcagggaagagggagtggaatcagggcagcgacagctgtgtgggtcggcccggaggacttcccggaagaggagggcccgagggttttgggggatccccggggaggcagagccaggggcacccacggctgaagaaacgggcactgccttcctccacacggacgccagggggcaggcaaggaccgtgagtgcggcctggaagcgcccatggcgctggggcccaaggccacaggtccctcccaggcagcccctcccgcctccagcctctgcctcctcctgtccagcccgcaggacccctgcccccttccagctggcctcccttctcccgactcatgcctgagtgagccctgccgtgacccccacctgcacccgacggccgcctgccccccagcccctgagactcgggacaccccctccctggaggcccctccccgccccaccctcccactgaccctactgtgtccacccgggagctccaacccagggacctggactggcagccacaagggggcaggaaggggcgggaagggaaattcaaagtctgcaaggggtggtaaggaaagtccctaaactgcgtatttcaacttttatttttattgcaaagagaaataatggcaccttccactcattgttttgagattaagaacaataatctggattatttaacaggctcatagatttctgggcagcccagctcagcgctgaccaaggtggggaggggcagcggggtgccggcctgggcagtgtccctcaggccctcccagctctgtctggggtcggttggggaggatgcagggggaggggtggggggtggggaatgcggaaggagggtgccggggcacctggccgggcagcgtccctcagagcccggccagactctgggcccgtgagtctatgtccaggaagcctcgagtatccctgagttcggacgtgcaggactttcagtctaagccacaccaggaggcaggaacgtccccagcccctcccagatacccaggagcaccaaacctgttcagctggtggctggcgagatgcctaggagggcacaggtgccacagacacacctggtccccttaatcccagtggcggctgcagagagcacagagggcgaggccttctgtgccagaggagcccccaggctgctgtgctggggacctgccagaactggaagctcagctcaaggcctcagtgggcccaggtaccagaaccagcccctcccctaggttctcccatgcagatggagctgggcaggtggccagggtcccaaaggctcagataaagcctcttgcctccaccatctgcaggggtcctggttcctgctgcttccctccgcttggccttgttcctccgatgcacgggccccaggaagcccccgcgctgcctccgttctcggagcctccgagtggcctcttccttccccggggccacctgtctctgcacacgggagtctcatct

SEQ ID NO: 1562032 - DNA, 4001 bp, Homo sapiens
tctctccacaatgcttccactgtgatggggtgtatcataatcaactccaacacttcagaccaacaattttcatttaaagacattttagactctactgcattaaactgatgcagaaaatttgtctacacagtctcaaagtcccttatggaattcattcagctaattcagagaccagatatggcatacaaattttatatactgatcaatcatacttattagtatatagattacagtggttagaaatattagtctagcagaaactaatatacacactacagtccaaataaaaagaatcctgtcaaataagcttgatgtaaatccacatgaaaatcaaggctgccaaaaaaaaaggcttttgttagtcaagcataccaaagaactgcttaaaccttttttcctttctaagcggagctcaaaatagattttaatactacagctgatggatctcacaatttgccttttgagcctataagctgaaaacagaatcatctgctgtctccctttacacaagtaacaaaatctctctattctgtatatcgcttatttaagatactgtgcaagtgtggttttagttaatcttaacaacccccgcaatgacatttaattgggagtatgtatcttattcagctgcttgtgaaaggaagagctctttgtgtttttaactacttgttttatagatatatgagaaaccctcctttcctaactttttaacacacaaggagatgactcctaagacaaggtcatctctgccacgaccaaagactaagctgctcattgaggaaagatgctattttagagagggttaaaacgttaaccttcctgagtccctgcctgaaagaataatatcatggccccaatggagtgggtaccgcaggcctcctggctagaaggttctttagccccatattctcacggctttctgctcctcttggttcagctcacaaagcaaatgtctcctcctttgacaggccttccctgatccccttctctaagacagccggccttctatgcagtcaccctgtaccccgttaggaagtcgttctcttcacagcacctgtcactatctgaaattatttgcttttgtgtttgattgccctattcgactctaggccccactaaggctaggatcttgcctgtcctgattagcaaacaccacctccaatgcctaagcggtgcctagcacagaataagcttgccaactcctatccaataaatgaatgaacagaaaggggaaaggggactgtcatctctgggactcgacgcacactgagactaggggaaaggaaatgtgaaggagggacggggggagtaaccttttcccccagggagacaaaggaagagagtctgaggtggtccactccagaaaaggaaatagtgggggtgctaaatcaccccaggggacaaagagtggacaggcagggggcggggtcggggtgcgagggattcgcgttgagagcacagaccggcggtcccccggcttgagagatcacccgagctggagaacagaagggaggtgggggatcgaagggggctccgacgctgcggcgagaaacacgcccgccccggggacaaagggtggggggacgcagtgcgtcgctgtcccatcgaatcctcaagcagtaggagcgaggcagagggcaagacccagagggagtctggggcctggaggtctgaggggatgttcaagcggcctaagcgaagggcccgccacgctccggggcgctcccgcacctggtaaatggccgcccagctcccggacttgtcgatctgctcgaactccttttccatctccatgacgggccagggcggctgctgcgcctccttctcggcccactgcgccgtctgccgctctaggccgcgtcgcgctcttagccccgaggcccgctgcaatccccgacccctgcagctaccgccgccctagccgctgctgcttcttcatgtcaaccggcagccggaactacgcatcacgcctgccaggggctccgcccctgaagcagaaggaccaatcagcgatcgagaatttcgacaagcacttccgcggggaggagccgggggcggtgctaggggaagtggccccagcaccgcgagatatctaatagcgcgcgttccctcctccgctttggggctctgggctcgggcgcggcgcgcgcctgttgcctaggcgaccccgggagccccgcccacggcgcgtgggctctccaggcccgggagggcattgagttccagccccgacccggcccgttgagtcacagagtgagtggccttaaagtagtcatgcacctcctttcctgcagggcctgggccccagcctcagtaatccaagctggagtatgggaggagggcaccgtgctctatttcctgcctcccagctctggccagatgtctgcccttttttcatgaaactcaggagtatcatgtttcactacgctgctggggaagcccactgctctctaagggtagtgtccctgtctgaaacgcagaatttccacttgggtgctgcaggaatgaatggatggggatggaatgattttcagtgtttcccgaagtatcaaggaactcctgctcagactgaactaagcagagcacaaattccatggtgcattatgttaaataaaaatcataggagcccaggcgcggtggcttacatctgtaatcccagcactttgggaggcagaggcaggcggatgtcttgaggccaggagttccagaccagcctgggtaacagaatcagacctcgtcactactaaaagttaaaaaattagccggtgtggtggggcccagctgctggggaggctgaggcaggaagatcacctgagcccaggaggtggaagctgcagtgagctgttttggcgccactgcactccaccttgggtggcagagagagaccctgtcttgaaaaaaaagggctgggtgtggtggctcacacctgtaatcccagcactttgggagaccgacgcaggtggatcacctgaggtcaagagtccgagaccagcctgaccaacatggtgaaactcggtttctgctaaaaaaaaaaaaaaaaaaaaaaattagccgggcgtggtggcgcatgcctgtaatcccagctacttgggaggctgaggcaggagaatcgcttgaaccctggaggcagaggttgcagtgagccaagatagctccactgcactccagcctgggcaacaagagcgaaacaaacaaacaaaaaaagttctggcattagggtctcaacagactagactaaaaatcaaaatggagtcactcatgctaaagttctacatcatcagactgataacctttcacaaaatcagaagagagatacacaccctgatttcccaagcagaccgttttaatcaacataatgaagttccctttgctttaatccttacaacaaaaagtaacctgaagtaacccgatgcgaccaatcagttatttctctcttgttctgtttccctgttcctgccttacaaggaaagtaactttgaaatgaccaatctgctttttgttctttgtttctgcttttttcagcccttttctgtctataaaaccaacctcctctgctcagctcattgggacacttgtgctattttgaggaatgaagtcttgcccgattctagaatcatgaatgaagccaattaagatgtttaagtttgttgtaattttgtcttttgacatttacggtcacctgggaagtgtgttgaataatgcaggttcctggacccatcgccaaatgattcagatatctttggtctagggatgagacccggaatctgcattttcaccaacaactccagctgattctcgtacctatgatccttaaagcacccatgagcaggttggtcaggttgccttcctgcaggctccagtttaaaccatccccctctgggcctggcatgtcatgtggacgttgtgaattccaggaggtttgaaaacctggaagagagaattgtcttcattccgtgttgcccagagacactgcctggtattatcagctgaactccagctca

SEQ ID NO: 1562033 - DNA, 4001 bp, Homo sapiens
cgggtggagggagaaggtaatgcacagccctcctgtcctctctcttacgagcagaggcgcaatgcatacatcgtccatatatattctatatgtatacacccgtcagtacatataatcccccaacccccatgcacagacagttgtgatctcaacattcttagggcagaaatcacctaaaccaaagctctgtcagagacttgagaccaattatttccacgcttctgctctaccacccaccattaccccttgcaacaggcgttcctgccaccagccctcacatttcctgtgttctcttgtgattgacattctcaaacctgccctatacacctctgaactacccaccacagaaaacagccctcagtatctccactgcctcccatatgcaccctccctgtgccccctccaccctcctcagacaagactttccctctagcacatagtgccccctgtggccctccctggggaaagcagctcattctctctccccgtaacatctgcaggcaaacttggacccatcctccagtgcacccaacacagcagatgatgcctgcccacaaatgtgtatacaggaagcactcgctaactatgcgggcagctgaacaggagcatgaacgggccatcctatctgtctccctgcctagccctctctcccgaagactaccctcactggaagtgggctggagggaggaccctgcctcaccaggtagccaatgggtgatttcttgctcttggaaaacttctctagctcttcccaatcttccaaatctgccagggcagtcagcttcagccaccagagcctgcaggaaagctgggcttggaggtgttgcaggagaggcaggtggtcctgggacccacatgcagcctgggccctcacctacctcttgtcagggatgcggaagtcacgtgccagctgctctgcacgcttgttgtgaccgccaagaatgagggtggtaactgtgtcatgtagagacaggtctaggaactggccccccagctcgtcttctaggcgccgctgcagccgtaggagccgcatttgatcctctgtagcctggggacccggataatgaggcatgatggggatgagggaccaggagggaagaccaggagacgaggaggctcttggaaaaaggtgggccaaaccttggctgcaaactcattcttggccttgtagaaggcatcggcggctgtctgcagagctgctactcgcccctcaatacgctataaagacaagaaggaaggcctgaactcacagcatgcaggaccctcgccctcctcacccaggctacagtcttctcccccatccctgtgcccagggtcgccagggtcagccttgcctgctaggtgcaccactctgatgtcctagagggatggctagctcctctgacactaacccccatcctggcctcacgtcagagtctccctcacagtgaggaccagatggagtgtgcacccaacacgaaggcctagattcctgaaggaaccggaccaacagccccagcccacatgccccacacgccccacacgccccatggatctcagacctcttctgcagcatagctggctcggatgtggaagctgcccaattcctggtgattgtcatcctgattgtaaaggtccttcagcgtctctagctcctgatgcttacagaactggggccacaggcaggcaatcagtcagcaaggccaactcaagtgctcagaaggctacaccacaaccctgcccactacacacacctgtcggtacaaactgagggccatgggctgattccgaagggtcatgaaaaaatctcctcggttcagctcgttcttcaggtgcagcaacaccgtgaacactgcaggagagtaaggtggagtgggaattccagccaggctcccacttagcccaggggccccccagccttgccctcacccaggtcagtgtccccgctctcgatggccttgcttagtgccagtttgctcctcttcatctttaggagaaggggtacctgctcccctgagcgtggctcatactccagcagctgtgaggtgagaaggaaggcacagagagaaggagctggcatgggggccctgaacaaccacatcagagtgtctgtggagggctgggcacccacaccttgatggccagctccgtgcggccacaaccataggctcgtgcagcaatgtcggagtaagagacaccaggcgtgtcccccagcttctggttaatggctcgagccacatcctcatctgagacatccttctgttgcacctgcaagggatgcggggtgtcacaaacatctggatgccattcctcactctccactcctgcaagcccttaggacccaccccttcagttcccttcctccctcccttccttcttctttctttctttctctctttcttctttctctctctttccctcctcctccgcccccgccacttctttctttttttttgagacagagtcttgctctgtcgcccaggctggagtgcagcagtgcaatctcagctcactgcaacctctgcctcccaggtgaaagcaattctcctgcctcagcctcccgggtagctgggattacaggcatgcgccaccgtgcccggctaattttgtatttttagtagagacggggtttcaccatgttagccaggctagtctcgaatacctgacctcaggtgattcgcccgcctcagcctcccaaagtgttgggattacaggcatgagccaccgtgcccagcgcagttctacactttctatttcctccacctcaccagggcctggaatcctctaaatgcccttggaccccatcccacatccttgccttgtagcaggcccagtgggccaggatcctgctgacgccctgtacttcaggaaggcgcaagtactcgcatatctggatggccagggggtaaagtctccgcaacacgagcctggtagacccggtgggtaaaggatacaaggagtgaggtggaggagaaagggagcagagtggcctcagcctgcacatcaggcctcccacatcctagataggtcaggagcagtgaccataagaccccacccaaggctgtaatgcccacccccctgacagcccgctcactgcacccttgggcttaccctacctgtccagcagcacctggatggtgagctgcttatatctgtattttcctcggttaaggatccagttggagaataagccccgcttgccaggtacctgcagacgcatctccagccccttcccctgccacccctggctgtagggtacccttctggcgtgcacagggatactggctataggtgagcgggatcccgatgtgatagtcccgaacagcattgagcacacgcaggtcctgacacatgtgcacgaagctgtcgggtggaaatctgtccaggaaacactttccgaaggaggcggcctgagaagagccagagggcgataggagagagcttccctgctgcccatcccaccccctcccagccccaccctccccggcccggccatccaggccaaccctgagcagactcttctgcatgtctggctggtgctcatgtcctgcagcctcaatgcactgctgcacggcctgggtcagctggcccagctcctggatctcccgcaggtactcgtccgccttctggctctctttctggtggggagcagtccagagccagggcatcatgacagagaacactcccacatctggcccctaaccattctgggttgtggttcaaataagctgggttggaggagctgcacaggctggagccccaactccctcagcccactcaatccacctgaggtgcccacagacatcatctcgtatcagcccacagctgcctttaggggggccttgagaactcctcccaatagtaacccagactgggtggggatagtggggatgctctgcccgtccctatcacaccacatggaggacatagtgtctcttcagtttacatgagccagccctccccagcccagaccagtgtcctgcctggacccctctcttgacaggtggcacctggctatgctc

SEQ ID NO: 1562034 - DNA, 4001 bp, Homo sapiens
acatgaatgtactgaagtcagaggggtggtttttctggttctgtatttcacccagatgttaagtggctaaacagagaacaggccccgggatcccaccatgccttacaatgcacggtatcagccaggtcactttgagcaggcagaggtgaaaagagactgaagggcttttagtctttcagagacagttttttggaggccagtgggatatgggacctaccagttcccacctgctgactgcttatgggggctgggtgggatggacatggggaagccgggaatcagaaatactaaaagtcctgggcatgtactccaagcaggccttcaaaacacgaaaaaatctcttgggaagtggataccgggaaataaacagagcctaggcataagagagaagagattggaaagaatctacaagacaacttggaggattctcccaccacgggagatagaaaggtgggcaagacacagctcctgcccgcaagaagcttctcaaatgagaagaactttaaaagaaaaagtggagcttggcaggtaaaggtggggaagaaagaggatcacataaaacaaaaacatcccaacatgtgagggggcagtcaagcagctctgaatactagccagcaagcgggatgaggggaaggagaattggaggatccgattaggctaaaagtaaaggagtaaattgaggcaagattgtcaagggctttgtatgacctgataaggcattttaggcttcattcatcccatgggaaaaagaaaagcgagggagtttttaagtaaacaagtgacagcatcagatctgtttctgaaaggagtggccaggcaggaagatgttcgccctttcctagtcagtcctcctctcgcccaccatcttctgtttctcaggctgcctgcacagctagcaggtggcaaacgaagccatctccagggtgatgtggactggttctagagccggaatccctctcctgagcaaaggcttctgatggcgttcaccctgcagagggtggatttgcacattcttcttttcctgtcttacaaatatcatcagtgatctcaaaaataaaaacgaaaccctcaagacaggactctgctctgctattttttttttttaatcttcaggagatataattagtaactaattttttcaaaaaaaattttttatttaccgaaagtaaaaagggaggggacctgcgttctcaattggcctattctgaattctgggcagctctcagcccttatttcccttcttaaacagcctcaacagttgggagagggcggcaaggagaggggcctgggagacgggccgggggaccgagggaggtggacttgaagggaaagaaaagttggtcactgcaaaagcaaattttctcatgccaagagttttcctctttcctcccattaaatggacctgagcaaattctgttctcgccgttctaagtttcttctctgagaatcaactctggcagtgccctggcctggtcccagaaggacgcatgcaaagttcctgggcagtcgcgaggggtcggcactcgggccggcacgtttccggggaccccctccccgcgacggacccgcaaggatgcacaatcaacctgcaggcgcccgcaggcttctacccggaaaagatggcttagggcttcgggctccgggctctgggctgtggcccgggacccctcccaccgcccccgggagccgctcccccttccggagcccacccgggcgcagcggccgcgaacactcacagagtcgggcgttgggcgggaccgctggggacgaggacagcggctccgcctcggctccgcggcggcgtttcgggccgccactagccctcagggccgccgcccggcccgcggctccgagccccgcggcggcggcggcggcctcgcctccatggcgaggggaagcggctgaggggcgactgggcgggcgacagtgatggcggcagcggccggggtccgagcgcgatcgcgcgcgcgcgcgtctctgtcagcgccgcactcgccgcagcctcgctcccgacccggccttggctgtaagacgcgtgttcattggctgttcagagacaggcgctggttggccgacagcgaacgggcgtctccggcccgcgcgggccccgcccttgcgctccgctgggcgctcacttgccggctggggcgccgaacccggtcgcacgttctcctggtagctccagaggggttcgccccggggctgcccagtccttcgggaagctggaccccggaaggaccggctgcgagtgcaccagtgccttcagccattctacagtcacaggcctcatgacttgggccttcttcccagtttacagatcaggaaaccgaggccaggcacaaactacaccaatgtctagccaccagggcggcctgcaactcgagagccatcttcctaaccctctccaaacgtgatactgtgggtcttttttttccctcccctaattgctgcaaagaacgacggatctcactggggagggagaggaacctgccaagtccctagaacggatctggctccgtgggtgtcgtcttatatcaagtcagcccacgccgtccccacccgagctccagggtaatctcccccgctttccagatgcgcatgctggggccccgctcgccaccgagctgagtagaagcacaacacatggtgctctgcgatggaggtgccttttgcgatacgcctggcgggggaggggaggctcaaaacgcagagaggagccagagtgcgccctcccccggccggggttggggcgcgtacccccttcccggcgctcccggcacggcgtctggtgcgtgacacccgcgaagcaatcgctcagtccatccagcggcagcaggttcctacacggatccccgcgggtgctgcaggacctgagcgtctgcggctgaaagccgattacgcagtcgagataggtggtggcaaatgcgacatttcgccgggttgtgatccccagtagggacccctggacattccgagacccgcgcagggcgagcggctgggcgtctgcaggcaaaagacagattgcacagtagcgcacaaaccgagcttgcgggtaggggacgctttatcccagacccagagtctgcggttcccggggtaggtggcggcgagtctctcctccagaccgggcaacccctgagtccccctcacgcaccccaggccggaaggagtcccacattcggggcgcccccggggaagggttgtgaccggcggcaactcttcatggcaggaaacactgcggcgcaaaaggggctcccagcagcccccaccatctccagtcctaccatctccggtccccaccaccgccttctgttggggcgccagttagggactctgtgccccactcctccgtattgtgggctcacatcagcagcccctaccatctccagtcctaccatctccggtccccaccaccgccttctgttggggcgccagttagggactctgtgccccactcctccgtattgtggaataagttagtccatgctaaccagagccagggcctgggaatatgggtggggcgggcctcaggccgtcccctccccagcagggaagtctctccttgagtgggagttgtgactctctctccctctcagcagggccagcctagaggtgagggtgaaatggccgaacccgacacctctgaccaatagacactccagcccaaaggcccagagtccacacgcctactctcctaacgctcagaccccagtgagggtggatccttccccacgcccaacattcacatatccccttaagtccaaactcaatctatcccgcaacaccgaatggaaaagtgaaaagcaggaagtcaaagtgtgaaaacccctaacaagtaatgactgcaaacgcaggaggtacctcagtagctgggatagcagccctatgctctagaaccaaaccccaccagcttacttttgccttatatctaatttacactattatttcttaatatgtttctttttgttgattagtttttttttactttttatttgtattac

SEQ ID NO: 1562035 - DNA, 4001 bp, Homo sapiens
ctgggggaggaggaaatggggagttagtgtttaatggatatggagtttcagtttggggagatgaaaaagttttggagatggacagtggtgatggctgcacaacaggaatgtacttaatgccaatgaattgtatactttaaaagtagttaaaatgataaatttaatcttatatatattttaccatgagaaaagtatgtatatgaacacattaagatgtaaaaccttttcaggccgggcgcggtggctcatgcctgtaatcccagcactttgggaggcagaggcaggcggatcatgaggttgggcaatcgagaccatcctggccaacatggtgaaactctgtctctattaaaaatacaaaaattagctgggcgtggtggcgcgtgtctgtaatcccagctacttgggaagctgaggcaggagaattgcttgaacccaggaagcggaggttgcagtgagctgagatcacaccactgcactccagcctggtgacatagcaagactcagtctcaaaaaacaaaacaaaacaccttttcggtgctgcagaggctctctcatacctctttccagtcacaacctcccacctcctgtcagaggaagtagggatatgacctttatcactgtagtttagttttactcggtaattctgctacatctactttttcttgtccatctggtttctttcactcaaccttttatctacgagattcatccatgttgtcatgtctactggtagtttgttcctttctattactgaataaaattccatgttatcaatagtgtatgtcaattttttgttgttgttgatacatagtctcgccctgttgcccagattggatggagtgcaggggcgtgatctcacctcactgcaacttctgcctcctggcttcaagccattctcctgtcttagcctcctgagtagctgggattacaggcgtgagccaccacactcagctcatttttgtaattttagtagagatggggtttcaccatgttgaccaggctggtcaactgatctgcccgccttagcctcccaagtgcttagattacaggtgtaagccaccacacctgaccatatatcacaatttgtttaactattctcctgtttttggacacctgattgggttacagtttttctggctataatacataaagctgcagtgaacatttgtatgtgcacttttgtgtagacatatatttttcatttctcaaaggtggatacctagaattgaaattcctgggttattagatacgtgtatgttttgcagatattgccaaagagttttctaaaactatagagttggtttacattcccacttaaaaaacttggagatcatctgtgatctactcaagaagctttaattcaatgctggcagggcattaactttggtctttttatttttatttttttgagaaggagtttcattctttggtgcccagaatggaatgcagtgtgcgatctcagctcactgcaacctctgtctcctgggttcaagggatcctcctgcttcagcctcccgagtagctgggattacaggcacatgccaccacatctggctaatttttgtatttttggtagagatggggtttcaccatgttggccaggctggtcttgaactcctgacctcaagtgatctgcccgcctcggcctcccaaagtgctgggattacaggcgtgatccaccatgcccagcctgactttggtctttttttttaaaaaaaaaaagctcttcaagtgattctgattcataatcaggttaagaagtatcttaaaggataattacaatgtttataataataaaaaaataagctactcttacagcttagaaacgaaatgaagcaggaaagcatgtgatgttagctttatttaaggacactacttggctggcaaaagcctcctcacagttctggttttatttctcttaccttagttatttgaactgcatcatccattaccactcagtggaattccataaatacctttgtttttttttagttgtgtcacctgcaacaaaaggaaaaatacctttagaaatatacaacatccctgagcagattgttctagcttaggaattcaagcccagcctaggcaacatgcaaaatcccatctccacaaaaagtagccaggcagggtggcacatgcctataatcccagctacttagcaggctgaggtgggaggactgcttgagcccagaaggtggagtttccagtgagctgagattgtgccactgcactccagcctgggaacagaatgagacccagtctcaaaagaaaatagccaggagcggtggctcatgcctgtaatcccagcactttgggaggccgaggtgggtggatcacttgaggtcaggagtttgagaccagcctagccaacatgctgaaatcctgcatctactaaaaatacaaaaattagctgggcatggtggcacgcatctctaatctcagctgttcaggaggctgaggtagaattgcttgaacccgggaggcagaggctgcagtgagcccagatcgcgccactgcactccagctcaggcgacaaagtcagactccatctcaaaaagaaaaataaggccaggtgcggtggctcatgcctataatcccagcactttgggaggccgaggcaggcggatcacctgagaagtcaggagttcgagaccagcctggccaacatggtgaaaccccgtctctaccaaaaatacaaaaattagccaggcacggtggtgggtgtctgtaatcccagttacttgggaggctgaggcaggagaattgcttgaacccaggagggggaggttgcagtgagccgagatcgtgacagtgtactccagcctgggcaacagagtgagactccatctcaatcaatcaatcaatcaatcaataaaacagccctatttaaacattatggattgttttggagagtggagtatatcctaacaagatgtttcacaggggtgtgcttaaaattccaggagccacagaacaaagctccatcttaaatagttcagatttctgaatagctcataggtctttccagtaagggtagtatagaacactcctccctgtcccaaaacttggactatgccaccatagggttgtttatataccattaggcccttccctagggaacatatggcagtgtctaaagatagttttgactgtcacaactaatagcagggaggctgggctactggcatctaggggatagaggcctaggatgctgctaagcatcttacaaatcacaggacaaccccctataacaaagtatccagtcccaaatgtcaacaatgccaaggctgaaaatctctacattgatcaaagatctatctctagtcaatgactgtgcaaagtggtagtacaagagcctagccatttctacctcttgtggtattcctctatcaggcaatctgggtgggcagagacttcgtcaggtgtgcactgcagtctgatggctccctatacccaaacatgttccgttccccttttcttcacaggcattactcctctaataagccctttgcccctccaaccccatctgtgtctgcttcctgtagaatccagctggcacataaattaacattcacgttcacactgaatggagtgcgcattcacattgttggagaaacaagaatcactggggggaaaaaagagtcccaataaataaaccaaaatgttaaaaattctaaacttttgtactatccagtattccataacaaccatctattatttatacataataaagaaaatattaaagtaagactttatactagattttgctcgtgaagacatgttctaatggcaggctaaattggtatactctgtatatacagtgtacccaaattcaaggaagggtgaacaactgttggtgttcttcaaaaaaaaaaaaaaaaaaaagcgcattcccaggtactaaggaaataaaagatcagacaatgggcttcacagacatctcgtaagctcagcttcctcatttgttaaatcaaagttgtactattaatagtttaaactaa

SEQ ID NO: 1562036 - DNA, 4001 bp, Homo sapiens
cgagcgccacctggcgggagcatccggaacgggcggcgttcagcactggacagcttcccgagccggtacgggttttaccgcttgctacccaagaacgattcgagacccgtgatggaatatttttgatcctgtttctgccgcgggaacgtgagtggtattaatgtgtggttggccggtcatgccttagaggatataaaatctgagtcacgaatcatgcctggatccccaggactgccccgggcatcctccctagtacccctccctcccctagcacacctaacacaccccccaaaatgaggaaaacaagaattgtgcaccatctttagaatggtgctgtagctgtccctcttctctcacttgctaatccaacctttcagcttcacacacctcaaaaggagtgtcttcgtcacccaacttcccagccagggaaacaggctgtcccttcacagaagtcgcctattccgcttccattttagtaccaagcaaggaaggctctaaagcatttccaacggaatgtccttccagcggcccttaacctcagacgcagcttgtgcaaagacgctgtacctccccacaggttcgttcttttgctctttctttcttcctttccttctttcggtgaaataataaatgggcacagctgttgcttagcgatccgaaaccagcctgttcctgcgtcccacgggctgatctcagcctgtccccgcaatcccagccacctcaggccggcgtggttacaccaaaagcaatcggtgctaagaaactttaaggtgattttgaacttggaagtacacctgcagcactcccttctcttccctccgccgctactcttgggggggggggggctcgggggtggaagctgcctgcggtggggcttggtgatgtgtaagaccctggactgtggtgccctccagcacccgccaacgtgcctttaggagcacggcaggcaccacccccccgcccccgctccccctactctggggaactacctctgctcaccgccttcccgtggccaaacccaaatatgagttccccgaacttttcaggagcggacgcgctcacgggtcaaatccactcccctccaagggccttaacacgggcgcccagctacctcggagaaaagccagcgggtagggcggaggtattgctctcggtcatcaacgcaaacatcccctcgggtgcctacagcggcctgcttaggggagcagcgtgttcagagcaaatggagagcttcctgtatctccgaggaaaaaagaaaagccgccgccccggcagcctcggcctgctggggacctgtcctccccactaaaagcgcgcgctgcccgaggagctgcccgggagagaacgctccaccccgggcgtcggtgccgctcctcgtctcgccgccccaaacactcaagtggcagattccgacaagtgggaggcagcaagtggaaatattcgcaacaaccgcggaaagttactccagcccggggggccggcaggaaactgaagcggggaacttcgccaaacgcgggctgccgagggacgcgaggggccgggctcgctggccggggcgcgcggggacactgcttcccgcgcctgcaagctgagacccgggttccggccatggggacccgcgcccccgcgagcccacacaactttctcctccgagggccccgcggctgggggcccgcgcgcatccaggagggagcggggagcccaggggagccgggcgggcgcactcacctgcggcgctctgagcccgggcgccgggcagtggcggcagctgcagcctcaggagcaggctgagggcgagcgcggcgaggctcgccatccgggcggcggcgggcagctcagccccttcccgcgggggccggggccgggactggggcgggcgcggggtggccccgcatcgccggcgcggccgctggctgtgcgcgcggctggctccgctcgggctcccggagccggcgctcctgcgttccaagccgaggcgcggcgcgaactgaggcgggaggctgggcgggggcgggacgcggggggcggggggcggtgtcccccgagtcctaacgccgccgccgttgccgccgccgccgccgccgccgcccgcccgggcgctccgcctcggccgtgcacacaccctcacgcgcacgcccgcgcctggcacacgcccgcggctggcacacgcgggctcccccgcgcaccctctccggggccgaccagctcgggccgctggcacagtcacgcgcgtccacacatcacccccgcacccacacgccgggcagggtcctcgcctcttcgccccgcgccgcgccgcgcagccaagcatcgtctgccctgtgggggcgcaggtacgggggcggtgcggggaggaggaagctgcagcagccgtttgaactcggggtggggaacaggtgaatgggggttcggtggcgagaagagggagggagggagcagccctcgcaactcaagataaggggccaggtgaattgcgaaagcgggtgggggcgtctgcccaaagctggggcaggcggctgctggccagggtctcgggcacaccctgagatgagaatttcatctaagagcgcgcgcgcgcacacacacacaacccactcacactcttctgggcgcatcgctgaccgcgccacaatcgtcgtccccctcaattagccgcccaccccaccttcttcttcacccacatctctctcttgtccccaccaccacgcggaagggggcgcagaaggggcatgaggcatccccccaccccctacaatttttccctggcagccttccctttccttttctagggagacagaaccttgtagctttttcccttttcttctcggtcttaacaaagacctggttggggctgaaagcctaaaaccatagatcagggttggagctgtccctggcagcccacggcccacagcctggctctctgctgtcctgggaggcagctggtacctgagtcttggctgggggtctgagatgtaaaagccaggggcagggatacccagaaatgcttaagggattcacactttgtgaacactttgctacctggccaaagccctccttcttctgtgtcagcacagccccccacccccatccttgttggggtaccagggactggactggggagactgtaagtgaattgtgaaaatcaagcatggcagggtttccaaaagtggggagccccaggctctggacccaagttggcatggcagagaacacagggcgtcactctgtcagtccccagttcccagtccccactaggtaaagtggcccagttccctggcatggaagcccaatttacaatcccaggcaaattcttccacccctctccggaccccgactcccaccaccaccaccatgaccgtgaccactttcaaaagctgacgtgcttggactagcctgttggaccagccagtgcctcccacacttgcctggtcaaagaactaccaggaagatttctccaagtcctgcttcccagacccctgctggggagagtggaatttggcaggcctgtcgggggtggcctgggagttgaaccttttacaagctgctttggagattaataattctaccaatatttatggtgcatttaattgtgtgccttactctgtgctgttctctggggataccacaatgctatagcccttagggacaattggaatggaaagatcccttctgctcagagctgagcttccagctgtttgctccatcactcactcattctaaccctgccttgggcagatgagcagttaggaagtgtgcgaggagaggcctgacccaagaccaccacaagcgaccccagtcatggcagatcccaggggatgacccgggtggggagatttctaagccactaaagagcttggtgtcacacttgtaacttgttgccactttcttgggctcctgccaattcatcccctctctcaagctttctggaaaactataaaatagcagttctcacagcatcctcagagcaacgccctttggcacccccctgcactcctgcttta

SEQ ID NO: 1562037 - DNA, 4001 bp, Homo sapiens
aaaccctgtctctactaaaaatacaaaaaaattagccgggcgtggtggtgggtgcctgtagtcccagctactcaggaggctgaggcaggagaatggtgtgaacctgggagacggagcttgcagtgagccgagattgcgccactgcactccagcctgggcaacagagcgacactccatctcaaaaaaaaaaaaaaaaaaaaaaaaaaaaaacttggcaaaagggttactgatgttatctcagggcacatcaaggatatgcccttggccagacccagtgggaaccagttctacctgactcttgagtgtccatgggagccaagagcctggcactggtgccaggcatccttgggtttgaatcccggctccaaccgtgaccaagtgctgtggccacgagcaatgggtctacctctgagctacagccttttcatctggaaaatggggacaatggcaattctgatcttgcacacttattcattcattcaataaatatttcagaaactactaaataccaggtgctagtaatacaccaaggaacaaaatagataaagttatggcctcatgaaactttcttttttttccttttgagatggagtttcactctgtcacccaggctggagtgcagtggcacaatctcagctcactgcaacctccacctcctgggttcaagcggttctcctgcctcagcctcccatgtagccgggactacaggcatgtgacactacacccggctaatttttgtatttttggtagaaacggggttttgccatgttggccaggctagtctcgaactcctgacctcagataatccgcctgcctcggcctcccaaagtgctaggattacaggtgtgagccaccgtggccagcctgtgctaagcatttcacacatattgactcaatcctgatagtataagtactagtaccatgcccattttacagatattgaggcttagagaggctaaatgacttcctccagatcacacgggtaggtggggccagggttcaagccaaggcatccacatccttcccaccatcccacgttgccactaggatgccaattctgggggacacaaaccactttctctggtttgttctctgctttgtccccggttctggcactgtaggccctcaataaatggtggctgttatgcactaggtttaaaggagactgagctcccctctaggcaccagccagggcaatgaccccaagacctctcttgcaggtaagatgccaggatagttgcagcttcttttacattcattgtcacgtcccaggagccccctgagccgaacgggacttagcgctggagtcctacaggtgagaagtgagaagcaggatgcaagcccatgggcaagcttcatggggacagaatagacaggaggcatccgcctgccagctagaggccagagtccagttccccattgtgcagatggggccgttgaggcccaaaggcacacagagaggtgaggtgaactgaacccaaatgaggggatacagaagctggcatgggaggagtcaaagcaagagggccaggctgcaaaggttggaagacccagaaaatgtgcagtgggagccccagttcagagctgggaaggcgcgcaagccaaaatccagctcccattgcacagatggtgacctccgagacttagagacacacgaggactgctccagggcaaacagcaccgcggcatcggacttcgaactcgcgcctctgaccccaggcaggacatccctcagccccagcccggcccgacggccccactcacacagccccgttccggaagcccttaagcacggccaacgcagcgtggtagcggcgcttgcgcagcagtgcgttgacgactacgagcagagcccttagctgcggcggggctgccatagtgcgggctgcgcgcagggtcggggttaggaactgtaagcgcactgacagccggaggttccagctgcgcgcccacagcccctcggtagcgccgccgactcgtggcgtctataggctgtttctgcgtcactcatgcatggaagaccaatcagagagcgtacttgtctcatgggacaatagcactcatcgaaatagttgtctgactggaagagaaaggaaagcttgtagccaatcacagtgggctccgcccaaggtcacacacgatttgtccaatcagaaggcactttcccttgggccatgttgggttcacgagtgggtttggaaggaggcgtgtacttggaaggagggctcctgaatgaggagtggccctgcttagagatgggatgggcgacaggtgatgatacagggaggagcagggccccatctttatgcgagatagttctgactgggatatcctttaccatagcgatcttcccagagtgtcagtcacatggcccctcaatggcttccatgtacgtatgtatgttttgagatgcagcctcgctctgtcacccaggctggagtgcagtggcgcgatctcggctcactgcaacctccaccccccagggttcaagcagttctcctgcctcagcctcctgagtagctgggactacaggcacccaccaccatgcctggcaaatttttttgtatttttagtagagacggggtttcaccatgttggccaggctgctctcctgacctcaggtgatccacctgcctcggccttccaaagtgctgggattacaggcgtgaacccagccggcgtccacttattcttagaatccaaactcctccccaaggcccaagagagaagacctcctgtgatctggtccgtgcctctccctctgaccccacgttccagcacttgccacctcactgcttcccagccaaacagcctcctttctgttccttgggccaagaacccttctacctcagggcctttgcacttgctggttccctgcttgatattcgccatcctgggctcttcccatgatgggcttcttctcatccttcaggtttcagctcaaatgccacttcatcagagagactttctgagacatccaatttgaagtagcactgtccactctgactcattaccctggctcttttttttttttttttttttttagactgagtctcggatctatcacccaggctggagcgcagtagtgtgatctcagctcacttcaacttctgcctcccaggttcaagggattcttctgcctcagcctcctgaggagctaggactacaggtgcatgccaccacgcccggctaatttttgtatttttagtaaagacggggtttcaccatattggccaggctagtccaaactcccgaccttgtgatccgcccgcctcggcctcccaaagtgctggaattacaaatgtgagccatcgtgcccggccaccctggttcttatgtgttttttttttttatagaacttttgacactttagacttgtttactatgtgttcattgtccattgcccttatcaaactgtaaattctatgaaggaagaaatcttatttgtcttgttttctgctgtaaccccaacactaggcacatggtgggtactcaacacttgcttgtttaagcaacacatagttttgggttgtcatctctgagagcattgatgggtgacattaacatatgatgtcactatgtggagttgtcactgaataacagctacacactgagtggtggctgtgacttgtgagggtgtcccctggtacttgggccatatggtatttaccagtgatgttatttgctcagtgtcaggggacaatttcagaggtcaatgaaggagggagttgtgctgggcctattttgtcactgaaactgggttgtccgggatttttcttttgtgatggtaggctactttattcagttcatccttcctctgaagataatgactatgttagataatatattaaaatatcctcttaaaaacactgaagttccttggctgggcacagtggctcatgcctgtaatcccagcactttgggaagccgaggcgggcggatcacttgaagccaggagttcgagaccacccctgaccaacatggtgaaaccccgtctctaa

SEQ ID NO: 1562038 - DNA, 4001 bp, Homo sapiens
gagaccagcctggccaacatggtgaaaccccgtctctactaaagatacaaaaaattagccgggcgtggtggtaggcgcctgtaatcccagctacttgggaggctaaggcaggagaattgcttgaacccgggaggcggaggttgcactgagccgagatcgcgccactgcactctagcttcacgctacagggcaagactcagaattaaaaaaaaaaaaaaaatggtgctgtgcatcagaactctcccaacagcagggaattctgggggagccactgcttcttggctgcttttcctggcaaagtcatcccaagcccttgttataacctgttttggccattcgttgccacttctatgttttgcataccaaatatgaagagccccagttggtattctaacaaatctgtcccttttaccatctccattttagaaaaaagaatgtcccagaataagtttggaaaagcagtcaatctcttagcaattaccgtattaaacatatcttaatgccctacaaaaatattctaaaataccatccataaagcaagtgctcactgcctagatgtacactgcaagtaaaatctttgccaagtggcttcaggtctggaagtgtgtcttttcctcaccagttctccctctacgttagtgtagtagaaagacaattctccatggtcaagagtttaaaagcaaacgacaacaacaaaaaactggcaacagggggctgtgcaagactaccatgtacctatcaaactgaaaactaccatcctatccattgacctgcaaagctgtttatcagtgaaaaagttacaaatgtttacgaatgaaacagaaaatctaaaaaactgtatgtgcattatactttttaaaaatgtgtatgtatatttaggaataccaaaaacacagcaagaacacaggcccatagtaaacatggttaagagtaacggggacaatcagtgactttgtttcactactcaaacaaatttttgcaagatataaaaagtaacaattagtaagatgatctctgtcaacttcaacccaagcaaatttctccaagggaggtgtgggaacctctaagacagagccttcttcgagggctccatctccatctctgagcttcgtacccctccctgcgtgaagcaggcatcttcagtgattttcttctaagcagcgtacacaaaaaaaagtctcacaattccctgcagattaccgagctcaccccattccaacccacaaggctgcccaggcctggttccagtcccattttctcccacaggctgctgcaggaaaacaaagagtggctggaggcaggggcggggagcaccggctctgcagccagcgcggaagcgcacggccagaaagagaccgggaacgtccgccaggctcccgggctcagcatcatctgcgggggacggcggaccccgccaggcgcgggctcccagtggggcggacccgtggccgcggccctgcgcaggggacgcccgggccccgccgactgcggcttccaggcgactccccagtcggctgtgcctggccgccggccggctaggggcgcaggtaacgcccgacgggccgccccgcagagacccccgctggcgcggctccgggaccggcgccctctcagcgggcacgggcgcacagggcggggcagcgcctcaccttggggtcgcgctcgtagtagtgctgctgcgtgcggatccagcggcccacgaggtggtcgcgcaccgtgtgcgccagcgcgaagaagtagtcgcggggcgtggccacattgcggtccttgaccagcgtgaagtgcaagtgccggttgaagctcttccgcacctcggccacgtcgcctagccccgccaggccgcgcacgctgatctgcttccgcttctcgctgtccgtcagcggcttcgccatcgcgccggcggaggcggaggaaaagagatggaggaggaaagcggcggcacacgcgaacgccgggatggtgcagctgctctggcgccgctgctctggcgcccggcactgcggctctgcgggcgggatggaccgcgcctgcgcgccgcgccggggcggggcctcggggggcggggcggggcctcgggagggcggggcgggcgtccaggctcatagctgagatctctggtgtagtccgaggcggcagcgacctgtccacgccacctgagcgtggtgtttgccccctcgttgggcaagcccggcagaaagtgggagcgactggagggggcaagggacccggggcctcggagcgtgccgtcgtggccgctcctgccagcccggggacggtgcgggaagggggccctgccctccggccctcgggttcctgggaccggccctcccgccctgcaccgggtcaccaggtgccccgcgggagcgcgctgggctcgggctgtggccgagacctggtacacgttcggggaaactgattacagcttgaaaggcatccaccaacgcctgctgggcccggtcttctctgtccggggcagggcggctctgaaaataccagctatttgcttgccactccaggccgatgacagacgtggagaaaaccagctgccagcgagctggagacgcccgttcccgagggcgcgaggcagccacagccaaatgccaccacgaccccgcctcggagggaccgcagccccctagccctcggagaaaccctgttcccgaaaccacctggcagacgctgtccgctttgagattacagcagggagaaggaaacatgcccgtctggccggggagctcagccactaaccgagacttagcctctgtcatcccaatccaggctgcagctccagatagggggcgtctgcacacagcttcccacacttggccccgcggaacacagtcctgctggcctcagcctgtgggaaccctgcttcatgtaaaggtcacctaaactctgccttccctcaaccccttcaaactctgcctttcccttcgttcttgggaggcgctccctcattgcagtgggtcagtacacccgattttgtggaccacaggtttgctcctggtggtcttgggctgaaggggctgcaaaggttactgaatttcgtggaggtaaaaattgcccgcaggaaatgtcatgaaagtccaggtgcagtaggtttcctggtgtgatgcttcaaagttatcttcttacctggagccccttccagctgcagacttcagaggtcggaggttaatcaatctggaatgaccccacagcccacccagctccagctcgggattcactcctgcactatgtcctagggattctggagccaacaagatcgaacttcgggcacagatggcagggctgtggggtcgagcttggctgcaagctccgaacactgatgcaatctctctgagggtgatctggcaattcagaagtcataaaaatgatagtgccctatgaccacttctaccactctggggaattgagttcaaggaaagcttaagaagacaaaaagcaagttatgcaaatatgttatctgctgtggtgtggtaaagtttaatcccccagctgtggtgcacacctggcaaagaatggaggcgctgacacttattgatcattacttgcagtgtacacgtattaactcctgatccctgcaaatagcctgctattacccccgcttgacaatggagaaggtgagccacagagaagttaactcttccctaagcccacacagctaataagggaaacagccaaggttcaccccagccaagccctgctccactgcacaagcccagaaaaatgtatctgtgctcaaagttaatatcataaaccattgtgctgctaaaaggaatgactgttttaatagctagctaggaaggtgtgattgatgacacaatactgataaatgaaacacaaaaataaggatgtaatgcagaaatgacagtaatgatttgaatattactttcatttagtcaatttaaatttaaattaaataaccacatgtggctagggactactgtgttagaaacacaggtgtatatccaaacctaaacactggttatttctgaatg

SEQ ID NO: 1562039 - DNA, 4001 bp, Homo sapiens
aagtcagctagggagggagaaatggggcatccaaagaggggtccaggtatctaccagggttgtctggcccaatattttttttttttttttttttttagatagagtttcactcttgtcatccaggctggctggatctcggctcactgcaacctcggcctcccaggttcaagcgattctcctgcctccacctctcaagtagcttgggattacaggcgctcatcaccacacccagctaatttttgtatttttagtacagactgggtttcaccatgttggccaggctggtctggaactcctgacctcaggtgattcacccacctcggcctcccaaagtgctgggattactggcgtgagccactgcgcccggctctctggctcagtcttttagggagagcagaggagtgcttccctcatgctacaaaggggtaaagtgagggaaggagcaggctaaacatcaaacctacatgttcaggccctccctggagtccctggtgagatattgaaccctctctgctccatgccgcctgcaatcattaaacacctgttggggcaggtgccacacacgcacaacgggtgctcaataaatgtgccatttgtttgaaaaatggagggcattctaggtgctaacgaatgaatgaacaagtcaatgactcccctgcactctagctgcctgccatcccggctcttattcccgcccctcccaacactgtattgcctcctcacgttatcttatgtacattaatatcttgttgttcatgcttgttttctcttattcccactaaaatgtcaccttcgtgaaggaaggggccttgtctattctgttaccagcagtatccacaaggcttagcacggtgcctggctgcaagtgtactccaagtataagtcaatggatacgatgaaaaagttaagttttcaggctatcgagtggcatgtgttggtctttcagggggcagactggcaaactctttccctaaagacatctctgggtgggctggaaacccatccctctaggctggttttggacagtggccctgggggaggagctgtaagcaaaaggttggtgccctcctttgacttcttgggggctggagtgagagccaccagccctgcctctttgaggggagacatcccagcttcctctgctggtcagctgttggttttcctcagcctgagattccccagtacctgtccccactgctccaagcctgcctccaggggcttgtggaggatgctgtgggtgtgtcagtcaagaccttagggtaaagagacaatagcatagaaagcaccagccacgcaccccatgcaggtccccagtgtggggagccaaaattcttgggtaggggattgtgatggttacagttgtgatggtgccaggtggcagcaggcagacctggattgaaatcctggctgggcaaattaattctctgagtctcagtttcttcctctggaaaatggagatgatactcacgtgcagtgcctggcgcacagtggtgctccttacatagtagtcacatgcctgactcactggaacagctgtgcaaccttcttggtttcctcatctgtaaaatgggcagattaactcctgccctttccacaggtcgacacccagatactggctagtggggccaggcaggcaagtggtccagctcttcaaagccagtcattctaggccaagatgagtccggctgcgtttgccggaagggacactgcggggggtggggggcaggtacggggactcaccatgtattccatgttggcggcaggtgggtacacactggcccggatgtggttgtgataatccagtaaggcattcatgtctctcacagagatgtggcgcttccggcggtacctgggcacctccaggccactcaggagccgcatagccgtgctctcgggctgggccggggctggggtagcattaggcattatcaaggcgttcactgcctggccagcccagaagagcaggcctgccaggcccacggtgctgggcagcaggggcatagctggatggaggagtcacaggtctgccttgtgcaatcagagccggctgcctggaaggggcaggcacgagagcaccagaccctgagcgttctccaacagtgccgacccagaggatgctgcctcctgggaacttggcaaagacctccagatgcagctctggtccagatgcccagcaccccttcctttccaccccaggggactgagtgggttgggcaaggggaagaaatgcccagacagtggctaatccagacatggccctggggtgagatggtgccaccacttcaaagccagtgctctgtccctccagcccaggagacagacagcagccctctccagtctagacatcctcttcaccaatcctgctggagcgggctcagtcaatgccctcggagggcagggcccaccttaccccaagtcatattgcaaggtccttttgtccctgctttgctgcaatttaggaattgagaatgagacacagagaaaacccaatggcagagaatgaaagaggcagagaaaaaagagagaccaaaaaggggacagaaaaaaagagttacagagaaaaaagaatgagaaatagaaaggtaaagagataagagagaatgagagagaggcaacaatgtggctgggggaggacagaaatagacagagagaggggcacaaacagaagaaagagcgaaaaatcgacttagagaagagacagagaagcacgagagaccaggcaggaggctccaacggtgcgtacccaggacgggcagcccaagcggtggcaggcggcagcccaggaggccggggacctctgcagacaccctggcccacctggcggcgcagcaactttaacggtcccctggtgctgttggcatctgacgtccctggccccacagccccctccccttccagccaggccagactcctgcagggaggctccgcctgctgcttgatgggcttttctctcccgcccctctctctctgctttcacctgaagcatgtagggctgggctgggcaaatggtcagggtagtgatgtggcaacagggcagggattccaggaaaaaatactcatcccctatgggagatcccagaccccgaggcttctctctgccttccacatcctgacatattaaggccaccttgcatctggagagtattttctgactgttttccctataacaccctccagccttggagcagacagttaatatggcccatctagtgagcccctgctatgtgccaggcccagggctgagtgctttacacaaaagcccagccaaccttcagaagcaggtactatagctccccatttcatagatgaggaaactgagccccagagaggagaaagaacaagcccaaagtcaagccagccagtctgcaatcacgccaggatttaagtccagatctgaccccaggcctggttagtatctaaaaggatgccttttccttttcctttccttttttttttctttctgttttttgtctcactttgtcgcccaggctggagtgcagtggcgcaatctcggctcactgcaacctcgattctcctgcctcagcctcctaagtagctggggctacaggtgcacaccaccacacctggctaatttttgtattttttagtagggatggggtttcaccatattggacaggctgtctttctttttttttcttttgagacagagtctcgctctgtcgtccaggctggagtgcagtggcacaatctcggctcactgcaacctccacctcccaggctcaggtgatcctcccatctcagcctcctgaatagctggggccacgggcacgcaccaccatacttggctaatttttttgtatcagccaaagatgccattttctaaccaaaccaaatatagatgcataaggaaaaaagcctagggtgatgttcgttatgatgccactcaaacacagcctattcattagcaaatgaattaagcccacaaatctgggttcaaatttcccttatcccaccccctcactaactaggtgttgggcacg

SEQ ID NO: 1562040 - DNA, 4001 bp, Homo sapiens
agcctataaaacacaacttcttatgtagtcaaaggattagtattgcaaaatgaaaagttttcttatagcgtcaaaaacatatgaacaatcaactttacttatccatagaaccagagaactgaaaaaaccttccatttcaatatgaatttattaatttattattactaccagtacaggaatgtgtaagggttcagatctcaacctactactttcaggaaggacaaaaaccatttaaatgtcttttacttgatatgcctgaaagaatagcaccaggatctattttcatctgccttatttcaaggtgtaattgctgttgatatttatagaccgaagcttctgtgtctgttctaataattagtagaactccaattcatatttgcattttgaagttctcacccccaacaagtccgaagataattttcctaaaatacacagatcctcactggactctttcaagtccttccagagatgatgcgaaccagcgactcagaattcaatgactacaaagcgcagggcctacacctgtaacacactatgtatttggaaggattttcaatgcacctttagatgtgtatcaaataaaagtctcttaccctattgttgggttgatgtttggatcaaaactgtcttccacaaaccgccacacaatactcgatttacctacacctgtatcctgaaagagaacgagatgagggactgagaaaaagtttaccttttggcagacaccaaaaactactttgtggcataagttcaggattttagaaaaatcaccctagacgtgtaaattttataaacggaggaacacaaaagcggttgtcataaaaattcagtagagtaattaggaaattccaactgtactaaaagggagaggtttttgccgttaagacagattaggaccttttgagagacccaaagtttctgcttcgtgtaaaaagtaacaagtccacttgctttttaacatatgttagtaaactttgaactcctgagttacctctgagtaatccctgatgaatcctagccccaccctatttgggggaataaagattagttattggagttcctgccgatctttaaggcagaaactctggaatgacagcatcaatttcagaaagaaggctttgaaatggccaacaccttgtctttcctgacaagacaggaagctgaagcttcaaactagtctttggggcttcctgatttgaacaccccttttctccacaggaagagttacttggcaaagtaactctttggacaagtggcaggggtatcccacaagttcaaaaacacccaagagacaaagtaggctaatgctgcttgtaaaacctaaagacctgttattggttttactttggaagacttggccaactcccaactaataccttggtaagttgggagaaaactatttaagaacctctcttaacccagatgcaatagagaggcaagggggggctgtttgctctttgtggggcgggaagagtccacgggctccagggaggggaaggggaagggtcccttcggcctccaggaccttttcgagagtgcaagaggtgggcgggacggctcccgagctggagggagggtccacggggctggcagacagcgtcttggacgtgggaggggggaagggatgaggggacaggggggatccggggtccccgccagcccagcctcccgtggccctcccggccggacccgccgccactcaccccgagcagacacactttgagctccctcagcgccatggcccgggagccaggggcgcgggcccgccgccgccctaagttgagaagggagaggccaggcccagcaagagcatcccctggcgccgctgccgccgcacggcccagccccggtccgcgcagaggcggctgccgcccgtcctccggccgtaggtccggcctgtccgctgccagccgcgtggggcccgccttagcagccgggacgccgccgcggccttccgggagccgccgccgccgccatcttgggacgccggccgcgtcacctgacctccccgcccacctcggcagccaccttcgctgagagggcggggccggccggccggcgcggatcgggggcggggcccgaagccgacggccccgcccctgtctgcagggccccgcccctgtctgcagggccccgcccctgtctgcagggccccgcccctgtctgcagggccccgcccctgtctgcagggccccgcccctgtctgcagggccccgcccctgtctgcagggccccgcccctgtctgcagggccccgcccctgccggtcccgcctccatgcccatcccaagatggcgggtgagtggggctgggctcgggggatgccaggggtgcccctctctctctcgccccgtgaccaccccgcgaggccgaggggcccctgcccgaccccgtcccctctcgccgcagccccctggtaacttcttgtgtgtttcttggttttcagagatccccctgtactttgtggacttgcaggatgacttagacgactgtaagtaagagttggggcacccctgtccctccctgggaccctctcaaagaattcagagtgcacgaagcgcggggcgggggaacctcaagccaggcactccttgtcgggaccagaacagcgggacccccaactgcctagatccactggtggcggtccctcctccctgggcggggcgggctgagggtgggagcccttcccttccctcgggggaaggatttttgttgttggggaaactttggactccctgtcacttcttttcttcctgcgcctgcagctgccgtgggatgggcggagggggtagtcccaagtcctagtcgaccctgggcgggcggggggtccgccacctgggaggtgggtgacttccctctcagggccttgcccttttcctagggactttttaggactgctggggggtttgggaggtccccctctcggtgtggccggtcacggagttgcacggacttctcaagtgtcctggccacaagcccggctccatctcttatcccatggagcccattggcccccgcatttcttgggtgggacccttgtcccttcttgccctcttttttggaatcatgttaagggctggtagctgggggaggtgtcatcttagaaatccaagttcgcatttctggtgaaggaaggaagcgttttctctcctgtcaagaaacttactgagcagctatttgctctgggggccacgtgttgggctccgaacctgcaaggatgtgttgaaaacagctctacacgcagggagctcacagggtgtggggagagcctacttgtaaacagaaaattaccgagcaccggagtgcttgctggtgaagaagccctatataaatcatccaaatagctaacattaattgggggcgtactgtacgccagtcatatacagtacttcctctcatctttcattccacatcttcaggtttcctaatagtaagagttggtgtttactgaaaacttaccatggaccagacagcgttaaactcttttttttttttttttttttttgagacgtagtcttgctctgtagcccaggctggagtacagtggcacgatctcggctcactgcaagctccacctcctgggttcacgccattttcctgcctcagcctcccaagtagctgggactataggcgcccgccaccactcccggctaattttttgtatttttagtagagaaggggtttcactctgttagccaggatggtctcgatctcctgacctcgtgatccgcccacctcggcctcccaaagtgttgggattactggcgtgagccaccacgcccggcccagtcttaaactctttacacacattaactcagaaggcgcagtttcggctgggtgcggtggctcaggcctgtaatccccgcactttgggaggcagagacgggcagatcacttgagtccagcctggccaacatggtgaaaccctgtctctactaaaaatacaaaaattagccgggcttggtggcgcgcgtctctaatcttagctgcccgggaggctga

SEQ ID NO: 1562041 - DNA, 4001 bp, Homo sapiens
taacatggtcaaataaaggaggaaggctgaaaatataagatatggaaataagaaacaagaataggaaaaggtagacaaaaccaagaaaagctaatacagggcacctcttttctaaaacttaataatttaagaaggattggattattgatttatacgcaggtgttgaatttcattgccctcttcaagatactctggtttattcaacaatattttaatttttgaagttaaaatcacgggactccaaaaagtggagtggagtggagtttccattccataaagtggaaaaatgaagaaaacaagaaactataagaaaataattagaaggcaagggaagaaacacgaatcaaatttaaatgttttgaaataagaacgataaaagaaaaccttcacttaaaacaaagagaaggaattaatgcacatttttacaaactgtactattcttggtaacaccatagggctctatcactaagctaaagatgagaagggatgttatagcactttggttgacttctagggaagaatcaaattattgcttacatataagtaatcttacactgccactatggaagcttctttttgcttcttttctacttaagatactgataaaagagaaaactgagccaagacgaacacaaagtcggcgaaagaattaaaaacttaggtaaacttccatcagtgtctatttgtaccgcaagaattcaatcattatgccccaactaaaggtgacgcaatccgccaaaccatgttcccctacggggcagctggagattttaatgcatatggcttgtaccttgcgctggttccactactttcctttttagtctgtgtgtttcgctctctcggaataaattcctatttatctttttaaatggctcccagtggtgtgaggtacttttaaaatgtactttttggcctggcgcagtggctcacgcctgtaatcccagcactgtgggaggctgaggcgggcggatcactttgatgccaggaactggagaccagcctggccaacatggtgaaaccccgtctctactaaaagtacaaaaagtagccaggcacggtggcgggcgtctgtaatcccagctacttgggaggctgaggcaggagaatcgctcgaacccgggagacggaggctgcaatgagccgcgatcgccctactgcactccagcctgggcgacagagggcgactccgtctcaaaaaaatcaaatgtactttttaagtgatggacttcttaaaagagaaaacaaacaaagaaaaaacccaaaccctgagatttgctattcctgagacattgattttcccgagcacatattacctaacctttttcccctccccacaaaatacgcacacaaactccccccgcaccctcccgccccacgtcccggaggctttttcagtctccagattgaactgacttcgtgcaacgtgaagccaccgggatggggccactccgtggaaaccggcccgcaaagggcagggtggcggcggtggcggggagggagcgaagggagggaggaaggggtcggaaggggaccgggcggggaccctgggagaggggcgtggggagagagggctgagccgggcagggcgagacccttccgggcgtgagggaggggaaagcaaagtgcaggggctgggaagagctgacggccacgctcaggggcagggggacgccaaaggctcctccacagacgactcctcagagttccgggccgggtgctcacagagggaaactgaggccacagcgcccattttcttccgcgtgcgggcgaggagaccccgggtcgcgcctccagccccagctgggctgcgggcgacgacctttcttcctcaggcgggaccctccgggcttggcgccgcgagctaacacggcgtgaggcgccggcgccgggtgcgtgtgggaatgtgggtggcggcggcccccatctcccagcccgcctacagcactcggggtccggccggcctctcaggctgcgccctactttcaaagcctcgtctgaggtgtggcgtgccagagcaggggctgcgaggagtcgccaagtcagcttggccgggttcttggcgccgctgggcgtctgcaatgcgcggcaggcgcggggcggggaggggcggggcgtggagaaggcggggcagtgggcgagggcggggcgtgcaggggacggggcggagcagtgggcgaggggcggggcgtgcaggggacggggcggggcagtgggcgagggcggggcgtgcaggggacggggcggggcgtgcaggagacggggcggggcagtgggcgatggacgggactgacaggggatggggcggggcagtgggcgaggggcggggcgtgcaggggatggagagggacgggcaggacatggggaggggcgtggaggggtatggacgggcggggcggggcagtggctgagggaccgggggcagggggcggggaagggcgggccagcgaccgagggactgggcgcggcggcggcggcggcggctgggggtacggacagagtagggcagtgcgctagagtggagaggaccgggactgagagggacgagggcgcagggcgttggtggggacagtggacggggcaggagggatagagtcagacagtgagcaaggcgcaccggtcctagtgcgcagtctccggctttgtcctggcgctcggacctgagacacctgagcaggggcatgacagggatggggcctgggccccatagtcctgttgtgaaaggtgatctttctggctgatctctgaacatccctatgatgcagtccagtctcttctcttccacttatagctggaggtcactggagaaattctttaatcccttgaacctcagattttctcatctgtaaagtgaaaataataaaagtactcgcgccgtaggatattgtaagaaataaataaaatgaaccatgaaaagagccaagcaataataagtgctctacaaatattagctattattattattgttattattaaaaagattattcacattgacctgccctttggggacagcaaatattttccagcctggaatatcacagttctcagtagtcaaggccaagtgctagaacctgagaaaaatcctgcaagagcatcaggatgcaaggctggtttcctctcttgagtttgatagtaaatactaataaatcttggagcggcaatggcatccaatataaggttattgataaggttcaggctcctggctgggcattttcatgggttgtctcattgactcttcaaacaatctcacaaaagtagttactggttttccccttttgaataaggaaagggctggagaaaaaatagcaacctgtctagggtcacgtggttgggaattgtagagacaggattcaaattgaattcaaattgaagtttagctcccaatttccgacctcaggaaatgatgtcacggcaaccattcaagaggatgtctgggagacacccttggtgccaccctcatgtctacttcaatgccagcccatcagcaagcccatcactccaccttcaaatatgactttcatctaccccttctcaagatctccaccgactccaccctagtctaagccacctctctcctggaaaagctccaacctcctgagcggtctccttcctgtcactcacctccctaaagcccattctctacaccaggggttcccaaccccgggtgggaacagggccgcacagcaggaggtgaacagtggacgagggagcctcaccgcctgagcttcgcctcctgtcacatcagccgcgcattagattctcacaggagcgcgaaacctattgggaactgcacatgcgagggatctaggttgcccgctcctcacgagaatctcatgaccccccgcccactcggctcgtggaataattgtcttccacaaaactggtccctggtgccaaataggttggagactgctgctctacactgaagccagaggggtctttgaaaaatatagatcatggccaggtgtggtggctcacgcctgtaatcccagcactttgggagg

SEQ ID NO: 1562042 - DNA, 4001 bp, Homo sapiens
aggtcagcatccgcatgaaactacctagaacaaccagtccgggaagcgaatcagcaatttcttcgtaaaagttttaaaaaggtcgggcatcgtgttttggacatttacccagcaagaacctctcccaccctgggttttttcttgaatatcataatctaacaggcccaccagggtttggtcagggcctcttgccactcaggagttgggactctaatctcaccagtcttcattttcctgctctgcaaacatagagaacattaacacattctccagggctgctctggggatcaaatcagattatgtagaaaatgcagtatctagttcatagtgggtacaataaacgacttttcccttcttttttccttccaactccccgaggagttacgtacactgaaaccacatttcaatcctactacctgttacgctgaaaagtcctccataccagtcacctctccaaagggagccaaatggctgagtgacatccttgctaacaagacaacacagaacggagaaactgcaaggaatttggggaaggcatttgagtttcctcagcttcatgaaaaataagtgcagaacaaaaggtcagagcaacagctacaagcacatgtacattttagtgaacgtgaggggatgtggtccttgccggccacacttctgccctcaaatgcagaggtacttgaaacaccagttggctgtatgaacgaacaaaggcatgacaaggcttctgcaatcagtccaggtgctggttacacggctttggacgggtcacttaaccttgattttctcatctgtaaaacagagacactaatatctacttcacagagttatgagaactaaatgaagccacacacacacactgcctaaagcactacaggttcttaataaatattactttcactctattcctctacctcaaccttcaagttgggagagaacatttctgccattagggatgaacttaggaaaaagaacatggtaggtgagaatcgttcgtgttagtcagtgtggaccacaccttatgctgagcactgggaagcttccaaagttcagaaggcacagtcatctgtgggacccacctaatctcttcccgctctctcccgccttgctgcaccccagccctcctagctctgctggcttcctttctccgctgaacacaacaagctcatccctgccttggagcaaacctagtgctgttccttcagcttgggatgatttgcttctccctccccacagctacctccgtttgaatcttcatatcccagttcaaaagttgcctcctccgaacttcttggggtgatgaaaatgtcccaaatttgaacttgccatgtttacgcaactgcataaaatttccaaactcacaatatacactttcaatggttgaaattaatgttattttatacttcaataaagctgtcacacgtattcttttttaaagtcacctcctcagacgcttctttgccaactttaacatatctaatcttccatcacatcccctggaatttcttgtttacactcaaaatctcttcccccccagaatgctggctccaagagggcagccacttgcctggattcttcccttaatgcatactgggtcccacagtacaatgcctggcccagggcggctggtgtttaatactacttgcctggagaagtactgcctgtacggtggcacctatatacgtatacaataaatacttggcgggctaagacagaaacagacttagtttcagagactggtaactgctacgaaagaaatggagcaggttgacgtggaagaggctaaaaggggacgcccttctgcaaagcggccagggaaagcttctcccaggagctgacatgtatctgacgagacgccagacgtgtaagggggagggacagaggcgacacacactgcattaacgcaatgtgacccttcccagaggctcagttcccccacaagagaaacgatggattaggccctaggtgacccctaaggccatttccagctctgacctcgcttccagggcccagtaacgaagcttagtcaacagtcccgctcgcgccccagcatcccgcagaagcgcgctcccgggaggcaactcggcctctgcgggagccatggcggcggttaacgacgggacgcgcgcggcacggggcctacctgggggtctcgccccggcggaaagcggcggccgggagcagaagggtctgaggagtttgcgaacctgctctggcgcgaaggacgagggccaggagcgcggacagaaatcccaggagcccgaagcctccttaagcctgcggtagaaactgccctgactaccgcggaaacaacgcgcgtgcgccctggagccacttcctgcgtcgcccggaaatcgtcgaagaaaaaggctccttttcccgcaaggcgacagcacatgcgcaaaaacgctttacaccagcagtttgcgaattggtccaaagttgatgtagccgctgcaagttactaagcgactgcttttataaatccgcaactggccaggcgcggtggctcacgcctgtaatcccagcactttgggaggccgaggcgggctgatcacctggggtcaggagttcaagacaagtctggccaacatcgtgaaccgccccgccccccgccccccccgcccccccgcgccgcccccccccgccccccgcccccgtccccccgccccccccgccccccccgccccccgtccccccgcccccccgcccccccgtccccccgtcagtactaaaaatacaaaaattagccgggcatggtggcgggtgcctgtaatcccagctgcttgggaggctaaggcaggagaatcgcttgaacccaggaggtggaggttgcagtgagccgagaccatgccattgcactccagtctggacaacaagagcgaaactccatctcaaatcagtcaatcaatccgcaactagggctagtgcaaggtagctagctgttttctcttgtgaattaattattgcatttatcatgtataaacatctaaaagattctgattgcttccaattcacgtccaaggccaacctccgagaagctgctctaacgctgcctccgaacaaggcgaggtcggccgcgggtttcccgccctggcctctccctgtttgcccactggggtaccctgagcccacctcggggctctttgggcctcagtttcctgctgcatggtggggaaaatgatgccagggctgttcctaattagggtcaagtgaaatcatacgtgaactactcttactaatagaactgtctgtagaaatgttaagggattcttattactcacacacgcccactccaaatatttcagttggttgtttcctcccaacccctacttttaggagcatctgaagaaggaagtgaaggaaaagacagatcacaaggaagggatttcgtgaggttatgtagctaccctggattctctccttcactactcagtgtggtctgcgtgccttgaccttcttaaggaggtttaggatctggggtatctttttataaaatgcagattcagtaggtctacgatgggcctaaaaatccacatttctaccaaattcccagcagaggttgctgggccgtgaaccagagttaagtaccaaggctgtagatcatttggaatcctgggcagctttttaaaaactgtgatgtttacactgcacccttagagattctgatttagtacgcctgggctagaaaagaggaaattaatattttttaaaagctccccaggtgattctaagatgcagccaagactgagaacctctagtctagacgatgatggtaataatagctcttttgagcatcaccctatgctaagcgctttagatgctccatctcctgtagtttccagaccagccctaaaagataggtattgtgattatctccattttatagatatggaaaatgaagctgacagaggtgatgttgtgtccggaattggtgggttcttggtctcactgacttcaagaatgaagctgcggagcctcgcggtgagtgttacagttcttaa

SEQ ID NO: 1562043 - DNA, 4001 bp, Homo sapiens
gagtgacatccttgctaacaagacaacacagaacggagaaactgcaaggaatttggggaaggcatttgagtttcctcagcttcatgaaaaataagtgcagaacaaaaggtcagagcaacagctacaagcacatgtacattttagtgaacgtgaggggatgtggtccttgccggccacacttctgccctcaaatgcagaggtacttgaaacaccagttggctgtatgaacgaacaaaggcatgacaaggcttctgcaatcagtccaggtgctggttacacggctttggacgggtcacttaaccttgattttctcatctgtaaaacagagacactaatatctacttcacagagttatgagaactaaatgaagccacacacacacactgcctaaagcactacaggttcttaataaatattactttcactctattcctctacctcaaccttcaagttgggagagaacatttctgccattagggatgaacttaggaaaaagaacatggtaggtgagaatcgttcgtgttagtcagtgtggaccacaccttatgctgagcactgggaagcttccaaagttcagaaggcacagtcatctgtgggacccacctaatctcttcccgctctctcccgccttgctgcaccccagccctcctagctctgctggcttcctttctccgctgaacacaacaagctcatccctgccttggagcaaacctagtgctgttccttcagcttgggatgatttgcttctccctccccacagctacctccgtttgaatcttcatatcccagttcaaaagttgcctcctccgaacttcttggggtgatgaaaatgtcccaaatttgaacttgccatgtttacgcaactgcataaaatttccaaactcacaatatacactttcaatggttgaaattaatgttattttatacttcaataaagctgtcacacgtattcttttttaaagtcacctcctcagacgcttctttgccaactttaacatatctaatcttccatcacatcccctggaatttcttgtttacactcaaaatctcttcccccccagaatgctggctccaagagggcagccacttgcctggattcttcccttaatgcatactgggtcccacagtacaatgcctggcccagggcggctggtgtttaatactacttgcctggagaagtactgcctgtacggtggcacctatatacgtatacaataaatacttggcgggctaagacagaaacagacttagtttcagagactggtaactgctacgaaagaaatggagcaggttgacgtggaagaggctaaaaggggacgcccttctgcaaagcggccagggaaagcttctcccaggagctgacatgtatctgacgagacgccagacgtgtaagggggagggacagaggcgacacacactgcattaacgcaatgtgacccttcccagaggctcagttcccccacaagagaaacgatggattaggccctaggtgacccctaaggccatttccagctctgacctcgcttccagggcccagtaacgaagcttagtcaacagtcccgctcgcgccccagcatcccgcagaagcgcgctcccgggaggcaactcggcctctgcgggagccatggcggcggttaacgacgggacgcgcgcggcacggggcctacctgggggtctcgccccggcggaaagcggcggccgggagcagaagggtctgaggagtttgcgaacctgctctggcgcgaaggacgagggccaggagcgcggacagaaatcccaggagcccgaagcctccttaagcctgcggtagaaactgccctgactaccgcggaaacaacgcgcgtgcgccctggagccacttcctgcgtcgcccggaaatcgtcgaagaaaaaggctccttttcccgcaaggcgacagcacatgcgcaaaaacgctttacaccagcagtttgcgaattggtccaaagttgatgtagccgctgcaagttactaagcgactgcttttataaatccgcaactggccaggcgcggtggctcacgcctgtaatcccagcactttgggaggccgaggcgggctgatcacctggggtcaggagttcaagacaagtctggccaacatcgtgaaccgccccgccccccgccccccccgcccccccgcgccgcccccccccgccccccgcccccgtccccccgccccccccgccccccccgccccccgtccccccgcccccccgcccccccgtccccccgtcagtactaaaaatacaaaaattagccgggcatggtggcgggtgcctgtaatcccagctgcttgggaggctaaggcaggagaatcgcttgaacccaggaggtggaggttgcagtgagccgagaccatgccattgcactccagtctggacaacaagagcgaaactccatctcaaatcagtcaatcaatccgcaactagggctagtgcaaggtagctagctgttttctcttgtgaattaattattgcatttatcatgtataaacatctaaaagattctgattgcttccaattcacgtccaaggccaacctccgagaagctgctctaacgctgcctccgaacaaggcgaggtcggccgcgggtttcccgccctggcctctccctgtttgcccactggggtaccctgagcccacctcggggctctttgggcctcagtttcctgctgcatggtggggaaaatgatgccagggctgttcctaattagggtcaagtgaaatcatacgtgaactactcttactaatagaactgtctgtagaaatgttaagggattcttattactcacacacgcccactccaaatatttcagttggttgtttcctcccaacccctacttttaggagcatctgaagaaggaagtgaaggaaaagacagatcacaaggaagggatttcgtgaggttatgtagctaccctggattctctccttcactactcagtgtggtctgcgtgccttgaccttcttaaggaggtttaggatctggggtatctttttataaaatgcagattcagtaggtctacgatgggcctaaaaatccacatttctaccaaattcccagcagaggttgctgggccgtgaaccagagttaagtaccaaggctgtagatcatttggaatcctgggcagctttttaaaaactgtgatgtttacactgcacccttagagattctgatttagtacgcctgggctagaaaagaggaaattaatattttttaaaagctccccaggtgattctaagatgcagccaagactgagaacctctagtctagacgatgatggtaataatagctcttttgagcatcaccctatgctaagcgctttagatgctccatctcctgtagtttccagaccagccctaaaagataggtattgtgattatctccattttatagatatggaaaatgaagctgacagaggtgatgttgtgtccggaattggtgggttcttggtctcactgacttcaagaatgaagctgcggagcctcgcggtgagtgttacagttcttaaaagcagcgcatccggagtctgttccttctgatgttaagatgtgtttggagtttcttccttctggtggtttatggcctcgctggctcagaagcgaagctgcagaccttcgggcagtgagtgttacagctcttaaggcgacgcatctggagttgttccttcctcccggcgggctcgtggtctcgctggcttcaggagtaaagctgcagacctttgcggtgagtgttacagctcataaagacgacgtggtcccaaaaagcgaaagaacaaacctcccacaccgtggaaggtgccccgagcagattgccactactagctccggcagcctgcttttattctcttatctggccccacccacatcctgctgattggtagagcccagtggtctgttttgacaggtcgctgattggtgcctttacaatccctcagctagacacaaaggttctccaaggccccaccagagtagccagatacag

SEQ ID NO: 1562044 - DNA, 4001 bp, Homo sapiens
tgaaatgataaaagaaagttccctaaaataagacctacaccttagagtgaaactacaattttacaaacttgaaaagaatcaactttctcagaatgggaacaatgtactgtgtgctaagaaataacctgatctaggtttacttgattctgcctttataaaatgtagccaacttaatcttgcagacctggacagaacaaaaatttaaacgctaaagcacagaaaaaggctcaaagtatcaaacgctttaaaacacagctcaactctcctttatcaaaaatgtccctgcagtaggtgttaatcagtcactaccaggaactccacacaatgcaacctgtgtattgtgcaacctgtgcgtgcatggtatctacaggaagtagaaaattcagtttaccaagaacgccacacttcactctccacacttcactctcaaaagtcttgaaaacgaatccctgtaacagcaactaatttacatttcatttcaaactgaacaagtcagtgtaacctcaaggtatgtgagattgtgaataacttcacttggcaaaatcaggtgtggtttggtttggcttgggttcttctccccctcagaggtagaatataaatagaaataatcagcaacttctgatctcatgaacaagatctttatttaaaatcttcacacgttaaatcattttatgcaatattctttcaagtgacagacacattagcactaggcgatttttgtgaattttgggactaaaagacacctggaagaaacataaggtgttctttccttcgccaccaaatacacaggtaagtgtgtctatagatagcaaaggtgttttcatcccaaagaaaagttaagacttaggatgtaaaaaaatacagaaaacaaaacatagcctaggcgaaccagctacagatcacatgcagcaggtgacaggaagccttgtggacacctcacacccacaggggcgagcttcatcacaggtcaactccaagcccacctgagctcctcagaacctccacctggcaggccataaaccagaaggtggcagacagcatcactgtcatgccggtaataaaggagaagcagcctccctgaacccaagaaaaccacccctctctccaagcaggaagagaaggccccttcacaccaaggacacaaagaaactgaagcagccagacccaaaataaaaattaaatttaaaaagcagcatgggaagacagatgacaaatctgtgctgggatcgcctggaatctcggtctatatgggggtctcacactcaaaagtaaaaataaaatttaaaagggggatgacagagatgagagcccaattaggtctgtgctgggttcacttggggtctcggtctacttagggtctcagactcaaaaataaaattttaaaaatgaaagggggaggtgacagttcaatgtgtgcacgtgatgaccacttgggatccagttcacttgctgggaggacaggggacaggtacctctgtgcccggcctccaggttctccgggagcgcaggcgcccagcgagaatctgggctaagtttaactcgagggcgacgggagcagtgcccgagggccaggctgcggctttctggaaacaaagccccgggggtccaagcccagatccagggaagggggtcggacgcccacccatccccctccccagcctcccagccaccgacccctgcacagaggagcgccctcccggcaggtgcccctaacccggcgccccgacccccgcgcccggcgcgcgcctcacccagcagcgcccgcaggtgcttcaggcgggtcagcacgtccttcttcgggtccagcaccttctgggtggacttcttcacatccccgtggctccttcgggagaacatcccgcggcaggaagcccgggccccgccggcggggcagtaggcgcctgcgccacgcgaatcaaagcatagggtcgaggccggcgcgtgtcgcgcgggccactcgccgcccccagccccgctgctgccgccgccgccgccgccgccgccgcctcagctgtgtctccaggaaggaggggcgggccggtcacggcgaggggcggggcaggaaggcggtgtcgacggggaaccgaaggccccgccccgcgggaggtgccggccggccccttgggcgctacgcacgcgcacacaggccgaactctcctggcgggacactagcccgtccgcgccaaaacctagcggggacgcgctcagagggccgagaaggcgcctcgaatcacaaaggagcttctctcacgcacacgttgtactacaagtcccgagatgcaccgcgagacagtcctccaatcaggctggcggtcttcggcacgatgggagtcagtgggccggcattgggcacgtcgccccgccctgccgcgggccgcaagtgctcctgggaaatgaagttctccagcaggcgacgcgctgcgacctcttttccagggtcgcagaagcgcagggcggcctctgtccgtcccctgccccggcagcctagatcgcccgtggtttcactctccctcctgcgcgcccaccccattttcctctagtgcaacgtgaaccacacacgcccaaaaatctcagtaagaaaagtgtcaaggcttttcaaatgcaaactatttttaggtttagcttctggattcacacaagggagcgagtcgaagcccctctgaccgtgccgaaatcgcagctctaatttcacactaaaatgagttgctttggcactagggaagagcgtgccccggtgaggagttcagccggcccctaggttcctggaacccaacctcacttggggtatggaggtcgctcgctcagagggctccttgggatcttgcctctttgtaggaagggtgcgttctctgttgtgcaagccacatggcgatccagtagcagaaccagaaatagaacctgagggatctgactcaggcctgtatactttttaaagccaggcgcttattccctggggcaagactttgagctgaaagatggtcaggagatttcttacactgtaggattgtatagtggcatccgaatcctgcaagttttgacatcctttcagctttttcagcaagtacttaaggtagaatcacgtggtttccatccaaattgggacaacacaactgtctttttctcctctagctgaactgtaacttgagggaagagacaaggatttacacgcctttgtatccccatccctcagcacagtatttggcccatagggtcactcaataaaagtttattaaatgaaatacaataaaaagctaaagtagtcctacatatttcaaccaggcaggcgaaaaggaaaaaataaataaataaactcacagttttagagcgtctctctatttttagatttgtgtaatattcctttgtatagacacattcatacaaaggaatattactcagcaataaaaaagaacagactactgataaacccaataacatggatcactctcagacccggagatgaaagccccatgctcaagatgatggcagagcggccctaccagcctgagtccccagatgataacagatcaggaccacaaacttctaaaagtgtaacaagagagcaaaataatgtcttatcttaagtcaaggcattttgagagtcttcgttacagcaattgagcttgtacctgattacacatagtaaaccacaatgttcactgtccaattcctttaggagaagatacttttccttacactgattgaaaaaatagaatatacttgtcttaggaaactccatttttttaattgcaaagcaagctgccatcatcatcaaacatttattgagcacctgcaatgtgtaaggcatgattctaaaccctggagataaaagatgtataaggtgcatcctcctgacctccaatgcttccaatccagttaaggaggctgagcgattagatacatgtgggaataaatgacagtgtacagtgaacatgtgatactatcaagcttggtaatgccagaaacaggcatctgtgcatataaattcatcgcacccatcatat

SEQ ID NO: 1562045 - DNA, 4001 bp, Homo sapiens
ctggaaggaatacagagatgaagaaaacatagtccctgccctaaagcttctcataatctagaagtagggatagaactacaactcagaaaaataactgataagtttcactacgatgttcctaaagagcaaattggaaggactcaaggtgggtaggggtcagggacagaggtatcttgaagggaatgcttaaagctaatgcagccagagacaggaagaaaagggtatgtaggcctggcacagtggctcgcatctgtaatcccaccactatggcagaccatagtgggtggactgcttcagcccaggagtttgagaccagcctgggcaacatggagaaaccccatctctacaaaaaaaattcaaaaattagccaagcgtggtagtcccagctacttgagaggctgaggtgggaggactgcttgagctcaggaggcggaagttgcagtgagccaagatcatgccactgcattccagcctgggcaacagagcaagactctgtctaaaaaaaagaaagaaagaaaagaaaagggtgtgtatatgcatataggagagagcagaagtgtgtgcgtttgggtgggatggccagaacgttcagaggatggtctaggcagacttccagcatatgtaaaaacgacccagaggttacagacgctacacctataagtactgtatatttaggaaaattgcaaacgagcagtttgcataagatgcatacattttaaatgttccagatgactcagaatccctgcagagaattccatccctaacagtctttcacaaggtgtagtggtcagtcaacctaaagatctctgcgggtggaacctgcaagtttaacaagctcccagacaattctcctgcacacttaagctggagaaagagagatgctttttgagatgcagaattatcaaattacatgcggttcccaaactttgctgcaagctggaatcacttgggcatctttaaaaaaaaaatattgaagtctggctttcaactccagacattctgattgttttggtctgggatgccacatgggcatcagaaacctttacaatttcccccaggtgattctacagtgtagcaaagttggagagccactgccctaattgttaagcacttgggtcggatgctccggttcaaattactagctatgtgaccttgggtaattaagtcacccaaccacccagggactcagttgcctcgtcagtaaaatggggacaacaatcctacctcacagggttgctgtgaagttagacgtggagaacgtaatggcctggcatgatgcctggcggataagaagcgcttaatgggggttagctgtttactcccatcatcaactctccctcatcaaagtgtcactgtgcaatgggcagcatcgtccccactgggcggcagcaacttgcctaacctttctgctggaccaaattctttgcgggagttgtctagctccgctccagacccgccccctcccccaggttgccaggagagagcttcgcctggccggggtagctcccaaggattagaccgggtttacacagactcgacagcagccgcccactccagggccaagctttccccgcccccgtgggtctcccaaaaatttgcagatgagcttccaaaggccgggcccctggagcacccagagccgagaaacaagcctcagccgtcccttgaccgccaggtggggaagagagggaaggagaggggagggtccggccgcggcggggccggctgcccggttacctgaggcgacgggcggggcccgcatcgccggggcgggcgccgccgccggccgtcctcggccttccgcctcacgcgacccgcgccatagggctggcgctttcaccgccctggccggccgtcctcaggcggtccgtcagtccacccgtcagcgactctcccagggcgccaagggacgacgaaggccactcgagccagccggctgggatctgctcaggcaacttccgactgccaggggcggcggcgtcaaataactccccagccaagtgggccactgcgcgtgcgcggtgcgcctaatcagagctttctacggggctgaaccggtggcgtcaaataattcccgagacacagagccggaagctgcgcctgcgcagctatcccagatcgccgcgcgggacgcattgcgttcctcccattccggatcaagtggagagggaggagtgaagtgacggatgcacctacctcatcgcggcacagaggaggcgctctacctgcgtccttaggaatcttacggcatccactctacctgctttcggtgcagacggataaggggcttctctgcaagattctggctcccacctaggttctaggaatttctcccatcccaccattacagcactcttcctctgaaatgatgccctttgctcgccgccgtcttattacacgggcacagcattaattatgaacagtgctctattccaggcccggtgtgggttacaaaggtgaatcgaacataagatttagagcctctcattaaagagctgaatctgatcgagataagacagtagtaataatactaagagatactacttcgagcacctgccatgcgctagacattttgtaaacagtaccactttcaataatttgctttcacttcaacgaagaaaataataccattggagaggtacagcttaagtgctttgagaatctaaaggaggaaacttggactgagaaagaagaggagggagggatggtggaattcttcacggaggacctggccttgagactgaccttgggtattgagagagggaggaggggtcagggtgttgagtagaggtgaaggcacggttgtctgaaaagcagaagggagcaaagaagattctgactcctcacctcagttagaagagactatggaggaatgagtgataagggaactagtatcctcacagaaagggtaaaactgaagagtgtttcctcaagaccacacctcaccccccagaaaaatagctacaggaaggaagagggaaaaggagggtaagaatgtgctaggacaggaacgaggctatgtccaggacactggatccaagcaatacatttcaattaaacacagtgtgacaaattatgtagttggctaactcaagatctatttcaaccactcccttgcctttctatactacaggggctgaaaagcaaagcacacaactctcaactttctttgctgctaagggtggcagtgagacaaagtcctggccactgagatgtaggcagaagtatcaaaggagaccttcccttccttcttcccttggagaagtttgtgtccttcacttttcccctgcttcatgcttggaactgggtaacacctgggagcacagcagcctagaggccatgaggagggctgtgctgaggaaggtggagcagaaagacaggagcctgtttgtttaagtcatactcaagcagctacacaaaccctgtactaccttcctgtcttatcgggatgagggatcttatatataccagagtttgttgagttttatgttacttgcaaccagatgcattctaacacaattaatactgaacccctgtaacagacaagggaggggtgactaactggaagaacaacgggtgatgggaattggaaaagtgacaggcacagaggatgggaaagctgtcccaaagcccttggggagatgatgaaaatacagctatcacccttctagtggtttcaattcattcctgaaattctgcttctaagtggaaagctgttaaatttttcccattaattaaaatgggcaaaattgtgttcaattccagcctaaggcacctaaatatttttaacagaaaaaatatattgatgcaacagaaaattatacaaacaaataattttgcttaaaatatggtttttacataacatgtaaggcagtaagacttactgctctggacagaaagacaagatttaatattaggtgcaagttggtggaggagagatgcaagtgagtggttctctaaatgatggtttgtttttttaagacacagggcctcgctatgtt

SEQ ID NO: 1562046 - DNA, 4001 bp, Homo sapiens
ccaggcaccacagacgtaccagactccaaagaactaatgtgaacatcaagagactcctcaagacctggcccagaaactcccttgcctgatttttagacactccctccaaccggatcacattgaaaaactggaacatttgccaaagttaattttagttcactttaaccactctgggccttatctgaaaataggagtaatatttgtttgaaggcagatgacttgagctactccccctaacccccatcaaactaggatcgataaatctaaacacagagaacctgcaaggtctgggaggaggaacacaccacacacaaactaaagggtggatcccaccgtttacagtctcaaagcttccttgagccaaaaccccagggaatttgagttgtgtctgagacctggagtctgcatccatcaacttctaactgccgcaacactagcaaggaattcatccaaacctttccctttagaactatggtaaccccagaatgggatttcatccacagtatagtggacaacggcccagaagtcagggaaaacccagagttatgcccctaattaaatggtgtgacccaaggctaggtaaaaataccctctgcactaagagatgatacatgctcacaccaggaaatattaataaataataggtactggcaccactcctttgcacttctgtggctactgtgacttggagaaaattacttgacccctctgcgccttaatttctgcttttgtaaatgaggataaaccagaaggccgttgtgaacattaaatgaaataaggcttgggaagttcctgggtgaagtctcattaaatgttccctgtcggtgttaaacacttctttcacatattagttccctccctgaatccacgaacaccccgcaaagcgagtttccttctttccccccatgtcaccgagaggcaaactaagactcggccgccaaggaggctgagtgaaacgcggatacggccccagttcgagggcccgttgttgtttctctccgagcccaaggcgtgcaaagagcccagaagaggcgggagccgaggcaggacaagctctgcgcgcctccgggagcccgtagacccagtccgggttaggagagccggaagcagccgcggccgggcccgcctgcggcctccccggagcagcctccgttcccctccctccgcccctcgccgggcggggcggggcacgagcacaaaagactccaacttccgagcgggcgcgggcccacccagccaactactggcccagacttggcccgcggagagagcagacagggaacgccgggagcaggaccgggcgcggagggctggggccggggacccggggcggcgggtccgagtgggagaaaggagcggcggagggggcctagagttactcgggctcccgggactccccgaagggcagaaataagtttctaaaaataggcagcggcctgccggaagaagtgagtgaacggaaaggcacaaagcacacaccctccccgcacccctaaggagacgcccgcagtccccactcacccgcgccgagaggtctggaggaagccgcgcggctgggaaggaggcggtactgccgcactcggggacgtaagggagggaggaaaagggcggctgcggcgggaagaggctgggcacacgcgcgggagtcgtcgtcgtcgccgtcgccgccgctaccgccccctcagcttctctgggttccgctgccccgagctggcgccgctcgcgcgccccgccgcactgacagcggcgcgagccccgcaaccgcgagccctgccctcggccggcaccactgaggcgcgcgggggtgggggcacccggagcggctccccgcagctcggctccgcccgccgctccggccctggttccgggctctcctccttctctgtctcctgggaaggacacggtgacacgagcacgaggagtctgcagccccgcccagaaacagcccggcttcccaggcgcatgggctctccccaccctctcagcctggctttggaaaggtccagagcttcggcggggacgggaggaaggcggggccagggtggggcctgaaagggaggagggactgagacgcggcttggggaggcggggctggggcgggaagagggcagcttgcacaggtttggagccgaagtaggggcggagctaagatggtgatgaggccctgggaagagggtcgccggaccagtggggaaggccgtgcaggagatggagagccgggaaccaggacagcgcttgaaaggagatgctgtgggcggggctaaatggagaatcgcccagagggcggagccacgggtggagggaggcggggctgaagagaagcttagagtgggaggaagatggaagcgggcctgaaggaggcgggcccggaagcagggaggggaggaggggccccgggggtggctactctgggcgggtgccggaaggaggcgtgccccaaggaaggactgaggggtggtgcttgaggtgggcggggcctggagatggcgctcaaatctgcaggctgtgggcggtgcaggagggatccggaagagacgaggcaggaagaaactcctggtcctttcgcttttaaggaacgtgccacctagacaaggtgagggtcgctcttcgctgcctaatctgggactgggcggagaggccgcgctaagggtgatctccgaaaaagatgcaggagatgttttataacttgatccaggtgctagtcctctctcctacacatttctcctgtcgggatttctcactttcagtgttccagcctccggtgaaccagtcttcctagtgagagcacgagaagcccgttgtccttcattcctcagctatggatttccctgaaagttgagaactgaccatattctcgatgcctcctccgacctgtgatttcatgactcacatcgcttccccagaacctgcttaacagacgggattcctgagaatggagcagagtttgaattcagagtcctggctttgccataccagcagttataattgtccttctgttgtttgatgacctccctgccctgcttcaaaaggaagagaaatcaaagagttgacgaccctgagcgcaaggcctgggacgttcttccccaaactcgctttaatatcaccttctcaaaagaactcttccctgaacaccttgtctcaagatgttctctagtttgtcttcttgttctgtcatttatttgtctgttcattgtttgtgtgttttttgaggcggagtctagctctgtcgcctaggctggagtgcagtggcacgatctcggctctctgcaacctctgcctcctgggttcaaagcgattcttgtacctcagcctcccaagtagctgggattacaggcgtgtaccaccatgcccggctaatttttgtattttcagtggatacggggtttcatcatgttggccaagctgggctctaactcctgacctcaggggatctgcatttgaggataaaccctgtcttggctcctccctgacgggggtgagaagtagccctcctggaattgcctcaaagcccccggttatcaccagtgttctcggttgcaaattacgaaacataaataaactcagactaacagatgcagcaaaggaatttatcaggaaggaatggggagctcccagaactgatgggaaggctggagaaccaggctcagaaaatgcactgaagtggtgagcgcagaggcttgaatgttgccaggactctcctcccagtcctttatctcttctctctgtatgcgagcttttctcctcaaggctaggcacctggctgcagcagcgctcaccactcacaactctcacccgttccaccggagagagactgaggatttctgcttctggtctgaaggacaaaattttagggaaaaactttgattggtccaacataggtaagtccccgtccctagaccaatcatctatgggtggaaaaccaggtgctgtgactggcccaacttaagccaggtgccattctctaaccaatactgtgaataaggaagtgggacgtacaggga

SEQ ID NO: 1562047 - DNA, 4001 bp, Homo sapiens
ccttccagcctccccagcacagggaacccaagctgtaccagtccacactccacgtgcccaggcaggctgcacgctatgcctccatcttctcccagggcaagaacacccgctctttccaaaactactgccctctccaagctcagccatcatttgaggccctcttccacccctgtgaggcctgctggactgccacagcctaggcatcaggctgacctgtccagaggagaaaacacagctactgcccaccctcaaagcccccacgcaagggtctctgatcccaaatggccaccacccaggtagatgtcacactgtgtccctgggacactatatttgaacacaagtgttttggtttttttgaaaattaactctcctcaaacaacccgatatatcttcgccatgcgaggcttctttaatccttcagaccacctgcagaaaaagtgcctggtaagtaaatgtggatttattagtaaaataagcctagctgcagattcctcatccagatgttcctgaaagaaggcccctggctctgtcttcccggctgtttaaaagaatcattgtttctaattctttcctcccattgtactaagatcaactgtggcaggaactgggtccccctccaggacaaattgttgtttgtcagctgattggttcatacattcattcatcatttacaaggtacttactatatccccaggctgccgtagacacagcctttgctctcccgaaaaacacgttctaggcgccgggattccagatacctgggaaatagagtgcacgcagctgttgagaggcctcgcgcttggcttctcctatcactgaggcgcagaggtgctgtggacagcccagacccacacggcgcccgaggtgaaacagaaccctcagtctccctatgaggccactggcactctcggctgtccccagagctctccgacttagagctgaatgcaaagtaagcgctcgaaatgcagaagtagccggggccgcccacggcacctgcctcgctcggggcgagagaagacgccaggctgaggtcccagcgacctcaggcaccagctccgaaggagggcggggagaccgcaaaggggaagtgcccggagggccaacggcccccgcgcaccctgcgcccctctgaagcgcgccgcctccccgcgccggggactgggacctgcctctggggaatccgcctagaagacggcggcggactggggtcgggcactctccagggctgtcaggccctccccagccctgcacctgccgcgccgccccacctcgccaggaagtctcagagaccccggggatggggtgggagcgccttcccatcgcgggctcaaaaagaaggaaggacgcccccaggggtcgtagaaggaggactagctccaagccacaactttcttcggacccaaggcaggccggctggggctccgcgcctacacggcccctggcgggggtccgcgcgccccgggagccccgcggctcggggaggaaagaggagacaagagacaggcgaggattacggggctgacccagccggggtagggaccatcgtggaaaaactttggcgaggtggggggacgcggaaagagagcggcccgcgccctgcaccttgcgccgggcatcccgcgccagtgcctcgctcccagtgccccgcgccccgcgccccgcgccttgccttcaccccgggccagctgcatcgcgcccgcgccgcaggaaccgtggagttggaaagtgggggcgccgcggctggggggctgcttcagctgcgcctcggccagcgatcggcgggccgggctcaaatccagccaggctgggcaggcggtggccgcgcgactggggaccgggcgccccgccctcctcgctcccctcctccttcctctccctccctccagccccttggcctttttcagcccctaccggatctgctcgtccgctgtcctctcttttctctcgctcttcatatcactctccaccccttcgccttgccttcgcctttcttcctccccttgtctcctgccccctcctcttctcccctcccctctaggggcggagcttctcccctccctcccagacaatgctgtggctgcgtccccttccccgccagctcgtccaggctcccgccgccagcgattcttccgggctgggggtggggaggtggggggggagtgcagggttggggaggatgagctggctcccctcacctccttgctgctgccctctccaagagggatggagacttggcccaagctcctcggttcacccggagctgtgacagccactcccagggaacagtcacgctgccctaccaagcccacctccagcggcctggattccccaggcagaggttgtgggattttgttttttctaacatcccagcttattcccaaaagggtttgagccggacaggggctaaacaggccccttcgacttggcgggccggccagacgtgacagcaatgccaaggaggccaagtttctttgtccatttctcacctcccccttttccatccctggacctcctggcgcccccagtacacagaggcccttgagcagcccggctgcaggttccctatctactcagagttctccccctcacgtgcctatccccaaccctgcagtgtctgcggaccaaaggggaagggagcctcaggccaacccccaaggtacagccagaccagctcatccagcctggaagccaagcattctttactaaattcattgtttggatcttggaatgtgtctcccttagaaacaatgttataaatggtgatctgcttcccaggccagccacaaaagtctgttgaacccaaaatgcagctgtagggtggtgctgagaactgtgtcagctaccctgaaaaaggaggccactgatcagctttatttgtagaaaaaatatgtatatatcttctggttctttcttcttgggctataaacactataaattaaataagttaaagttctcccattaagtttccccatatggacccactactctatgtgttaagcttctttcctttgcaggtaatagaaataaccttgggggaatgcatttgcagacgcagtggtttctcgataatctcatctaatctcagtgtcagaactgcatggagagctcagtataagaggcaaatccagagcctaaagggcttcccgtaacccagaaagtcttccctgaggggttctttcttctccttcatcacagactggccctccctgcaccccagacacttggtgaaaggtggccatgacttctatctccggggcttggagctctgctgctcaggaaagcagccagatgctgctagaatcccttattctctaatctaatctcccaaaagagcagctcatcctcctgtgacagtggggctagggatgagctcaggttgtacatactgggctaccagaaaccctgaacctaggccctatttaaaactaaacccattacttttgtttttgtttttgttttgttttgtaattttgagatggggtctcactctgtcacccaggctggagtgcagtggcatgatcatagctcactgcagcctcaatctcctgggctcaagagatcctcctgcctcagcctcccgagtagctgggattacagccatgtgccactatggccagctaatttttgtatcttttgtagagatggggtctcactatgctgtccaggctagtcgtaaactcctggcctcaagcaatcctccccctcagccttccaaagtgctgggattacaagcacaagccatcttgccaagccctgaacacatttctctctacttagattctccatcttggtgaataaattgattgattgattcattcattcattcacgcaagtcaccagaaaacatttttccattcatcaatttccccataccaaagccacaggtgagaaaggaatagcccttcatccttcatccttcaaggcagaatatagcaacacatctgaacagggataatattttgcatatattaaactaataattaaagtctacccttaaatca

SEQ ID NO: 1562048 - DNA, 4001 bp, Homo sapiens
cacaggccccgcagaccatccccaccccattcccagaaaaaccccgatgcttggtaactgacaggcacagccccttcctggcaagctaccgcactcccatccccggagctgcccctgcctggcccaccgacacaggaggaactgaaacacagcaagggccatgctggggtttcttcaagcatgtcagcctacgaagccgccactcttctgccaccaactgtggcccagcccggcccagccctccctgcccaagctgtctgcacaggcctgggttcccagacgcgactgtggaagatgggaggaagcggtcctgggactcctgccggaaaggcctgcctccagctccaccccagtgggagggtggccaggtgagtgacccagaaggccaccgctgggcccacccagacaatggcctcgcagaccggaggagcagccacatgtttacagggaagccccactggcatccacaagtgcctgacctttaggatggatgttgcagaaggaaattcagagcgcttagccactaatcagagaggcagggcgctggagcgggacgaaaaaggaagcataaaggaagcacagactccagaaaaaagcagctgtgtgtgcgtgggtgtgagcatagctcccggtgtgtgagtgagagtccagtgtgtggcgtgtgtgtgtgtgtgtgtggagggtatggttgggggtggtgtgtatggctgtgtatgtgtgtgtatccacatgtatggtgtgtgtgcttggtatgtgtagaattagactctggctcagagaaactaaagacctagaatgctaaccagccaagacatagtccctcgtgggctccagttcaaccaagtgagacattccatgtgactgtaggacccaaggggagagtggaaagttggtggagacaacactggccccaataaagcaaataagacaagacactccctgacctgcatttctcaaagctgagccagtttatagggtagttttaatgtcctacctggggaagagcaaggtaagctttcctcctgtccaataactacaggatttaagggaggccaccctgcagggagggcctgaggcctgtgtccccaagtgctcccgatggcccatctgagggttcgtctcccagctctgcagagacagagacagacagatccaggcaggtaaggaggggctgcctccgggtcccctgtttcctacaagctcagatttctttggtatcgacacttcctgtttactgagtggtttccaagtcacaggccactcagactcatctctgacttcacatccccttcctcaagggaaccccagcattcttccttttttggtgctataggctgagactctgagctctgtgtgcggagatcttgaggtttcctctactcgccacctggggacaggactgaaaacccaaaagctaggatcgctggcctcctccacccccagaccccggcaggttccttggacttgaaaagcagtgagtgggaagagcaaaggaagtgccgggtgtgtccagagccctccagggtggtcggggcggcagtcattgcggcatatctgacatccaccctccaccctcctttaaccttgagttaacgcatccaacaacgtgtgcggggaaattccccgctcactgcagatctcagacccctcctagtgccaggagaaatggcacatcggggggtttccagaccgtttccaggggaagtttgccacagtagcacattcacaacctcctctgtctgccctgggcacagctgaccaaccctaaaggaaagtcagccccatgaaaagcagaactgctcctccacgtggcccgcagaggcggctctatcaaacctctgtacacccggacgactacctaagattaataaggtagccacccactgggcagggccaggtgaagagaccctgagcgccctcccagactcacgcttttaccaactcactggaggagccgtgggcgcttcggggaactcacctaacaaggaactcacagcatttgcctcagagcaaatgtcccagagaaaagccacctgacccactcccgtgacccctgaatagagtcacgtgacctggtttccctgttctgggtcccgcagcttcctgagctgacctgcgggcaaactctgcctcagcagccccccaactacgtggcaccatggccccgactgtacacaaaagagccatccttgccctaaatgtctgtgtgatgagctgtaagaccctacacggcactttaggaaggggcactgattatctgaggctaccaccacccatctccccagagtacctgaggcctcatggactccaccagttaaagtcccccctgcaccccatgccacactatggacaaaacattcaacaaccagccctacagccactgggatgggtatttagcagggcaagcgttgggcacacacaaaggatgcttgaaatagaaaggcagagatcctccttctcgagcttcagggaagctagtgtccacacaactccacttctacctggtttgaatctctctctctgcacggcacctgctccctcaaagtcatggcgaatcgtgagcccacatttccaaactcatcaccacacagaaaaccctgagattaagcagcagtgggtctgggccccaagggccagctgccagcagccagcaagccatgctgtggtcagctcccaagccagtggtgctgcacgtctgcaccctggccacttttgtcctgtgaggctgagatggaggcagcaccctgatactgcccaggccaggaaggatagtcaggaccacatgacccagcctgagatggaacctccaggggccaaataccacagctgtctcccggggctttcctttcaattgcagaagtaaaataaacattttttgttttattttttaaatataggtcaggttccatggttcacacctgtaatcccagcaatttgggaggccgagacgggaggatggcttgcatgcaggagttcaagaccagcttgggcaacatggcaaaaccttgtctctataaaaaataaaaaattagctgagtgtggtggcgtgcacctgtagtcccagctacttgggaggctgaggtgaggtgggaggatgacttgagcccaggagacggaagctgcagtcagccatgaccacacctctgtactctagccagggcaacagagtgagaccctgtctcaaaaacaaaaacgaaaaatatatatagataaatgaaaagattagtatccacaaaaggacaaatattgtttgattccattgatatgaggtagctagaacaggcaaattcataaagacggtaagtagactagaagctaccaggagctggaaggagaaaggagtgagggggttattgtttaatgggtacagagcttctgtttggaacgacgaaaaagttctggacatggataatggtgatgggttgtacaacgttgtgaatggagttaatgccactaatttgtacacttagaaacggttaaaagggtaaattttatggtatgcgtactttgccacaataaaacataaaaataaattattacatatgaaaaaagatgaagatcgaaatctcgcaaacctccaccacccagagataatcactattgacattttaccatacatccttccagatgctaatatagatgggtgatacagtttgtaaaaatagcacatagtttggtaagctgcttcttaaaaatatatcatattctggtggctcacacctgtaatcccagcactttgggaggccgaggcgggtggatcacctgaggtcaggagttcaaaagcagcctggccaacatggtgaaaccctgtctctactaaaaatacaaaaaattagcctggcgtggtggtgcatgcctgtaatcccagctactcgggaggctgaggcaggagaattgcttgcacccgggaggcggagattgcagtgagttgagatcatggcattgcactccagcctgggcaacaagagtgaaactacatctcaaaaatacatatatatcat

SEQ ID NO: 1562049 - DNA, 4001 bp, Homo sapiens
gtcctctgggaggccgggccccctgagctcctctgctgtctgagcaggaggcatccggggcatcactgggctccccgcctctccgagggcactcaaccagagaagccgcctgggcaccagtgctccaaggacgtctgccaggccggctgctctccaccccagccaccgacccccagcaggctctttggggcaggagtgcggagctggacactggtaccctccgtctctgaggcctgggctgtctgtatgtccatctgactgactgcccacctatccaggagcaacggtgatggccacagcagtagcagtggcagtggcagtggcatagcagtggcagtggcatagcagtggcagtgacagtagcagtagcagtggcagtgggagtggcatagcagtggcagtggcagtagcagtggcagtgggagtggcagtggcagtggcagcggcagtggcattagcagtggcagtggcagtggtagcagtagcagtggcagtggtgacagtggcagtggaagtagcagcggcagcggcagtggcagtggcattagcagtggcagtggcagtggtagcagtagcagtggcagtggtgacagtggcagtggaagcagcggcagcggcagtggcagtggcattagcagtggcagtggcagtggctgctgttgatcacatactgttctgtgtcaagcaccacaccaggctttttcccacttgcatgggcactgaaaccatcctgcagctttgctgaggaagccaagctcagagtggtgccctctgcaccttgacccgcttctccccaagggattcccctgcccctgtccacctcctggctgcccctgtggaacacccactgcatagctaggttgggcacatgcatgtggccggggcccacctggccttggaggaagtgctgattgtctcattctacaggtttggacactgaggcttgaagcagatcagagatgagcaggtggagcaagatttggacctggacatggcctcagagtctcctcccaccctctgtggtaatgggcaaagcctctcccatggagacttcggccaggtcgcttgtctggccgtgcctcagtttctgtgactgtagaacagatgttggtggtgagccctgacccaggctcctgtgcacacaccgccgcagggcccccgggacagctgcacacgcatgttgtgtgtgcacatgcactcgtgtaccccacacgcgcgtgcgcccgtgcactcgtgtgtacacataaacagaggagccagccgaggtgtccctgcagctcaggcacagcagccctgcaacctgactccctcccggaggtggaggtgggccgggctgctctcctgccctgccggctggctccctgaggcctggcccgtgggggagggggttgagcaaggcccgcctttgtggctgcttccccacagacacagcggcagaggagtcccctgctcagtgcccagctgcgggtgctgcacccctgcaccaccctcacccctgtggctgcgcccgcttatcctcttgtgaacctggatggtggggcgggacaggcccagggtggagggcgaggccaccagcctgtccctgatgccccaagcccctcagcagaccatggacacttcctgggccctggtgccagactaggcctggcctctttgcacccagctcctgccaggaacgcccactgagctctctccgttgctaggtccctggaccaggagcagccttgtgccaccccttagggaagacgtccagtcccacccacccccgcggctctcctcgcaggagtccaagctgggcctccagcctccctggtgagcaccccagccagggatcccagctcacccggctacttgggtggcctggccccggggtcccgggtactcacatggctcctggccctgcctcaacctctgtcgacctctgcgcggagtcccccacgctcttcacagggagagagaagtgagcgggctgtgaacctgcacaggcaacaagacaggattttggccaaacccgcttgacaggttttcgattctcccagccaggagcagaaaggaggcagagactgccctgagccgccaggcgggttctgccatctcgcagaaagtggccggacaggttgggtctgaagccacatagagttgggattgtttcctcataatcactgtgaggctgggctgcaggagccaagctggttagcactgagaatccagtttggtgcctgtgacacggagggcccgggcggggaagggtggggggcttgcaggggtgcctgggtcgggggctgcaggtgggagtgagcaaatgtgctgtctcgccacctcgggacaggtggtagggcctctgacacagagtggtccttcctgctgttcacagctcagctcaccgtgggctgaccataggtaggtgacagtcccctttctggcctcggtttccctgtctgtaaattggggataataagctcaagagctgtccctgccagaacccagtggacagaaatccagcagctgctatgggaagcgacccgcccagcctgccccgccctgcctggggaagcaggccttctgcttgagggggactgggcgcatgctgggcctctggtctgcgcagtctgcccggggtctgtgagtgcttgtgagtgggcttctccagtctccaggtaggctgggtgcccccggccaggtggagcccaggggggcaaataggctgggggctggcctggccccgggtggcacggcccaggtgctggagcagcctcacactgtggtctcgtgtgtgttccctggacagcaacactgtggctgcggggtacagccctgaccccctcatgccttgccccctgtgtcctacccacgacccctccccactccctcctccccgcctccacctccgcctctgcctcatcctcagcctgtcttagctctgcacggaagcagagcgggggttcccgagtccttggggccatgatccccagcgcacccgagtaccccaggaatgcacggggctcagaggaggaagcctgggagcctggcctgtagccgctgccgcgaggggaggacggacttcctgctccctggcagggcccctgctggtggctggtggccagctctgggtttgggatgagggctgggtcatctctggccccacgatgccctcccactcaggaccaggctcttgggagggggttgtggtcagcatgggccactccagctctggctggcctgggaacttcgtggaggcccctcctccggccacctccctgttcctggctgggccctttgtgagtggggtctgcttgctgctggcgtgtgttttgtgtgtgcctgtgtggggactgtgtgcacgtgtgtgtgtgtgtgtgtgtggggatacgaatgtgtgtgcatgtcttacatgtgtgtgcctgtgtgtgcatgtgttgcacgtgtgtgtgtgcacatgtgtgcgtggacatgtgtagctgctttgtgctgtggtctggatgttttttgtgtctaccccagattctcgttgaaatcctaacgccccaggcaatgatgttaggaggcggggcttctgggagatggcaagttcgtgaggctgcagctctgctgggggatcagtgtccttctacaagcggctccagggaggtcccttgccccttccaccatgtgaggacccgagatggtgccgtctatgaaccgggaagtgagtcctctccggacgtggaacaagttggtgccttgattttgaacttgcagcctccaggtatgaatgtgagctctgggctcactgcctgtggggagccctgcctcacaaggaggggtccctctgcatctgccatgcatggctgtttcaatcaaagctgctgtctaacaccaccggctcgaccttgagttcctccctgagcaaagccaagcgacctcctggactgagccagttttcgtgcctgcctgccctggctcattggccagggaccccaccccgccatgtccaggccttggtgatacaggacagaggtgcc

SEQ ID NO: 1562050 - DNA, 4001 bp, Homo sapiens
gaaaaattcttctgccttgggatcctgttgatctgtgaccttacccccaaccctgtgctctctgaaacatgtgctgtgtccactcagggttaaatggattaagggcggtgcaagatgtgctttgttaaacagatgcttgaaggcagcatgctcgttaagagtcatcaccactccctaatctcaagtacccagggacgcaaacactgcggaaggccgcagggtcctctgcctaggaaaaccagagaccgttgttcacttgtttatctgctgaccttccctccactattgtcctgtgaccctgccaaatccccctctgcgagaaacacccaagaatgatcaataaataaataaataaataaataaataaataaataaataaaaatgacaaattcacagaattgaaaaaaaaaaaaaaaaaagaattttctatggcttttggttcacaccctcctccccaagctgcttgccttattctttcttaggtatataggcatctttggttcctccactatgatattcttgttctctaccacaaaaatggtaatatcaaaacccaacaagatgaggctatttaaaaacaagtttaaaacttacttgggtcgggcatgtttttagccaaacactggaaaccaggtatctatgatatgaggggggagaaaaagctataataaagagcttaattacaactaatactttgctaataagaaatgaggcacctgatatgatcgttaccaattcagtattaacttgtgttatgaaatgaagtaggttaagtgaccatcttttcgcatgaactccatctgtagttctgtatctaggcagctctgctgatctctatagagagacctatatctgcatttgtacacccatatttgcctctacaggcctgcatctatagagaggcatgaacaaatgtgttctagacagactgacctggagccaaatagactgtgttccagggagtaggtaaaacgtggcacaggaacgtgatacagaaatttggagacagcatactctcagaagctccagccctgacctttggggttgtaactctgaccagggttttcagccacagcgctgcaatctattctggagacccgctctagaggacagcaacccagggagccgacttaccgcctggttacagaagagggttaaaaaataaaaatcaaacggcacaggtcagcctacagtaagatgccacttttataaagctcaccaagaagccaaatagaacagtctgttgtttaaaaggtatattcataggttgaaaagtacttcaattttaaaaagagaagcagatgaaaaaattcaggatggcacgggactgagatgggtagacataagggtcgtttggaagatgatgtataggcaatgtcccaggttttagtttggtaattcattacattatgcctcataatgtagacgcatgttacgtatatcctttgtatatattaagtatagcatatttaattttttaaaagctgaagcgggaagcagtgaacatgtaaaattatctgggaagtcccaaatctgaaccagcagcagatacggggggcggggctcaggggctcagcctcggtagttcaaaggggttcctttaactctaaaggctgagccctcagagaagtcttccaggcagttttaccagtcaaaattcgaccactagctcagactttaagagaaggcagcgggggagaggcaggaaaacacacagggctttgctagaggggattagacgcctattcaaacttcagccctcagtcctctcccgccgtccctccctccaggctgacttcacggagcagcggcgttgggcgcttaccttctccagctcctttttcacccagccataccagccgtgggtggtcacatccccgcctccgttcccgggaacaatcactgccttgctaggagaagccatgagtgcagcgaggccagagttccccagcgcgggtccagcggagctgagcccagcctgctcccgcagggagcctgcgccgcggcatcctgggagttgtagttgcggggacctgggaggccgggctctttcctccttggcctgccttccgctggctgcgtggggcagccaagaacaaagcctgcgagcttccatcaattgtaaagcaaagcaccctttacttgcctcttactagtgctctcatgtttttcccttatttaagacaggctatgacacggttggggtgtgttatttctttgctagatttactgatatttctataggaaagtttgtttttggtttcaaacatgcagaaaacccatttataacctgggaacgcctgaaatccatattatttttccttctgagtttaaaacagtttttagtagtcagtatcagccctggttgttgtttttcattgctttgaatgaaatttccttgcataaagctactaacccaagtaaaacaagcaaaaatttaattaaataccaagaaaatacttcgtcagattttcatattaaaccagctgatactgaaattgtttaaaatagtttataaccaatgcttagtcccatattcctgggaagacaaacaaagcttcatgtacatttggtcaccgggtgggccatttaaacattttgtaaggggatttcattcaattgttatttgaattccaatttgtcattctggttgtataaaagctttcccatgcaagagggctgatgttataacagtagattattatgctacagtgtattttcccccggtaaagaaagctttttatggtttgaattttctggaaacattggagaagactgtccttgtcatccacactacaacaaaacttcaggaccttgggctttgggttcatggtctcgcaaatgagaacggtccctccacacttttggaacagtgcacccattggaacttttgaggtaaagctaccctgggaaatttctcccaagaagaaaatggcatccttgatgtgaacagcttttcccaagttcacagattaagacttctactaccatgaaactcttatctttcaatattttttgtcttccttatgcctctacaaacaatagaagtggaaaaggggtctgttatgtgcacttatggggtatacttttatttgtgaaggagtttgcagccagccttatacatggataaacttagactttgatagataaaagatgaaggcccgaagtaggtaagaaactttaatggtacatgcattgcttcataatcagtcaaaaacaaaacattggttcactcctctaacccacatcatgggttaaagaaaacattgccagtaggccttcactcttctagaaaggcatcatttgttaggtccttttaccatggtttgaagtaaaagaagcaatgattagaaatgtatccctcattggctgggcgcggtggcttacacctgtaatcccagcactttaggagtccgaggcaggcagatcacctgaggtcaggagttcaagatcagcctggccaacatggcaaaaccccatctctactaaaaatacaaaaattagctaggcgtggtggcaggtgcctgtaatcgcagctactcaggaagctgaggcaagagaattgcttgaacccggaaggcagaggttgcagtgaaccaagactgtgccactgcactccaacctgggcgacagagcaagactccgtctaaaaaaaaaaaaaaaggaaaaaagaaaaaaataaattcagtggtagaggattaacgaagaaattgcttagtcaagtgagtaaaccctttatctagctcattctttgatctatttgattttaggaggtttggtttatcggggccttgggtttaggagcataccccgaactcttggtgttatcctcccaatatttataataatagtctccctggtgtgctgtattctctcaaaggttttaaatgtttgcacgcggtcatctctagaacgtcagatgttctctcttcaactggaatgacaaaagctgaaagaaatgtgcaaccatgagaacaccaaaacctataaatgatgtgctg

SEQ ID NO: 1562051 - DNA, 4001 bp, Homo sapiens
ctgctgtcccttgggttcaggccagccatgcactcctcacctgatgtcctgcgttggggagacctcaggcttcagttgcacactcaggggcacccgttgctctgccagccagatggcacacttcattgccacctgttcatccccgcccgccactgctcgggtgaggctcagggccatttcctctgctgaaagccagtacagcaggagccagttagcacagggtttattttcaggagctgagagtaatggggtaggaaaggaggcgatcctttgtgtgtgctgctttctctgtcttcctggtgaactcctacgtatccttcagcacccagactaaaagtccctttctccgggaggggttctctaatattccccactcctcctcacactaggctcatttggttgtttgtccttcccattcccagggtccctcatatttctattcatttatccaacaagcagttattgagcttctactgtgtgccacccactgtcccaggaactggaatcccacagagatttataaacagggcccctctccttatggatctccctgcccagtggggagacaatgaacaagtttaacaagaaaaaaaaaaaaagtcagattgcgatccttgctggcagggaaataaacaggttaaggagaccaggggaggcctctgggagggggtaacactgaagctaagacctgaaggaggagaagctgcacgtgtcaagctccagtggggaagagtggtccaggtggaaggaagagtaagggccttggccaaaaaatggttggatgagaaccgaaggaagccagtggggctccagtagagtgagcatggcggggtgactgaggacagatatcctgtgggccacccagggcctctgggttttgtttggagaacacagaggggcatgggagggtttccagcaaggcagtgactgacttccgttctacaaccctaggtgcaggggacaagagaagaggcaagtacccctgcttctcaggtcaactgacgtctgtctcccaccagcccaggaggtctccaagttcaatgccctgtgtcctctgcgagtcccctagccccatctcagcacagagccagcccaaggagttctcagggccccaagatggctctggaagccagcaggtaccaaaggaggaaactgatggggaggagggtagagggagggcaggctaaagccccctctccaaggcccttctggccaggggcaaggccaggtcctgcggggcccacttcccaccggaagttccccagccacctccagcctgtgcccacctttcttggtcttctcgtccatctggcgtggctgtgcccatccccctgggggggaccgtgcctcctgggaaatgctacctccgggtcgcctgggagaggcgggagaccaggagcaactcagccaggccgtgtggcctccggcgcggcccaagccctgtgtgtgcctcgctgtccccgcggcagtcgggaagcatcacactgcccggtgaccaggccgggatcctgcgtggggcggtgagagggcagcgggcgccgagacaggtccgcactgggcgcaggaggaaacgggaccagccgaggtgggaagaagcggggaaaggacgcccggacaccacccagccggggcgttccaagtcccggaggacccccacttgcgggagcgcccctggcgtcccgggtttcaaggcaaagccctctctcctcccgggaggccccagttcttcgcaaggggagcggcttcggcggaagagaaagtgaaagtggcggccccggaagtggggcgggactgggagggggggccggaaaaattgtcgcctcatccgggacctccactgcccggctacccggcggcggcggacgccgagtgcggggtcccagcggtcccggcgctcctgtttggggcgaccccaccccgtcctccggggctgatcgcgggtccccggactcccgcccgggtcaccctgcgggccgcatcgcagagccgcgggaaggagctgggccgcaggcggggtgggcggggccggggcggggccgggggcggggccgggggggccgggggctgggggcggggccggggtgggccgggggccggggccggggccgggggcggggccgggggcaggagcaggagcctgagcaggagtcggcgccggagccggggctggagggcggcgggatccacagcgtcgagccgctggggacgggttaggagcgcgccctgcgagcccggcgcctgctcacccaagcctcaggcatacctcggggcaggcccggtccttggccccgtttgcacatgaataaacgaaggctctgtttgttgatgacctgtccaaggccactcagccgaggtttgaatccaggcctggcaggctcaggaacccgcccttacccagatccgacgctgcctctcagcggtcaccgtctgtcttttcgttgagctattggtgaagtttgcattcgtctgcctcatgcgccgctttaatttttctcccgttcctcgtcccatcgatcagcagatcctgcgggctccacttgcagaatctcatccctcacctcctccggccccatcccgctccagctccatcagtgctccatcatctcaggggtcttgaaccagcctcctcctgggcctccttgcttctctttttgccccctaccgtccatttccacctagctgccggagagtcctgttaaaatgtaaatcaaacccatgccactccccgacccaagtactcccatctcacttaaagcaaaatccgagatctgtcccagggctcgcaaattgcctcccgatctctgtcttcgtagctgactgccctgcccctgcctcattccactcaagtcccattgacctgctgggtcctggagtaagtcagacacactcccgccctaaggcctttgcacctgccataacccaaacgtctgcatggctccctccttccctttattttggtctttacccaaaaatcttccctagttactccatctgaaatttcacagacacacgtatccagcatttcacatccgctttcctggcttcattttttcttctcagcatctattactgtctaacggagcatgttttacttatttatgttattctgggtctgttttcctctcctagagggcagggactttggtttgttttgctcactgctgtgttcctggtgtctagaacagttccaaacacataatggaggctccatatgttgaatgaaggaatgaacctcagaccttcatctgggataatttttcttttgccggaaacacatccctttagacaatgtttcttaactttggctgtacatttgaatggcctggggaagccttttttttttttttttttttttttgagatggagtttcactcttgttgcccaggctggagtgcagtggcgtgatcatggctcactacagcctccaactcctgggctcagcttcccgagtagctgcaaaccacgggcacgtgccaccacagctggctaatttttgtagagacagggtttggtcatgttgcccaggctggtcttgaactcctgggctcaaatgatctgcccacctcggcctcccaaaatgctgggaaatggttgctgttgagatatcatcacctgtcaatctaactgctgttctttttataaacagctttattgagatatcatcacctgtcaatctaactgctgttctttttataaacagctttattgagatataatttatatgccataaaatccacccacctaaaatatacaattcaatagtttttagtaacatttacagaattgtacacccatcatcacaatcaaattttaggacatttttggctgagcatggtggctcacacctacaatcccagcactttgagaggccgaggtgggcggatcacttgaggtcaggagttcgagaccagcctggccaacatggtgaaaccctgtctctactaaaaatacaaaaattagccaggtgtggtggcggacatctgtaatcctagctactgcag

SEQ ID NO: 1562052 - DNA, 4001 bp, Homo sapiens
ttgaagatgtcctattcaactctgcctaactagagatttagctctcaacttttcctggtgttgggggtgaggggaaatattccaggcagagggaatggcatggatataccacaaaactgggaacaaacttgtcatattcaagaatctgaaacaggtgcatgccttgaccatagtttgacacagtaaatgcttattcaatgacagatggtgtgaccttgggcaagagagaccaaatcagacctaggatgtcagaaatgctttctcaggctttcaaaaatcaatctgttttcaattgagacgccattcattctaatctcccttactttcttattcttcccacagctctccagtcatgccacccacggatgtggaccattgtcctttacccagtctatccagttctgaagacacttttttcaggtactactccttcatatataggcacacatacaatcgacacttttccaactctatgcctttgaacccagcaattatttcactgggtggtgagtcagtggtgcaccctgggagtgggtccagcgcccttggcacatgaaagcctttgaacatgaggccagtggtgctacatgaaatacactccatcacaattctgtctacactgggcttatgctcgtctgggtttctttctctgtttttagatagagtcttgctgtcacccaggctggagtgcagtggtgtgatctccactcactgcggcctatgcctcctgggtttaagcaattctcctgcctcagcctcccgagtagctagattacaggcaggcgccaccacacccagctagtttttgtatttttttagtagagatggggtttcgccgtgttgcccaggttagtctcgaactcctggcctcaagtgatccgcccgccttggcctcccaaagtgctgggattataggcgtgagccgccacgcccagcctgggtttctatattagaataatcctaggcaagacaaccttctgagccttgccattatcacctggaaagcagtctaatactcattgccatgccatgttcacagggctgttgcgaggataaaatgcaagaatgatggggaaaaaaatcaagtaattataactgacatttgttttattcagagccagacactgatgcaaagcatcaggacgatgctctgacggaggaggaaacgtagggctgagatcagcttcgtgtgcacattggctttgatcaaactgctgcacagcgaccggcagctccaccctggtgaagcagagggtggaggttaaacggctcagaccctgggtctggctccatctctaaccgtgtgaccttgggcctgtagcttaacccgtctagggctccgcttcctcttgcgtgaaatggggatcacagaaggggttcagacggaactgagggtccatttaaagctctgggcagtgatgtcttggcatgcagttcattttcactttaccattatatttgttcttactgatttaagggcagcaccatgacttttgtggcgcttggcggggtagagggaagtgtggtcaggaagcctggggtctgagcggcgcgggacctaggccgctcctttcctgagcttcagtttcccgcctcaaaatgatgggtggattggctgagctacacccacctttcccgcccctcggcgcttggctgcgcagcgaccctcctaggtggggaaactcccaccaccccataggccgaggaaggggcggggcaggggtggggcctggcgagggtagggtccggccgccccacctgctgccgctcacctctaggctgtagttgcctcggatggcagtaaagtcgtccagggcttcggccgcgctcccctcgtccaggttcagctcctggcacagggcctgtagcgcctccccggctgcggcgaccaccgccgccccctcagcgtggggcttgtcctcgaacatcccttcaggccccgcgggctgcgcgccacggcccccgacttctttctccctcccaggcgcgctacccacaaccacctgcgccaaagcgcgcgaaaatctgcagctgcgggacgtgttgtcatccaccgtctgcctccgcttttctcctcaaaaaaagtccgtttttcctccggagctcctagcagtccctccccggaaatgtgataagaagatgtacctcagattctgaaagacctgtccttggcccttggctggtcgcggggggcccagccggcgggacagaaaaagagcggagggatcctcagcccgcgcgcagagcctgctgggaggtgtagtccatctcttgggagatgaagcccgcggcctccccctgtcttcctggttaggctcttgggttttggggcagggctgggctgcctactgcgaggtggcctcgtgcagcgtagtgagatgcctcctctatccacgggccctgggtttgtcactgtccctgggcgccaaacataatctgagctgtaccccttgagttaggagatggaggctggaagagaaaaaagtagcccctggacgaagaggggcctcttgggactctccccaaagtcctagtgcccagtgagtggttcgctaaatgacagaggggaaggattggtgacggatattagaagacgaatcctcatctcatgctagtcgctaaaagaggcaggcagagaagactgcagtaaatgaggcaggagaatagggtctggaggcagggaacctatggctgtttcacgtgacttcttagaactaaattgaaaggaaaaccccaactttccacgcctaagtaacaaaagaaccagaggctgttcccttggaccttttctgcatggcagatgggaaattggctgtctgcaacaaatcacactgagcgccttccagtctttgtttgcaactttgtaacttcactccagcctctgaacggttgctgtccacaaccaatcagactgatggcgggagagtcttcctttgcatagaagtataattttgttaacttcaccctggcctctgattggttgctttctgcaaccactcagactgattgtgggctaccacttcagttacatcaagagagcataaagtggccaatgggaaacttctagagggtatttggaccccagaagattctgtgtctgggcccttgagctgctgcgtgggttcgcttccccactatggagtgtacttttgttttcaataaatccctgtcttcgttcttttgttgttccattatttgctttgcctgtaatcccagtactttgggaggccgaggcaggtggatcacttgagtccaggagtttgagaccagtcaggccaacaaggcaaaaccccgtcactactaaaaatataaaaattagctgggcgtgtgggtgcacttgtgtaatcctaacaacctgggcaactgagacatgagaataaagaatcgcttgaaccgaggaggcagaggctgtagtaagccaagattgcaccactgcactccagtctgggtaacagagtgagactctgtctcaaaaacaaacaactgaggacacatctgtcaaacccagcctcacctgcatgcatttaaaaaaaccaaaaatcaatatgcccttccttatattggttttattttttcttattatcccaggacatgcccatttaacccaaaattgagcttttctgaatagaaaatgaagtatggaaggccggttgcagtggctcacacctgtaatcccagcactttgggaggctgaggcaggcgggtcaccagatcaggagatcgagatcatcctggccaacatggtgaaaccccgtctctactaaaaatacaaaaattagctgggcatggtggcgggcgcttgtaatcccagctacttggcaggctgaggtagaagaatcgctggaacctgggaggcggaggttgcagtaagccaagatcgtgccactgcactccagcctggtgacagagcgagactccgtctcaaaaaaaaaaaaaaaaaaaagaaaaaagaaaatgaagtatgggtagtgaaatagatttactctgcccttcagttttga

SEQ ID NO: 1562053 - DNA, 4001 bp, Homo sapiens; identical to SEQ ID NO: 1561721

SEQ ID NO: 1562054 - DNA, 4001 bp, Homo sapiens
agcccaaggccctctccacttcatctccacggactacccaccccaagccagccatgtccactcacccgtaagtccgctggatcaaggtggggtgcagctgctgcaccccaatggcaaagcctaaaacgagagaacaatcagggacttggccttgctgcacgagccacgtctcaagggctgcacacagggtggcagaatcccacaagccacacacctctagtcaaaagggatcatccgcttcctctcccctcccaggcctcccccttgtgaaccccaaggcacaccgctgaagtgtggcagtgagtgacgcaggtgtcagcagccactggtgtcggcactcccaacctccaggccccatggccacttcctccctcctgcgaggacagctggcaactggggtgcagtaccctccctgccccccgcccccttctttgggccacacgctgtgagaaggggtctagatcctcgagggggggatggctgccctgtgccggctctgcaggcacatgatagccgactgccactgctggggcgaggagggggggcctctttccacccgacagataccgacacccaatatagaaaccgagaagagccaggcaggaaaacacaagctctcacccgtctggaggctccgcggcttggcgcccagatatgccaggttcacgttggccttgcggccgtcgatgatggggttcgggtctttgcaagccctctcagctgccgcccggtcggccatggtcacctggtggagcagagacacatcaggggctgccgtggggggaaccaggggcgaaaggggcagacggctccgccctggcaccggatgctgccacccctctcttcccttcctctgagggtgcctgtgacccagggtccttgagccaaagctcctctgaaccctacctggggctctcccacaaagatgcctcctggattccagctcctcccgtcaaagttcaaggcctgggaaatgtggccttcaaggacaaaaataatcccctgcggggatagggcaaaaatgaaccccgaagggagcttggggggccgcctggacttgcccaccagtgagggccgagactttcctctgagaaggagtttgcgacgctatgcttggaaggtaagcaggaaagtgtcttcaagacgtttttacttaagctgatgtttatttggggcggctgagagggctgttaaaaatatgggggaggccgaagagctcctaacaccccggggtggagccattgctcctcaccccccgctgctccaggaaatcccgagtgccctctggctccaaaacctccccaccaacttaggagtcctaattgaacacagcggctcttccttttaaaccgggggtgggggtgggggtgggggtgggggtgggggccggggcctggggtggtgggggcgggaccggcaggagcgcgcccgggagaggcggcaggtgcgggcgccggctggaggcgcctggggcgggggcggcagcgggccgtctgggcgtgtgccccggagtggactcggcgcccgggccgcgataaggtgtgcggcggggtgcgggcccgggcgcgggggccacttacgaagccgtagccgcgggacttgcccgtctggcggtcggtgatgaccacggcctcctcgatgtcgccgaagccctcgaagtacttcctgagcgaggcgtcggtagtgtggtacggcaggccgcccacgaagatcttggtgaacgtggtgtccttctgcgagccgtgcatggcgccgggggcggccaggggccgcgggaagcccgcgctcggggcgcacggcgcgggctgcagcagcatggggggcgccccgccgcctacggacccgggccgcgcggggctgcgctcatggggggcggcggggagcgcgcggggcagcgaggggcgcccgtccagccgccaggcccgaccactccggcgcccgtcccgccgtgcgcgccgacgtgcgccgcgctgcgctcccgaccggcgctgcggggactctgcgccccggcaccgcccccgggctttgtagcctgccgcccccgccagctcagccccgcccccagccggccccgccccgccccgggcgcgcggggaccgccgggaagcgtagttctaaccccgcccagccgcacccgggcgcgcggcgattggggggaggggggaggggagcgcacgcgggctgagggcggatccgggcctgggggcgctgggcgcgcctttctctcctggctgcccccgcgggcccggccggttgcaggcactaagcacaaccctgaactagggaggccaggccccttccctcgtggagcgcaccgtctggtgaattaaacgtaaaaaacgtaaaaaaacgtaaacggtttttagcatcttgttaattgagtcggtatttaacccagggcgacttagggaagagccacgtgccatattaaaaaagggaaatgatttctgttttatatgtaagattagttcatccgaccgatatttactctgggcgcgaggctgcagcggagcacagatcatattccctggccccacggagcgtccaggactgagaattcggctagtaaacatacagcatacgaccccggagggagctacaccacggtgccgcgatagaagcgggtcccgggcggtctcagaggccccgcgggagatgaggtgggcagaggaagcaggtgtgggctctttccagctccaccccgttctgggctggtgtcagggacccttggggcgagtaagagcagacccgggtccctcatccggcccccagccatagaaaggcggcgcatagtggggctctgtgagcttcacaccaggcagggccagccacagaattttcggggcccagtgcaaaatgcaaacgcggggccccttattcaaaagctaggaatttcaagttggcagcggttgagcatgaaactcagccccgggctttcctgagcgaagggaagggccgtgtgactgcacagaccccgggatcccggacctgcgggtcacaccctccacctctgaagccgggactaggggcctcaagcccgcctcatctccagcccccgcggttgggacctatgcagctgggaaacagcagctctaattggggtcactcccggccccagccctgcggcctcctctcagcacagggcgacgcaggtggggtctgtggggactgggagtggcactccgtgggctgtgggggaccgcaaggccggcgaggagttcccctcgtttcctccagcaccgaggagttctccgcgtttcctccagccctctgccctggctgccggcggggaggagtctgcccgccccctcccccactccacggcccacgctccacgcggcagccttgacctctgacctctccctcccccagctcccgctctagccctctgcacagtggggatgggacccccgagtcttccggaagcctgggcgtcctttcctcccttcccccttcgttcctcgttcctggcgctcctgcccccgcttgcggcccccgttgcccttcatcccgcgtggtttcctctccttccttcgcggagtttcccacctccccggccctgtgtgttcgcctgcctggagcccctcccctgctatttgggcgctgcgagaacagggacctgggatgttttgcccaagctggagggcctggcaaggagagggctctgggatatgtttgttgagtgtatccacgatggaacaaggtggggtgggggaaagctctggcccagccggaggcccttcgaagcgactttgaaaactttcatttaagtgtgaccttcacttgccccctagaggccgggggaggcggccactgcgcggccgcgtgcttttgcgccagctggatcccttcaccaggcctcggtttccccttcagtttttccaaggctgtccccagccgtcgcgttgcctgggcaggctggagccgcgtcggtggcgtggccacgggcttcagcccggaggcgcccgggctcccggcctacaagtcccagcgccgcccgg

SEQ ID NO: 1562055 - DNA, 4001 bp, Homo sapiens
tcttcttataagactgttagaagatttaacttgccacagactggtcatgctttgttattcttggacccctgctttttcccaaaccactacattcacctttttgctataccaaactggaggtggtaattcttagttgagtcattttacctaggggaccacggtacagcgataagtcactcaattactaccttatgattgacagttcacactggaatcaaaggtgaattcatgggagtagaggtgagatatcgttaggcaagtctacaaagagagatagatgggcatttattcatcacgctgaagtgaaactactgcacaatattattacatcaatagcatatatttacttttgtaagttacacgtaatgcatctctgataagataaatcaagagggctccggggaggttagtttacatttcagcagtagtttcgtgaataatgctaaattaagaaatatataaacctcaccgacatgttttttctcaccttcttgtaaggagcctcaagcattgcttcaatatcaatatcgtctgccattttctctaaacgcctaggaagagaacaagacaatttcttgagtaaacatttctcttacaatgtgaaacaagtttcactcttgttgcctatatcgtctaacattttctctaaacgcctaggaaaagaacaagacgattccgtgagtaaacatttttctttttttttttttttttttttgagacggagtttcgctctagttgcccaggctgaagtgcagtagcgcgatctcggctcactgcaagctccgcctcccaggttccagcgatcctaccacctcacctcccgaatagctgggatcacaggcgcctgccaccacgcccggctaatttttgtatttttggtagagacggggtttcaccatgttgatgaggttggtctcgaactcctaacctcaagtgatccgcctgcctctgcctcccaaactgctgggattacaggcgtgagccaccgcgcccggcctggtaaacgtttttcaaatcgactgaatttttcttctcagccgacacactcgaaaacttaagaaaaacctccaaaagccctacaattaatgactaaagtgacatgcactttaaccaggtttggcttacgtaagtaaatccaaaacgcctcttacacgaaacacacgaaaatgaagacttcaatatccaatatttaaaactctgctgtcaactccaaaaacagaaactgggagacccgaacgagagcgcctctttccgggcaaaaacccgcgctgccattttaggggcaaagagaaactccctccattgggaggggttatgagccaaggcagcgttcaactggcgccatgttgggaggtcgcggccggcccaggcctcgaaggagacaggtcaccattctaccgcggcctctcgggggtccctaccgccccaagaatccagactatacccgactggaaaataagggcgcggtcactgaaacagggccgatttctcgaaaaccaccccccaccccggtcgctaaagacctccaaaagcgcccctcagcccaaaatggagccaaacctcgagaaagctgagataatacgcgggtccgcaacgccccgtacctgttccggccttcgggcgcctgtggtgctcgtgttcgggaagagattgctgctgctgctgctgctgctgccgccgccgccgcttctgttgctactgttaagcccctaggcccaggccgcggaaccgcccagcccgaatatcgggttccaaggacggctaggcccgagagaatctaaaaaaaacaatggaattagagaagcccacgcgggagagcaggacggcggcttcggcagctcaggatccacccctgcgacagcgtcgacaagctccctgaaatggcggccgctgcttccctgtactcacattcaccagcacacatacacacacacaaacacacggggcctcacagagccctcagcacgggctctcgcgagaagctgccccaagctccaaatttgagcggccgaagtatcgcgagacctaagtatggctccggcgaccgtagcccaatctcgcgcaatgattgcgccacagatattcccatcccccattcagtgaggcgcctttcactccccctccgcgtaagcacccaaatctcgcgagacagagcgggtctctagggcaaagacagttggtaggctgcctgtcaatctttcagagagctcttcgctgagtggagctcagcggtcacctccccctcgtggcgcctcctcacggccatctgaagattcctccggcacagccgatcgcccccgctccggcctcccacacagatggctgtcaaggtcgccataaggcaacctagtccttatggcgataggataaaacggccatattcagattatccgctgagggtggagaggaagtggaaaagtgtatcagaaggccagaagaagagatctttaggggtagggggagagggggagataataaaaatagatttccctgtcatttggagccaatggcgcggcctccactgtcgagctttgaaacaaccttggaaatagtggagaaaagcaaaaaaaaggtggaaaaaataaactcttgcttcccttggcatgggatcagttttgtgccccgaatttaatcagctcttgtgtcagggttgctaccgttccttcaaaaatgttccccttcctgaatattactggacgatttggtgaaaaaataagacacccccccaacaaaaaaaaaaaggcccccttccccctgggacctggctcctctcccctgaagtcttctagatgccaggtaattagagtatgaattagccatttgttctttggtcagtactgtgtgaggtttcctcctagatgctgggaaaaaaaactggaaagaagtcttcaaagcaaaaatcttaccctctaatcttaacagtctaatgattgagggcagaaaagattggaaatgagacgccttgattagtgtaactagctgctgcaacactgtgtgaccttggacaagcaaattaacctctcagaggggatctttcatttcctgatttaaaagaggacgtacttagtagctagtctaagctacttgagactgaggaaggcaggtaatgctcagtactgaatttttagaggttagcagggcatgtctgcccaagtggaccctcagtaaattaatgaatgaaggctcagaagggctatagtgaagattaaatgatataatgtctgtaaaacgcctggtaaatatttgatcttcaaaacagctaacttctgtttctgctaaacaaaattatttagagcaaatatagatgttaagtggttttgcctctcaggttaactttacacacaggttaggatttatcttagaggattattaataacagttattttgtagttagaatactcccttaatcctttttctgaaaattcagatcctctttttattttatttctgagacagtctcgctctggaggctgggcgcagtggctcatgcatctaatcccagcactttgggaggccgacgcgggtggaccgcctgaggtcaggagttcaagacctgaccaacatggcgaaaccctgtctctactaaaaataaaaaaaaaactaggtggcaggcgcctgcaattcccagctactcgggaggctgaggcaggagaatcacttgaacctgggaggcagaggttgcagtgagctgagatcatgccattgcactccagcctgggtgacagagatcgagactccatctcaaaaaaaaaagaaagaaaaagaaagaaaagaaaactgtcacaggaaattgaagcataatatgtcagaaataaagcaagctaacctttgctatctcttcctgcccctcggtaattccagtattatgactagtgcaaaatgaaagcatgaagatggcacttggtttttcttgtttgtttaggaacatgacatgacagaatttgaccttaaccgctagacttcttgtttgggaagaggaaggatttaagctctaagtcgct

SEQ ID NO: 1562056 - DNA, 4001 bp, Homo sapiens
cctgggggtcttgagcggtgtgggtgggtaggcccgagcaattgcagggagcaagtagaggaggggaggtgggagagatttggggggttagcaggttgaggcccaaggagagccatgaaaactgaggctgtccttctgagcccttattcctcttggcaggaccagagtctctcctcactcctggaggggacagcgcaagaccgcaccctcgaaagccaggccagacaggcagcagccacagccaggaccgctccaccccttggggctctcctcagggaagtgccttctaagcttccaatgaattccggctgtggagtgtggctgccccggtctccccagtctcccgctgtagctgaattccagcctggcccgcagctagccctgtctgcagctccaagcgtggtaggagcagggggtgctgggtttgccccccctcaggaggaaggggggatccctccctgccagtgggaggggttgcagcctgcacttcccctccccacccgccagccctgggttaaatgcggccgttgcctctgtgtgctccagctgcctggcagtccccacctagggcacgctgccacgccgccgttacctggtccaagtgcccgggaggctccgcctgtcggcttcgctctgcagctgcatctctgatctgtcctgcaggctcaggtgagtcaaaggattgggaggcactgaggggtctgcaggggagtaggcatcaagccaggtcaggcgagtgtattttagcagagacgctgcctagggtgccctatctgatttgcagtgcccttccccacttctgcagggtcctttccaaatcgagcccccaccctcaaagccatcaaaataggatcatcccttttctactctcatccctccaggaaccccctgaaatgtccctaagggacttttgagaatttatttacaggcctctcctcccttgctgctccactccctcaacctcacctcagggcatctctgaatctttctttttttaatgcaaggattaactcctcagaggaatcccaggttctagtatcagtcctgccacgacatcgccatgtacccttcagcaagacactaccctctctggacctagttcctttctttgtagaatgaggggtttggaaaggtgatgaactttgaggcatttgctattttgactttctaggattcctggggtggaggcagggtgccaggtgagaagttggctcagaccaagaatgggatgaggggaaccttaaccaagatttaggggcccagaggcatctccgggtaggaaagtatgggaggtggcagaggccccttgtgccttagccctcatgctgtccagggatgttggctttgcctgtggcccaagcttgacaagggttccccgccctcccacttccaccagcgctgccacatcttgcttggtcaccctcccacgacgggccctgccagaggatttatgttcttctaccaggcctgggaggggaaaagggagaagaatccgggatgagaaggtcgcctggagtgagaagcaggcactggcctcgctcagaataggcgcattcacggaattggggggcgggggcggagctgctgttgggttaggggcagctggccctctctgccaagaaacagcaacagaaaaatggctaacacagcttcagcatggggcgcggcggtggggtaggagctggaaggaaatgaggtttagtgaattctaggcgccagggggcctcaagagagagaaggggaaccaggagccctaggttctaatcctgcttttgcagttcggcgggctgcctccttggggcttagttttcctatttgtatagtggggagggggtgggggggtggtccttcgtagttctcacggggcgtctccggggcctcgggagggtaagcgctcacctgctgcccctgcggggtccatggtggctccacggggccccagccgctcacccgccgccctctggacgagtccagtgctgctgtcgctggaaccctgcacacccctgctcctcggctcttgcgcgggttatatcctgtccaggccttatctccaaggccccgggccccggccccctgtttgctcggggtgggcgcacctgctgggcagatgtgggcttcccacgccccctgccatctcgggcgccccctggcggtcgctcctgagagcaggcgggaaacaggcgccaagccgcgcgttctcgtgcgcagtgggttttggtccactcgctgccacgccaccacgctcagccccgcaacagggcgcagcccctccctgccgcctgcggttgggcagtgcatgtctgtgtttgtgtgtgtggaggggtctgggggggttggcgagttgcaaagacagccacacagaagcctgtgtgcgtaggggagtgggccgaggtggggaagggcttctgtctgcagaggttcgcctggcaggaggagaggcaccaaacgcccaggctggctcacagaaactagcaggcgtgggattgtatcctgccgcagccactttttggccgaatgactttgggtaccagcgcttaacttttctgagcctcaatttcattgtctgtatgatgggggacaatcacagccttagtcttacaattgcagagaggattaaatgccacaatgcgtgaagagcatttaacactgtgcctgacatttaaggaagacctgtttttttctgtttaaattttgcatatttgtatctatgtatctattcttatttaccattctcttgtgggccgagcgcggtggctcacgcctgtaatcccagcattctgggaggccgaggtgggaggatcacctgaggtcaggagtttgagaccagcctgaccaacatggcaaaacccgctctctactaaaaatacaaaaaattagccaggtgtggtggcaggagcctgtaatcccagctactcgggaggctgaggccggagaatcgcttgaacctgggaggcagaggttgcagtgagccgagatcatgccactgcactccagccgggacgacagagcaagactctatctaaaaaaaaaaaaaaaaagaatctcttgtgtttcccagcaatcccactgtgatgagaattttttaattctgaaacatttcaaacatacacaaaaatagagagattagtaaaataaacctgtaactgtcttccccctccaagtgcctatcacccagaataagagctctgtaaatactgttgcttttctattttccttcctccctccaggctctgacacctccattctctgtccccaagcgccatgagaggccttctttgctggcccgtgttgctgctccttcttcagccctgggaaacccagctccagttgacaggtgaactggggcccagccctcaccagtgggaggaggggagcggaagcaggtcctccctctgcagccagctcctcctgctggggagagggaagcaagggctttggaacatatgggactgggtttaagttccccacttcacctttctgggcctcagtttcttcatctgtaggatgtggcttagttttgggcgcatgcagaactgcccatggggtgtttaatttggaaaaattatttgaaaacatggaaaaaaaccaggaaattttacataaaaatccctgtttagtatttctcttgaaaaaccagggatctgctgacatccaattcgcaggggcatggcctcatttggatgcagctacctgcccaatttaggagtgataggggctctttgggtctccagcgtcctaacccaaccagttcatccatgttccctgcctggtccctgcaggctttgagtttgcgacgcttccttgccccctcgtcaatgggtaataccgcctcagaatagccctcagatctgtaagatgagggaatttgtgaaatctcctagcccaggtgctaggcacatgccgggcgagtgcatctgtctaatctgcgtttgctgtgctgggcgctgttatgtcggcatagcggcatttcccctgggtttcctagggggtctcctcggagg

SEQ ID NO: 1562057 - DNA, 4001 bp, Homo sapiens
tcagctcacagcagttcttgggaataaagcaacccagggcccagaacttggggtctcggagtctcccttctgcaaaggatcttagttttgctgtagatcatggtgaccatggatgggtgtctatgggactgggagaatctaagagtcagaggagtcagggaggggagtttctgaccttggtggaagtccaccatttcttaacatggaattcagaattgccacccgcatgacatggaaatgaatcatatacttctcattcatgggaagttggcaaaattcttgttctattcaagaatttccctccccttgaccattgtgcaggctgtgccctgtacaactttggagggcgggggggcatcgtgcatgtcatagtctaagtgaatgatgccccttagagttgaacagtgcatgacttgtacaactgttcttggcagccctgtgtccctggtgacagggctttcgctcctttggccacatcccagcccagcccatatggcccctacctcccagctgttcatggaggtccctctcttgcttccctgcaaagaggctggccaagctggtcttccccactccaggatctccaagtagcaccacacggtagagagcctcccaggagccttcagagtcgctggattcagaagaccaatcatctggggcaggtgaaggtttctgggtgggagggttgagggaggctgattggcccagccggggatgctgggattgagtggaaggcactgtgctcaggcggccaggctggtggccccgtggggacaggggcagtggggtgctggctcgccggtgcagaggggtctttgcttcctgctcggtgttgagtgtcatctttggtaggggggggtttgcttcttccttctttccttctgaaagaagggggaattggctgtcagccaattgctttgagctgcttctttctatagtgtcctgatgagctgctgtatggcttcttccagatccccctcttgttcagatgggagtaggaggtgcctcagcttcttggggcagaaagtccctaggttttctggcctcaggctctgcataaacctggatccggatggaaggagtgagtgtgcaggctgtgaacacacagacatgcacacccagaggccattcccttgtcttaaggatgatctactcctgatgacagacaggcaggtggaggggcagtagtaaggtgggatgtcctcacatgcacactccccattccgtgtacacggacctgcccttgccacagaacatgaggccctggctctgaaagacatctgaattgtccccctcctccccttccccaccgctctctttcacagcttctgggttgggagtgcagtttcaggtctcccccaagggtaggggctacttaactttcgatgcccaatttcacggggtctgaggaggaagaggcaggagggcgggttggcactccagaagcgcgaggggggtatgggggtaacccgactgtaacccgagtgccctagtgccatgggaaccgcgtgtctgacccgccccctgtgtgaaaaattcaggagcggctggcgctacggcctccaactgcttttggggacgggagctgccgccggtcaggccccaggttaggtgacaggacagggtcctggcaggggacggggagggcagaccacagggcccgggaacgctgtgccattcctggagtctgggtccgagctttctcagccggcatcccgggtgtgaatcccccatcctggggttggaggggtctttgtccagggctatccagccctccgggtcccaggtctgaagaccctcaccctagggacgcggtttcgaagcccccctattcctgccaacgctgccgaatcccccttcaatcgcctggcgaactctgctccaacttgagcaagttggcggcgcgtagcgcagggctttacctcggcgtgggaggggtccagggtccctcgcagctccagcggctggatgctccaggctgtaccacccgcctcagtgagcagcccctcaggccagttcccctcccctcgccgcctcggccgggggaggagccgcgaccccgccccatccagccccgccccattagggcagccccggggtccccgccccaaggccctggccgctcagtgacttttctgaaagtgcagagctcagctgacccgcttctgccagccctacgcaccgggtgagggtggcagacgagaaaggaaggatgggggctctggattcctgggtctggagctccatctgcgtccacatctgtccactccatcaaggggatgcactaacatattagcccccagaaaaaccacttggggaacttgctaaattttcaggtcccgccttccaagagaggcggattccacggtgctgggggaggggttcgggaatctgcgttttaaacaagtgccccaagtgatcctgatgcaggcggttcactgacctcactttaagaaactctgctctggatgaagaattaattttgggaggtggcttggaggaagagagagctcaggaagtctgcactgaagaattatgaaaatcttattttggcatcattcattcattcaccaactgaggcttagctgggcctgggcctgaggtctctgccactctgtctactgtttctattactgatggctgaaaaaaaaaatgctcccaggtatggaggaggaggaaagagattgctggtgacgtcggccatccaaggggccaggatccagactctttgactgggctgcctccctttaggtcttgagaaattggggtgtgtctgtgtgtggagcccatggagaccaggctgcacctgtgggtggggctcattgtcatggctgaggggattcaggtgttcagcttggaataactcccacagcagctgaacagactggctcagcccccacaggtcttggagctgatacagaaccccctcgtgcctggcttccttccgtggcttggccctctaagcttacctttctaacttgcaagatgggccatgagtggtgcagcacccttcattgtctgggagtgaggtgacttggcttttccatctctgcagcacaattgctgtgtgaccttaggcaagtcaacttccctctttgggtttcagtttctttatttaaaactataatatgaacagcttacactcttgctaaaaaacttttggttgtctataatacaaaagtctgaacttggcattcaagccccaacctattctctgcagaatcatttcaacctctcctcccaggaaaacccttgcttggctcatgccctactcttctaggcacattctattctttctgcccgggataccttttcccctactcatctttcatgatgcaacttagattcctgtgtaccagacactgttctaagctctgcacggatattatctcaggggttctcaaactttggcggtgtgttagaatcacttggagggcttgttaagccacattttgccgggacccacccatactctcatctatgactagtgatctaacaaatgaccagagagctaacttgtgaccagtgttagtgaatctgtggtctaacttgtaaccagtggtttaacctgtgacccatgggctgctctgtgacctgtggccttcttctgcttaggaagaggtgaattcagtaggtttggggtagggctaaagaactggtgtttctaacaagtcccaggtgttgctgctgcttgctgggggaaccatagtataggagccactgtattacttcatttagtcccctaaatgagatgggtagctattactctctatgacatgggtactattactcttcccattttagagtaggcctgcatacatgctgttcacttggccttgtaagggatgcttgtcatcatttcatagacaacagcctgaggctcagagaggttaagtgacttgtctgatgtctcacagcagttagggggagatgcgggggattgaactaggtctctcttaagccaagattttttccactctcttaggtggggaagatgtcta

SEQ ID NO: 1562058 - DNA, 4001 bp, Homo sapiens
cctcatgtgccgccaccctccctggccaggaagctcacaacttgattctactttattttctcaatcttcatccccccgccacgcctcccctagctcgtggcctttgaatgcttgtttctggctggttggcttctcttggcctcctgggacggtgtgtgaatggccctcagaagagacagtgctggagttctgcactcttagggcccccaatacccccgaggcctgggcatgcagaggccactgccctggcccaagtctggggcaggtgcagcatcccctgggaccttggcccctcaccaccggcccagtttcctctgagactgggggtcccacgggctcctagcaagtagatgaggagaccgaaagtagccctgcagctgggctttctttcaggggtcaagtttctagggaaaggaaggggcgtggcaacctgaggtttggtagctgtacccagacggggctgtctgtggcttccccaggcagcagttcttcctcctctctgtccccacccagggtcctcccccacactctagcacccctgagactgtccccctgggctaccatctccaccccagctctgaactggaggaggggacgtgtttaggggtgcagggccggggtgctaggggctgcatttgctgcagagcagggagccagccccttctttcccagttgcaggccctggacctggtcacctgtccctggacctggcttcctgtacccttctcaggtcaactggggcaacccatgtccccaggctaccctccccccgtctctcctgggggatacagagtctcaactagggtcctcctgcttgtcaacctggcattggggacccccttccccagcctcccaggctttggcccccaagtctgggatgggataggctggataggcggcacgtctgctctctggggatagaggatcccttgggagtggctgccgctttgctccacagaaggaaaaagaacgtcccagagcctgcccagtccaaaaaaagaataagaaaatgtgacaatcccagaaaaaaatgtcataacctttgggaggggggttgaagaggggctccattctcagtccttagctcctacccagggcctttcccatctgccaccctccacatctggctggtgggcgagccctggcctggcccctccagggaaggccagctctccccacctctgaaatggtggtggtggcccacccaccacgctcctctctctgctgttagggtccagtctggagaagcctgtgttctcctccaggtgcctctttcttcagcctctgacgcccccacccctacctcaaagctccctactcaccagcgacccaaaggcggggtgggggcaggaggggccaggttgggtctgggccccaccctggctgccgaaggggcgtgcactgcagcagcagggactcaagtcagacggcaggagggactcctgcggcgctctggagggaggctagcgccaggagcccccgatcggctggggccgggggcgcagcgcctcccctacagctcgaagggctgagtggctgccagatccagcggggtgggggcgggggcggacagggtgtcccgccccggcccctcctcaccgggctgagagggggagggagacgcggaaacctgggttcttccggcccccacctttgagcaatcacttccccaggctttgagctccagaaaaaggggaacccggctgcggcgccccctcccccacgcgcggggggcgggctccacttccactgcggcccagggtccacgtggacctggcggcgggagcccttggggttcgagtcccgtgcgccggctcccgaagctcccgcccagcacggtccccgggcccgggccgggaggggcagggccgctgtccccggcgctgcgcgcgcgcactcaccagccgcgctcccgagccactcgcgccgccgccggcccgcgcgctccaaggtccggcccgacagtcggggagggggcgcgggggcgcagtgcgcaggcgcctcggcggcacttccccaaagccaggggccgggacttcctcgcgccggcggtcgccgggcccgccccgcccgccgcgccccgccccgcgctcggccggctccgcaccccacccgccccgcccgcgcgtcggcccccacagtcgcctgggggtggcccggagagtcgaggtgctcatagtggagccctggctcccgggcggacggagccgcacggtagtagatgggggtgtggccgtggcccccgactctgctcggcggggccgttcctgctttgccatccgtgtgggacttccacgacagtggaggcacgagagctgggccccatatgctgcttgcccagcttgggaaagaggaggctgctgcaaaggaccgatcggcgggtacgccagcccggcccacccctcgcctccgtgagccgcgtctgtaaaactgggttaagagccgcctgtctgtgctgtggggggttcccaaggaagggggagattcctgtgctgcggggctggggagaactgggggtgcgggttcttgcatccggagtcatgccgaatgtctcctgtggggcctggcagagtccctgctgacccgtgtgtcccaagatgtcctaaagcttaaggccacactgtcccctttgccacgaacgccctgtccctttggccgactcttctcatcctttatgactcggtacagacgtgggttaggcttctcatcgcagcatgctttggccctgtgtcagggtggccctgaccctgctctggaagtgtctgcagagcatctgtgccccccgcccctcccctggcccggctgtgtgcagctcctgtcctccccagcacaagcactccacccggatagttcccagtgtcgggatctgttcataaaatgccttccagttgcacaggtcaggtgcacaccttacaccttcacagaactctgaggggtgcaaaggcagctggagattctacttgtattcctcattcaacggacaagtatcagtatctgggtgcccctgtgggccaggcagtaggaccagaagccagcaacatagatcagcctggatcttatgctggggggcgcagagtgagttgtggggagcaggcagggaaggcctgggtgagaggggggagggctgaggaggggagggtattgcgctgctgagcgggggcgggggcccgaagggggaggtcagaggtcagagggccctggaggacagacaggctgcctctcgaagctgtacccagaaccctgtgactgccatgttgtcaggccaggcaaggaaaggcaggggccaggaagcccacagggacaagaggcaggctgctacttattcagcccacataacactcctgagcggtgggcacaggtgaggtcagggaagctcaacgaagatgggccagcacctggcccaggccacacacaaccaggctgaccccgctgagccggcctgttgtctctgctgtgggaaaatgcagctgtgggcagctggcagggggtgaaggtcagtgccctccctgccccctcgggtcactctacaaccccccagtcattcccccgtctcctctggccccttgggcctgctctccaccgccctggcttctgcctctcggcacacagcatcctgaagtccatgggtggggccaggtgagctgggcagttgatggcggagctgggatttgaacccaggaccctctgcgccctgacagccctcaatatattgggctttggaccacatgccttccttcccatagagctttctacaggcaggcgtccctccaggccccattccccagcctcctttgcacatccagcaccccctgcgccttttcatggggatcaaagggcccgagtgccggcctgaccctggtgcagtcactgaggtcactgtcttgctggccttctctgggtgctgggtctgctgtgcctgtctctgcccctcttccctcttgcctgtctgatgcagagtgacccatcccctttggagcacttgctgctgtggggtactgcac

SEQ ID NO: 1562059 - DNA, 4001 bp, Homo sapiens
gacttgctgagggtgtgggaaggggggcagggccccggtgaggagggacatgccccccaaacatggttctttggtcctgctacctcccacccaagacttccctccctccttgcccactgcctctaggctgtgaaactgctgtggaaccaaggccctaccacagggtgcgccagccagggaagtgggggtggcaggggtggggggcaccctgctccccagtcgaagcctcggagtccctgaggggggtgtggtgtggtgcatgtccctcccagcatttggttgcaccgtctgcaggggaggtgcaccaggagcgccaaagctgtgagtggccctcatgccacctaagatgccacttcgaatcccaagtctccttgggcgatggtacaggggggccaatcagtgccccggaggcagttgtgaacacctgcgcccacttctgcccagggcagggaggggcctccgtgcacatccgccaccctcctcatgtgccgccaccctccctggccaggaagctcacaacttgattctactttattttctcaatcttcatccccccgccacgcctcccctagctcgtggcctttgaatgcttgtttctggctggttggcttctcttggcctcctgggacggtgtgtgaatggccctcagaagagacagtgctggagttctgcactcttagggcccccaatacccccgaggcctgggcatgcagaggccactgccctggcccaagtctggggcaggtgcagcatcccctgggaccttggcccctcaccaccggcccagtttcctctgagactgggggtcccacgggctcctagcaagtagatgaggagaccgaaagtagccctgcagctgggctttctttcaggggtcaagtttctagggaaaggaaggggcgtggcaacctgaggtttggtagctgtacccagacggggctgtctgtggcttccccaggcagcagttcttcctcctctctgtccccacccagggtcctcccccacactctagcacccctgagactgtccccctgggctaccatctccaccccagctctgaactggaggaggggacgtgtttaggggtgcagggccggggtgctaggggctgcatttgctgcagagcagggagccagccccttctttcccagttgcaggccctggacctggtcacctgtccctggacctggcttcctgtacccttctcaggtcaactggggcaacccatgtccccaggctaccctccccccgtctctcctgggggatacagagtctcaactagggtcctcctgcttgtcaacctggcattggggacccccttccccagcctcccaggctttggcccccaagtctgggatgggataggctggataggcggcacgtctgctctctggggatagaggatcccttgggagtggctgccgctttgctccacagaaggaaaaagaacgtcccagagcctgcccagtccaaaaaaagaataagaaaatgtgacaatcccagaaaaaaatgtcataacctttgggaggggggttgaagaggggctccattctcagtccttagctcctacccagggcctttcccatctgccaccctccacatctggctggtgggcgagccctggcctggcccctccagggaaggccagctctccccacctctgaaatggtggtggtggcccacccaccacgctcctctctctgctgttagggtccagtctggagaagcctgtgttctcctccaggtgcctctttcttcagcctctgacgcccccacccctacctcaaagctccctactcaccagcgacccaaaggcggggtgggggcaggaggggccaggttgggtctgggccccaccctggctgccgaaggggcgtgcactgcagcagcagggactcaagtcagacggcaggagggactcctgcggcgctctggagggaggctagcgccaggagcccccgatcggctggggccgggggcgcagcgcctcccctacagctcgaagggctgagtggctgccagatccagcggggtgggggcgggggcggacagggtgtcccgccccggcccctcctcaccgggctgagagggggagggagacgcggaaacctgggttcttccggcccccacctttgagcaatcacttccccaggctttgagctccagaaaaaggggaacccggctgcggcgccccctcccccacgcgcggggggcgggctccacttccactgcggcccagggtccacgtggacctggcggcgggagcccttggggttcgagtcccgtgcgccggctcccgaagctcccgcccagcacggtccccgggcccgggccgggaggggcagggccgctgtccccggcgctgcgcgcgcgcactcaccagccgcgctcccgagccactcgcgccgccgccggcccgcgcgctccaaggtccggcccgacagtcggggagggggcgcgggggcgcagtgcgcaggcgcctcggcggcacttccccaaagccaggggccgggacttcctcgcgccggcggtcgccgggcccgccccgcccgccgcgccccgccccgcgctcggccggctccgcaccccacccgccccgcccgcgcgtcggcccccacagtcgcctgggggtggcccggagagtcgaggtgctcatagtggagccctggctcccgggcggacggagccgcacggtagtagatgggggtgtggccgtggcccccgactctgctcggcggggccgttcctgctttgccatccgtgtgggacttccacgacagtggaggcacgagagctgggccccatatgctgcttgcccagcttgggaaagaggaggctgctgcaaaggaccgatcggcgggtacgccagcccggcccacccctcgcctccgtgagccgcgtctgtaaaactgggttaagagccgcctgtctgtgctgtggggggttcccaaggaagggggagattcctgtgctgcggggctggggagaactgggggtgcgggttcttgcatccggagtcatgccgaatgtctcctgtggggcctggcagagtccctgctgacccgtgtgtcccaagatgtcctaaagcttaaggccacactgtcccctttgccacgaacgccctgtccctttggccgactcttctcatcctttatgactcggtacagacgtgggttaggcttctcatcgcagcatgctttggccctgtgtcagggtggccctgaccctgctctggaagtgtctgcagagcatctgtgccccccgcccctcccctggcccggctgtgtgcagctcctgtcctccccagcacaagcactccacccggatagttcccagtgtcgggatctgttcataaaatgccttccagttgcacaggtcaggtgcacaccttacaccttcacagaactctgaggggtgcaaaggcagctggagattctacttgtattcctcattcaacggacaagtatcagtatctgggtgcccctgtgggccaggcagtaggaccagaagccagcaacatagatcagcctggatcttatgctggggggcgcagagtgagttgtggggagcaggcagggaaggcctgggtgagaggggggagggctgaggaggggagggtattgcgctgctgagcgggggcgggggcccgaagggggaggtcagaggtcagagggccctggaggacagacaggctgcctctcgaagctgtacccagaaccctgtgactgccatgttgtcaggccaggcaaggaaaggcaggggccaggaagcccacagggacaagaggcaggctgctacttattcagcccacataacactcctgagcggtgggcacaggtgaggtcagggaagctcaacgaagatgggccagcacctggcccaggccacacacaaccaggctgaccccgctgagccggcctgttgtctctgctgtgggaaaatgcagctgtgggcagctggcagggggtgaaggtcagtgccctccctgccccctcgggtca

SEQ ID NO: 1562060 - DNA, 4001 bp, Homo sapiens
gttgcctgcagcctgcaataaccaaggtgtttgacccatgacacacagcatgactttgaagaaaaactaaaccgctcctgcctctgatgctcctacaaacccatgctcctgcccagcctggctcttgagatccaagtggactgctgaccactctactgtgttggggagccccctacttcttcccaccttgccttgtccagaataataatacaacctccctcagctacatgaaggcagaagttaaacctctgagcctcagttgtttttttctgtaaaatggtgattataaaaatggtaaaatgtctctgcagtaatcatctttacccttacccccatccccacctccaggtcaatagaaagacaggtctattggggatctgcctcacctatccccattcattcaccagtcaacaaattcttctggagaaagggcaggaagacatgcccaccacttcatcccatgatggaaccttggtggccaggttgatcagacaagggtccccaaagactaagtctaaacctgggcccaggaacttcctaaaaccgtaggctacattttgtggatggtgcatatatgcacttcgggagagatagtccatgttttcctcagagacttgaaagtgcccatgaaaccattttgctcctcaagcacatacactcctccagcacatacactcctctgttttgttcccccattgaattcaaagactctcggattttcaccttataaaacactgaactccaccctcacaccatacagagctttgcatcgatacgatgatccccatttcagagatgaggaaatccaggctcagaggtggcatgacttgcccaaggtcacagctaagaagtagagaatgaagactggaacctgattccgattcccaatctggcattctttggggaactctcacccaagccctctagctaccccacctgttggtggattcccttcctcaccccagaaccaaatccggagctctcatgttccttctgccgggtcccagggccctaaagagtaggtttccctacagctccccacccctcgctctggctgaggttgtgcgcaggcctgggaggaggaggttcaagccgctggctggtggccggcttcagcccaccaagaaaggcgactccagggacaagagcacctgaggtcaggggcacacaccagcgggcggacaagtgtagagttggcgccgccctacacctctctccgggaagagaggggaggaaaggccgtcacctggccggttcccctccgtctgccccaggcgtataagaagcaggagtctggagccccagcccatgagggaaggagaggagagataaatgggggcgctcaaggcctggggcgccgggcaggggtcttgggcagggatcctctggatgtggccaagacaaagatggagaggtaaggtctgcgcgccacctccaatggcggggggcgcgtcggagccccaggggtgggacggccaaagcccagggcttgaagagtgggcacattcaggagactcagggagggtggcaggtcggctccagggacgaggcaaggggcctccaataggcgcgggtgaggagggagatgggtcctggcgacccaaagggcccacctgcgggaaaggtgaatgcagacaatctcggggtccctgggggagaaggccagaaggtagcgcatcctggagaccctggggtcccgtgggtgcggaaggagaccctgggggcgccttcccaggggattgggggtggggaggagggcgcacgggtcggggagggggctaccggacctggatcccgggacaccccgggggtctggggggcgggccgcgcgcttacctgcgtcctcgtcgtcgaaggagttcatgcacgggaagtagatggcgagcgcctcgaaggaggcggacagactgaggcggctctgcgagcgctccatgcccgcgccggcgccgggcgcctcggccgcggcggcggcggcggcggcgggcggcttgggcagcttggccgccccattcttgacgcggagtacggcgcgcggcgtggtggcggcggcccggggccgggccgaggctccgctgcggggctggcgggcgcggcggggccggcgggcgggccaggagctggcggcgcgcggagcccgaggcgcgctgtgctgctggcggcggcggcggcggcggcggtggcggcggcggtggcggcgcagcgcgctctggtccgcggcgccccccgccggcagcgcgaggcgggcttggagcggcgccgcagccaatccgtgccgccgggggagggggcgccgctgcggggcgtgggagcccggagggcgcgggctgcggcctcttctagcagcccccgggcccggcaggtgcgcgcggggaggcaggcgccgggcgaggttgtctgggccctggtccgagggctgttcccgaccccgcctcggcccccaccctcagccggccgacttgcggagaggccggcgtccagtccctcacccagacaggcctctcccagagacactggcgcgctcggaggggatgcgctcaaagggtcccgcccaggcgggtcggcactcggcctcccacacagagaccctcggcttcacacctgcacccacagagaagctcaaacaggcacccacacctacacattcactctgcaacatgccccgcagacacccggacagatacacccacagacccaccccctcacagatgcggggacagacacgtccacggacacacgcagactcacgcagagacctgcaaacacactcagggaggtaggcaggacatccctggtgcccggcctccctcacggggagactctcagatgccacaaaaccccacgaagttcaggtaggcatacacagtctcatgcattcacacttaccaaagacaccccagaattcatacacacattcatacactcagatgaacacacaagcccagacccagcacacactctgtgtcgcctccccctgtgatcatctcagcactgtcaaacactctgactgacacggccagatgcacacaccttcaccctcagacacactagagtagcacacacacgccaagacacagccacacagactccatccctcccagtgtgggtgcatcccgacggattgactgacaccctcagactcaggtacactgagacacacttggcaggctcacactcacagactctcccattatcaccctcggcgacccgcagtcctcagacacacacgggctcagacactcacagccccaggacagagacgagcgaatcggaaacccgtgttccattccctgcatgtgacctgggacgtgagggtccctgcccacctaatcaggccccagatgtcaaacaaccttctcagctgctcgcacacctctttatgaagccatctggcgacatggaaacagttcaggcctcagaaagagacagcccagagtttgaatctcagctgtggtgctgtctttctgggtggcctatggcaaaactctttatcccatgggtcctgttcctcatctgtacaatggggacaggagccttccattttggatggttgtgaactgcctgtaagataacacaggtgtttgttttctattgctgcataacaaatgaagcagcttaaaaacaccaatctagtgatttacaatcctgtaggtcagaagtctgggcagcctgagctgggttctctgcttagggcctcacaaagtattggccagactgggctcttctctgcaggctctggagaagaatccgcttccaagatcattcaggttgttggcaggattcagttccttgtggttgcaggactgaggttcctgtttccttgctggctgtcagccagaagtcaacctcagctcctagaagtggctttctggtcctttcacctggccccttccaccttcaaggccagtttcaggatgtcaagcccttctcatccttcagtagaatctttctaccttggcttctgcttactggcctgagagattctgcttttaaaggtctcgtgt

SEQ ID NO: 1562061 - DNA, 4001 bp, Homo sapiens
gtaggcactgaagctaaggcagctgctgctgcaggttcactgaggctgtttcattattagctgagtggcagagagccagcgacacaaacaggacattgagggcgatatttagggacgtttcaacaagtggaaaagcatgaatctatagctgagaagtgcatatcagtgagtgagcaaggatctttgcacaaaggtttttttcggccccacgatttacacccctgcttgcactcacagtgagttgtgatgatctgtgcacggaatcccatctagaaaacaatagtgacacagagcatcccacccctccttccagaaccatcgtctctttgtgtcagtgctccgtgctgtggccactttaaagatttgacggggtcttccctgtgtttctttccacttgtgatcctgctgggatgaaggccaatgttccagaaacctcctgagaaggcagtgtgcaattttgctgactctagaagttcaggttctggggttcatcactcattagcaaaaggccacaggttggagcaactccagaaagaaatcacagtgccatgctcagaactagggacggaatgggagccacactgtcaccttggggagcaaaccatgacctgtttagacccagaagcacacaaataaaaaagcataccctgttttaaaccaggcctaatgtctggaattctttttatttcagacatttcttcggcaggggatttgatgtcacctggcagttcaggaattgctaaacgagagccaagacttcattcctcatccagacttaagttcctttgttctgttctgaagttttccatatacaaactctttctgatgagccagggcagacagggaattttgcctacagcattggagcagtttaggttccagaaatgtactagtttattttaattagctgcctgaaaacttcatgtgtaccctttaacctccagcagtcctcaattcaccatccagtttgaattctgctcagggcaggcagatccatcacatttcaaaagatgcaggtggcatctctccttcataagctgctccaagagggaaatgagagcaggtgacaggaacacactgccaggtgcagcagcaggtacatcccatgggattaaatgctggtggccatccaatagttcaagcagacagtacatagcttattattattttaaaaaataaagtccttggccagaaaaacaaagttcttggtctgtgcagtggctcatgaccagcattttgggaagccaaggcaggagaatcacttgaatccagcagtttgagactagtctgggcaacatagcgagaccctgtctctaaaaaaaattaaaaaaaaaaaaaatagatgggcatggtggcatgctcctgtagtcccagctactcaggagggaggatcacttgagcccaggagattgaggctgcagtgagccatgatcgcaccactgcactttggcctgagcgacagagtaacactctgtctcgaaagaaaaaaaaaaaagttcttcagggccccaaaagagttctggtttaagatctttctgtagtagctatagttagctatagttttcttccccaaaccataaccttagacaccttgactcaatattgacagcaatttaataccatttaaaacgataacttctcttcacctgcgcttccccatgcctccccacagatgtcaccccagcagcttcatcctaaaaccatcccagtaacaggctagactaagaaacaaaaagggtaccgtagtttgagaggctgtgaaattcctccagacttgtaccggttggaagcttgttcttttcctggcttccctgaagggtaaagtggattcttgagaaaatgagtccaacatgtccagtagatgtttccagatactagctaaaagctagcaaaaaaaaaaaaaaaaaaagaagaagaagaagaagaaggcagccctcataggactaaggacactgcaaacatttgggagctgccaagccctttcaacaacaccactgaaagaatgtaaacggagctggtcgcgttggtcggcgctaatggacaaaggcaggaagtgactattcctcattctcctagagacaccagcctctgtcactttatagtaaactcagtggtggctttccgtgtggccccaagagcgactgctgtggtaaagcaaagtctgtccttaaaaagcagaaaggattcctgcgtcccctggctgggctccaggctgcactgcctgcctgctatgtgagaccgctggaggctggctccccaacccattctactgacagccactgaggccaggagctgaggctgccacctggaccctggctgtgggctggctgactggggttgaaacacagagtccccgatttccatttcactgatcaatggaactgggttgagtcactggcattttcccagcttttgctgcgccgggccacaggccagatcttggcaagatacagagcttgagaaggattaaggacaggcctgttccctcctctgccctcccccgtcgcctattccccgcccacctctactgtcccttccccacccttcccatcccctccgctcctctcctcttctcttaatttctttagtccaacgtaaccttcctattttgggggaaggattttattttattaattgaccagtaaaaattgtatatatttatggtatacaacatgacatcttgatatatataggtatacatattgcagaatggctaagtgaagctaattaacatatgcattacctcatatgcttttttttgttctgagtgcacttgtgcacttacaatctcctgtcttcgaaaattttcttttcttttcgtttttttttttgtttgtttgcttgtatttctttttcgagacagggtcttactttgtcacccaggctgcagtgcagtggcaccatctcagctcactttagcttccgcctccagggttcaagtgattctcctgcctcagcctgcaagtagccaggattacaggcgtgcaccatcatgcctggctaatttttgtattttttggtagatgtggggttttaccatgttggccaggctggtcttgaactcctgacctcaagtgatccacctgcctcggcctcccaaagtgctgggattacaggcatgagccaccgctcccggccgcaattttcaaatacgcaatacattggtattaactacagtcaccgtgttgcacaatacggctcttggactttttcctccttctgaactgaaagtttgtatcctttgaccaacatcggcccaatctcttctcctcttgcccccaccccagcttcctattttatgctattttatttactttaggtcacaagtgcaaacccacaaaagaagcagcaaaagcaattatattggattccactactcacagttctgacttaatagacacttagtgtactcaagtcctggattctcatctccgtgctgcatgaggttggctacagaagctttctaatcacaaccttcagtttttctttctagccgttaaatgaggccgggcagcacggacttcagtctcagtaaacaagacctcgttattgtaattattttacagccaaattgactgaaataggaaaaagtgactcaccctagaggacctgtcaggtcaagtccgaatctaagaaatgcatctcactttttttgcctggtcgcttaaccagctcccagggagacaggtcatctctccttttaatgctttttgtttttttctaagagaggtaggaggaaatggaggtggctctgtgtctgggtccagggaagttctctgaatatttccataattatctttgtattactcaatattttacacgttggacagacaaatgttattccaggatcagacttgacaattcgaactatgtgaattgaaagaaatttttaaagtgtcttggatcactgtttgacacaggttttccctcacccaacagtcattttaaaaaaaaattttaagtttgaaggtcatgaaaactttccattgaaaagacaagct

SEQ ID NO: 1562062 - DNA, 4001 bp, Homo sapiens
aattacaggcatgaagcaccatggctggcctccattttcttcttttgccttgactttaaaatctaactactatgtaagatacggctccactgtgcttcctgaccatcataaggtggtaattatggactagccaatatttaggctgatctagacagtgctttgggttaaggagaggttttggatcatccctcttaacagggggaaataaatatctcagcatcagatgcaactcaggaacctggaggatgacaattgggcaacctggtgggcttagctcttgatctacagaggacttgaggagctccttactctcatttgcctccaatgggtggaggttatacaggtttgatcaaaactgagtaaatcatttgagaactgagactactttgtccacaaagcttaactattaggattgataattgagaccatctgtgtcaacataacgtaactcattcttccaggatcttcttgcccagaaaattaagactgtaaaccaataaataacttcactgtttgttgcaggaaatgtctacacactaatttgtcctggcaagcaatttgctcacctgggaaaacagctcacttatcaaacaagggtttacttgtcaagagccacttcaatatactagtcttgctgtatccaccagtcccaagctattgtggcatagacgtcactgaaatcaaattagttctccaccttgaaaaatgcagcttgaaggacttaggcctagatccccgaatcctataaatctgcctcttaatctcccctggcttagacatgaataagactgtgtcctggtgatgttcttccttatttcagtaaatctcatgaactttgctttatcagcaggttcttctgatggttttttttttttttttttttttttgtagagtcaacagttgacacaatatatcagttttggtctcttggaaacaggaaacatgtaaataagtgttaatagatacttccaacccataaaggttggttaattgttaaacatagtcacttgtcctcggtaataaaatctcctccgtcttcctcctctgaggacaagacctggtgttggaacactgcctatgacagatttcaagtgcatattttacctccatttttctacctttttaaacataattctgtattttcaaaattttctatactgaggatgccttaattcgagggtgaatgaaaggaaacaaagcaaaaagccacaagaggggaattgattcccaagtgtaaatcagaagcgaccaccaagtcttcattaaatacacacacacagagtacataaaacacccatttaaaatcttatctcattaagctagcaaggtaatttagtcccattaacatcaatatgaacacagaagagttagacagttataatcatgcttcctcattatcataagaagcctttggggatgtttgataaaatataccagaaaataatatttcatcattctaaggtgcggtccaggaagctgttttttgtttgtttgtttgtttgtttgtttgttttggagcccttcagtgattcatacaaacaagccaaggagagaacacatggacgacagcattgattcactggaaagcaaagtacagcttccaccataaaaccctgcagctgaaaaaggacaaactgagcagctctcaaataaagacagcctcagccgtcttgcacagcacggcccctctccgtgcccgagtcctgtgcctgtatgaaagcactaaatcacagaccccgcaacctgttataagccctggtaacaatcagcagctgggctcgggcaagctcccttagccggtgctggctcagagagcagacttccctcagcagctccatggagcaccgcagctcccaggctcaggcagcaagccgacgagttgagatcccaatcaaggcttccttttaccttaaagaaacttcctcgcttgtccagaccgcgggcgcccatggtccaagctgtcatttcccccagcgaggctccactgcacgccggggactcctgaaggtagagacatttttaatggttagtccagcctgtaggaaattcctttctaagccacagaacactcacaacaacagtcctgccaagatctttttccgtcaacaacacagtgccatttatttcccaccaaggccttacatctcccttcagcccaatttcctgtccccaccagcgcagttcctagactgccccacctcgccagcccacctcccacctctgccactgacgtagaaggtccttgggacttcaggaagcctaatgattactttgtgtgtttcacctcctgctgaaatgtgaacagacccaatattagatgtccccatcatctgcactggaagtttatagattgaatgtggctgatcacagagggacagctgaagaaggaggttctgtacatcccaggaaatcctgctggaagggggtgaggtcatccttagctctgctggcctctcccccaggcaaggtcaacagaagggcactgggaagaaattgctctatttttcccttagaaatcagaaatatttggataaaatcctgtcactgtttacagggatcagttcacggaagaggacaacatgtaaacagcttcacgatcatccacaaaaggggagctgaacgtagaggaaaactcagaggcagggtaacaacacagttctgaattctaactgtagctttttgggcttggaatttcccctgctagggcatcagatcccaataattcttccctttgggtcacaaagccttcaacattcagttctaagttaaacatacacacacctctgccagctgacctggctcaggccttcacgcattgaggggggcctgggggagcaaccccaaacccttccttacccagtgactgtcccaggatcaagtataaaaccaccctgtctttcctcattcatcccttctcgccataacatgcacaggaggtagctcatgccaaccgtgacggacacagaggaaggccagtgaagggaatagtgagactgtctcttgcaccatcaaggaatattcaaagtggttcagctgcaggggtgggtaggcactgaagctaaggcagctgctgctgcaggttcactgaggctgtttcattattagctgagtggcagagagccagcgacacaaacaggacattgagggcgatatttagggacgtttcaacaagtggaaaagcatgaatctatagctgagaagtgcatatcagtgagtgagcaaggatctttgcacaaaggtttttttcggccccacgatttacacccctgcttgcactcacagtgagttgtgatgatctgtgcacggaatcccatctagaaaacaatagtgacacagagcatcccacccctccttccagaaccatcgtctctttgtgtcagtgctccgtgctgtggccactttaaagatttgacggggtcttccctgtgtttctttccacttgtgatcctgctgggatgaaggccaatgttccagaaacctcctgagaaggcagtgtgcaattttgctgactctagaagttcaggttctggggttcatcactcattagcaaaaggccacaggttggagcaactccagaaagaaatcacagtgccatgctcagaactagggacggaatgggagccacactgtcaccttggggagcaaaccatgacctgtttagacccagaagcacacaaataaaaaagcataccctgttttaaaccaggcctaatgtctggaattctttttatttcagacatttcttcggcaggggatttgatgtcacctggcagttcaggaattgctaaacgagagccaagacttcattcctcatccagacttaagttcctttgttctgttctgaagttttccatatacaaactctttctgatgagccagggcagacagggaattttgcctacagcattggagcagtttaggttccagaaatgtactagtttattttaattagctgcctgaaaacttcatgtgtaccctttaacctccagcagtcctcaatt

SEQ ID NO: 1562063 - DNA, 4001 bp, Homo sapiens
ttcaatttgcactgaactgctgatcacgtggggctaggacagcgaggatagagaagagccaaggtttgaaaaccagtactgttccttgccctctgacctaggaaaggttcaccaagctcaagaaaatctcaaattttgctgctcttcatttagcaaactgtgctgggtctagcctttttacaaatgttaatagtaaatgaaatccactgaattaatccaaaatcaggtaaatctgatccaaggataagtggattcaatgaaaaagctaaagaccacttcaactctcgtgaagcttgcttacacgacttattagttcattcaaccattacctgatcactcaccccacgcacagaggtgtgatccctgaaataccctcccacttgcagaatgaatttttacaatagtttgaccagtcattggtacttatttataatcaattcactggactgtaaactctgaaggcagagtctaccccaaaatctggcacacagaggccattccagtcagttcaggggcaataaagatatggccactccgtcatgagctgttaagttttgctctgtgcaagcaaggagaaggaagttaagtcccagaaaggaagtgggggaagtaatttagatggggatggtatttggtgaggtaacttaacctgggacttgaagcctgaaaagggaggggtggggggaagagttccaggctaaccgaattgcaaagatgaatagcctaaagcaacatgatgaagcaaaaagcagccagctaggtgccaagcactgttctctggactactgaaatggtcacctgcagtacatctgggaagagctaggccacggtgacccttccctaagagagcctcggaccctcagtgtattcacctgtaaaatggctgccaaccctcccccgctgcagggtggctatagaataatgcccatggagtgcaatggctactgtgcccgctgccaagaccaatgccaaggtgatcccacgataagcactgagaggggccagaggaaaagccaattctgaggcaagaagcaggtggccacgttgtctacaattctttcaactcagatgtgtttgtgcgtctgatggaacaaggcttagattcaaatcgaccaacctgaccaacctcgaaagccccggccacagcccaggacctggactggacatttatacacatatctgctttaatcattataaccactctattcacaatattcaggtcatgaaggcttaattgaaaactgaaagaaacaaacctcctacacaggaagtagaatgctaacaatcccatctgccaactcccacccccctttcacagctaagggcaaactggccagatccccataaagacttcccttttgttgttttagtctagttcagcgtttctcccgactttagtgcacagtagaataactcgccacagctagacacgacgccaaatgtcctatgctttaagagcgacgtggactagaaaggaaacgtcggctctccaagggcggacttcggagcctaaagtccccgcagggcacgagtccactatcacgtgtgggaaggagactgacaggccgcctggaacatcgcaggcgctcaacagacagcagctgccccgctaagacgggcggaggaacgggatacttaggagtgagcggggcgggacagaagagcgccccggcagctttcacggcccttaggagccccgggggacacccccgggaggcccctctgggtgggtcctctggctcccgccctgagacccatctcgctcctcggctccattcccttcccagttaagcgccccccgaccaggcccgggctcgccgcttacacgtgtccgcagggcacctgtaccggcttctcgtacacctctaagcacacgggacacgtgaagcgtcctagggggtcagcctccgccgccggccccgccagctgcgcagcacccccgcagtcccgctgttgcgccgccatcttgctgccgctctgcgccgcgcaacggcggccgatgaggaggaggccgagggggcggggctcgcggggcggtgagcggttgggggcggggctagcgggtgggccgcccctcggggcccctctgacgcaagcgagctagaggccgagggaaatctggaaaacgtggaagccaaatccaaaggctgccagaattgggacgggctctgcgcgtgggccgctgttttccaaatttatcgttagttcggcaccacttgcactatcactatttatcttcgaatcaagttgctttttccttaaatttatttatttatttatttaatctattttgggacaaggtcttgctttgtcgcccaggctggtgttcagtggcgcgcgcgatcatggctccctgcagcctcgaccaccggggttcaagcgatcctcccacctcagcctcctgcgtagctggaccacaggcagtcaccaccatgccggactaatttatttatttttgtattttttgtagagacggggaaaggagggggggaaggagtggtgcagagagcgggcgggtctcactgtgttgccgaggctggcctcgaactcttggacgcaagcaatccgcctgcctcggcaacccgaagtgctgggattacagcggtgagccacagtacccagccatttcttaaatttaagcaaattctaataacagatctaattcctgagctgcaagaagaaaatcaatatcatttatttatacaaaggagctgggcaaggtggcttacttctgtaatctcagcactttgggaggccgaggtgggcggatcgcttgagcctaggagtactagagcagcctggccaacatggtgaaaccccgtctctactaacaatactaaaattagccaggcgtggttgcccatgcctgtagcctcagctactcaggacgctgaggcaggaaaagcctttgacctgggaggcgaaggttgccgtgggccaagatggctcactcactccaacagtcactaaactccagcctgggcaacaagaacgaaactccgtctgaaaaaaaaaaaaaaaaacaaaaacacaacctggctaacacggtgaaaccctgtctctactaaaaatacaaaaaattagccgggcgtggtggcgggcgcctgtagtcccagctactcgggaggctgaggcaggagaatggcttgaacctgggaggcggagcttgcagtgagccaagatcttgccactgcactccagtctgggcgacagcgcgagactccctctcaaaaaacaacaacaacaacaacaaaacaaaacaaaaaaaccccaacaacaaagtacattcatttcatattgtgcaatcatcaccatcagctatctctaaaattctggtcttcttgctaaactgaaactgaaattctgtccccattaaacaataacttcctcttccctcctcccatccccatacccccaggccctggcaattttctgtctatgattttgaagcacttatagctataaaatttcccctgagcactgctttcactgtgtccagtaaattttggcatgctgtgtttttgttttcatttgtttctcaatattttctctatttatttaattaatttatttattttgagatggagtctcactctgtcgcccaggctggagtgcattggtgcaatctctgctcgctgcagcctccctctcctggattcaagcaattcccttgcctcagcctcccaagtagctgggattacaggtgcctgccaccacgcctggctaatttttgtatttttagtagagacagggtttcacaatgttggccaggctggtctcaaacgcctgacctcaagtgatccgccaacctcggcctcccaaaatgctgggattacaggtgtgagccacccagcctggcctgtttctgagtattttctaatttcccttgtgatttcttctttgatccattggttcttttaagagtgtgtaaatttccacaaatttgtgaattttccagttttcctttgatattgatttctttttttttttaacccccccat

SEQ ID NO: 1562064 - DNA, 4001 bp, Homo sapiens
tccgggagttcaagcgattctcctgcctcagcctcccgagtagctggaattacaggcgctcgccaccatgcccggctaattttttgtatttttttagtagagacagggtttcaccatgttggccaggctggtctcaaacttctgacctctggtgatccacccacctcggccccccaaagtgctgggattacaggtgtgagccaccgcacccgacccataataaaaataccttggaggtgtgtttcttgtaaatgagtggctaatttcccaacaccctgtaaaagtatatgggtaaaaagaaactgaaaatcatcatgcaaccagagttaacaactatcttgcaaaattcatatcatttgttttaaaaccaaaatagcaaggaagagctggtgttatcccaatagcctctttttaattggtctacaacaactgcaactcttcataactttaccaacacaacaaagtcaggcaggcagtctgacagagtcaacgtttgtgggaacctacagcgcttccttctctctctggagatgaggacaatgaaaaaaggtgttctgttttccagtagtcctgtaagaggagccattgagctgggctgtacaaccagacaacagaacacaggaaaattcacatcaaagcaagggcgcatgccagggtaatatgcaataaaaccctctgccaaagcattaaggggaaaaaaaagcaaggaggtagagagaacctgctggactaccttctcattaacacagggaggcagaaagaaacaaaatctgcctgtattcaggagcggagaaaactgtgtcctagatatattggagtattcctatagacatgtttatgagcattcggacaaattatcaatgaactaaacccagaaagcagtgtcctgtacggtggagtattcctatgtagacagacatgagaatcttaccattaactaagcccaaaaaggcaaagtattctagaaacacagatatatgagaatttagatgcacatttccaatgaataaaacccactggttttacagtgagaaaaaactgtttgaaataacatcaggtaaagaattgggtaaaggtgtgatgaagttatatcccctccccttttcctcataccctttttgacaatctctgattctctcatttcatagatgtccctttcacttgaatgcgcacacacacacacacacacacacacacacacacacacatcattaggtctccagaaacaaaggagggtccttaattctccggcctgtggaaccacacacgccccctgcccacagatggtgactttcattaatgagtaagccgagggaagaggtctccaccccgaccactgccatgcacactgtgacaacggggcacgagacaagcgccacaaagaaaggggaggagtggacggggaccaggaaaacactgccacgccgcaccccccaaggcgcgcgcccaccgccaacgcgggggcagcgtcctcgccatcctcctcctagcctcccagctcatcccagccgcctcccacgcccggggacccgatgccagggcttgggcgagcaggacgtgcgggggcccacgcaccttccctccgtgatctccaggtgacagccccgctccgccctttgtgagggactcaccctccagtcccggggccgcgccggaccctcctccgcgtccctcctcagcctggagacaccgcctcacccctgcacaccgcgcccggccggccgaggcgccgggagagtgtgtgtgtgtgggaggctggcgcgggcccgcggtctcctcagcatcccgaacccggagcggctcggtcccccaaaccccagcccgggggcggcggccgcggcgctcccgccctcgctcgctcacttactcgggcgcgccggtggcagcggcagacgtgcgggaccgtcagcgccctgcggcgggcggcaggctgcgggcggcgagcgtccgtccggacagagcgcggcggaggtggcggcggctgactgcgcccggcggcccctcgcgaggggcgggcccgccgggggaggggcgggcgccgcgcctctcattcatgcagcgggggcggggtgagggacccggatgcccgggcagtttccccacccacctcggcggagggctcggcggcttcagagtctgcagtgcgcaggcgcggcgctccctggccaggcctggtgcggccctggccgctggctctgttcctggttagaactacgccagacaggccgggcgaggtggctcacgcctgtaatcccagcactttgggaggctgaggcgggcagatcacgaggtcaggagatcgagaccatcttggctaacgcgatgaaaccccgtctctactaaaaatacaaaaaattaaattagccgggtgtggtggcgggcgcctgtagtcccagctacttgggaggctgaggcaggagaatcgcctgaacctgggaggcggagcttgcagtgagccgagatcgtgccactgcacaccagcctgggcgacagagcgagactctgtctcaaaaaaaaaaaaaaaaaacaactactccagacagaccttctccatcgaccgtttagtatttttgcgtgccctacaagcatttttaaaagtgaaagcatggggccgggcgcagtggctcacgcctgtaatcccaacactttgggaggccaaggcgggtggatcacctgaggtcaggagttccagaccagcctgaccaacatagagaaactctgtctctactaaaaatacaaaattagctgggtgtggtggctcatgcctgtaatcccagctactcgggaggctaaggcaggaaaatctcttgaacccggggagcggaggttgcagtgagccaagatcgcaccattgcactccagcctgggtgacagagcaagactccgtctcacacacaaaaaaatgaaagattggaatgccacccctttcctagcatgcagattgacagtccccagagacacaagaatggtcacgtggtgcccattggtttgatggggagatggtatgcaccgcaccctcctccatctgcccctcctgctgcagcctctcagctgagtgctagaaccttggtgatggatgagacctagactctgcccagatagtggagagaggtgtgtgcaagaaacagtgcattcctttatttacatccactcctcaacctccggctcccattctacagggcaggcaataaattgacctccgattttgggaggctgagctcttcctgcaataccaaggcaaggatctggggagtcctctcttgtctttagcaggcagtgtattctgcagatactctcttgttcccatcgccttgtgtctgccactcctggggtacggaagtttctggagaggctaggagcctgcagagggaatggctgtgaagctccacagctgactgtgtgtgcgctgcagctcagagcttgcaaaaatgattgccccctcttcctcagtctccatgtgtcccccagaagttctccttccttctcctaatctctcaggccccatcacataaaccataaacagctcagtagcttaactttgggaagcaaaagtcatcatggcaagcgcctagaggcatgttccttctgctttggcaaaccattaaccaccaaggcagggaggaagtaaagagggaaacattagtgaatttctcaagaagtcacctgccacccaatggtcacagtcccccaaagtgagagaagggtggaggcatgtgctagggagactgtggcaaaaggaagggagtgggagacccaggcttcctctagagctgcctgtgccagggctgtgctgggggaacactgccctccttgctgtcaatcatagcagttacctggagggtcttttcaactttgctttgctcaaacctctcactgttctaaatcagccccctcatctctcccctgggctgttgcagaagtctcaatccattctcatgcaaatcgattctcatggtattcaaatctgcctgtgtttctgtctttttctttttccctgcccc

SEQ ID NO: 1562065 - DNA, 4001 bp, Homo sapiens
aattattcatatcatccaatataagcgcctcttaattttttaaaaccgctattttgaatccaaagatcataataaaaatagcttttttttcagacggagtttcgctcttgttgcccaggctggaatgcaatggcgcgatctaggctcactgcaacctccgcctccgggagttcaagcgattctcctgcctcagcctcccgagtagctggaattacaggcgctcgccaccatgcccggctaattttttgtatttttttagtagagacagggtttcaccatgttggccaggctggtctcaaacttctgacctctggtgatccacccacctcggccccccaaagtgctgggattacaggtgtgagccaccgcacccgacccataataaaaataccttggaggtgtgtttcttgtaaatgagtggctaatttcccaacaccctgtaaaagtatatgggtaaaaagaaactgaaaatcatcatgcaaccagagttaacaactatcttgcaaaattcatatcatttgttttaaaaccaaaatagcaaggaagagctggtgttatcccaatagcctctttttaattggtctacaacaactgcaactcttcataactttaccaacacaacaaagtcaggcaggcagtctgacagagtcaacgtttgtgggaacctacagcgcttccttctctctctggagatgaggacaatgaaaaaaggtgttctgttttccagtagtcctgtaagaggagccattgagctgggctgtacaaccagacaacagaacacaggaaaattcacatcaaagcaagggcgcatgccagggtaatatgcaataaaaccctctgccaaagcattaaggggaaaaaaaagcaaggaggtagagagaacctgctggactaccttctcattaacacagggaggcagaaagaaacaaaatctgcctgtattcaggagcggagaaaactgtgtcctagatatattggagtattcctatagacatgtttatgagcattcggacaaattatcaatgaactaaacccagaaagcagtgtcctgtacggtggagtattcctatgtagacagacatgagaatcttaccattaactaagcccaaaaaggcaaagtattctagaaacacagatatatgagaatttagatgcacatttccaatgaataaaacccactggttttacagtgagaaaaaactgtttgaaataacatcaggtaaagaattgggtaaaggtgtgatgaagttatatcccctccccttttcctcataccctttttgacaatctctgattctctcatttcatagatgtccctttcacttgaatgcgcacacacacacacacacacacacacacacacacacacatcattaggtctccagaaacaaaggagggtccttaattctccggcctgtggaaccacacacgccccctgcccacagatggtgactttcattaatgagtaagccgagggaagaggtctccaccccgaccactgccatgcacactgtgacaacggggcacgagacaagcgccacaaagaaaggggaggagtggacggggaccaggaaaacactgccacgccgcaccccccaaggcgcgcgcccaccgccaacgcgggggcagcgtcctcgccatcctcctcctagcctcccagctcatcccagccgcctcccacgcccggggacccgatgccagggcttgggcgagcaggacgtgcgggggcccacgcaccttccctccgtgatctccaggtgacagccccgctccgccctttgtgagggactcaccctccagtcccggggccgcgccggaccctcctccgcgtccctcctcagcctggagacaccgcctcacccctgcacaccgcgcccggccggccgaggcgccgggagagtgtgtgtgtgtgggaggctggcgcgggcccgcggtctcctcagcatcccgaacccggagcggctcggtcccccaaaccccagcccgggggcggcggccgcggcgctcccgccctcgctcgctcacttactcgggcgcgccggtggcagcggcagacgtgcgggaccgtcagcgccctgcggcgggcggcaggctgcgggcggcgagcgtccgtccggacagagcgcggcggaggtggcggcggctgactgcgcccggcggcccctcgcgaggggcgggcccgccgggggaggggcgggcgccgcgcctctcattcatgcagcgggggcggggtgagggacccggatgcccgggcagtttccccacccacctcggcggagggctcggcggcttcagagtctgcagtgcgcaggcgcggcgctccctggccaggcctggtgcggccctggccgctggctctgttcctggttagaactacgccagacaggccgggcgaggtggctcacgcctgtaatcccagcactttgggaggctgaggcgggcagatcacgaggtcaggagatcgagaccatcttggctaacgcgatgaaaccccgtctctactaaaaatacaaaaaattaaattagccgggtgtggtggcgggcgcctgtagtcccagctacttgggaggctgaggcaggagaatcgcctgaacctgggaggcggagcttgcagtgagccgagatcgtgccactgcacaccagcctgggcgacagagcgagactctgtctcaaaaaaaaaaaaaaaaaacaactactccagacagaccttctccatcgaccgtttagtatttttgcgtgccctacaagcatttttaaaagtgaaagcatggggccgggcgcagtggctcacgcctgtaatcccaacactttgggaggccaaggcgggtggatcacctgaggtcaggagttccagaccagcctgaccaacatagagaaactctgtctctactaaaaatacaaaattagctgggtgtggtggctcatgcctgtaatcccagctactcgggaggctaaggcaggaaaatctcttgaacccggggagcggaggttgcagtgagccaagatcgcaccattgcactccagcctgggtgacagagcaagactccgtctcacacacaaaaaaatgaaagattggaatgccacccctttcctagcatgcagattgacagtccccagagacacaagaatggtcacgtggtgcccattggtttgatggggagatggtatgcaccgcaccctcctccatctgcccctcctgctgcagcctctcagctgagtgctagaaccttggtgatggatgagacctagactctgcccagatagtggagagaggtgtgtgcaagaaacagtgcattcctttatttacatccactcctcaacctccggctcccattctacagggcaggcaataaattgacctccgattttgggaggctgagctcttcctgcaataccaaggcaaggatctggggagtcctctcttgtctttagcaggcagtgtattctgcagatactctcttgttcccatcgccttgtgtctgccactcctggggtacggaagtttctggagaggctaggagcctgcagagggaatggctgtgaagctccacagctgactgtgtgtgcgctgcagctcagagcttgcaaaaatgattgccccctcttcctcagtctccatgtgtcccccagaagttctccttccttctcctaatctctcaggccccatcacataaaccataaacagctcagtagcttaactttgggaagcaaaagtcatcatggcaagcgcctagaggcatgttccttctgctttggcaaaccattaaccaccaaggcagggaggaagtaaagagggaaacattagtgaatttctcaagaagtcacctgccacccaatggtcacagtcccccaaagtgagagaagggtggaggcatgtgctagggagactgtggcaaaaggaagggagtgggagacccaggcttcctctagagctgcctgtgccagggctgtgctgggggaacactgccctccttgctgtcaatcatagcagttacctggag

SEQ ID NO: 1562066 - DNA, 4001 bp, Homo sapiens
ctcaggatgaacattgctttggaaataatgcaatgtgtgaccttgaggaaatttcggcttataaatccattttttgaagtagtttttctcctttaaaatggtgaccgtagtaacaagcacagagttgtactgagtaattagttgaatagtatctatggaaaatactagacactcccaagttttccaattttggattaagagaggcaggccttgtgaaagagatactaaccctagtcattacgttagtccatctctttagtgcagaagatccttggcaaagctggataataggctgagagaagaatattcctttaagagagggacactgactactcaaagactttcttttattagtacatgggctgggattgatgggaagggacagatgtagttggcaaccatggttagcatcggatgcccatcccaatggccatgaatgtgccaaaggtgccgccactctgcatcatggttttcccaatgccgcccatcagctctcgaccccgcattccgatcctgaggaggaaaccaagatggagctatttggtaacaaaaatatcagaaagagtattaactgctcctttccaattttttgctaacactagtctagcaacccctacatctgattttccacttactggatattatatcttactacctggggtgggtaatgagaaggaaaaagatccatctgggtctccagggtatttttctggtggatgtcgtattaactgccttcagtttgtgggaggcagcagatgcagtgtaaaatacatagagaaaccagcttttttgactggtgttgcctgcagtttaagacccaataaagacatctgtcttttagtttcttggtgttaatgattttggagtaaggtgggggttcaagagtcagctctacaatttacacatagtgtcaagtgtaaaatgggcatctcaacattatttacaggattttgaaaactacagtatttagcacagtgcttaacatagagtaagtgctctgtaaatgataatttacaatctagggatatggcaataacagcctctaaatgtgaaaatgacctttagagtgtaaagtttaactgctttatctctgtatcctgtatccagaatagtaaaaccgctgaacgagtttctttccttatgcgcaattggaaaaaaaaataaaagcaacagtagtaactagttactgagcacttaatatgtgccagatgctgtgcaaagtgtgctgatcgaatttttacaactctataagttagatgctactgtcttcattctacacttaaggaaacccagtctccaacttgcctaaagtcaccgaaccagtaagaaaagggccagaaagcattttgactctaaagctcaaattcttaagcactgacgcttccaacctgactttacagattgaaggtggtttggaatgagtctggctcgcgaggggacagagagggaagtcgaaagaaggaggctgtgttcaggctccaggccgaatggggcagggccggaaggtctggttgtcctgcccagagatcaccgcccgcgcccctcacctgagacaggaaaaggtgccgaagagcgccccggccgccatgcccacggcgcaacccatcacgaagcccattttgacacggtcgaagcagcttggctgggactgtccgtagggacccacggccaccggcatctgcgggggataggaaagtgtgggcccaggcgctggcccaagagtcgggcggggacggaagcggtaggctgggaagtgggcccaagggctcaggggaagtaagggaaggaaaatcagtgggtagcccgactccaccaccctcttcgcgttccggccccgcgtcgcccggcgcctacctcacctcgctcgcgggctgggtcgctcagctctacgtctctcacggaaaacgacggggagggcgctcgcggcccgatgaatcgcttccggagcgccgggcagcacttccgggagcctggggcccaggactgcagcggcttcggaaggtgggctctgccagcgggaccatgctgctccgagccgcttggaggcgggcggcagtggcggtgacagcggctccagggccgaagcccgcggcgcccactcgggggctgcgcctgcgcggtacgctcgggtcccgctctccgggaggcgcggacctgtcccctccgcgcggcgacgcaactgaatattccggagccttcctgtccaccctgctgcccagaccctctgacccttctctcaaatgacacatccctcaaactttcttaggcgggtccccgaacggttgaccccggcgcaccacccctcgcaccctgcgcgacaggcccccagagccgtggaggcgcgtccttcagaccgctcctggccaagttacagatgctgctccgggctcccgtgcagaccgttaccttcggtcagaagggactgcacctactctggctccacgttccttctaaacgtctttgccctttagagccttccttcctacgataccatttgaatatcaactcaacaccccctccaggaaccctctctccctctcccttacctccttttacagcgtgtcaggtatctggtgttgttttctttccattgagattcgaccctagcatcccttacacttatctcacctccagccagatttttccttctgccctttggatgccatgcgttcatagttgccttcggtcttacttggctactccgttccattttttatcagttggagaccgtgctcctcagtctgcggttcccgcagatacagccgctgccccggaggtggggccagtgctgcgacctctctatatggatgtgcaagctacaactcctctggtaaggatgaagcttttcccaaggctgcttataggaagtaaatgatgggcgtgatcacgcaaagaaatggctgaatccctggagaagtgagagccgtgaaggtgtgctggaaaaagcactgagcgaggagtcgggaggcttaaattcgaggccactggcattggctttactactcactagcaattgaccttggtcagatcacttcagcgcaggctctatagtattagttaaaagcatgggctctggaatgagcagaacggccacttagtaactgtgtgaacttggacaagtattaaacgggttaaaagactaatgcaagttttcaccaatgtgtgaccaggggtgtttgcctaggccctgtcctgtcccagccccttatagatcacattacctggcaggaatggaaacaccagcagaaacagatgtcggaacaaggcagtgtttgtagactacctgaggggaggcagaacaatccgagttgggatgggttgtgagtgggagtgtattaggttgatatttggtgggtagttttgtgggaacaaaagaatgtttgaggcctcctctaggcagtgcctgaggggttgagagtgtcttaaggcagggtggccaggtctgaggggtggagtgggacctgaattgacgatgcgctcaaggaaaatgatctgttctgttgtgttcaggacccccgggtgcttgatgccatgctcccttacctaatcaactactatgggaacccacactcccggacacatgcttatggctgggagagtgaggcagccatggaacgtgctcgtcaggttagtacacaggagtctaggaggttctaaggtcaaagaggggcagtggcctgtgggaggcatttctttcttggtaggtgtgcatggaggtagaaatggttttggattctttctggaagagattcaaagagcagccttggagtttgactgcaggcatttgattggttcccatatttcctggctaaatgacttgggcaagttatctaatttctttgagccttattttcctcatttaaaacagagattgtggtagtttctactctgtagggttactgggtggattaaataagacaatgctgataaagtgtttattaccacaacatctgtaagtaagaagtactataaatagtaagagctcaatagttctttttttt

SEQ ID NO: 1562067 - DNA, 4001 bp, Homo sapiens
tttcaccatgttggccaggatggtcttgatctcttgacctcgtgatccgcccgcctcagcctcccaaagtgctgggattacaggcgtgagctaccgcacccggctggagaccactggaaagttctaagcagaggagtgatttgacttacactctaatggtattactgtgttgagaataaacaatactgtgtggagaacagaccatgcaggtgcaaggacagagcaggggacaccagttgggagactaccgccataatccaagccagaagatgatggtggcccaaaccagggcaacagcagtgaacatgatgagaagtgatgagagttagtctggctagaattcaaagtcaaagcctatcagaaactgctaatggacagaaagacctaagagagagcggagtcaagatactaatgctgaatccccaatgccttgtgcacaggcgggtacccaatatatgaagatctagtgaatggctgcgactagcattttcccacctagaccgtaaattcccctaaaacagcacctgtgtcagaatcctaatcttctcactccatgttaacgagagcagtaacttttctgactaaaagttgagcacttaatatgttaggtatgcccacgctatgctgtgctttgcacacaccaaatcattaaatcctcacaacatctaagcaaggtggctattttctgcatttcacagaccaggaaagtaaggctcagaagtagttacctgccctaggacacatcactgaaaatcaaacttcaggcaatttgaatccaaagtctgcttttaaccactttactatcctgaacttctcaaataatgaaacggtgagccactgactcattcatgtgtcaccctgggcaagtaagttcccttccgtgggattccaacttctcatctgtcaaatggtagtaacaagagtacatgcttccaaagttacgatgaggctacatgaaattccaccctgcacagcgtctactcagtaacttccaatgcagttaacttagttcttacctagggccatgcactgttctaaactaagcacgaagattatttcacttaataaagcaactcaacgaggcagataacgtgactaatttgactaacttattttacagatgagaaactgaggtgtagaggggttaagtaacctgctttgggttacacaatgaatacgtggccgactgcaagtttgcacctagagtgtcacttgagaacttatgctccaggctcccagagagaagtgagggttttctttgcccctttcactgaatgggaaactacagcacaaagaaggacaatctgcccaaaacctcacacggagtaaggggcagcgccgggaccagaaccttaggccgcctggcccagaagcccgcgcgagtgaaatgaatgaggccagacctaggctaagcgcgtccgcggtccccacggctgagcctcggggcgacccgtagctccgcgctgcacccctcccccaggcaccaaccccgccaggtcgcgggcactcccaccagctcgcagccctccttcggaccctcgatccgagagcgccccagccagagcttgtgcccatgcccctgtcccgcaggggaaggggatcccgcctggccggctctcgagcggcgactagtaacctcccgcgggcgacagccctctccccaaagccacgcgcaactcctcacccggcggcgccattcctccgagcaggtcccgccggagtccgagccgcgggctgacttccgctcgggaaagtggctccaagagcccgccacaggggacgccagggactcgcggcaggctctgcgggccaggatgagttctaagcacaggtcagtgtccgcggccccgctgagcttcgacgcttccagcagccgcggccgggatcccagtcctcccgctcacagggccttgcagttcccgaggacagacccgcctctcccccgcgcccaggcccacttggaaccgaccgtctcgcaacgctcctattccgggagctaccgggacgcggttgggccaggcctcggggtgggcccgagacggggccgcttctgattggcctgtctgctgtcactcactcgtctttctgctgcccggcccattttaaaggaacaggaagggtctcgtcgggaggggatagcttagaagggatttttttttcctctttagaaaattgtggcagtttctggccgggcgcagtggctcacgcctgtaatcccagaactttgggaggccgaggcgggcggattacctgaggtgaggagttcgagatcagcctgggcaacacggtgaaaccccgtctctactaaaaatacaaaattagccgggcgtggtcacacatgcctgtaatcccagctactcgggagcctgaggcaggagaatcgcttggacctgggaggcggaggatgcggtgagccaagatcgcgccattgcactccagcctgggcaacgagtaaatctccgtctcaccaaaaaaaaaagaaaaagaaaattatgtcagttttttccaaagattatcagtggggttgttaataactgacctacgagtgacgttttatctgatttgcagagcaatgcagtgactcatagagaacatattaggccagttttacaggctcaacatggaggtggctcatccaggaacaccgctctaataactagcgccaactactgaatgtttacagtataacccgacactgtgccgaacgctctacaagcattatttcttttctttccttttttattgatacgggatcttgctctgtcgcccaggctggagtgcagtggtgcgatcacagcttactgcagcctcgacatcctgggctcaagcaatcttccctcccgcctcagcctccggagtagctgggactgctgccttgcgacaccacgcccagctaatctttaaaattatttttggtagataccgcgtctcgctttgttgcccaggctggtctggaactcgggctcaaaggatccttcggccttagcctcccaaagtgctgagattacaggctaatcccattttaaagagaaggaaacagatttgaacctaggcagctgactccagaatctgtgcttttaactacagttttatgaacatataaagtatgcacaatataactcttattaacgttattattgtcccaaatgttatcccgcatgggagagagtcagttctttctgtgtctgttatgatagccactagccttatgtggatatttaaatttgaatttaaatggattaaaattaagtaaaatttaaaattcagtctctcatttgtactagccacatttcaagtgctcagtagccacagataactagtggatatcagattggaccactcaaaattataggacatcttcattattgcagaaagttccattgggcagtgctgatgtagaatatataaagaattctcccagctcaagaataagacaaccaaccagtggtgtgctggagctgtctcatactatcttgagagtccattgttaaatttgcagtaattttgcaaattggttaaatacagccatttagaaaattatatcaatttaggatgaaataaagtatattgaaaacaaaactcattattttctaattatttcactacattttacgttttgtgtgcttttgtggttgcttatatctgttgtaactgtgtggtggaaatatatgacagtatgccattgaacatctcttcccaaggtagtattggtagcttgattttggccatgatgggagtatttacaccacagacttagcatatgcagccaggaatggtggctcagtctgtaatcccagagcttttgggaggctgaggtaggaggatcacttgagtccaggaattcgagacccacctgggcaacacagcaagacctgcctctacaaaaaaaaaattttgattagccaggtgtggtggctcgcatctgtggtcctagtgactagctgtggaccacagatgggagccaccacacctgactaatgaaaaagaaaaagaccaacaat

SEQ ID NO: 1562068 - DNA, 4001 bp, Homo sapiens
ggggcagtccctgctaaagggctagaactgggtctcctgaaaaaaatcatgaagattttggtgtttgccagcctgttgtagtctgagcctgttcagttcgaaagccttgaaaataccacttagccacttcagtttcctcacctgtagagcaggacatctgtggtgtccccaactcacagatagtatagaacacttgtaaagccacttcgctataaaggcctaccacatatagggtgtctggagcagctctgagcttcatttcttcagtcttccattatgaaactcatccgggagtgtaggtgtccatctttccccaccagactgtaagcaacttgaaggtaaagaccatgcctcacagtgagtaatcaaaagtctcatctcaccataatctgctgaatgcctacactgtgcctcaccccatgctaaatgttcatttggattatcccgtttactcctcaccacgagatgagtctcagtttttcctcttctgcaaagttcctacttcatagggctccgagaattttttttaatggcaatgtatgtaaagatatcagtactgcacttcgcatgtaataaagacatagtaaatttcagttatccattctgtagataagaaaattaaggcacagacaggttaagttgctggggtcagtaaggcggcaaagtcaggcttaaattctaggcagttggcagaggcaacatgctgcaagtgtccaagccagtgcctggcacataacagaatgagttcaatgaattgtctgtcagaacctgagcagggcctgaaatcaatgacaactgcatgagagaggagaggagaggagaggtaaggtctgggtggccccttaacctaagatgggagagactacctacttcacagggctgttctaaggactgagtgcgaggatacacacaaaggtcttagtatagtgactggtatgaagtaaaggctttgtaaggggtagctatccttgcctccctcttacagatgagaaaacggagacacagggagatgaagaaactctcccagtattattcagctggcaaatagctgagccaggactcgatctgcagagtctgactccggagcccactggcttttactccaaatacccagcactgggcccgacatgctagggccagtacggcagtgaatgcagccgagataataacagccacaaatgtcagggggaaactgaagggaaaatggcttgatgaactagaagtctggacacctgagtcccagtccgtggaccctcaggcaagtaccttaaaccttcccgggcctcagtttccttcttcgagaaatggggctaactttgtctcccatctcagaagctcgatcaggcctggaaagcaaggctcaatgaagaggcttagaggggcctaggttgtatgtgggcgagaggacaatccggggaccgtccagggggtggggatttggtgtttacctttgcggagctcgcggtgccacacggagacgatgggtcccgcgtgcttgcggtggtggatgagccaaagggacagggtctgcacgctctgctgagagttgctcagctccgagagcttcttctccagcgccgactcagagaaggaggacatggtggcggcagtgaggcccggcagggagcggcctgggccgcccagtgcggcgggaagagcgacggcacgaggccggggcctcacctgacaggctgcgggactttttaccgactgacagactgccaggggtgcgagaagggggaggggatgggtctccgcagtaacagccgcccgcgccgccgccacaagatggccacccgacctctcaccctgccgcgagagcgaggtcaaagggcaagggccggagcagaggggcaccgagaggcgtcggagctctagaaaaccgtccctttggaggcggcggccgctctgaacctcgcgcagagcacttcgaaggagacagagcgaggcaaggagagtagttccccgggcccccggaaagagctttgaccgctcgagcctgcacaccggcgcagtggatctcgccggaaccctttttcccgctccctcggaacctttctggcgcgatacggcgcgctacttagcgcgtcacttccggcgaggcagaggaggcgggagagtgagagaaaggctggaagacgaggtaagggaagagtggcgggaaccagagggagcccagcagctgggaccctgtagaggggtatcctgaggggacattgagtctgagagatcatgatctggatatgggagggggatttcctttctaatctggcgggccccaggccgcatctttcctccatatgtgttcggctctctggctgtcccccaaaacacttagttttggttcttccaagccacccacgtgcccttttcacgcctccacgccctggcgctcgttctctgtccgaaagtgacatcccctttctcacctggtgagctcctactcagccccccggagcaccctttaatgtcctgttttgaccttttagtctgtaacagcgccgtcatgaaacacacatttgggctctcggctcttaagtgggttctcactcagggtattattacgtgctgcttttgccgtctgcgggtccagttgactttttcgaacttaagtgaggtgttaactttagggaaaaggtggagggaactaacttagccttcccaatgtgtctgttgacctcatgttgagacacactatttgaggcctggcgcaacgtctcttgcttgtaatcccaaccctttgggaggccgaggcgagaggatagcttgaggactggagttcaagaccagcctgggtaacagcgaaaattagccaggcatggtgacgctcacctgcagttccagctacgcgagaggataccttgagcccaggagttagaggttacagtgagctatgatcgtgccactgcactccagcctgggcgatggagcgagactcttctctgaaacaaaacaaaacactatctgagactctaaaccttgaccctattttttttttaagttttaaatcccaggtatcaaagcagcagagaaattttgtttttcttactgccacgggggtgatggtagggagttaagttatagacataagagggttttaaaatttcctgatcgtggtataacttcctagttgtgggcagactctagtttaggagacgttcttctagttgatgcctgcttttgctcttattgcactgtattgcagttctttgcttacatgcttttacccttcctccagactggaatcataatcatagctaacgcagtgagaggttactatgtgctagacacaattcccacacagtaactcatttaatcctcacaacaaagctgtgaggtattatattatccccctttggacagcgtaggaaacaggctcagagaggttaagtgacctacccaagatcacattactaagacttgagggaaggggctgcaacttagccatctttttggccccagttcctgatttatcaagtgagttagtgtaaaagaggtgagtaacctaaaatcatacagtgagtatctagtcataactgagggcttttgtgtcgaaatctagatcatctttccatattaataacactgtcatatactgagcacttttataccaagtcactgtctattaagcacattacatactttttaaatttaattcttacatcagtcttaggagttgaaattattacaatcactatttgatagacgagaaaatgtaaagcatggttaagtaccctatgtacttggacatagttaggaaatagcagagccaggagtcaaattagggttatcttatgtctgatcccaaattcttgcctcctgaaccaatagtttattcattcattcggaaaataatttttcagcacctatgtccaaagcactcttctaagctaacagacaaaatccacgttctcaggaacttactttctactgagaaagatagaaaaacaaacatgcaagtttagaataagtcagaaagtggtaagtaacttcaataaaaa

SEQ ID NO: 1562069 - DNA, 4001 bp, Homo sapiens
ctacacatgaatgcgagaaatggctgataagcacagtaatttaagattgcgtattcatgtagtgagatttagtcattaaccaacccggtctttgtgatgtgtgaagccttcccttcagttatgtcccatttttatgatgccaaaagctgccactgtgtggtattcgaggattattgcaacaaagccagtagttaaaccaaactacagtctcagcctgtcattctctagaacacatccaggtgtcggagctaaggtgttcagctcggctgtgactatacagaaccaggcctggcgttgcttccgcaccggtagcagttgtggatgtcagtgtgcataagcaagtatcagacctcagaatgtttgagttattttgtcttagatatctgtttttaaatggataatgtatttgtcctttaaacctcagttttgcaatatgtttcacagcttgtctcctttcaactaactgggtaccctaccccacccgtcacccactgacagcaaaacctcaaccctgggcctacagacacagaatgaacctgcacaggtaggttttcattatttatttatgacaaatattccacatctgtgattctctccagtcaaaagttcctagaaccaggggaaaaggacaacgttaagaccacgcctctggagcagtcctagtccactcactctgcccaaatgtgagcccccaaccttactttgagacgatgccatcggccttggccaatcggagaatggaatcatctgactcacccttaagaaaaaaaaaaaagcacactaagaatatttccactccggctgcctgagatggcagaaggtcagctgtgccaccagcccacgtctctcccccgctgagcgaatggagacaggcgcagaaggggagccacctctcccggggcagcctgcagcctgactatggtggagcggggtcgggggggcacctcctagtgagaggcagagtctgctgcctgagtgtcttctcagagcacccctcttccaccctcaagaagcggcaggcggccagcccagtccagctggctcaaactactctgccagcagatctactcaggcaccatcacacactccaatgcgcacggtaaagtccacgatgtcccgaagtgatgagcaaagcccagggaaacactcaccatcctacgaatggccccgcagatagcataagttttaaactggccattaaacctgcctgtgaccttgtcaacctagaaagagaagaagggtcacaaaccactcccccaggtttgggaaacaccaatcctcaaagccagcctctgcctgtaccttcaccccaggggctcctccacaatgggacagcctgcctttcccgcacatatatcacaaccttcccgcctcccgggctcccagctcacctcggccacgttcatctggatggatgcgtggtccttggcaccgatgatgcgattgctagcggagctgtggagaaagggcgcagtgagcagaggggacttgggcggtaagaatgaaagaggggacgagggaggttgggggtatatgaatggaaaagagtaacgtcgggggcaggacaagttagggacgtgacgaggtaaggacgggaggggtgtgggggaacaagggcaggcgaggggacgtggtggttaggtaaggacggaagagaggcatgtggggggcgcttaccatttccgcggcacgtacaggtccacgaactcgccggcgtcgttctgcatttcgaggctgggctgcgcctggggagtcaccgcgcggcgccgtgagtacggccggaaccgtgccccggctcccggcgcaaaccggcccctagggtcacggccccagccgcacccagcaccccgcaccccgtcccccgcgtccaagcccccactcccgccccagccccagccctgagcccgaagcccgcgccgcgcgccacacctgctgccaccacaccgcgcgcgagagagaaaggaagcagctagtcacccggcagagatatcggcgggcaaggaggggcctcggcgagcgcttccgggtcacgccaccacagcgagtctgcgcggtgcgtgcttgccggccgtcgccgtgacgcacttccgcttccggcaaggaggttctcggaccccagcctgctggccctggggcgcggggcgtcgtgggggtcgttgtcgttgagggtcgttgccgtgtgtggcgtcttagcctggcccctgggttgtgccccacggacgcagtcgacccctctgagcgcctcgggagccccgaatagcagctgggagaaggggcgaggactgagcctcgctgcccgctgccggccgggctagagatacgggcgtgccccccattgtgcgcctcccgccctccggtcccctcaccctgcggccacctggggcgtggggcggtgctcctgcccgtgcacgtagccgctgcgagcggaggcctgctcacctggtgcctgctactcactcccccgggccggtgggcgaaggacacccgcaggaactcggcagaggagaaattcagacggctcccgagggtaggaaaagaccccggcccaccgtggaatctgaaacacccgaccactctgccatcccatgtttcaccagtcagacccccagggcagggcaggggaagcagaatgcaaactggggcaccgtttccctgaagcgtgttggccgcgtttgtcgtagtgctagaggtgcatacccttggaccccgaaaacccattcctgggaatttgctccaaggaagtaaagatgttacaaagatggacccacgaagtatggtcgttggttatgggtggggtcttgaggaaggccttgttagtagcctgaaccctgttgccaggagaagctccaaaccggtagacggagggagcagcgcggcctatgttggggtcttctctgggcgggggacatgatcctaggatgtagaactagcctcagaaaacttaagactcagtggccaggtgcggtggctcaggcctgtaatcccagcgctttgggcggaggtgggtggatcacctgaggtcaggagttcgagacccgtctggccaacatggtgaaaccccatctctactaaaaatacaaaaaattagctgggcgtggtggcaggcgcctgtagtcccagctactcggaaggctgaggcaggagaatggcgtgaacccgggaggcggagcttgtagtgagctgagatcccgccactgcactccagcctgggcgacagagcaagactgcgtctcaaaaaaaaaaagtttttttatgtttaattttttgggtacatagtgggtgtgtacatttatggggcacatgagatattttcataccggcatgcagtgcgtagtaatcacatggggtatatggagcatccatcacctcaagcatttatcctttgcgttacaaataatccaatactatactcttttagtcattttaaaatgtgcaattaaatcattattgactgtagacaccctgttgtgctatcaaacactaggtcttattctttctgtctttttatacccattaaccatccccatttgcccccctcctcccactgttctacccttcccagcctctggtaaccatctttctactgtctgtctccacaaattcaattgttttaatttttagctcccacaaataatagtgctgtgataaacatcgtagcacatgtatctcttcctttctttcttttttttttgagacaaagtctcgctctgtcacccaggctggagtgcagtggtgcgatctcggctcactgcaacttctgcccccagagttcaagtgattctcctgcctcagcctcctcagtagctgggactacaggcatgagccaccacacccggccaggtatctctttcatatactgatttcctttcttttgggtatatgcccagcagtgggattgctttatttatggcagctctattcttagtttttgtttgtttgtttgtttgtttgtttgtttgtttgagacggagtcttgctctgtctcccaggctggagtgcag

SEQ ID NO: 1562070 - DNA, 4001 bp, Homo sapiens
attcgcagttgttcttcctgggagtgccagacagacgtcctgggtctctggggacacccagttctgaagaggtatctaatgtgagatatgaggccctaccaggcccatttctccaaattcctgaaaatgccatccagatggcccctaccctgaaggttccagcacgcagagtgaatagctgagcagtgacgtgggaggctcctcaggtccctcagagtttcatttccttggtgcttcccagtctctcctaacctctgacctctcagagtaattgccaaattgccttctgtttgtacaaggtcccagcacttcccggcgtggttcccgaccctgtgagtgggtggtgctgtcttcaggccacagataagaaactaggattcagaggggctatgggacctgcgagtaggcggccagtacgtggtccggggtgtagaaccccggctgtgcaacttctgcagccccgcgcccgccgcagtgccggagccaggccccaccttcctcccgtgtccagcaccccccaacaaaagcatcccaactgaacagccaacacttgtggctccttcctacaagtgctgggtctccacagctttcctcgcaaatcgaagctaacaggagccccgatttgcagaccaggaaatggagaccccgaacgaaacaacttggtcggggtcaccctcgccagccggggcactctagagctaaaactcgcgacttatcattcggagaggggtccctgaagcactgcgggcgccccactggaagcgcagaccccggcctgcctcccctaatcagggcgcagcgggagagccggccgggccggggcgggcaccaggccgggtgccagcgcgcttggccggcccggaggtgtccgcttccgcccggggctggcaccgccggcccattcatcgtggccgcgggcggggcgggccgggccccgggcgccctcgtccccccgccgggagccctcgagccaggctccgcgcagcccagccggggaaacggtggccccggccccgccgccagggggagcagggagccgcctcccgcactccgggaagttgccaccgcggccgcccggcgtccgtgccatggacagacccggtccctgcgccgcgagccctgcggccccggcccgccccgtcgggggccgtcccagccccgcgaagcgccagcgggccgcggcccgggaccggcgcgctcggcccgtgggcccccattcaatcccgccctcctcccctcggccggcctccgccgccttccgcccgcaccccacccctccggcccggactccagcccggcaacgtcatccggcggcttcccgaaacttaaccccttcctccgccagctgtgcgccgccccgccccgccccgccgccaactttcttcgcccaacttcggagcgcgctggccggcccgacggccctgccgggagggagggaggcagggagcggtcgccacgtcgcgcccgtctgccgccgcagctccccggacggcgagggccgcggggtccacaccacggggcgcgccctgcctacgccccggtacggcgcttgcccggcacccccgccccgagtccgaccccgaccccgatggtgcacggccgcggcggcaggcggcgggcggcgggcgggccgggggaggggccgccgaggagacgtgtcactcgcggcgcagcgcggccggccccggccccccgacggcccggcccgcgcgcggccgctgcagggcccggccaagtttcttacctgcagccagagacgcgagagggaaagcgagagggcaggagccgccgccttcgcagccgccgcggagccgggagagaggagccggccaagcctccgccaagaaaccgcccccgagcagctgtagacgctgcgaccctgacgccgcccgccccgtctgccgtccgctccggccgctcgctggctgcgtgcgcgcgtgtggagtcgtggcactttctgcctcagagctggcgaacggccccctccgccgggatcgccgcctcctgccttccccacccgggccagccattcatcgagccgcctcttcccattggtccgcaccccgccactctgccggtcgctggccagtcaggacgcgggtggccgagccgcggcggcggccattgggcagagaggagggtctccacctcggccaatgggagaggggaggagctgcggggaggtgaagggggcagggctggggagaggcggggccgagcggcgcggcgctcggccgtgcgcggggcggggcggagcaggaacgccccgcccaccgaggggggggtctccggccagctccgcccactctgggcccgcggcgctcccagcagtctctgactaggatccggctctgcctaggcgggaagcagaaggttcgggtcccggcgaccccgggcctgcgcctctggataccgctgggctgacatggcggtggctgaacagggttgcgcaaccgcgaacagccaaggaagctgctttatttaaacccaactaacttcccccgaagcagcgccccctcgggccgccgggtatgaggacaagctctgctgggggtcagcccagggagagcaagttcttatcatcaaagagattgcaatcagcaccagaaggaatttccttcagtaaatggaggaattggggtggaagagccagaaggtgcacgaggaattgaagcggatgtcatcgccctcgttgttagggagggtacaactgaggcacggtctatttaagatactcaaccaaatcacagccggcagagcaataattacaatccactctgtggcgttttattccatgcgttggggaaggtgagaggttctaacctaagaaaactcatccgtgtcccacaaaacggagcaactggtacttcctcattccctgactttctccccaatatcagccaacactcagtcttcataattagtcaagtctttaaattaaaataattttaggcttgatttttaaccattatgtcagcgtctcttaaagccaaccctttgaacttgagccaaagccagcttctttggaattttggattctgagcgaccaaaggctgcctagactgccccccatcacttccctagctcctgttgctgcagaatcccgtgcctaacatctatttcttggacaattttcaatcttccctgtccccatttgtcactagtactgtactagctgttgttagaaagatgtgaaaaatacaagccttcatggggaataaagagcgattgggttgaaattaaactgttcattcctatttttaatcttggcggttccttagcccattaatgattaatcagcaggaattaacctggattaactctggaacactcagtcattttccagcagtgagacccggcttcaaatgaaagtcaagaatcccagcttctggctggcaattgctaccaatgagtcctacttgaccagggctgggccatctaacctttctgaacatgggtatactcctttaggacaatcactccttcctctgggtttcagggaggaaattcattcgttcattcattcattcattcattcaccggtgtttgtggagtgcccggtatacagtgctaagctgggcaagcagcctagaatgacacataggtccagtgaagacccagctgccctcaagggcctgtccagggacagggacctcctttatcctgttcactgtttatctttttccggaagcagatcctggcagtagggtttgttcaatcattcatttgggggataatcataagaaacattggtggagaagtgggatgagcaggagccaataaggggaccaacatcaagcctgtgactggtgtgggcacacagggctcggcgtctctggggatgctgtgaaactgtagaacacaccccagagacgtcccagctgaggggtgaggacctggttatttatccagccactcccagtcctcattggttaacagcttcttctggggggactttaacccccgcccccatcaagctggagaaagccttgcagcaagaa

SEQ ID NO: 1562071 - DNA, 4001 bp, Homo sapiens
tgggattcgagcctgctttgctactcacctgctgtgcgaccttggacaagtcagtttccttctctgaacctcagttccctcatccagaaaacaagcatctctcccctccctccactaagccactgtgagtagccaaagacacagtggacaggaaatgagaatgattaatacttacgagcacccattaggagcctgtgtccttagctactcatcttgcccacaatcctccttatgagcaggatacttaagtaaaagatgggttgatgaagggaaagggggtttgtttgattttttggtattgtttagaatggagaaagatctcagagatcttctaaaggaccctcagatgggtaaagtgaggattggacaggcaaagtgacttatccaaagtcactcagttggtaactggggaagctgggatttgaactcagttgacctggctccagagcccatgcccctaactactaaacaaaggccattcacaaaggagtgtccccatagagtcccaaactcaccccagctcagctgaaaaccacacgcctctctagtcccttgtcccactgtcacagcaagaactggagcctcttgggccacagtctccccaaccccatccaatcccacctcccaattctcccacagcctctgtctgcttcctgctccgttccaggagtgactgtgtcgctgtagggctttcacacaaatggaaggccccagagggcaacccatcctctctcattttccttcccctttatccttgctcagacccgatgccagggctggaaagagagaagacaccagctggacaattcagcagttatttaaaccagtctgagccttggaatcccaggctttattaaaactggacgacccctatgtcatgagcatatagttgggatttgatgagctaggacatgaaaaacccgtggcatagtggctggcattcggctgctgatcttaagagtggcacctggaggccaaagggctgcccagctcaggcaggcgatttgctcacttgctcacccgcttacccttctctgaggcacaggctctaccaactcctgctctgcagggacagcctccaacccaccttctgaggatgttctgactctcacagcgaggctgtggcataggactcccaggtgagagcgcatgcggcccctggtacatttataatctgaaccttggctcatcttcctagtggcctgagaggtgaagatggaaaagctgaggctctctgaggggctggacttcttctaggtcatcccctattagaataagtgaacctgaactcaggtctcaggtctggctgaactcaacataggggggccatggaggatcactgccctctgggaggtgacaccaggagtcagggtgagtgatgaggctgggactggggcctctggacgcccagcccaaggctctctatgtcacttcctggccgagcatggatgcttggaatggcttctacgccactgagtctgtctcctagtccctgtgccccgcaggctggctcttgagtcttctgtctctgcacgaagccatcctcctttctgctgaccatgcggctactacagagagccctgctaccctctcccttctgggtgagtctccttggcccaccctactcaatggctcgctcactgggtgccctggagcctcaatctccccatcttaagtgaggttgagactcgtctggaggagcgaaggacccagggcgccaggcaccaggcagatgcccccagagccgccgcccccggtcctccggcccccggtctgccccgcagcgcctgcccggccgccctgcccagccaccccttgtaccttgcttcttccttcggttcagggcgagcatgtccacggcgtgggcgacgagcaggagcaggcagagtggcgcccgcatctgggcagccggatccgggctggcgctccccaggcggcccgacggcccaagggccccacgtcccggcggcggcacggcgggcgcgggggctgctgtgggcgcgccgggcgcatccgccaggcgcgggtcggtccggccgccaggtctagtgagggcgttggcggagccggggcactgccctggcggggaggagccggcgcggcgggggcggcgcgttaaccagctcggggcccgggagcgcgcgcggggagggggcgggggtcacccgggtcggggccctcgagttcgatctgtcccgcagccggcggtcttgcgtctttcccgcccccagcactgcccccgagcacgtgcacgtgcccaccgccagccacaggtacgcacgcgcgcgcaggtacagatgcgcggacacccggagacccgtacggtcccccgcgccctctcagcgcctgtgattttctttccctccccccagtcccctttctctgtctgttcctccttctggcccttaaggacaactccttgtctcctgctttctcggtctttccgcggcccgcgctcccctgctctgcccccgaccctgcctggctgttcctgcatcctttactcttgccggccgtctctctctcaggctcactgtctgtgtcctcctggctgggcctctggttctcccttttctctgtctctcccttcaaccccatctctccccttctcccctcctgcagggtggggtgtttgcggggctcctgctgcctggctttctctttttctctctactctgtctcattcttttaacagaggcctgagccccttctggccactaaccctgaatgtttcctgtgcagtctgcggggatcatctactccgactcaaagtgaccagcacctcataaatccacttgtgacagggctggggacctggactgtgtttcctccaaccttatcaccaggactgggagcagctggttcaagtttaaccctttcagagcaaaattcctccttcaacccgacagcatgctcacctctcctgtcactataaccaccaaaaacaacaacaatcatgctagctatcatttgtgaggcatatatggtgggcattgctaagaacttgacatatactagagtcttcaaaacaacccaatggtttgggtttgtattctgagtaattccacttttctggggagcaaagggaagctcagagaggccaagtgacttgcccaaggccacacagcaggtcagtggccattctggtccagtgcctgcccctcttagccacttctcaggcacagactcatcagaatggaagaggccttggagggaggcctagagaaacttacagttgacactctcttgctgaacaattgtccttcctttttcttttcttttttttttcttttttttgagatgggttttcactctgtcacccaggctggagtgcaatggcgccatctcggctcactgcaacctctgcctcctgggttcaagtgattctcctgcctcagcctcccaagtagctgggattacaggcacctgccaccacacccagctaatttttgtagtttttagtagagacggggtttcaccatgttggccaggctggtcttgaactcctgacctcaagtgatccacctgcctcagcctcccaaagtgctgggactacagacgtgagccaccccacccagcctgtcctcttttttcctacatgtggagcttgctccaaaagaaatggaaggtaaatgctggtatctcctccagctccttctcccagtgcaatgagggacacttgaaggcatggcaggggcaggggaaacacacagagagtgtggcagctgaaggtacagccctggcctggccattctttctgtggggccccaagaacgctggcagacaacacggagaacttggtggaatgtcagagacagcccacccaaagtgctccatttcacagatgaggccactgagccttcaggactggggggtgcctagattaggccacccagtgagtcaaggactgagctgacatgggcatccaggtgtcccattgtggtcatcaccatggcctgcaaggacctcttgttctgatatctctgatctcagtctttccc

SEQ ID NO: 1562072 - DNA, 4001 bp, Homo sapiens
cgccggtcccctgggcccacttttctctctatactttgtctctgtgtcttattcattttctcagtctctcgtcccgcctgatgagaaatacccacaggtgtggaggggccggcccccttcaaaggacgatcgtttttacttgtcaatcctctctctgaccccacctggaacaccagccctttttatgacagacgctgcctctggcccggaggggcctggctggaatgggccgggagagggaagcacaccccgtcctggctgaagctccacccacccgcagtcctttcctcggggcctgtgctctacctgctgcagacattccaggaccttggtcatgtactcctgttggcatttgtagggctggaaagggaagtctacggtcacaccattcaggactatcttgggcatatcagcctgttctcagaagggcacagagcgtggctgaggggcaggctattcgggtctgtgcgaaaaaaccactccgaacatcttagggtctcgggcactcctggtaagcgatgcgagcatgtgcactgggacacaacgctgttctcttcgagaatccctatggcacagacctgggaaagacagtaagactctgtttgtagacagcctttgtgggtaccgggctactttcccaggcgtttccatcagtccctcctgcggagagggttggagagcaaccctggtatatcccatctcgaggagctggcggggcgaagatgcgaagtggctgggccttgccttatcctcccgccccacaactccgtccttctctggaaaagacgcccacagtgctgcaagttccgcctgcagtaattccgcgacttccacaagagcgtgagggctgaagaggcaagcggcacccctcccggcctcaccaggcgcaacgtcagagcggagggtctgaacctccggccctgcctctccagccctctgccctcctggctggctggagtccattccccatccgcccgggtgggcaaccagatgcagccaaagtagcgaaagagcatgccgggatgccaacccgtgcagccctcagcaaatcactcaacttctctaagcctcaatcccgcccgggaactgggactaacagaacagacgcggacacactgaatgtcggcccttccctccagccccggtcaagggctcagccaacgccgcggcgccagcgccacgagcgcaggaaactacaggtcccaaaatgcagcgcggccaatccgccgacccgcggccccgagggcggcttggggcctgccgggagctgtagtttcgaaaaaccgcaacgcgcctacgagccgctcgggtaaaagaaccacttgtagggtcactgcgactcactgctcacttgtctccgcggcgaaccttccagaaccggggtccctcaggaactcaaccgactccagtcgagggccgccacccgtccccagctgtcagccagctcagagttttcgcgggcagaggcgcgcagtcggcgctgagcccactgcacttccgccccccacttccggtccgttgctttgtgctcccggcggaaactgttcccccgcggagggggtccgcctgctcttcggctcctccaggcctacacggcgttttgcgcgttctgtgtccggctccgctggccagtgaacctcacttccatcgcccacaggcagaaatctggggtcccgcccgtctcctcccttgatgtcattcccccaccagggtctgcgttccactaccgcctctctaggccgagccaccaccattgcccggagagctgcacgggcctcctccccagaggcatctttttactgctcgagtgtgagccgaccgctttcctgaaaatttgaaaacggctgcgccttgcccaggacccggctcctgagagccctgaccgccccctctccttcctctcctgcgttccagcttctgctcggctcactgtcccgcagtggtcccggcgggcctccctgagtccccagcacccggcactggctggcagcagggctgactccaagagcgaggcccgcaccgttctgtggggtcagcccagcgtcacggatgtttgtctcaggcggccccagctcccatgccccagaaggccccagaaggccccaggagggagttggcgctgcgtgaccgcgcacggccggcaggcagcacttcttcgtggcttcttcatggctgtgtttaatgtccactgacggcacatgcgaatgccatgcgtgcccacgctcctgggtgtgagatagtgctcggagaagccccagcactcactggcacccagccccatgtgcctgttgtggtgaaggaactgcaggctgcctatctgagactcggcagggagttgaagatgaggagaccagccacacacactcgttgaatgaatgggcaccaagcacaagtttcagtgccccccatacatgctgatatggttcggctctgtgtctccacccaagtctcacctcgaattgtaatccccacgtgtggagggagggacctggagggaggtggttggatcatgcggtcagtttcctccaggctgttctgacagtgagtgctcaggagacccgatggtttaaaagtggcagtttccccttctctctctctttctcctgccgccatgtacgacctgggaactgggactaacatagacttcaccttctgccatgattcttttttctttgagacagagttttggctttttgcccaggctggagtgcagtggcacaatcttggctcactgcaacctccacctcctgggttcaagtgattctcctgcctcagcctctcaagtagctgggattacaggtgtgcaccactaagcccggctaattttttatatttttagtagagatggagtttgaccgtgttggccaggcaggtcttgaactcctgacctcaggtgatccacccgcctcggcctcccaaagtgctgggattacaggcgtgagccaccgcgcccagccagataagtcctctcattgtccacactttctgggtgagaaagtgaggcacagagcgttgagcagattgcccagagcctgctcaggagccaggagtttaccttttgcagccacacatctcatctcctgagagcagtggccagaaaaggctgtcctgtggactgagctgaagtctgagtcatctgctccttgccagctgctataggagcgtgctggcctggggtggtcaggaactcctgtacccctgccctcttcctctaattgctgacgtacccacagctccagcatacagcaggtgcttgacagatgtctgttgaatgactgagtgtcctgctgagatatagggctccttctaggagccagagttaatttctttctttcttttttttttttgagacagagtcttgctctgtcgcccaggctggaatagagtggtgcgatctcggctccctgcaacctccacctcctgggttcaagcgattctcctgcctcagcctcctgagtagctgggattacaggtgcatgccaccacgcccggctaatttttgtatttttagtagagatggggtttcatcatgttggtcaggctggtcttgaactcctgacctcgtgatctgcccacctcagcctcccaaagtgttaagattacaggtgtgggccaccacgcccagccaagccagagttaatttcaagaatgcagaggtctgataaaagtcacactttatgaaaaacatttttttttttgaggtggagtcttgatattgttgcccaggctggagtgcagtggtgggatctcggctcactgcaacctctgcctcctggattcaagtgattctcctgcttcagcctccaaagtagctgagattacaggcacctgccaccacacctggctaatttttgtatttttagggtagatggggtttcaccatgttggccaggctggtctcaaactcctgacctcaggtgatctgcccacctcggccccccaaagtgttgggattacagttgtgagccactgcacccagtcaaaacatttttttaactagc

SEQ ID NO: 1562073 - DNA, 4001 bp, Homo sapiens
agatgatcccgtcacccaggaaattacaaggaatttaggtgctctgcgttaggaaccagggcagatttcacaatattgatccgaaatgtaagctccaccagggctagactctgccttgttcactgctatatccctggggcctacaacaatgtatatatggtaaccacttattaagcatttgttgtgtgaatagttataataaaaatccatcctgcctaggcattctggcttttttgaatcgctcttccttcttttctaccctcttccgacacctgtttcttgtcaagcctttcattaagctactccttttcagccctgggcacaagaaaacaaaactgagctaaacacttttttggtgaaagccaaaaaaccactcatgaatgctaattatccagcattcgcctgtttacatgtacgtatgatcagagggtacacttcatcctcttgggtattcattcattcccatattcacacatacttattaggtgtctattatgtggctgacacatggtaggggttacagaggtaagacacacaaggttcctgtctacgtgggaaagagacaataaacaacacagtggtaggcactgttaagaagagaagagagaatattggaagtgaggcacatttcagttacagtggacagatgacatttgagtaaaaaactgaatgaagtaaagaaactcatcatgtgacaatctcagtgaagagtatttcagattgatgaactcacactccaggttgaagaacaagaggcctgtttagctagaacagtatgaaagaggtggagaggggcagaagatgaggtcagaaacataggcaaggtctgctcaagggtctgacgagattttattcttaatgtgatgggaagccactggaatgcttcaaatacaatagtgacttaaggggtttaccttttaaacaagctctccagctcctgaatcagaatacatgaagtctccacgtgtgctttacaaatatttttgtaaagaagtctctactaggtgctttacaaatattttatcattaaaaagtaattacttgtgctaactttgaaatcccaaataagtggatgggaatcctggcttcactacctaccagctgtgtgatcttagtcaccttaatatccctggactcaatgtccccgtcagtagcaaagaaattattataatttcctcgattacttgtgagatcagggattattcactcatttgtttattcgaaatatttagtgtgccaggaaccatgctagttgcagagaaaaaaagggtacagcctctgctatcaggaacttaccgtctagcggggaagacttgatacaaatcaaccacgtacagccgtgtgcaggctaagacagtttataaaaggatgtggtaagggaacagtttgggaaggcttctctgagcaaatgaagttagtgtatacaaaactcagtatacactaggtatttgtattattgctactagtcgcaggtagggttcaaatcctggctctgccatttactagctttgcaaatttctccttttgagcctcaacttccatgtctgaaaatgaggacaacagtatgtagctatagggctattgtgataattacatgagataccccctgttaagattactgtccagtgaatggcaatagtcagcacccattgaatgtccactcttaatactgttgttaattttgagtcctctgaatggaataaaagaccgcagccaggtctggaactccgctggctcccccttcttacttcctctcgttttctggggtcgtcaaattcccaccacccccggtcgccaagagccggcccacatcactgaccttctcaaccttcttcggccccttcaccagttcatgcctcttggggattgttcccccgtcgcaacccatcgcaggacgggagtcagagccagcagcaaacccccaaagctgtcacttccgggatttccggcgaaatccgcagccacttccggcgcaccgccgtgacgcagcacgctggtcgtggcgtagcggggcggggcggggcggcacgctaggcgcggcgtagcggggcagggcgaggccgttaccaagtgccggttgtcatggagagcgtcgcttggaggctgggcgtgggcgggtttcctcgttcccgtgagaccctgggtttctgctgcacaatcggaatcactcgcccacgctccgggagggcagcgagggcgtgggcggcccgtgcgcatccaccgctctttgaccctatcccacgccagcttgtgtggctgcggagcgggcacatccctggactgagagcgccttgaggaaaagggccgccctcctgtttctgcgattaaggatgcctatgaacggaatctgctgtatcaatggacatttttgtgtttaaaaggagaacgcatctttcttgagcgccaactgtgactcaagcactcacaacaaatcttgtgaagtgatgttacaacagattctaggaagtaagaccctcccttaaggcctggaactttctggtgttgccatgcatattgtagatggcatgtgtgtgaaattttgcatacagtttgtgcgtgtgtgtatttcattcacagtttcctgaagcccaggctaaaaaaattttattaacaatcaagtatcattaatagacgatataatagttcttataaaatatacactgatgttgccatgcccgttccaagagtcaggctgtattttatctataagaacacaaatcccttgctaaaaattcatgattgtctgtctgctcttaggcgattgtctatctctctgtttgttcctttaattattataaatattatgggaaagtgcctataatcccagcactttgggaggccgagacgggaggagcacctgagcccaggagttccaggtcagcctggacaacatggtgagacaccatcttgaaagaaaaagaaaaattagccaggcgttgtggtaagcttttgtagtcctagcggctccggaggctgagggggtaggaaggattgcctgagcccaggaattcaaggttgcagtgagcttatgattatgccactgcactccagcctaggcaacagagcaagactctgtcattaatatgtatgtatgtatgtatgtatgtatttgtacatatatatgatgggaaaatttctccattgccaagaaggcagatctttatgattggatattaccctattgacctacgtgaaacataaaaacgctgaaaatattttttacttgggaagagttgcccagaaaatacgtggatgtggaaacttcaagggctatatgtaagcttggggtacttgttactgtgattaatgagaattttaaaaaataatccctttaattagttggtctctgattgatttatgatttatttctatgctaaccacaataactgtaagctctatgagggtagggacttcattttgttttgttttgttttagacagagtctcgatctgttgcccagactggagtgcagtgatgtgatctcggctcactgcaacctcaacctcccaggatcaaagcgattctcctgcttcagcctccccagtcgctgagattacaggcgcccgccaccatgctgggctaatttttgtatttttagtagagacggggcttcaccgtgatggccaggctggtctcaaactcctgatctcaggtgatccacctgcctcggcctcccaaagtgctgggattacagccgtgagccaccaagcccggccaggacttttattccacattgtatcatcagtgcctagaagagtctttggcacactcaatatatgagtacatttcctcagtaaaccaaaagaaagtacagattcattgagaaaggggtgaaaagcctagttttggcagatactaaaactggttagtactattagaattccatttactggtgaggaaacagaagcgtggaaagatcaaatgactccttcaaggtcacataggcagtgagagacccgggaatgagtgctaggattagttctttctcacagcaaaggaaa

SEQ ID NO: 1562074 - DNA, 4001 bp, Homo sapiens
aacaagcttccctcccgaaaggtgccaaacaccaccaaaagccccacgtgtgtgcgcccacccaaaatgaagggggaaggggaggtcagcgtaggaccaggggaggggtcagaaccaggagctcgcccctcctctccggaggaagcaggcgggctgagggttaacccttttgttccaggtgggccaggccacgaagccttcacgctcccctcaacccccaccccaccccgcccccaaccaaggcacaaagagagtccctccaggcgcctgggacctcgggtgcgcgctgcgctgaccacccggcgccccgaaaacgcccagccatcccctccgtcaagccgatccttttaatttgccctggaaaaatgttaaacggggaattctattgacgtattataaacttgggaaatgtattacattcagtctccgacaaaaaggcggggatacggaagccaaaaagtggcgaccgtcttctcgggaaaccccgggtatcagagatggtctctgagagtcctccggggttgccgcgcacacccgtctgctgcagggaaattagaaagcaggcggggagcggagcgacgaacaaggccggagaggaggctacaaatcccccctccccccacgcgcacgctaaaaacttatcaggcgacaatttggcgggccgggatggagacgagatagtggaaaaccgcctcgctcctaaaacctccgcggtgaagtgatgaagtgggaacagagttggccccgccgttcctggcgcggctggggtcccgaactcccctcgatctgggaaacgctggccgcggaagcgtgggccaggtcagccgcgggagttcgctctggccccccacctctcccctttcacacccaagcgcaaatgtggaaagccgagcgctccagaaaagccacgcaaaacgggaggccggtgcaccccagtggggctgccgcgcgcccgccaccccggccactgggggctcgcaccctcgggcttgccgcggttatttttaggaagtcggaaatcaaagatggctggaggtcaggccccgaaaggttagggcgaagatcggcaggcggcgcagcccgggcagaaaaggcgaaatccagaaaagaaaaaaattttaaagggaaacattgagccctcctcccccacctctctgggccctccaatcccctgcgcagcgcgggtggcccgcaccccagctcctgagggtggggagaggtcgcgccccctccccccacttggcccgggaggggcgcgtgcaacagatcgtcctcctccggggggtcttccaggggtgcgcccctcctccagcctccaagaaaagccccaaggggctggtggagagggtggggatcccccggggttctttcttttgagagcgacgcgagggagggggacctaagttacaaggggggggggtaacaccagtgaggggagtggaaccaattaagtgaggggcagaggacaaggagaagggaacctttcgggagcgagaacagaggagcgagtgggggtcaattttacaattaggggagaaagctgggggtgaaacttacacaagaggggagaagaggaaaaaagtgtgaaatgtgcaaaaggcggggtggtggggagaggaggagacctctcctcccgggcactgagcccccaaatctcggctcctgaatttgcgctggacgccgcccgctccccgaagcctgcgccctcgaggatcccgcgtacgtccgggaagctcccctccccgggcgggcgccccagccccactcacccagctcccccgccgcgggcgccgctggggccgcatctgcaaactccggggtctgctgctgcggctgctgctcgccctggtcctcctccgagttgatgtgctggggtttcgcctgcttgcgcctcgacatggtgcgagcatcggggcgccgggagagccgcagttatttgccctctccgccacaaattcctggagttgggaaatttaccccccttcggccggaacgcgcatgtcccagtaattattattatcaataatgcattgcgatttatcatgagccctgacagctgattggcctgggtccaagacctcagagatcatttaaataagccctcattgatcagggaggggtgaggcattctgggctttgtagtccgggcctacttgtgacaaaggcgtgttcatcaggggagcgcagctaattagcatccgggctcagattggctggggcggggacgaaatcagagggggacccatccttgctccagctatctcagtccttggagaggaaaagaaaatggggagaaatgcgtactcattaaaaagtaggagcttacgtagaagttttggaacggctttatttggtagttacttgctccaaagattacttggtaaggttgatgtccaccagccgagaagggagatctcttcacagtggaatattttggctcagttttcacatctacacgcacacacattcccccaaacctgagatgtgacccgtgtcccctcccatctttttgattaaaaatgtttaagttgagtctcgagataactgaagaatgatgaatggtggtgttttcagccctcccacccatctcaactcttaaagtgagctcggaacttccaaaatttcagataccccaccaccaccatgacttacctcctttaaaagctgattaatagcctccaggattcctgttcacaaagactggtttgtggttacaatgcaaaccttgatttttttttaacttcaaaatgactggctactaaatatagaaatggcaaatgataagcaagcatagtcagagataatatcaaaacagcaagcaattgcatttttttccccaggagccataaatgcctgataacatcatattttattactgagacaatgctcttgcatctcccatggaatggcaatggggcactgtcacagtatctggttgttactaatcactattggaatttttttgtgcaatacacacattattacagaaaaggtgtatcgttcaaagtgattgtatcattgacacatgatgcctggaattttttaaagtggggcttgtgtgtgtgtatatgatatattacatgtatacacatttataccgtaaattcatgtatacttaatttggctaactgctttacacaatgtacatgctcaataaatgttaaatgaatgatgaaatcatcaacctgctaagtctttgattggtctttccataactgctctgggcatgcgtctttgtttggcatttacttcattgtaagggactgtgcagatataaaccctccctccacatttgtgcattgcattctcttgattagttattcatcacgttcccagcttgtaaactcatcaggaatacaagcaaaatggaatgctgggctcatcaatgtgttcacctgggtatttggacaacccaaggcagaaaataaatcagcttgatcatcttttttatattcgtggccatcagtaaaaacttgttgaaggaagattaaccttcaatttttgagtctctgaaaaagtcttgccttattttatgtataatatttaaagcaagtaagacagaattatagccaacagccagattgaaaaggtaagaatttggtttaataatacatagaagcagtttagaattctgatactgagtaaaaaggccaattagcacctgccttgctgactaatctactaatattctcaacaccttttctgtgtaagatagtgtggcaggagatctaacttacaaatctaaacgaatgtgcagtgggtttatggctcaaaaaatactattgggttaaggaaaatttcatttatatagttgtttatatttattttagtagatgatagttgtaacatgttagccttactacgagacaaaattgtgccgcttgactctccaagtgatagtaataataataattgattgagccccttgtacatgccacagactgcattaaatgaatgcacaccgccttgttttatcttcccatggaggttggccctattgt

SEQ ID NO: 1562075 - DNA, 4001 bp, Homo sapiens
cacccaggggagcaggatggattcttagatcagaggatgtgccctctagggaagggaacctgagacatatgacaagaggagctatcctgggacagccctgacctcacccttgccttgggctggcccacaagtcttgcacacaccacaccagaccaggaagtgcacacacggcctgctttgaggaaaggcagatcccgagtccggggaggtcgtctgtgctggggaaaccgggctgaggatgctgcttgcccatcgccactgaaggcacccagttcacacagccctatctggtgttggggcccgactcactgactatgactcattgacagcctgaactgtgggccaactgacaagcagggctcactccgcaaacacgcgctgggctctccagctgtgccgccccccacagggcctgcagcccgggacaacaccggccatgtgaatggtgggtacccattggatatgggcgggtcagcacaggtatgtggggtgcagccattgcttggggacccacggtgatgctctgtgctccctcttcccacagtaactgcattaaagtgtttcatctgagctttgtcatcatctctgggggcactgctgacctgagtctggggaggcaggcgtcttgatccaggtctggttacagaggggcaccccacattcattgtcaatgaatgaatgaatgaaggctctgtatggtatctgcaagtgaacagagcctgtggggagacagaaggtgggcacaggcctgcccctgtctttacagcaccctagcacccaggccttcagcagggcaggtgaggttcccacgctagggccctcatcccatccaccctagagtgagagaccctcccggcctcagactcagccacccactccacacccagggcaggggttggggatgtgtctaggaggtctaagtatcggtgaaaaccacatcctacttccccgtcctcccacgcctgtaagacttaggagacataacaccttccgcccccattcttgcaactttcaggaaccggacccctgggtgactccaaatttgaggtctggggtcagcagagggtgtgctcagtgggccaccgccccgaggtggcccctagtgctgtgggaaaaggcttattctaagcccgcgccttccagcggacaggcgccgtggtcgccgggctttgcagggcctcgagcggcggggctggtgcagaagcgcgcggcagtccggggaaacccgtcggactcctcagcccgcacggcacctgccccggccaagcaggctccgcccatttcctgcctgcactcccggagggagttccgtccgtcccgcggtctgtcggtccggtccctcccgccccaacgtcaggattccagaaggaaatggggcgggggcaccgaggcgggatgtgacctcggccccctttcggccccactgcaaaagcgggggagggttttccccgtgcgcaggaaaaggtgacccgagcgtagtgccagcctggacacaggcgccccggcttgacaccccctcaccccaagccaagggcgcgctgacccccaaggcctgaggctggctgccccctaaagcaggacaaaggctacgggaccccgttgagccgagacatccgccgaatacccccagccaccgccgctcgaagcccgccgggtcccgccccgcccccgtgcctctgggtccctgagacccccgcccgagaaatccccgctccccaatccagccccgctcaccgtccacatcccggcgctccccgaagcccgcgcgcacggccccggcgcggccacgcggggggctcagcttggacctcagctcggtgaacatggggcccgcgggtgccaggcccgcgcacacgcccctcgccgagtgcagggcggccggtgtggccggcggggaacgcgcgccgccgccccgccccgccccagccggccccgcgcccgagccggtccccgcggcccgcgagtgtgcgcgacgaggcacctgccgccgagccctgtgtgccgggcgcgctccgggagctccgaggtgtgtcggcggcgcgcgggcctgcgtgcaccaaggctgtccgccagggcgaggggcgtccgtgcgcccctgggcacggctccgcggaggagagtccccgtgaacctgccgggcgtcctctgaggtcgggcccctctgtgcgtgggggtgggctgaggggcatctcacaggggtcttctacctaccggggccaggacaaggggcaggtcaacgcctcccacacactttcctcggtctcctacgtctttactcgccttcaaataggcacccgcttccccggagaaaccagcttgactcttgcttaccgcccaccccactgtgaacatcagggtggttctcccttccctctgcagccccagaacctggctcagtgcccgggggagagggggcggtacagtgctctgtaactgaaaggggcttggcttgcctggagatggggcagaggggaactccaaggaggctgtagcaggccggagcggtgtgtttgctccaggactccagtgagaagtgctgagatggggctgggctagggaactgtggttgcctggtgcagcagcaggccaggcttgcaaccagctattcggcttgctctgcccaggagcctgggtgctctccctgggtgtatgtaggggctctggaggatgtcttacagcaggaggaccagagatgcacacagacatgtagaaatgcatgcacagagtacagtcatgcacttgcacccaaaacacgagcacacgtgacctctgtgcacacaccccactaatcacacacacagaattcacccacatgcttgacagccatgttcatgtactgacgtgttcccgacagctcagctgcggttatttatttcgtcaattagctctccaggagctaaggatgtggccctcaccagaatgtccaaggcatgttggcgggcgtgggtggggtctctagtcccactggagggacagatgcctgaatgggggttcaagaatatgagtgctaaaagcgtagggcagcagtgtgcgcacaggacgcacacagacaggtgtgcccataaccagtacacacaagctctacacaactggacagggtacagctctgctcggacagggcgcaccaggggcgagggcgggcagctgggctggttcagagggagggggccatgggttcagagggaggggaccatgggtcccactctcacagacaggtctccggactgcatcagagcactcgggaagcagcaatgccccaggctgtttttagcccccaggggccagttagggtcccagtgcaagctcgacctagcttcttccgcctctccacgaggaggcgctcccgcgcacgcgcctaccacgttcctgccccctagccgcggccggaagtcgtcgaaccaggacgtcgggacttccgcccagggaatcaaaagtgggcggggcgtgtgcggactgagcgctctgcttccggggcgcgggtgacgcgacgacggcgacactttgctacggagtgcatcggacgtcgaagcctagagtctctgcgtctttccctcttccgctgcctcattcctttccttcctagccttggtcgtcgccgccaccatgaacaagaagaagaaaccgttcctagggatgcccgcgcccctcggctacgtgccggggctgggccgggggtgaggcctggggcggcgcgcgaggggcggggacccggctacaggagcgcagtgctttggggcgtgtttgggggcgggggtctatggccgcgcagtctgaaagacgcttggtggatcggcttaatccctgcaggaagcaacgggctttggggtcaggacatacctgtgtgtgcaccctgcttgccgcctagatgtgacacattgactctcagcccagtgttttggtctgtaagatgggtaatgctgtatacggtctgcagtgaggagtagaggaatctgacgtgtagtggaaacacgcgaccaccttcctcaggtcgggctgacact

SEQ ID NO: 1562076 - DNA, 4001 bp, Homo sapiens
tctttggataggaacctggacgagcaagggaaaatgagcagtgtagcccaacaggacagcatcctactgtggtcagccggttctcaaaagaaactgaccagagggaggcatattccactgctttagtgcctgcctggtcagatctgggggtaagcaagagttgaggggcccataagggaagagagaagtccgaataaagtttggtcaagacaaagcagaagctaagacatgagcaattgggaacagttggtcagtttttaccaaatgaaagcacatagtgtctttgatagcaataggttgtaggtttaaggaacacacatcattctggagggtaacgagttaatctacaaaccactgaaacagagagccaaccacattttgagacagaaaatatggaactacttcactccacttgttgctagtcaaagaaaataaagtaataatccatcccagcagtggagggaaacgaaagggcaaaagggggaagaaaaaaaaaaaaggagaaatgcaatttcccatacccattcaagctatctttgggtcctgaaccactaatgttcctcctaccccagtttccaacctagccaaacagggccccacctaacaaatgcaaaaatttactaaatttgcaaatcccaaccaccaaagaatcaccttcctattggacacctagaggatataaggcaggagtcaaatctcacacccaccacaaaaagttgagtagaattcacaaggatggatgcttggatacgaatcagtaaaatatgattaaaactcaacctaaacacttctccaggggatgtggccaaactgtggcatgctggggattcagtggtcaactgaacaaccccaaggttcagattttggaggggaacctgcttttaaagagcaaaacatgttccttaccatgttctgcaagtgcagtcaacacacgcctatcgggcgctgctgggatgccaaggaaggtgatgggaattcagagattaaccaagccagttccttccccttcaggaaaagcctcaattcagggaggaaaccgaaacctaaaagccccagaacatcctctgatgtggcaagtgttcaaggagctgcggttagcgcggaggggtcccgcgagcctggatgacagcaagccgcccaccaaggtctggggaaaaatctccttctaactaaaaaaaagggacccgagtctcgcttgtcccgcgccggggtggcaagttagtgaagaaacccacgagagtgagatcccaatctacgactgcccctcccaggtcctcaatcccgggagcctgctcccatcctacgaatcgcctatcccaggcgaccccatgtcttcttcctccgcctcggggagtcagtcccgggagccccatgccgcaggccctcctgggaacccccgccgcagggctccctcccccgcctcgggtcttcctttcctcggcgcccccagcgcaggtccgccctcccgggtgcctcccgccgcagggctcgctcctcggcctcggtcctctcgtggggccccctccctcagggcgcctggcccgcgccccaggtcgccgcccttcgcccctcagcccctccggagccgctacctcggatgttcttcagcagcaccggctcttcaaagccaccgcgcctgaggaaggagcacacctgctccggaccccatgtcttgtagtcgggatggagttccaggcccggggaccagtctgcctctgcggaaggggtgtttgagggggttctcgggctgtcatcgcaacggggacgcttggagggctgctcggaatcggctcgctgcatggctacacctggcgtccggcacagcagtcaagaacctcggcgccggacccgcgcgcaggcgcactgacagcagggccctggcggggagtccaaggagtattggcagcctattggcctcctgcgcaggctcactgacagttgagcccttcgggcagggcagcctagcggctcttgccttgggctccctgcgcaggcgcaatggcagtccagtcgtcctcaaatcaatcccgccagggcgctggacgtgaacgcgaaagggcgtggctagaagcagaactgagggcagtgctggtggaaagggggaggaaagagcgcgcccggcaccgcacccccaattaggggctcgtctagtgaattgggggtattctccttcgaatgagtacactacccgccgcaccttggccgggtttcagatgccccaaacttaaaagaagcctaaaaggccgtcaggctgccagcaccttcccagtgaagaggaaaacagtcaaggtgctgaactggaagaacccggaatgatttcaaatgtgacttgagggtgtcttcattccacagtattgctggtcaactagagggccctgggatacctgttgtctggtgtccacacaggaggggacttcagacttctttccaactagagacagagccctccatcccaactgcattcccagaggaaggaaagtggccagtctgattacttaaaatttaacttctgaggacttttactgcctggttgtaacagcatgtgaaaatggcaggcattttcccatcacttaacccctctgcggcagggctcaaacttccctataaatactggtccatgcaattgcctggtaaaaggacatatcactattactgttaataaagccaacacaccttcccagcaaccaaggcatagacctgtttagggggtcaaggacgaatgaggcggaatagcttatcatcaagcagtatgaactagtggtctactggtgagccaaaatattatttgcaaacagagctttactgtgtgccaggcacggttctaagggctttacaaatataaaataattttatatttatacataatactaaatgaattaagtacattcattaaattatttaaatattaaataatttttataacttctaagggttttacaaatattgtaaagttctaagggctctacacatattacttcacttaattatcacaattaccttaggatgtaggaaaaagtaatttgccgcaggtcttcttttttttttttgagacggagtcttgctctgtttcccaagctggagtgcagtggcgtgatctcagctcactgcaacctctgcctcccaggttcaagtgattctcatgcctcagactcccaagtagctgggactacaggcgcctgccaccacacctggctaatttttgtatttttagtagagacaggatttcaccatgttggccaggctggtcttgaactcctgacctcaggtgattcccacacctcagcctcccaaagtgctgggattacacagccgtacccagctgcccaaggtcttacagctaggaaatgatgaagcctgtattcaaacccaagagatgtaacttggttccaaagtccatggtcttgataacttgccaaccactgcttgttaaagggggtttggggctgggtgcagtggctcatgcctgtaatcccagcactttgggaggccagagcactcacttgaggccaggagttcaaggccaacctggccaacatggtgaaaccccatctctactaaaatacaaaaattagccaggcctggtggtgcatgcctgtaatcccagctactcaggaggcgggggcacgagaatcactcaaatgtgggaggtgtaggttgcagtgagccaagatcttcccgttgcactccagcctgggcaacagagcaagactctgtttcaaaaataataataataaaaaataaataaataagtaaagggggttttgatataaaactattttctattatttaacccacaattttcaatggctcccttttcctgcagacccatggaggaaagtataaaggtgttcctgccaggcgcagtggctcacgtctgtaatcccagcactttgggaggccgaggcgggtggatcacctgaggtcaggagttcgagaccagcctggccaacatggcaaaaccctgtctctactaaaattacaaaaattagctgggtggccag

SEQ ID NO: 1562077 - DNA, 4001 bp, Homo sapiens
agttaagtgagcatttaatagagccagctattttgcgtgtaagaaacccaagtgggtccttgggagcccaggtgaaaaacttcccatgtgtggtagagggataacctaggttcagtcaacatctaaagatcccactatagccaacgaaggccttattgttacggactcccaacttcgtttcgccaccagccagaaaggcggtaggaaacaggcttggtaaaataaacccaataagaacgaatgaaagagacacaccagaccacaggcgctgccaaaactcatttttcattaacacggggtggggtcccaggctcaggcccccgggcccgatcatggccccagtccgcacagagcgcccggccctggccgcccgcagctccaccgctcagccagtgatgcgcacatccgtgcggcggcggatccgccgggcccgagccgcctcgggcaggatggcgagcagctgctcttgcaccagcatctccacgatctgctccttggtgcggatgtcaggccgcagccactggcgggacagctcccgcagctgccggaaagcctcccggggacccgccgcatcctggtagcggaactgccggaaacgctggcggaacgtctcgggaccgagtctagagccggcggggcctggtgtggagcgcgcttcagcttcggcctgaggcgctacgctcacgggtgcgggcccgagaggcagctccagggccgcggaggccgcagctcggggcgtagggatggcttcagggaccgcggcgttgggactggaaggctcaggggcaggcggtgaggcctctggcagcgaggagcccacacagttacgctcaggggctgagctcgaaccggctccttccagtttctccggtggcaccgccgcgggactcccagtggccgccaagatcggctccgtagccgccataactccagctccgggcgtcactctttgtccggtagctgtgtgctcagcactgcgtctgcgcgggggtggggtgagcagggagacgtttccggttaaagggcagagctcgcgtcacccttgagggagtcggactcgggaccggccgagagtgtgcggagcttacctgcaccagcgaagcgcctgcggcagccggaagcgaaagtctctggcttctctgcgtccaggtcggcgcgcgagcacccggaagccgcttgcgggctcccggaagcggcgccctctagcgttctcgagtcgcatgaggcggctgctgccctcgcggtgcgggagggcgagctgcgcgtggcctgggctccttccgaatggtggcgcctctgagcgccagttcgaggaggagtcggaggaggagcctgaatgtttggagatagacttcaagtcccggaccttatccgtgcgccgcttcggtttgcaggtgacctttgcgtgcgggcgccccttctgattgaccctgatgagctgtagctctgatggcccctccttcgggaatgattagggtgacggctggccggggctcgttcgagtggcgcccggccggtggtgacccgaacaggagagcgggacggcgaccattctctcgggaggggcccatctggagaaagtcctctcgcttggtcaaactaggagggcgatagcaccggccttactgcgacgatgacaaagtacaacacaccgtctggcgcgaaggagatgctcgagaaccctttgctgttgttatttttcgcgtgtcctccgaaaccaagggaaatgcggctctgtgggttctgttaacgtcagcatttaataagtgaactctaaatgcattgccccttatggtggccgctggcctcctgagttgactcagctcttgcaacgtagctagttgataaccctcgaaatatagcgaattgagatgtgctatattgtaaaatacgggacttagtacgaaaaaactgatgtaaaaattatctcaatactttttaatactgattacatgttggaatataatgttttgcatatattgggtcaaataaaaatgttattaatttcacctgtgtttttactttttaaatgcagcttctaaaaacatttaaattgcatgtgcagtttacattatatttctgttgagcagccttgggttagagtgttggagtgaggctaccttggtggaatcccctttgacgatacccagctcagagttgttaggaggattaaataaattaagccgttggagagaaagggcttttaagaagtttgctcttgtttttattaggtaaactgcttgctatctctgagctactgttttcttatcagtaaaatgtggatgtaatagaacttacctctcagaggtaattgagaattcagtgagatgatgtaggtaaaagcacgtggccctgacagccctcggccaggtggttttctgtttggtagctgactcacaaatagttttgtttttgtttttgtttttgttttgagactgagtcctccgcctaccgggttcaagcgattctcctccctccgcctcccgagtagctgggattacaggcgcccaccaccacacccggctaatattttatatttttggtacagatggagtttcaccgtgttggccagactggtctcgaactcttgacctcaggtgatccactctcctcagcctcccaaagtgctggcattacaggcgtgagccaccgtgccgggccacaaataggttttatatcctcattttacagaaggggaaactgaggccctcaaaggacaggggcctcatatgaaaggttttctatgaccttgcagtccttttgagcccgtgcaggatggaggagcaggtttaacaaccattaacatgccattagccctgatataaaacttacccctaccataggatgtttcctttggatgggtagaagtggaccctcatgaaatcatttccatagcctgaaaaccttgaaagtcgttgcagtgggcctttaatgttttttagttgctgacatgtaaaaattgggagatttcacatgcaaatctggatttctaatttttcttgaaaaaacggaagagctggccacactggacccaaattcctgctggtcaacaatcagctgacactgagtagagacgacttcctttagacaagatactctgtcccatttggtctcaatctcaaccattccctatggttctctgaaatagaatgttgtttgcatttactgttgctctcaggttgttgctttatttagagttgatatttttctctcttttctttttagaggtgagaaagcagggtcttagtgtttgttatgcctactggcttcaaaccttgacttctgtctggcccctcagtagttgggtttgctgcccagagtgaccaacagtgctattccctgtgtggtaacaggtactcagtttctaggcctaagggagcacactaacccttctgtggaggcaagaggtgatagaagtcttcactggggaggagacttcaagctgagactcaagaacaaaatgggtggggctcagggacattccaggtagaaggtactgcctgtacaaaggcacatagtgagtaggagcaaaactgtggaaactgcaggctatatgggaaagtggttgggatctggagaaggggtgagagatgaggttggaacactggtgggggttaaatcataaatgtcctagaattccatgtttaaaatttagttattatcttcttgtgaaagggaatgaacttttgtggcacctggaatcatgagatgttatgttagatctctagtctatttcttccatccctattgaaatcgtgaattattagagataggaggagggacctgagagatctattagaatcattgaatgtcagactggaagggcccttagaaatggaatttaaaaatccagccctttgtgggccggtaagcctgctttaaagtgattcagcagtaaaaaaataatgtggagggaataaatgaaacaagattggctcagtagttggccgggcgcggtggctcatgcctgtaatcccagcactttgggaggcataggcagg

SEQ ID NO: 1562078 - DNA, 4001 bp, Homo sapiens
cttctttaaacattaccttttaaagaaggctgttcttaccttctaaacaactatctttttccagggaggcaggtgcaaactctgccaagaaatcccaagaatgcaaaaatacttctcaatttgtctgtctttaatattcaaaagcaaattgcccctcaccaacttccagcccagtctcactcatgctttgtggtgtgaactgcaggctgattttgattgttgagagcagtgcaaggaagacaagtctggccttccttatattaacaaatggcactcactgcaataggacctatctgggaccaatccaagctgtccatggaccctaactagctccttcctggttgggcagaagcctctggaaacagagtaggtttaagatttcagaacaggtcctcattatttgccaaattctttcttccctttgtaaacgattatgctagtttaaacaccaaaagggagccagccggagagacattaaaatgagtagcttcagtaatgtaaataatccattacttcaactagttctgctttattcctaccacaggcctaaaatttggcaaggaagttgagcaagcctggcggcataagccagagctcacaagaactagcctatctctgtgaaggtgtgcagtaaacacttcacattaaaatggcccagtaacttggacattttgggaagcctgtacccaaagggcaggtgcaagttggtgcccatattggtatagaggtagccagttaagtgagcatttaatagagccagctattttgcgtgtaagaaacccaagtgggtccttgggagcccaggtgaaaaacttcccatgtgtggtagagggataacctaggttcagtcaacatctaaagatcccactatagccaacgaaggccttattgttacggactcccaacttcgtttcgccaccagccagaaaggcggtaggaaacaggcttggtaaaataaacccaataagaacgaatgaaagagacacaccagaccacaggcgctgccaaaactcatttttcattaacacggggtggggtcccaggctcaggcccccgggcccgatcatggccccagtccgcacagagcgcccggccctggccgcccgcagctccaccgctcagccagtgatgcgcacatccgtgcggcggcggatccgccgggcccgagccgcctcgggcaggatggcgagcagctgctcttgcaccagcatctccacgatctgctccttggtgcggatgtcaggccgcagccactggcgggacagctcccgcagctgccggaaagcctcccggggacccgccgcatcctggtagcggaactgccggaaacgctggcggaacgtctcgggaccgagtctagagccggcggggcctggtgtggagcgcgcttcagcttcggcctgaggcgctacgctcacgggtgcgggcccgagaggcagctccagggccgcggaggccgcagctcggggcgtagggatggcttcagggaccgcggcgttgggactggaaggctcaggggcaggcggtgaggcctctggcagcgaggagcccacacagttacgctcaggggctgagctcgaaccggctccttccagtttctccggtggcaccgccgcgggactcccagtggccgccaagatcggctccgtagccgccataactccagctccgggcgtcactctttgtccggtagctgtgtgctcagcactgcgtctgcgcgggggtggggtgagcagggagacgtttccggttaaagggcagagctcgcgtcacccttgagggagtcggactcgggaccggccgagagtgtgcggagcttacctgcaccagcgaagcgcctgcggcagccggaagcgaaagtctctggcttctctgcgtccaggtcggcgcgcgagcacccggaagccgcttgcgggctcccggaagcggcgccctctagcgttctcgagtcgcatgaggcggctgctgccctcgcggtgcgggagggcgagctgcgcgtggcctgggctccttccgaatggtggcgcctctgagcgccagttcgaggaggagtcggaggaggagcctgaatgtttggagatagacttcaagtcccggaccttatccgtgcgccgcttcggtttgcaggtgacctttgcgtgcgggcgccccttctgattgaccctgatgagctgtagctctgatggcccctccttcgggaatgattagggtgacggctggccggggctcgttcgagtggcgcccggccggtggtgacccgaacaggagagcgggacggcgaccattctctcgggaggggcccatctggagaaagtcctctcgcttggtcaaactaggagggcgatagcaccggccttactgcgacgatgacaaagtacaacacaccgtctggcgcgaaggagatgctcgagaaccctttgctgttgttatttttcgcgtgtcctccgaaaccaagggaaatgcggctctgtgggttctgttaacgtcagcatttaataagtgaactctaaatgcattgccccttatggtggccgctggcctcctgagttgactcagctcttgcaacgtagctagttgataaccctcgaaatatagcgaattgagatgtgctatattgtaaaatacgggacttagtacgaaaaaactgatgtaaaaattatctcaatactttttaatactgattacatgttggaatataatgttttgcatatattgggtcaaataaaaatgttattaatttcacctgtgtttttactttttaaatgcagcttctaaaaacatttaaattgcatgtgcagtttacattatatttctgttgagcagccttgggttagagtgttggagtgaggctaccttggtggaatcccctttgacgatacccagctcagagttgttaggaggattaaataaattaagccgttggagagaaagggcttttaagaagtttgctcttgtttttattaggtaaactgcttgctatctctgagctactgttttcttatcagtaaaatgtggatgtaatagaacttacctctcagaggtaattgagaattcagtgagatgatgtaggtaaaagcacgtggccctgacagccctcggccaggtggttttctgtttggtagctgactcacaaatagttttgtttttgtttttgtttttgttttgagactgagtcctccgcctaccgggttcaagcgattctcctccctccgcctcccgagtagctgggattacaggcgcccaccaccacacccggctaatattttatatttttggtacagatggagtttcaccgtgttggccagactggtctcgaactcttgacctcaggtgatccactctcctcagcctcccaaagtgctggcattacaggcgtgagccaccgtgccgggccacaaataggttttatatcctcattttacagaaggggaaactgaggccctcaaaggacaggggcctcatatgaaaggttttctatgaccttgcagtccttttgagcccgtgcaggatggaggagcaggtttaacaaccattaacatgccattagccctgatataaaacttacccctaccataggatgtttcctttggatgggtagaagtggaccctcatgaaatcatttccatagcctgaaaaccttgaaagtcgttgcagtgggcctttaatgttttttagttgctgacatgtaaaaattgggagatttcacatgcaaatctggatttctaatttttcttgaaaaaacggaagagctggccacactggacccaaattcctgctggtcaacaatcagctgacactgagtagagacgacttcctttagacaagatactctgtcccatttggtctcaatctcaaccattccctatggttctctgaaatagaatgttgtttgcatttactgttgctctcaggttgttgctttatttagagttgatatttttctctcttttctttttagaggtgagaaagcagggtcttagtgtttgttatgcctactggct

SEQ ID NO: 1562079 - DNA, 4001 bp, Homo sapiens
gtaatattccatggtatgacaccgcacaatttgtccacccattcacctgttgatgaacatgtggcttgtttccagtttaggactactcccaacacagctgccatgaacattcacatgcatgcgagtgtttattttatgcttgtacatatgctttcttttctcttaacaaaatacccaagaacagaatggtgggattatttggtaggcgtgtatttgagcatggcagttgtgatgaaacttccacccaggtttcagagtgtccacactgtgtaggtgtttgagcatggcagttgtgatgaaactttcctctaggtttcagagtatccacactgtgtatatttagcccacaagtcaaaggtacacacaaaccacatgtgaaccaagaacacacacacactcacccacaaggagtttgcatcagctgcaacagacttcatcctatcctcccagacaacatgtgaagggagcttccggaagggaaatctcccaggctgccctctgattttgtaaaatgttcaatgcacaagctcctgacagcatggatactttataaatggctcacagagggctgtggggtctgtctctgggagatcctttaattaatggcaccatctcattggcctagaatagaatagttacagtcaatactgagagctttggcatgaagtgaagcagagctggaattctctaagggtggtgccatcagcatcccctgggaacttgttagaaatgtgcattctctccagcccagatttcctgagtagaagctctgagatggagcccagcaatccagactttaaccaacctttccggtgattctgatgcatgctccagttaagaaccactggcctagaacacctcccaagcccttcaagtttcttggaattgaaaccatcagaaattataatacaccaacagcaccatcccctctattgcctgggttccacccacagacctgtggtgccccattcccttagcaccccacagtctcatagtaaagtttcctcatggaatcaagttaccatgcagaatgcacacctgcacaatgatagttatcacttctttccccaaaacatcaaacttttttagaaaaggaaaaatgtctcaagaacacaatcattggagtatttaattccaatgatcataatcacccatttctttacacgtggctctcaccctggcataaatggagcataaagggcataaatggagctaaaaaaagagaaaaagacaaagattctaattgatgcactacaacgctttttactgcttcagaaccctccctgaaaatttacccatcaacaggaaaatcaattaaacttgaataggaagaatttgagtaaaaatattggatactttttactttaatcttcagattaagcatgatttccactcgacattatcatcgaagagaagttcttccttggtatttttgcatgcttaaaatttagcccagtctttgaaaaccctttccagcttccagctaagcagaaccttgccactcactttgaactttccggcaaggaaagccttctgcgggttcattttgcccaaaaccagctccataaagacagactccgggattgtaaagacagtgtctgctgggagcctggcaggtcccggatacatgtccccagaaccattcttcagatcaatggtccaccgcaaaatggtcttcccatttttggtgatgtccagctgaaagacggcattgactttcttgaccaattgagctcccacttccctgatgtgaagcctaatgtcctgaaacactgggaagctctcaaattctgacagctctagaggatgtggcatggcaggttctggaactgaacccagaacctcgaactggcccaccagaggtccatcctctgctttgatcttgggttgatggtcacttctcttccacatcttcctgtgctagtcccctggaccttgccatctagtctgtgagcagctgtgaccagattaatacccacaggtcagattgtgacatcaaaggtaaggccaagtggggactgaagctggtgtgtgtgctacagtcttattggccaaacaaatgataacgtgtgacctcagataagggctcagacaggccattgtgaggcagatccacacacacacgcccctcccaaaccaatcagggatgttggtcctgcaagcccaaaaggtctgcaggctgcaatggggttaagggaaactggccccagaagcttctttagtgacatgagctctgtctttccaatgcagacatctcctcagtgaaacccaacgtgagacagaagttattcttattcctctaaaactaggtaacacttaagtcccattaagtgggtaatacttaagttaatactacagatcctagtgctgaatttggctttatctggctgctggtagaaagggaaatgcttttaggccagagtaattgattggagaaggaatcagtccaggagcctgcatcagaaactttccagaagcacagtgagacacacacagagagattaaatgtccctaagatcagaagatgctgccagtctcctctgataattacacgtaatagtatagcccttgctctgggccaaggtgcagagttctaagtactacacatgtattaacacatttaactctcattacaaccctctatgataggtattttttcttttttttttttttttttgagacaaggtcttgctctgtcacccaggctggagtacagtggcgcgatctctgctcacagcagcctctgcctcctgggctcatttgatcctcccacctcagtctcccaagtagctgggaatacggcgtgtgccaccacacctggctaatctttgtactttttgtagaaatggggtttcaccatgctgcccaggttggtctcaaactcctgggctaaagtgatccacctacctcggcctcccagataggtattctttttatccccattttacatataaggaaactgaggggagaaatgaagtaacttgcccaatgtcacacagttagtaagtagtgtagccagatttgaggagaggcagaatgactccaaagtccacctgtttatttctttactttttattctgaaataatttcagtcttataaaaagtttgcaaaaatagtacctgtttaaccttctcccagctttccccaaaactaacatcttatataatcacagtacagtgatctaatctgagaaattcacattggttcatgactactaactaatctacagaccatgtgagaccatatctatttggttgcaggtctccctagtgccttgcagtctggggcagctcttcaatctttgtctatcgttaccttgacacttgaatactggccagttattcccaaaaatgtccctcctttgaggactgcctgatgctttctcctggttaggtggaggttatgcatttgggacaaggatgccacagaggtgacctgtgctcttcccactgtgccatagcaggcgtccatgatgttatgtcccatttctgccgatgttgtccttgatcacttggttaaagcggctccttcaggcttctgcactgtagagttactgtttttccctctgtgattagtatctttaggggaggtgccttgagaccttgcaaatgccctgttttgcatcatcctctggcctactcttgttgcatccatccatggcccatccctgcagcaatcagtgtgaggtaggcccagcagtcatcttctatgcttcttactcccttgagatttaataactggaattctgctctaaggaaaattgccctcttctctcccatttctttatttgttcaattatttatttatctcagcatggacttgtgggtatttgtttattctgtgggtcataatctactattatcattgtttatttccttgctaaattgtcccagatttggccatagggagcttcatcaagttggagcctgtatcctttcctataccaaactgctcttatgtgtaagcaaagctctgttatatggagttgctggaaacttcg

SEQ ID NO: 1562080 - DNA, 4001 bp, Homo sapiens
tttgcccagcactctctctctctctacctggtgtggcagagtgatggaatgtgggtgaagtgcttggaaatcccagaggtggaagcccccatcctcccaggctcctgtctttgccatctcagttcccccctcatcctcagtcctttcttttctcctctctcaatctccctctttctctctctctctttccccacccccatctctctctctctctctctctcacacacacacacacacacacacacacacacacacacacacaacccaaagctgccacatgtgatgtcagatctctcactaccaaagggacacctcctcttcagacacctgccctggtgggggccatcaggggagaacccctttgtgatccccttggtggaggatgggatccacagaagcagtctccactttcccctgccttccagagatcacccccttctgcacctgaatgacttctcttgttcctcaaacccttgtccctgcaggaacttgttctgagaagagatggagtgtgtgtgtgtgtgtgtgtgtgtgtgtgtgtgtgtgtgtgtgtatgtgtagtgaggagggggcttacgaggagcagcagggttggttctggagggggttgagaagctggggatggggaaggagtgcaatccaggggaccaggagccactttgggggaacccctcccagaaatcctctctttcttgcagtccccaggacaggcccagcctttggcaggcatgtggctgagggtaacaaaagagttattgagagagggggtctgagagcacttgtgtgacatcggcaggggagcaggtttgaagggagggagggcgcccccagccacccccagggaaccaaccctgtctctccagggactgaacatccagggctctttaccttcccccttcccgggcagccagcttctcttcctcaacgggggagagggaaccctcaaagtgccttgtgcctcagtgcccagcgctggcctttcacgagcagccccgtctgtgttctcttgccaccccctcactctagccctatttgagggccacaactttcaaagtcccggctggcgcgtggctgcgggatgggccgaccccgcgactttccctttgtacgacctagcccctgccccgcccgcacggcccttggaaagcccgggaggagcccacggccagagagatctcctcccgggggtttcctgtcgcacgcgcccctcctcgtggcccaagctggggagggccccagctcccctcgcctcttctcccaaccccccgcccccgccgggtcccactcaccgttgtccccgggaggcccccgggcgccaggcagcacgtaggctgtctccaaggggtggtaggtgggggccggcaccccgctgcactggaagccgtcccctttgatcttctttaccaggaaggagcgcggcatggcgcggccggcgcggggctcggtgcggggaggcggccggccgggcgcgatcggctgtgtccgcgcgggttttcagcactggacagctcccagcgggctggagcgcgggaggccgctcggagccggcaccggtggcggcggccccggctcgggctcgggcttggcggcggcggcgcgcagacaggggatcgcgggagctgcgctcagcactccggctgccggctttatatgggacgcaggctggagatcaggtggtcccctagcaatggaaccgctcggcgctctaatccatcaaatgtcccccaggacaatcgctccgcacacgttcccctgaaccggcggcggtgggggcaggcccggagcaggcaggaggggagaaagtgagggcgagaaaggcgcagagacagagagggacggagaaaggggagtgaggggggcggggagaagaagagagactcggagaaagacagagacatacagggaaagagagacgcacacgctgagagaggtagaaatagaagcagagagaccaagataaggacaaaaagacacaagagagaaacagagagagaagaaagacagagatggagagaagtagcaacacacacacacccacgggaggaaaagagaaatccaggcacacaaaaaggaaacccccccagggatgcaaagaaagggaaagaaaagtgcaaaagagagggggaagccgaggggaacggagggaaagcggtcccgagcaggcggggttcaggcacatggggccgcagggaaggggatgcagaggaaagagtgcgcactggccagcggccaccctcccgcctccagtcctctccctctcccccagttctgaagtggccagggtggacgctcagctttcactagagtaagtctcccctcccccctgctcgggctcccactggagccccctgttgggtttggggttcaactttcttcttccagaactggtggggggagcaagtcccccacgccgatgcctggccttgctcggttggtcctgttccggtgcctagctcaggcgggcgctgcaagaggaagtgaaaatcgtccagtaattaattttcctgctgccggggggtggtggttttgacacatccgaggcagtgtctttccctgaagcggggagcagacaatagagacacgtggactgggaagggagaggggggaagggagggggagcggggctcctgctggaactctttgcaggtcagctcctttgtctctaaaaggatctgagcagacccgccacccccagtccgacccaaacctgggggagcccccatatcttggcaggaccaaggagcaggagagctcagccccctgcccagagggtgctgggcaaagccccatggtggcggacctgctttagcaagtgtgggatggccagtgcacaagagtcccagaatcagactctaggaattccaggctctcgctgtcaatggaattctggttatgagatgcaaggctggtggagtggggatgtccttttgggactgggtcatccaataccagtttgcaggctaagacctagagagggcttggaggtgcttgaggtcatgcagtgagtcagcagcaattgccagagacctcagtggcctctgggcaccactgaatcagggcctatcatggtccttgaggtgtagcccagaagtctcagaataaaactggggcccctcgtggtggttcaagcctgtaatcccagcattttgggaggctgaggcaggaggatcacttgaggtcaggagtttgagaccagcctgggcaacatagtgagaccttgtctctacaaatagttaaaaaaaaaaaaaaaattagccaggtgtggtggtgcacacatgtggccttagctacttgggaggatgtggtgggaggatcgcttgggcctgggagttcgaggctgcagtgagctgtaatggcaccactgcgctccagcctggatgaaagagcgagaccctatctccaaaataataataataataataataagttagagtttccaatgcaggatctgttggccttgaatattttcaaaagacataaagatgcaaggatgtggaagcagaaggtttgccattgaatttgccctgtatggttttagattgttttccctgaccgaaataaggaattaaggcagtttactccctatatataaacattgaaaaacattgcaggtccaaaacaatgggggcccctgatcttgccaaggccctgcatggtctagaggtcccccaccatctttcctgttgcattgcctcatatcttgcccatgggaattttttttttttttgagatggagtttcgctctcgttgtccaggctggagtgcaatggcgcgatcacagcccactgcaacctccgcctcccaggttcaagtgattctcctgtctcagcctcctgaatagctgggattacagggtgcgccaccatgcctggctaattttttgtctttttatcagagacggggtttcaccatgttgcccatgggacttttttaaacctctgtcactgagagttgaagtgaccacacccttgactcatggcacgcccatgcattctctgctc

SEQ ID NO: 1562081 - DNA, 4001 bp, Homo sapiens
aggactgacacagtccccttcccccaaactacatccttcagaatgcccccaggacacagctgactgctcagcaccctgaagcacctgaaggctcagcagcccctgggaggaaactggcatgtgactgggcacacggtgacctcagcaacctcctgggtcctttcctctttttccctgtactgcctaggtggtatcccttcggatgcttccccagttgcttgacccgacacatccttcagggcctagtttagagcactgtgctagaggcagaaggcttgggtcctcagccactaacattttaggcaaggtagcctttggtttaggttaagtcatcacctcactctggccttgtttccttccacctcagaattcctttgccttccagcctaaaatctcaacctattctaaacccgtctttagttaccaacgatgggacacctggagtagcacaaagagtagaagttaagctaaagcagaaacttgaaagcctggctgcctaaatttcaatctgactcacccatttattgtgtattaactgtgtgaccctgggcaagttacttaacctctctagcctcaggaccagtttaagaacagtacacagtaagattgttgttggaattaagctcctggatatacccattagaaagttattagagcaatgtctggccccccgacaaaggcgctccacgtttgcaatcatcatggcatgcctggaattgtgctggaagtattgcctagggtctcattcattcctcaagaagagcctgcaggcagaatcaaccttccgctaagtaaattcagaggaacaggagccccaaggctttcaaagaaattaacattaatggttaaactgcaaggactcactcgctctgaaaactggggctaaagggcacaaagggggcacaaagctcaggctgtgggggacagattgccttcaccagtaattcccatgccccccaacttcccagatgagattgcccccctcctcctaagccggctgcgggcatggatagagcttctgctggcccagggacagctatgacggaggccagtggacagtgagaaggaaaggtttccctgggctgattgaggccttctctcccccctacccccttcacctcactcaaggtggatgcttcaattttcttatctgcaattgagaaaaaatgaacacacttcttgcagaaagcagaggctcagctcctggctaagtgttgagtctaaaccattcctctcctctgtcctcgaaaagagcagagtccccaactttctagaaaccctaacgcagtgtcccctcttgccccattccctcagacccttggtgcagtattgggaagagattcagaagggcaggactttgccctaagtcacaagtcaatgacagagctggggccagaactgaggttagggctcagttctccttggtgtgtgaaagagggcctcgcacaaccctaaaaccctcccccttccgagtacacgcagccccccgacccccagggccatctcggatcctaaagctgtctgctctgggcgccccgagagcgaggaggggattcagcgctccaagcctgccccagggtcaccagggaagggacgagggtgtgggagttgaagagttgacaccggcttagtcactaacgagcccgtagcccgcggcggggctgaggcccggggaggcgggaagagcaacaggcgaggggcgcacggcgcgtgaagccatcccggaggctggcccgtgaccccggagcaaagtttccaacaaagtttcccgggcctcggtgtccggttgggggtagcgtacccccgatctgcccccccccatcccacgctccgacgaacaaaggaggcaccggcctgcgcccccgcttcgcccccagcccgggaacctccaagcacccaccgactcggcgactccgcctacgaagaacagcagcagcgcgaacagacgggcgggggccatggcaccgcggactggagaaggcgcgcaggctgcggcgagtggccccgggcgggcgcgccacccatcttataggcggcctaccggccccgccccggcccgcccccgccccgccgcccgcaccccgcccggaattccccagtggaagcgaggcctgcggggcactgcgcccgcccgcggagttggaaaccccaagggacccgccctgcccgagcccgccggctcctactcaacccctagtcctaccctccgggagctccaactccctttatttatttgacccactgccaggcaggtccccagagatcactgcggctaaccccattttatagttggggaaactaaggcccagggacgggaaggacttccctagggtgttgagtttagaccagccttcataccgggtgtgctcccctctgaagacacagaacttcccaaatgggatgtgaaccgtgttaagacaggggacagcaaactattctgtaaagggctaaatattttaggttttgcgggccatacgatccctgtggcaactattcaaactcgagcgtcgtagctcaaaagcagccataaatactaaaggaatgagggcagctaggtcctaataaaacattatttatagacaccgacatttgaatttaatataattttcatgtgtcacgaaatattattattcttttgactttattcccaaccatttaaacatgcaaaaatcggctgggctctatggctcacgcctgtaatcccagcactttgggaggccgaggaataggaggatcccttgagcccaggaattggagaccagcctgggcaaccataatgagacccccatctctacaaaaagtttttaaagaaattaaccaggcattgtggtgcacccctgtggcccagctactctggaggctgaggtgggaggactgcttgagccagagaggtgaaagttgcagtgagccatgatcgctcactgcactccagcctgggtgaccgagtgagaccctgtctcaaaaataaataaataaataaataaataaataaataaataaataaatgacattttataataaaaatgcaggccggatgcagtgagtcatgcctgtaatcccagcactttgggaggctgaggcggcggatcacttgagctcaggagtttgagaccagcctggccaacatgctgaaaccccgtctctacaaaatacaaaaattatccaggcatggttgcctgcgcctgtaatcccaactgctctggaggctgaggcaggagaatcgtttgaacccgaggggcggaggttgcagtgaactgagatctccccactgcactccagcctgggcaacagagcaaaactccgtctcaaaaaaataaaaaataaaaatgcaaaaaccattcttagcagtgggctgaacaaaaataggcggtgggcctcagccactctgagaccactctgacgctggtctcagagtggctgacgtctgttctaagggcttcatctaccagattttgaactttttcaaaagtttgatctctctgagaactggtctgcaagtttatttccattcttagggtaagcttccaccctttataagagaaagttgtgtgtcctccttacccttcatcctcctaacagtgcattggtgggagcaggttgagggaagaagtggaggggggtgctatatggagactgtaaaattctctgggtccccaagcacacgtactgttggaattattgcagggtgtgaaggtgggcattctacgatgatcgaagtacaaaagaagcctaaccctgtctctccctgacttatgtataaatctttctaagggtgtaacatagccttagaagtaggacattttggccactgttggcatattatgaattcatatactttgtggagtggagaattggtagtgacttccctttttccacctcttaattattatcaaagaataaaagtctcttgtggcagagaaccttggcagtaaagcaaacttcaaatgctgaccacggggtttccacagatttaaaggtaagcaatgactttcagtggtttt

SEQ ID NO: 1562082 - DNA, 4001 bp, Homo sapiens
ttggatccatggatgtgaaacctggggataggaaaggcatactgtatcccctgccttgtagcagctcacaatataatggggaatggttccctgccagcgaacatgctgtgtttcgttcaatcattcaaaacatttgagtgtccactgtgtgccagacgtgctggtccctctgctgtgcacatcatcctccttggtgtgatgctccttcgaggctcagttcagatgctacttctctgcttggcttttccagactgcatgatacccaggctgcctggctgggtcttcccatgtattccacccctgacctgtactgcccctgttgccaagctatttatcaaattatgtgattaatatctgggtattttcttacactggacctcactcataagggcaggagctctgtcccgttcacacacgatccttccccgccacggcactgcccagcacacatatgctagcaaaaattatttgactgaataaatcagtggttttccaaggaacagattggaaatttatgtgggcatttttgggtgtcacgagactgaggggacagtcatatccctgtcgggggtggggggggcagggatatgaaactcctgtaatggatgggacagtccattacagtcaccataacaaatggtcctgtcccgcacaactttcagatatcctgccaaactttcaagtaagccaaaaatccgttataattggttgtacatacaatcacaatgaatttttccctagttttagtacacactagactgtctggaaatgcatatatcaggttggttgtggggagttacactttgctcaccattctggaaaatcgctgcccaccctgctccccacgggtgagtcacccgaacagcatgctcacgtctgtgtacatgtgtagctgtcacagtgactccgcgcttttatataaatatatttagcctttgactcaagatgtcagatataaactgttggcaaaattcagctgaatattgtcttctagtaaacctaagctgattcctaagttgggtacaagcgtgatcgggtgtaagccagcctcagcttttacaaagtgaaatgcatattcttttattagaaattactttcatgtccctgccttctccttataaacaaagggcatcatattgattttttacccggggaaccatcacctgggctgcagcctcaggacgaacctgtgccttccctctgtctcaatttcctgctttgggaaataggagccacaagccacaaactccatccaccgcgccacaggagcgaggtccaacgcaacggtccctagggcctgcctccaacccagcctcagtttcctatctgtcacatcgttctatgatctcgaaatgactataacccctttcttagccccaaaccagccggaagcgacatcttccggttgctacaggttacggcggttgctatgggctacggcgcctgcgcagaaacaccgccaagcgactcagcaacttctagagcgcatgcgtttcgcccacccaggcccgggcgcggttaggggtgactcccacgatccctagcggctgcagagtggaacatggcggcctccttgccgcttgcgttaccagagtccacccggcctcgtgctttctccgggcgcccgtagctggcgccggcatccacaaaaatagatcaggtaaagcagcagagtaaggcataggaagacttggtcgggctccgcggcccctctttaccggattggaggctgcgcgggtgaaatcgagctttaaactcccctggcctcggaacaccatttgtagcctctgaaggaggaggacttataagattctgtactaaggcagccgtgggaagggaggagaaccaggtcggcccgcgcgctcccggctgcttttgctctccctttggtttcgaaagcgtcaagtcccaaggtatttcctaccaattgtgacgtcacccttcctcccccgtttctcacccgtttcttgtctggccgtgacttctgacccagtgttgagctaaaaatgccccgccccaccctacgcagattcaccccgcgtcccacccaccagtgactgagtgactgggcttctgctgcctagggaagggttcttggcttggccgggcaaatcaattcccacagcaaaatcagaccgaaagcctgttatgagggactcaggcagttggatgtggcgtataggaggaaggctagggcaatcaggaaggtctcctggaggaaggaagaagaccctgactgggccgtgtaggatggatgttcaagtgggaagagagtgtgctattccagggacagggaggcccaggcctgagagtccagttgccttctggatcccgtttacctcgcagattatccaaactggactcgtgattttccccagctgtgccgcgcctccccagcggtctcactgaatccacccatgggctatgtcagaaatctgggagttatcctcagctcctccctttcccttctgaagccatacctacttcttgccctcaaatctctgtgacctgacttctggtaatgtttccattctcaccatctcattcttctccacacttatcatgaagttcatttattccagactactttaggttgagtcctaaaagtcagcctgctagttcatgcctccatgcttttgcaggtgctattccctctgtcttaagagtcattcatgccttctctcttttccttgttgtgaactctttttcctccaatttaaagctttcccccacctgtacgcatggagattggcaagcctcccttctctagacgacagcatttcttgtatttgcctcttcatcatatattccacaagtgtttgttaatcacctactatgagcaaggccttctgcatttcctaggttggatttccactgtgctgtgtttgtttgctcatctccctcactggtcaggaaatgtcactcatttgttaacccccagtgctgagcacagtgcctggcacacaacaggcatcccattactatttctgaaaggagtggaaaagcaggcacagagagaagagaaagcctgatatcctaaatatacagtctttcttcccatgcctgtctgtgtttgcagtcaataagtagaaagtctttcgaagaataacctgggcctggaaaaggagagaaaccatggccctaacgagttaggttgaaaggctgcctggctcctataatctgacagtggaagtttgctcagttctgtgctgatggcttcccacaagtaattggttcctccgaaaggaaaagaacccacctaacccctctctctcagaggaattttcctctcccacagccctttccagatttccatccctgagcttctgtactttttgatataagcaataacaacacccacaacaaaccaatagctgggcttcggagatcagcagggctgacaaggggacttcagcccccatctttgaacttagagtgagaacactctttggaacactttgttccaaagagctgaagtgatggaactcccactcgttcctgtggacagctcatccgtcctttacaagacagtgcgcgggagggaagcgtgggttagagtgtcagaggaatagctcctggaaggccaaattagcccagggatgtggtgagtcggaatagaagaagctgttgctaggccaccagcatgtacccccactcctcctctcagtgctgcactgcctgctggggaaaagctgtgacttcctcaagcagacacgcctgaacccaggcccaggcagggcagggttcagactgactgcttctgacttgtgagagcacagcataggcaaatcccctttgaatgtcatttcttcctttgtaatctggataacaatagttgcatcacagttgtctggagactgaaagatttttaaaaagagttaaggtgtatatggaaagcatttagcacagcacctagcacataataggcattcagtaaaagttagctgtttattcattgtttcagcgcttacttactcagcacctgctaagtctgagtactg

SEQ ID NO: 1562083 - DNA, 4001 bp, Homo sapiens
aagaagtgtggctggctgggacaaacccagttctgaagaacctcacgaccccatggatttctgaataacgattttctaaaacattcctaaactactgaacatgatccactataccaaaaaaagtgccatacagagcaaggaggtgtccatgcagccagcaatagctattatgtattaagcacctgctatgtgcctggcactgtgctcagagctctaggtacactgtcttttttttttttttttggagacagggtctctctctgttgcccaggctggagtgcagtggcatgatcatagctcactgcatccttgacctcccaggctcaattagtcctcccacctcagcctcctgagtagctaggactacaggtgtgcaccaccacgcttggctaattttttagttttttttgtggaaagagggtttcacattgcccaggctggtctcgtgctcctggacttagtgatcctcctgctttggcctctcaaagcactgggattacagacgtgagtcaccgcacccagccctacgaacaccgtcttactgaaccctcacagcaaccttaggaagaggatgctgaggctcaggtggggtaagcaagctgcccaaagacctgagccctcccaccacccggcagtccctccctggtgcggccaccagcctaccttcagcccgataacattctgcccgtccacctcacacacgtagtggttggtgaggagcccgttgcgggccgcagaactccctttgaccagagagacaatcttccccttcttgatcacgaagccgacgtggcccatgctgtccttgtgcatggtgacagtccgctggaacggcctggcaggagggacagtgagctgtcctggggacatggctggggtgagacggagaggctgcccgggcctggctactcacctgtcccgaaccaccacgacaatcttatcgcctgatgccttcttcaccacctgatgggctttgtgcgagctccacccagcacagtcacgcccgtcaatctgcaggagctggtccccaaagcgcagccccacaagggatgcaggggtgttggcctggaccaactgcacaaagagcccctgggggaggcagggccccagagtcagtgtccctggcccaccctaggcacagatccctcttccaacctgttgttttcctcctgatactccaggaacctacagggtgccagggacacagctctgcatggcaggcaccaaggttaccccatttaccggggaggaaacactctaggcctcatagttaggaagcaggtgagtcaggatttcaaccctggcctggggctgcactccgaaacactccactgtaccattcacaaaggcatgggcttccctggcgtcggctgtctacaccgtcgcctggaagctagatgccctgggcagcgaagggcaggtggggaagggaggctcctccgagcgacggaagcccacggagaggccagtggagggccctgcgcaacccagcaccagccccgcccgggtctcggggaggagggactgggggcaagagcctggccgctggggttaggaggcccgctctgcaccttccttactgtggacgggccctctgagctctgaggcctggcgggagagcgcgtgcagctcgagctcctcttcccacccagcccccgcgccctacctggtcgaccttccgcagcctcagcccggtcttgccgcgctcgtccttgcacaggtggatctcgcgcaccccgggcttgatctcagctcgccgcacgcccaggctgtacccggttaccggtgccaccatctggccgggcccggggcccgagaccgctgtctgcagacaccagggggcagggggtcagcccggcccgtggggaccctgtgcctcaggagacactggggtgggggtagggatggggaaaggaggatggagccgtccccgggtccccccacgtccccagtccacgcttctcccctaggggcgagaggagacgtggctccacgcggccactagggggcgtcaaagtccatgcccttaaaaagccaggaaaacggggagggaaggggcgaggatacaggaagaggcccttcatttcccaagggaaactggcatcaggaaaagcctcctttaaaacccacttaaaatagaaaaagtcacagtaaatagtgagcaacaggggataaaaggactggatttttgtcttgagaaaaatgtaaaaatatacaaattcatgatgcagaaaaaggcaaggaacttcactctcccaacactattaaagatggtactggaagacctagccagcacagtaggcaagaaaagagggggagtcacacagatcagaagagaagaaataaaacggttcctatttatagatggcacgatggtctactagaaaatcccaaagaatctacaaataaactcctagaccaaataaaagagtttagcaaggtcctgggatacaaaattaacacacaagattcaattgtacttctgtatactaacaacgaacacatgtaaactgaaatttaaaatacaacaccaggctgggcgtggtggctcatgcctgtagtcccagcactttgggaggccgaggaagatggatcacttgagcccaggagttcaagactagcctgggcaactgttgaaacctcctctctactaaaaatacaaaaattggctgggctggtggcaagcacctgtagtccctgctactcaggtggctgaggcaggagaattacatgaacccaggaggtggaggttgcagtgagccaagactgagccactgctcagtccagcctaggtgacagagcaagactccacctcaaaaaaaaaaaaaaaaaaaaaaaggaaaggaaaggaaaggaaaagaaaagaaaggaaaagaaaagaaaaggaatacaatacaataccacttacaatcactcaaaaaaaaaaaaaaaaaaagaggccgagctcagtggctcactcctgtaatcccagcattttgggagaccaaggccggaggaccacttgaggccaggagttcaagaccagcctgggcaacaaagcaagacccccatctctgttaaaaacaaaaacgaagcaaaataaaacctaaaaacaagaacaacaaaaagaaatacgtgtaaatctaacaaaacacatacaggaaccgtatgctgaaaacaacaaaatactgataaaagatatcaaagaagacctaaataaatggaagattctctgtattcacgtgttgaaagaattagtaaagctgtcaattgccaccaaattgatatacagatataacaccatttctatcaaaatctctacaagatgttttgcagatccagggaaggttagtctaaactttatatgaaaagacaaaggaatttagaatagctaaaacaattctgacaaaaagaatagcgagaggaatcaccaccaaatttcaagacttattatatatagctacaataatcaagacagtgtggtactggtgaagggatagacaagtatcagtggaacaaagtagaaaatccagaaatagcctcaaatgagtaaagtcaactgctttttgcaagagtgctttcaacaaatggtgttggctgggcgcagtggctcatgcctgtaatctcagcactttgggaggacaacacagggagatcagctgaggtcaggagttcaagaccagcctgggcaacagggtgaaacctcatctctacaaaaatacaaaaattagccaggtgtgctggaacgtgcctgtggtcccagatacgcaggaggctgagatgggaggatcgcttgagcccaggaggcggaggttgcagtgagccaagatcatgtcactgcactccagcctgggtgacagagtgagaccccatctcaaaacaaacaaacaaacaaaacaacaaaaaaagcaaatggtgcaaccatggcaaaaatatgaactttgactgaaacctaactccttacaaaaaaattaacccaaattcaatcataaacgtaaacgcaaaacataaaactataacca

SEQ ID NO: 1562084 - DNA, 4001 bp, Homo sapiens
accaatagctgggcttcggagatcagcagggctgacaaggggacttcagcccccatctttgaacttagagtgagaacactctttggaacactttgttccaaagagctgaagtgatggaactcccactcgttcctgtggacagctcatccgtcctttacaagacagtgcgcgggagggaagcgtgggttagagtgtcagaggaatagctcctggaaggccaaattagcccagggatgtggtgagtcggaatagaagaagctgttgctaggccaccagcatgtacccccactcctcctctcagtgctgcactgcctgctggggaaaagctgtgacttcctcaagcagacacgcctgaacccaggcccaggcagggcagggttcagactgactgcttctgacttgtgagagcacagcataggcaaatcccctttgaatgtcatttcttcctttgtaatctggataacaatagttgcatcacagttgtctggagactgaaagatttttaaaaagagttaaggtgtatatggaaagcatttagcacagcacctagcacataataggcattcagtaaaagttagctgtttattcattgtttcagcgcttacttactcagcacctgctaagtctgagtactgttctaggtatcagcagtgaaggaaagaagacttggtccccaaatgtactttctttgggggaagagctggataaataggctttgtgactctgtgtgctgtgttagatggtgggaggcactggagagaaagagcaggacggagggtcatgtcaggaggttcagaagccttgctggctgggtggggtgacatttgaggaaaggcctaatggggtgggcacggccattgcagagcctctcaggtgggagttggtgttgtgtttagaggacatctgccagtgagaagccagttgtgcagagagggagtaaggaggagtagtggggaggaagctggagaagtgagaggggccagatcctggagggcctggaggtcatggtgaggactttggcatttactgtagtgagatgggagccactgggggatttgtagcagcagagtgccaaggtccaagggttattttgacaggcctcctctggctgatgtttggaggatgggctacagggcaggagtgggagcaggagcccaggtgggaagtgatggtggtggaattgtcatgagcttgggccactgtacgtgaagctgcctgtccagtgctcgcccagcccataccaggctcgttttctgccccattttctgagaccctgctgaggagggcatgcactggctcctgtgtccagtatgtccttccattctcctgactttgtgggctattttcagtctccagatgaagaaaccagttcttagaaaggtgaagcccctggcgcagttccccagcaggtgtttcagtgctgtggcaggaaggttttttgatagaaacagcctcaggccagagaagtcggcctgagctgtggattccttgggagaaatgggctttttgcctgcctgcagcctctggtttcggctggaattggcctttcaaggagcaaagtgtggatctcatctccttgagcacagtcatgggcagtcagaaggcatcgggggccctcatgatgtctgggtgaagaaaatcactcagcccttaatcaaacttggtccagggctgggatcagaagaagaaaccccacttcacacttgactgcttggagtgaagcacttcgaaaggaagctgcctgggaagtcccagaagggaaggggcagggagggaaggggacagggtgagagcaggtctcactcatcccaatcccagccaggattgggtcagggcccccagcgcttacctgcaggcaaggtgctgctccacgaccttctccagctgctgccgctgctgaatctgtttccctccctgaaacgtagccctgtctctcagctggcttcctgatctgggaagggtggtgcctgtcccctgttcagctgactcaccttggactgggatgggcacaggtgagggctgtggctgggtaaacaaggcaggttgccagcccagaggaggcctttggccttagtctggatttggaggtgggattaaggccctcacagctgctgttcagacggttatgaaccaagacttcttggccttttcttaaatagctctaaatttgggttggacacctagtcctgctgatcgaggcagttggctagagggcggtttgtgataggtatctaggggtctaggccaggatattaaaaagtggtcatatcctgtgacccagcatttcttctaggaatttgttacagtggagtcacagggcccatccatcactgctgcttctagtaaggaaaatgtagaaatcccaaatgcccatctctgtggtctgcttgaataaatcattgtctgtggaagatcacagagctattaaagtcacttaaggaagaaggtatgaggaaacatttctgagattctagtgagatgttgaaaaatcaatattgtgaatctcttcttgcattttgttttcattttttgtaaagtggatgtgcgttgaaagcagtctaggaggacatacgctaaaatgctgagtatctctgaatggcagcattgagggtgaggttttcagtttgtacttttgtgtgttccaaggtggtttttttttttttaagttagcttttgctctgaatgctcatgacttttgtaagggggaagcaattaagtttgattattttaatgggaatttagagtggttgtctcttgggagcagacctaaggagctgtgtgctgaggtggagatttttttttttatggcacatttttggtgtcttaaattttgaaaagtttaaatgtactacttattccaaaaataattatataaatttgaacagaaaaggaggaagaatttagtttagatcctggtgggtttggttgggtgagggtgcctgtcgcactgggtgcctggggagggacgagggactcgtgtgctgggcagtcccatgaggattgacgctgtacacactcagggtgtgtcagtatctgggctgcttcctgggccaggcaggcctacgtcacagttcccatgacccacctggcagagttgcactagccttgggtgtcagatcttgtgcctgccaatgaagagcttacagcccagagtcccacacaggaaacacacaataggaataataacaagaaagacatttgccactaattcagcacttactcccagagagcacagagattctacccctggcactttaaaggcattatctcaatggcttctcatgccatccctgcagagtaggtgtgactcacaccattcctccaggtggggacactgaggcacagaggcaaagtttctctctcaagttagctggaaagtgggccaagttcatgtcttctcttctatgggacatactgtttcagaaagctgaggtgtggggcaacctcagagtaagctgtgtgggcctgaagctgaggtaacgtgggtgatggacccaccttaggtcaggtgtccaaggccaaagcaaagtggaaaatagagatcctaactaaaccaagccactcctcccccacctcacttcattcagtcatgacctgaaagggcctttatagaagagggaggaggaagcaggcccttccaggtaaggggcttgcctgtggtcccagcatgtcagcatggagcccaggtcccctaactcccacctatttaatacctacagggactctctttctattccctctttggatagttgccacccatcactgacttccagccacctggaaatatctttcattgggcatgcccttgctcgaactcttcagtggctccctcctgcttcagggtctgggctaaactcccagggctgacatggagacctccacagcccactccctttattacctcctcagcactcccccagcacctctgcctcagctggactgggagccccaccattcctgccccactgcacacccacttcctacctgccctgactccatac

SEQ ID NO: 1562085 - DNA, 4001 bp, Homo sapiens
actattatgctgagtctcaccagaacctctttcctcaccacggttgcttatgttcatgccttgacaggctgtggtcaaggccaggtgtggtggctcacacctatactcgcagcactttgggaggctgagatgggcggatcacgaggtcaggagttcaagaccagcctggccaacacagtgaaactccgtctctactaaaaatacaaaaattagccaggtgtggtggcacgtgcccatagtcccagctactcaggaggttgaggcaggagaatcgtctgaactcgggaggcagagattgcagtgaggcgagacaatgccattgcacagcctgggcgacagagccagactctgtttcaaaaaaaaaatgaagactgtggtcagtaaaactgtcctacaggctaaactctcaaacccagatgatcccaacttcattgagtatttatacatcctgttcatatcctaaaatctagggtaacacacaactcagctattggggttcaagggaacaagcccctcaagaaaagtagtaaaaaggcaaattaaagagtctatcaaattaaagtggcctctcgcgcccacttcctgaatatggataacaactgtctgttattttgggaagtaccatactgtaaataattttgattaaggcaataatattgcatggctagaaaagcaaatgaattactctactacataaagcccagaacacaagaattccaatgtttgctccaactgaaactctaagaaatctgtttatttctggcaacggcaagaacctgaagcactgtgtgcacaggaagcactctggagcttcatgggaagcaaagggataactaaagtcggaatgaaagcaagttctatcacaactctcagcaagtatgtcagcagatttcattaaataaccgtctctctctcaaaacgttctttattaaaaggcactggcggccgggcgcggtggctcacgcctgtaatcccagcactttgggcgaccgaggccggtggatgacctgaggtcaggaattcaagaccagcctggccaacatggcaaaaccccgtctctactaaaaatacaaaaattagctgggcgtggtggcaggtgcctgtaatcccagctactcgggaggctgcggcagggaggactgcttgaccttgggaggcattggttgcagtgagccgagatcacgccactgcactccagcctgggcgacagagcgagactccatctcaaaaaaaaaaaaaaaaaaaaagaagctactgcctccatctaatggtttccaagcatgtacagcctaagacctgctccctccttttcctactgcctgtttccctcacccttctagggtctggattcttagcagtggacacataatccaaggggactatagaaggtccactaatcatctgaagttatgcgcatgagggaatatgccgtttttctagggagatgggtccatagcttttaccaaagtatcggggaaggtatctgaagaggtaaataactgaaagtatgaattagtgaatgaatgaaaggcctggaaagataacaggagaatatgccaaaaaatctgaaccacccttatcgcgccaactcgtaacttctcaggacacagtgaccatgtgtatgtaagaataagtgaggtttaatccttgaagggagtccaaggacctgggttccagttccagctgtcatgaagcaaaagtcgtttcacttgtctgagtcttgagtttctcaactataaaacgggacttgggtccttccaggtgtgcgcactccgcaattctggggaaactggagccagaaatcggtcccggcctggtgcgggacgacatccgcaggggactcccggatcatccattcccccgctaccctaaactgtcaagaaaaggcctcctcccagaagccgctcacctcgcccccggcagaaactcatacccgtgccctcggccctccgtcacctatgcgccccgctcacctggccggagccgctcacctagctagagccgtcctcacccacagctgcaacaagcaggctccggctcccaccgccaagtccagctcagctctcaaccgattggccagcgccccagcgcgtcatgccacggcgctgtccactggccaatcaaagagcgcttctccgacggactggaggaagcgagagactcagagaagctctgccaccatcttggaacagggcaagacaggtgtatgtcgcacttcaaaacgagagttcctcggaacacgtttccccacccctaaacgtttctgtttcagaaaaccccggcgcctgccgcaccgttgcctaagcgcagccagcgctcctcagaggttcgccctgatacaatatgacatccgctcgtctcagtgggaagtcccgctgatcgccttagctaccggaaagcgagaacgatgacgtatgctcgcggaacagggagctgcactggttggaagaaactaaggctgccggaagaaggcattagcatgcggaaggggcggggcgggtggtgagcgcggcggcgcttacgcacttgctggtttgggagtcggtctctgtggttaagtttgaagtacagaggtgtggtggtgcttcacgttacaagctctcctaccgtcgcttgctgtaatgtcttggcgctctcagcggaggctggcactagcgcacagtccctgtcatccttctacatggagataaataattgagaactgtaatattcaaccattttaggagagtaagcttagaaatacatggaacataactttcttttaaaaaataattccaacgtttagatttagggggtacactgcgtatttgttacctggctatgaggtttcgaattcgaatgagctggtcacccagatactgagcatagtacccaagtttttcagcccctccctgcctccctccccactctagtagtccccagcgtctattaatgtcacctttgtgtccatgtgtgcccaatgcttagctcccactttcaagtgagaacatgtatttggttttctgcttctgcgttaattcttttaggatcatggcctccagatgcatccatgttgctgcaaaaggcgcgatagaacacaactgtataaagccaccacaaccatttttacacacgctgacaagtggcaaacatgaacacatcattactgtgactcagagttgtagtctctgtagcatataaaaataagcaaaacgatgtaaacataaaattatgcaagaacatatctaggcatccaagaagtatccattaattagctcaatttaatactaagttttaagttatctacagatcatagaaattattaatagtttaaggcacaaagaaacaattactgttaaatgtgagaatgattcagttttgttgaacaaattcacatttttcaggatcttaaacaatgtaatgttaatattagcttatcaatagtaaacttttataaatttaggaagttcagattaattattctcggtaaggaaacaaactcaaaatgtacacatgtataatacttaacactgagaaaagacatagctgggattttttttaaccaaaacttaatattattcgccaaagatttgccttgattatttgaacctggattctttctgtactagcaatttctgtaagaaagattgttataggaccatcaggttcgattgtccattgtgcggtaacagaaagaataggagttgcagcagataaagagttccataatcaagtggcagccaaatgaggagacaagagcaatcctcaaatccacctccccaagagattagagatggcatttttaagaagtctggaggggcaatgggctaaagtgtggggatttctgattggtcaggaagtgagaggtgaagtcatgggacagggagatgaagaaacttcattccagtgttgtttcttggtggaggtctttatttatttatttaaaaaaattttttttttgtaaagcagggtctcactttgttgcccaggctagtctcaaactccgggcttcaggcgatcct

SEQ ID NO: 1562086 - DNA, 4001 bp, Homo sapiens
gctaaactctcaaacccagatgatcccaacttcattgagtatttatacatcctgttcatatcctaaaatctagggtaacacacaactcagctattggggttcaagggaacaagcccctcaagaaaagtagtaaaaaggcaaattaaagagtctatcaaattaaagtggcctctcgcgcccacttcctgaatatggataacaactgtctgttattttgggaagtaccatactgtaaataattttgattaaggcaataatattgcatggctagaaaagcaaatgaattactctactacataaagcccagaacacaagaattccaatgtttgctccaactgaaactctaagaaatctgtttatttctggcaacggcaagaacctgaagcactgtgtgcacaggaagcactctggagcttcatgggaagcaaagggataactaaagtcggaatgaaagcaagttctatcacaactctcagcaagtatgtcagcagatttcattaaataaccgtctctctctcaaaacgttctttattaaaaggcactggcggccgggcgcggtggctcacgcctgtaatcccagcactttgggcgaccgaggccggtggatgacctgaggtcaggaattcaagaccagcctggccaacatggcaaaaccccgtctctactaaaaatacaaaaattagctgggcgtggtggcaggtgcctgtaatcccagctactcgggaggctgcggcagggaggactgcttgaccttgggaggcattggttgcagtgagccgagatcacgccactgcactccagcctgggcgacagagcgagactccatctcaaaaaaaaaaaaaaaaaaaaagaagctactgcctccatctaatggtttccaagcatgtacagcctaagacctgctccctccttttcctactgcctgtttccctcacccttctagggtctggattcttagcagtggacacataatccaaggggactatagaaggtccactaatcatctgaagttatgcgcatgagggaatatgccgtttttctagggagatgggtccatagcttttaccaaagtatcggggaaggtatctgaagaggtaaataactgaaagtatgaattagtgaatgaatgaaaggcctggaaagataacaggagaatatgccaaaaaatctgaaccacccttatcgcgccaactcgtaacttctcaggacacagtgaccatgtgtatgtaagaataagtgaggtttaatccttgaagggagtccaaggacctgggttccagttccagctgtcatgaagcaaaagtcgtttcacttgtctgagtcttgagtttctcaactataaaacgggacttgggtccttccaggtgtgcgcactccgcaattctggggaaactggagccagaaatcggtcccggcctggtgcgggacgacatccgcaggggactcccggatcatccattcccccgctaccctaaactgtcaagaaaaggcctcctcccagaagccgctcacctcgcccccggcagaaactcatacccgtgccctcggccctccgtcacctatgcgccccgctcacctggccggagccgctcacctagctagagccgtcctcacccacagctgcaacaagcaggctccggctcccaccgccaagtccagctcagctctcaaccgattggccagcgccccagcgcgtcatgccacggcgctgtccactggccaatcaaagagcgcttctccgacggactggaggaagcgagagactcagagaagctctgccaccatcttggaacagggcaagacaggtgtatgtcgcacttcaaaacgagagttcctcggaacacgtttccccacccctaaacgtttctgtttcagaaaaccccggcgcctgccgcaccgttgcctaagcgcagccagcgctcctcagaggttcgccctgatacaatatgacatccgctcgtctcagtgggaagtcccgctgatcgccttagctaccggaaagcgagaacgatgacgtatgctcgcggaacagggagctgcactggttggaagaaactaaggctgccggaagaaggcattagcatgcggaaggggcggggcgggtggtgagcgcggcggcgcttacgcacttgctggtttgggagtcggtctctgtggttaagtttgaagtacagaggtgtggtggtgcttcacgttacaagctctcctaccgtcgcttgctgtaatgtcttggcgctctcagcggaggctggcactagcgcacagtccctgtcatccttctacatggagataaataattgagaactgtaatattcaaccattttaggagagtaagcttagaaatacatggaacataactttcttttaaaaaataattccaacgtttagatttagggggtacactgcgtatttgttacctggctatgaggtttcgaattcgaatgagctggtcacccagatactgagcatagtacccaagtttttcagcccctccctgcctccctccccactctagtagtccccagcgtctattaatgtcacctttgtgtccatgtgtgcccaatgcttagctcccactttcaagtgagaacatgtatttggttttctgcttctgcgttaattcttttaggatcatggcctccagatgcatccatgttgctgcaaaaggcgcgatagaacacaactgtataaagccaccacaaccatttttacacacgctgacaagtggcaaacatgaacacatcattactgtgactcagagttgtagtctctgtagcatataaaaataagcaaaacgatgtaaacataaaattatgcaagaacatatctaggcatccaagaagtatccattaattagctcaatttaatactaagttttaagttatctacagatcatagaaattattaatagtttaaggcacaaagaaacaattactgttaaatgtgagaatgattcagttttgttgaacaaattcacatttttcaggatcttaaacaatgtaatgttaatattagcttatcaatagtaaacttttataaatttaggaagttcagattaattattctcggtaaggaaacaaactcaaaatgtacacatgtataatacttaacactgagaaaagacatagctgggattttttttaaccaaaacttaatattattcgccaaagatttgccttgattatttgaacctggattctttctgtactagcaatttctgtaagaaagattgttataggaccatcaggttcgattgtccattgtgcggtaacagaaagaataggagttgcagcagataaagagttccataatcaagtggcagccaaatgaggagacaagagcaatcctcaaatccacctccccaagagattagagatggcatttttaagaagtctggaggggcaatgggctaaagtgtggggatttctgattggtcaggaagtgagaggtgaagtcatgggacagggagatgaagaaacttcattccagtgttgtttcttggtggaggtctttatttatttatttaaaaaaattttttttttgtaaagcagggtctcactttgttgcccaggctagtctcaaactccgggcttcaggcgatcctctcaccttggcctcccaaagtgctaagattacaggcgtgagccactgtgcccttcctggtggggatccctagacagtttggcatcagctgttttgtgggaattcaggatctgaaaaataccttaagcaattcctgggtacaaagagctagtgtcagagattctgtggataggagcaatcagggagtaggtgatcagtgtgctgcaaggcttttggttagttagcagctgcagggaagtgaattgaagggcaccaatgcaccctggtcagtgcctaactaacctgcctaaaggctggcttgtaatcttgttaaccctgtcaggatggtttcagcatttttaagaaattttgcatgcataagtttaatttacttattttctggaattttagaaataatt

SEQ ID NO: 1562087 - DNA, 4001 bp, Homo sapiens
atcccaacttcattgagtatttatacatcctgttcatatcctaaaatctagggtaacacacaactcagctattggggttcaagggaacaagcccctcaagaaaagtagtaaaaaggcaaattaaagagtctatcaaattaaagtggcctctcgcgcccacttcctgaatatggataacaactgtctgttattttgggaagtaccatactgtaaataattttgattaaggcaataatattgcatggctagaaaagcaaatgaattactctactacataaagcccagaacacaagaattccaatgtttgctccaactgaaactctaagaaatctgtttatttctggcaacggcaagaacctgaagcactgtgtgcacaggaagcactctggagcttcatgggaagcaaagggataactaaagtcggaatgaaagcaagttctatcacaactctcagcaagtatgtcagcagatttcattaaataaccgtctctctctcaaaacgttctttattaaaaggcactggcggccgggcgcggtggctcacgcctgtaatcccagcactttgggcgaccgaggccggtggatgacctgaggtcaggaattcaagaccagcctggccaacatggcaaaaccccgtctctactaaaaatacaaaaattagctgggcgtggtggcaggtgcctgtaatcccagctactcgggaggctgcggcagggaggactgcttgaccttgggaggcattggttgcagtgagccgagatcacgccactgcactccagcctgggcgacagagcgagactccatctcaaaaaaaaaaaaaaaaaaaaagaagctactgcctccatctaatggtttccaagcatgtacagcctaagacctgctccctccttttcctactgcctgtttccctcacccttctagggtctggattcttagcagtggacacataatccaaggggactatagaaggtccactaatcatctgaagttatgcgcatgagggaatatgccgtttttctagggagatgggtccatagcttttaccaaagtatcggggaaggtatctgaagaggtaaataactgaaagtatgaattagtgaatgaatgaaaggcctggaaagataacaggagaatatgccaaaaaatctgaaccacccttatcgcgccaactcgtaacttctcaggacacagtgaccatgtgtatgtaagaataagtgaggtttaatccttgaagggagtccaaggacctgggttccagttccagctgtcatgaagcaaaagtcgtttcacttgtctgagtcttgagtttctcaactataaaacgggacttgggtccttccaggtgtgcgcactccgcaattctggggaaactggagccagaaatcggtcccggcctggtgcgggacgacatccgcaggggactcccggatcatccattcccccgctaccctaaactgtcaagaaaaggcctcctcccagaagccgctcacctcgcccccggcagaaactcatacccgtgccctcggccctccgtcacctatgcgccccgctcacctggccggagccgctcacctagctagagccgtcctcacccacagctgcaacaagcaggctccggctcccaccgccaagtccagctcagctctcaaccgattggccagcgccccagcgcgtcatgccacggcgctgtccactggccaatcaaagagcgcttctccgacggactggaggaagcgagagactcagagaagctctgccaccatcttggaacagggcaagacaggtgtatgtcgcacttcaaaacgagagttcctcggaacacgtttccccacccctaaacgtttctgtttcagaaaaccccggcgcctgccgcaccgttgcctaagcgcagccagcgctcctcagaggttcgccctgatacaatatgacatccgctcgtctcagtgggaagtcccgctgatcgccttagctaccggaaagcgagaacgatgacgtatgctcgcggaacagggagctgcactggttggaagaaactaaggctgccggaagaaggcattagcatgcggaaggggcggggcgggtggtgagcgcggcggcgcttacgcacttgctggtttgggagtcggtctctgtggttaagtttgaagtacagaggtgtggtggtgcttcacgttacaagctctcctaccgtcgcttgctgtaatgtcttggcgctctcagcggaggctggcactagcgcacagtccctgtcatccttctacatggagataaataattgagaactgtaatattcaaccattttaggagagtaagcttagaaatacatggaacataactttcttttaaaaaataattccaacgtttagatttagggggtacactgcgtatttgttacctggctatgaggtttcgaattcgaatgagctggtcacccagatactgagcatagtacccaagtttttcagcccctccctgcctccctccccactctagtagtccccagcgtctattaatgtcacctttgtgtccatgtgtgcccaatgcttagctcccactttcaagtgagaacatgtatttggttttctgcttctgcgttaattcttttaggatcatggcctccagatgcatccatgttgctgcaaaaggcgcgatagaacacaactgtataaagccaccacaaccatttttacacacgctgacaagtggcaaacatgaacacatcattactgtgactcagagttgtagtctctgtagcatataaaaataagcaaaacgatgtaaacataaaattatgcaagaacatatctaggcatccaagaagtatccattaattagctcaatttaatactaagttttaagttatctacagatcatagaaattattaatagtttaaggcacaaagaaacaattactgttaaatgtgagaatgattcagttttgttgaacaaattcacatttttcaggatcttaaacaatgtaatgttaatattagcttatcaatagtaaacttttataaatttaggaagttcagattaattattctcggtaaggaaacaaactcaaaatgtacacatgtataatacttaacactgagaaaagacatagctgggattttttttaaccaaaacttaatattattcgccaaagatttgccttgattatttgaacctggattctttctgtactagcaatttctgtaagaaagattgttataggaccatcaggttcgattgtccattgtgcggtaacagaaagaataggagttgcagcagataaagagttccataatcaagtggcagccaaatgaggagacaagagcaatcctcaaatccacctccccaagagattagagatggcatttttaagaagtctggaggggcaatgggctaaagtgtggggatttctgattggtcaggaagtgagaggtgaagtcatgggacagggagatgaagaaacttcattccagtgttgtttcttggtggaggtctttatttatttatttaaaaaaattttttttttgtaaagcagggtctcactttgttgcccaggctagtctcaaactccgggcttcaggcgatcctctcaccttggcctcccaaagtgctaagattacaggcgtgagccactgtgcccttcctggtggggatccctagacagtttggcatcagctgttttgtgggaattcaggatctgaaaaataccttaagcaattcctgggtacaaagagctagtgtcagagattctgtggataggagcaatcagggagtaggtgatcagtgtgctgcaaggcttttggttagttagcagctgcagggaagtgaattgaagggcaccaatgcaccctggtcagtgcctaactaacctgcctaaaggctggcttgtaatcttgttaaccctgtcaggatggtttcagcatttttaagaaattttgcatgcataagtttaatttacttattttctggaattttagaaataattgatttacatgtgtttgtttcca

SEQ ID NO: 1562088 - DNA, 4001 bp, Homo sapiens
caactccattcttctttttcaggaacatttttttccatatgaattttaagaccagtttgccaatttttgaaaagaagtcagctgggattttgataaagattgtgttgaagcccagatgcggtgtgattcattcctgtaatcccagcactttggcaggcttaggcgggtgaatcacctgaggtcaggagttaaagaccagcctggccaacatgataaaaccccgtctctactaaaaatacaaaaaattagccaggcgtggtggcagacgactgtaattcagttacttgggaggctgaggcaggagaacggcttgaacccaggcagcggaggttgcagtgagccgagatcacgtcattgcactccagcctgggcaacaagagcgaaactccatctcaaaataaataaataaacaaataaataaagattgtgttgaatatgtagatcaatttggagagtattgccatcttaccaatattaagttctccaattcatgaacatgggaagtcttttcatgtagtgaagtcttctttaacttctttaaacaatttttgtggtcatcagaatatgagtttcacactttttttgtaaaatttattcttaagtagttcatttttgatactattataaagtttctttcataatttcatttttggtttgctcactgctactgtatagaaatagaactttttttttgtatttatcctgcatttgttatggagctcatttattagttctaatagtttcgtagttgattccatacgattttctgtatacaagatcatgtcttctgtgaatacagatcattttacttctttctttccaagcttgatatcttctacttttgtttcttgtgtaattgccatagctagaacttccagtacaatgttgaacagaaatggcaaaagtggacatccttgtcttattcctgatgttagggatgaagcagtcagtctttcaccattaaatatagtagctttgggttttcaatatcttctatcaggttgataaagtttccttccattcttagtttgtcacacatttttatcacaaagcctgttgaattttgtcaaatgcttttactagattagaatgatcatgtgatctttgtcttttattctgttgatgtgattgttacattgatttatgggtggtaaaccaatcttacatttctgggtaaaatccaaatatttctttttttttccttttctctgacagggaattgaacctgggctgtggcagtgagagtgctgaattctaaccactagacaagcagggaccaaatacatatttcttaaattgaatttatcatgagcacattatatgaggattgggtaaaaagtaactaaaaaaatggccaaagaaacaagatggaaaataacttccattttcagatagtaactatttaggaaacattgaaactttggaagtgaaattgttattgtgtaaatattttaaaaaagcatgtttatacatctttcacactctttgagtcttatatttttcctttaaagtcttggaactagacctttatgatattctaaatttaataacacttaacaacttgccctaaatatccctactttataacaattactgtagtggtttcctcatagatttgttttttccccatcccccacacccttcccaagtacacacccttcccaagtattatcccaagtgagactatcattatcatctattattcttattggacattttaaagtacctgtacaaaaatggcattagttagggatatagtaaagttacttctagtcttttaattggcttctgcccttggcgctgtttgagcaaagagaagagaccctcatagagaactctaaggacaaaaaaacttacttttaattgtgaccccaagaattatcaatatctctattaacagagacaagggcttcatcttctcttaagcagcttctcttcactgtaacacaggcagaaactaggtgattggcccaagagctcctcttctcagggactgtggtgggggcaggagtcagttgctaagcaaccatttccttactcttgggccaatgggctgccagagtgttcctttcaagccggaatgaaggcagctgctggagaatgtaggctgtggaaaggatccactgctattcctctggctgaagataaggggtaggctagaaattaggggtggctctctaacatgaaaggaagggaccagaagtccgactcgtacgtgtccacacgttcaactgtgttcaggggtgctggaagttcttatttttatgttgcctctagaggtacaaactacacttatgtaaaaacacaattaaggtacatgaactgatctgacatcatcctgtaagctggtatctctaggctatggcggaaaagaaacaatgggccaagtctgctttgttcccaatctggatgaaaatctttatcctcttttccagttagaaactgctgaggatttactggaacaaaggcaaacaaagactgtttaacaatgtctttacatacctcagataatacagacatctcacaagtggtaccttcaaagctacgagaaatcaaaatgaatatttagggaaaacatataaatattaaaaatatccaaggcacagagctagttgagaaattatgcctacaaaaaatatccaacttttacagtctgtccaggtcattactttagaaatagacattttattgttttgaatttacagttttattccttttattagtttcccattgctgtgataacaaattaccacaaacgtaatgggttaaaacaacaggaatttattctctcatagttctagagaccagaattccaaaaccattcttacagggctaaaatcaaagacaaggctagctcctcctggaggctccagggaagaatccattcttggcctggaatttttcagcttctaagtggctgccagcattccttgatttgtgaccacatcatttcagtctctgctcagtcatcacttgccttctgtagtttaatctccctttgtgcccctcttataaagatacttgtgattacatttagggcccaccaacatgatccagaacaatctctctctctctcaagatccttaatgttggctgggcgtggcagctcacacttgtaatcccagcactttgggagcctaaggcagttggattacttgaggccaggagttcgagaccaggctgaccaccatggcgaaaccccgtgtctactaaaaatacaaaaattagctggacgtggtggtatgcgcctgtagtttcaggtactcaggaggctgaggcatgagaagtgcttgaatcctggggccaggggcctgaggggtggaggttgcagtgagcagagattgtgccactgcaatgcagcctgagcgacagagtgagactccatctcaaaacaacaacaacaaacccaaacttctttataggaaaatcaatgagcaatgaaggcatataaggggaagcggcaaacaaaggtcaggtagggtcagagtcagggaaggctttgctagggagtgatgttcaagctgaaatatgaagaacgagagtgagtcagctaaacaaatcatgtcccaggtgttgcaatgaacatgttaagaggctatgtgggctgggtgccgtggttcatgcctgtaatcccagtactttgggaggctgaggcaggtgggtcatctgaggtcaggagttcaagaccagcctggccaacatggtgaaatcccgtctctactaaaaatacaaaaattagccgggcatggtggtagatgcctgtcatctcagctactcgggaggctgaggcaggagaattgcttgaacctgggaggcagaggttgcagtgagccaagatcgcgccattgcattccagcctgggcaacaagggtgaaactccgtctcaaaaaagaaaaaggctatatggtgttccagaacatgaaatgatgctctgtgggctggaatcagagactggggaatgggggtggtatggagcatagtataaaataaggctgggttag

SEQ ID NO: 1562089 - DNA, 4001 bp, Homo sapiens
aggtaggcatatacaaaaaaatattattgaagaatattcaattaaggataggaattctaggacctcatgataggccaaacatccttctgtgccactaccagaccctctcctcaccagggaatggggaggctcatcttcctaccacttgttatacagcacttctattggtgcgaacaatggttatcaatcccacaaaagtcctggagagtccccaacaattctaaacaatgagagagatatctcccctatttgctaaaaaaaaattaccttgatattggtccatcctttcacatggttaccgaatggtaggtttatgtaaataatgggtttcggtcgttgttaagatgttgtgccaaatgacgatcactgtcatcttcctgctctataattacaatatccaatcccccatgagatccatgttggtgtctgcctttttgttcatgactgagtaggtcttgttctctatttgtagattggccagactctccttttgcattttcaccatgccatggctcttgcttaggatttggtgcctggatttgagacttgcctgctactagcttttcagtttggctataaatactgcgttgggatacatctttctgcacaccattttctccatagtggagtcgtctttcttccgtacttgaagattggtatgatattttatttgccttttggctatgctcttgctcttgactgggaattgttatctgtttttgagacttgccctgtgctttctcttcagtttggctataaatactgctttgggatacatctttctgcacaccattttctccatagtggagtcgtctttcttctgtacttgaagattggtatgatattttatttgcctttcggccatgctgttgatcttgattgagattttttgtctggtgttgattcttgttatatactaggagctcatcttgggtagaaaaaatgtctttggatccatgttggagtttgtcttggtgcgcaggacagagtgaggtttgtactttacttgaatgttcctctctcacttcaaccacattttggtaatgccctttattttgatgagaatttttagtctcacgttgttgtttgttagctactagctcttcagtttggagaacataactgctttgggatccgccttgttttctacctttttgtgcaccagagacggaagtttgttctttacttagtccatgaacccacagcctttcttctgtgtttgaatattgactggatattccctttccagatgggctattcccctgatcttgagaaggattttgtgtcccacgatgagctttgcctcctttatggtgtataactaccctgtgaaaatgaccttttgatttatcatggtctctgccttcttgtttattatggagcagttgttgacttccacctagatgtcgttgtgattttgtcgtcttatgtagggcattcaaatcatattgctgactttttcgggactggtcatgatcattggcatctacatgatatgtgtattgaatagaaaaactgcctttggattcagtttgttgcttgcctttttgtccagaatagtgctggcccttttgtccgtgtggaaattgggaaaattcacttggtaatcggccttttgatccacctggtaattgataataagaaggtatgcattcattatctccaaagctcccttacaactcttaccccccacttttcccccaacaaattattgatatttctagaaaagctgaagctttgggtggagaaaatcaattctcttcaaagagaagaatctgtgcctaaacaggttactgtttgcaccccaaataatcttagattattagctgtctgagcagctttccccaaggcttaccctctccactcacctttttgtcccatcacagctgcttgcttctccaagatgaggagcagggaaagtacaaagatgatgttgggcttcatcttgcttggaaaaccttgtctgagagctgagccgaccttgtcatttatatcttccttgagtgagtgtgccatgggtggagcttaaattacaaaaggcactgacttttcttagcttatcagtaaatgccaacttcctcacccctgctgagtgtgggacaaagtcaatgtccccagcaacataatgtcaaaggcattttctttcttctggcagccccagcaaatttttatcagtccttttagatcatcatgccagatcactttaattttacagaattatagacaaaagtaggaaagagactggcttcaggctacaaaagcaattggtttctgagaatgcctttatattctaaatgtgagtttcccttcatgatgcaataatttaaatactctattttagatagaactccatacttccttttgttttaaaaatgatcttgagacacgttctattttacctaagaatgagcaatcatagaagtccaatgatatagaagataatgaaacgttatggaatccaaagaaagaaattttaaacaagtaaatggggcactccaatgtcaaatatgtctgtcaagttcaacacaataaagactgacatgtatccaaagtttttcttagttgttgctagtaactttaatgagagatgaatacaattgcattgggttgtcagttgaaggatggagaccagctgcaaccttctcaggaagtctgaattcatggtggagtgagagctgaggctgtatctggagggtgaggtaagttccagatgtgttttcaaaggatgaaagaattttaatatgctttcatggtgataggaacaactgttggaaaaaaagtaaaaatgctggtttctagattgggttcttttcatgaaatctacctaaacagcagaattttctttttaattaagagaagtttctacttcagtagtaaacagctgaatccccaaacaggctgtgagaaatatttgccaccatcaatgaattgaataatgtattgtgagtggacatgaagctaaaattcccacctttggtagaagcatagatttttccaattgtgatgacatcctgaaaagtctgaagaaactttctttactttgagtcataaagacttcgttatgagcagaccacaggagaagaagaaagcatcccaacagtgtccctgtgtacattcagaacaccttggagggtagtgctggggaaaggatagcttgaaaacttattttcaattattctgtcttagaatcttaaccttcctgtaggcaatgctctatggaaggggaaaagagaaaggccaaccacagaaaaaaagtgctatgctatcaaacataaatcatgtgagctgcatggtttctctatgagccactctgagatcttaccaaatttatctgtttgcctcaaaggcagtaagtagttccttattgcagaaaccccaacagagtaaggtgatattgttctgaactaaaattgattactgtgtctgctaaccactgtaatcttcctcacacttcccttaagaaaataccagaaactgttctgttccaaacttactgatacaaaatagagtctgaaatattaatcttacttatggatcaagaacaaaactttcatctcatctagtgtccaaaagatgcagataaaacaaaagggcacaatatttgcaaaaacaaaccaggaaaatgcaatccaagcaaaacatgtgattactatattcatattagaattgaattcaatgaaatgtggaaaaaaacatttccaaatgataaaggaatgtattgataaagttgaaatcagaaatcagtgatttggaaagcataaaaatggtatggtgatgcatacatcttagatatggaattatgatgggggaaaagattaagtgatcaaatgatttgtcctgttggacaaataaaaaatgcaaaaatattaaagtgcactaaattggcacaaaaatctgaaagttttatactcataggaaaagaagaaaacaggaggacttaaatgtattttgctcaattctatgggaaatcactttacaacttagaaaagattcaaatatag

SEQ ID NO: 1562090 - DNA, 4001 bp, Homo sapiens
tggatttctgtcttcattatattgttgtgtcaaatgatcatcttgggcaacctcatgctcagtaattacaatattatgtgactcactggattcctgtttgtatctgcctttttgttcatgactgagtaggtcttgtttgctatctgcagattgaccagactttccttttgcattttggccagaccattgatcttgattaggatttggtgtctggatttgagacttgccttctactagcttttcaatttggaaagaaatactgctttgggatacatctttctgcgtgctctttcctccatagttgagtcgtctttcttctgtacttgaagattggtatgacattttattttccttatggccatgctcttgatcttgactaggaattgttacctggttttgagacttgccatgtattttctcttcagtttggatagaaatactgcctttggatacacctttctgtacatccttttctccactgttgagacgtctttcttctgtactcgaagattggtatgatattttattttccttatggccatactcttgagcttgactaggaattcttacctggttttgagacttgccatgtatttgctcttcagtttggatcgaaatactgcctttggatacacctttctggatgcccttttctccacagttgagatgtctttcttctgtacttgaagattggtatgatattttattttccttatggccatgctcttgatcttgactatgaattgttacctggttttgagacttgccatgtattttctcttcagtttggatagaaatgctgcctttggatacatctttctgtacactcttttctccatggtgaagttgtctttcttctgtacgtgaagacgggtatgatattttatgtgccttccggccatgctcttgatcttgactgagattttttgtctggtgttgattcttgttatatactaggagctcatcttgggtagtaaaaatgtctttgggtccatgttggagtctgtcttgatgtgcaggatggagtgaagtttgtagtttacttgaatgttcctctctcacgtcaaccacattttggtaatgccctttattttgatgagaatttttagtctcacgttgttgtttgttaactactagttcttcagtttggagaacataactgctttgggatccaccttgtgttctacctttttgtgcaccagaggctgaagcttgttctttacttagtccatgaacccatagccttttttctgtgtttgaacattgactggataatccctttccagatgggctattcccctgatcttgagaaggattttgtgtcccatgatgagcttggcctcctttatgatgtataactatcatgtgaaaatgaccttttgatttatcatggtctctgccttcttgtttataattgagcagttgttgacttccacctaggtgttgttttgattttgtcgccttatgtagggcattcaaatcatattgctgactttttcgggtccagtcatgatcattgatgtctacatgatatgtgtgttgaatagaaaaactgcctttggatttagtatgttgttggtctttttgtccaaaatagtgctggcccttttgtccatgtggaaattgggaagatccgcttggcaattggccttttgatccacctggtaattgataatagaaatgtatgcattcattatctccaaagctctcttgcaactcttacctcccaccttttcccaacaaatttctgatatttccaaaagcctacagcgttgggtggagaaaaatcaattctcatcaaggagaagaatctgtgcctgaacaggttactgtttgcaccctgaatatccttagaggccatttttttaaagtagctttccccaaggcttaccctctccactcacctttttgtcccatcacagctgcttgcttctccaagataaggagcagggaaaggacaaagaggatgatggacttcatcttgcttgaaaaatcttgtctgagaactgagcggatctcttcatttatatgttccttgagtgggtgtgctatgggtggagctgaaatgtcaaaaggcactgccctttcatagcttattagtaaatgccagcttcctcacccctgctcagtgggggataatgtcaaagtccccagggacttagcatggggacataatatcaaaggcaattttttttactttcagaatccccagcaaaattttatcggtctttgtatatcatcatgccagatcgcttgcattatacagaagaaattcagtccggagtaggaaggagactagcttcaggttacaaaagtaattggtggctgacaatgccttcatactctaaatgcgagtttcctttctgatccaataacttaaatactaaattttaggtataactctatactttgtcttgttttaaagtaatcctgagacacattctgttttactcgagaaggagcagtcatagaagtagaatgatacagaagagaaagaaacttcatggaagccaaagaaaaaaatttcaacaaataaatgaggcataccaatgtcaaatgtatctgtgaagttcatcacaaaaaagactaacatgtgtcaaaaactttctgatgttactcactgctagtaatgttaacgagagatgaatacagttgtgttgggttgtcagttgaaggatggagtccagctgaaaccatctcaagaagtctgatttcatggtggaatgagaggtgaggctgtatctggagggtgaggtaagctccagagattttttgaaaggatgagaaaaatttaacatgtttttatgatgataggaacaactgttggaaaaagaagtaagaatgttggtttccaaattggattatttgatgatatttacctaaacaaaaatgtatttaccaaaatacattttttaaataaaagcatttcatacttctgtaataaactgctgaaccctccaacaggctgtgaggaatatttgccaacttcagttcattaaataatgtattgagagtggacctaaagctaaaatttttaccttgggtggaagcatagggtttttttgcttttgttttgttttgttgtgttgtgttgttttgttttgtttttttgcaattgtgaaaacttcttgaaaaatccaaggaaggttttttgtttgtttgtttgtttgttttgttttttttgtttgtttgtttttgagacagagtctcgctctgtcgcccaggctggagtgcagtggcaccatctcggctcactgcaagctgtgcctcccaggttcatgccattctcctgcctcagcttcccaagtagctgggactacaggtgcctgccaccacgcccggctaattttttgtatttttagtagagacggggtttcaccgtgttagccaggatggtctcaatctcctgacctcgtgatccgcccgcctcagcctcccaaactgctgggattacaggcatgagccactgcacccggccagtttctttactttgactgaaaaagtccttgttatgagaagacaacaggagaagcagcaacatttgaacagtgaccctgtatgcattcagaacactgtggagggtagttctggagaaaggacggcttggaaacttattttctattattctctcttaaaatcctaaccttcctgtaagcaatgctatatggaaggggagaggggaaaggccaaccataggaaaaaatgctacttatgccatcaaacttgaagcatgtgagctatgtggtttctctatgagccattctgagatcttaccagttttatctgtttgccctaagggcagtaagtatttccttatggcagggaccccaaaagaaaagagtaaagttttcctgaacacaaatttattgctgtacctgctaatcactataatcttccttacacttcccttaaggaaataccaggaactgttgtgttccaagattaccggaacaaacaagagtctgaaatattaatcttacttatggatcaagaacaaaact

SEQ ID NO: 1562091 - DNA, 4001 bp, Homo sapiens
ctacataatgaagcctgcataaaagctcagaaggacaaagttcagaagaacttttggctgggcatggtggctcacaccccaggagttcgagaccagcctggccaacatggcgaaatcccgtctttattgaaaatacaaaaattagctgggcgtggtggcatacactataatcccagctactccgggaggctgaaacatgagaatcccttggaggttgaagagagccgagatggcgccactgccccagacagagcatggaagctccagacccgttccctctacaccttgtcttacatatcacttcatctgtatctttaaaaatatattaatagtagccataaaaaaagaagaaaatcatgtcctttgcagcaacaaagatgcagctggaggccactatcccaagtgaattaatacagaaacagaaaaccaaatacagcatattctcgcttacaagtgggagctaaacactgggaacacagacacgaagatggcaacaataaacactggagagtccaagagtggggaaggacggtggggggataggggttgaaaaactacctgttggatactgtgttcactgtttgggcaacggaatcattagaaacccaaacctcacgataaggcaatatacccatgtaacaaaactgcatatgtaccctctgaatctaaaattaaaaatacataaatacacaaaataaaatacttttataataaaccagtaaacatgtttccttgagttttgtgaccaaattaatcaaagccaaggagggaggtcacgggaactttgatttataggtggccggtcagaagcacaggtaaaacaacctgaggcttgccattggcacagaaagtgggcacagtcttgtgagactgagccctccacttgtgtgatttgatgctatctccaagtagagagcttcggaattgacttgtagggcaccaagttggcatcccctgcagagctgactgtttgcctgatgtttgggggaaaatccccacacaccacacatcaggtgtcaaaagtgtgttgtgagtacagcaggagaaactgagtgtgctttttctacacacttggtcaattaaatcagctggagaatgaggaatcaaggaatcacgctcctctgaagtgggtaaatgagggaactcagcatattcttttataggccctataattttctctttaaaatgtttacagtttacaaggtgattaaaccttcacttcactgtcacaatcgttctcgaagagaggaatgctggggtgattatcctcggataaatgacttacagcagtcccaaaatattcaggccctggtttccaattttgaataacaatccacaagggcttctttcccttgcacctgaactgcagacaagcctccgctaaaaccccagctttgccacacactctgtagttttggcaaatcccgtgctaggggataaaaatattacttgagccacctagaactaaatgatggcaccttaagaggtgcttcgggaggaaccggagcccctcgctgggagctgtcattccttggtccctctccagctccagaggaacctagtcaggaagcctcgcagggcggagccatccgaattgtaaacaatggcggcctagcctcttccgttccccgaggaacccggagggcgagccgcctaagctggacctgagggtatcgcggatttgcgtctggggccccggagaccctctgtagcccagggcctgctgacatcccgagagcctctggagccaaggcccgtgcagctctggtctcgaggcctttccccgcaaaccgcaggtccggcgaggactcgggaccccgaactcacccagctggcgagggagaagacacccagcacagcccccatggtgacgccagtgatggaggtggccggtcctgaggctgctttctaacacggtggtaactgccagctgaggtgactccccagaaacatgacggtttctcaggccggaaacgcagccttccacagacgcacggatgcgtcacggcgtggccccgcccaccgtccgcgaccggagcggcagaggggggcgcctgtcattggctgagggggaaggtggggctaaaccatcctggggttgcaggaactgtgaaggtgtcattccttacatcatttgtattcattgtgcaaagatctggaagttacagaagtgtacagagaggcacagtacgctcagaatttattctctagttaataggagatctgacaacataaatgcaccgtgccccaatgtaatgaatacgatgaagtagtatgggggaataggctttcaataaaggtgtatttagtgcctcctattgtaaggggaaagtaatttagctgggcagtagtcttggaaggcttctctgaaggatttattttttaatctgcgaactaaaggatgagtccaaattaacctagaaacgatggaaatcgtatcctaaaatgtgggatgcaccccatttgggaaaaatgaatggctctaagggtgcatgaaggacattaagcgatattaaacagcagagtgagaacgtcccatttcaaaccaacaggctagttgtttgaggccagtatggtatttaacatttttctagtatttatctccctttctaacagagtaaagccttcattttccagatctctcaaacaggcaaccatgcctgcagttttaaaatattgttttgttttgaggtgtgtgttagcaataaccttttcatttcttccgagcaatgctgatttcccatttaagcagtgatgtaaatattcctttcaaaatacatgtcaaatttgagagttcacttaaagaagaaaatgaaaacattttttacttacacatataatagtttaggtggaatgtggcaaacaatgatgatgtccggacaacaaggtgtcacacttcaatatcttctcctgtggtgtgttaatcttccctgatagataaaactctctggaaggggattcataattgaattccttctggattgtcagcctttagtctgataagggaaattcatgaaaagcccctctctccatgtgctgttccccaagcaatcatcataccagtgtggcatatttggggatgttatttcctggattccttgaaaatgtattccaaattcatcttttacagaaatggaatgaggctcaaagtttgcccaaggccatgaaaagggctgatgaaagaagaaagagaactactcacatttaataattcctacctctcttttcccagatccctctcctcaccacacatacacaaataccagctcaagtcaagttgcttcaggaccactgaactttccaggtagtccttaacattcttgcttcttcctgtctgagtattgctggtctggacttaagagagctgactgtgataaattttacagatcgaattctaccagaaacatacctgtagtcaaaaagaattaggtttatttagcttgttcagaaagggagaacacatatcagagaaaatataaggtgtcttggtaagaggtgactggggagaacttattttaggatttgggtttatgctgggtaactaaatctaaggagagtttaaggaggaggagaacagttttggattggacacagtcaaggagtagaggcaattcagtgattaggtatcttacaaatttttatccagaaggaagaaggattaaaacaaggctagattagtccttggaaaagtgtgataccctaccttgtcttaacctgaattgactctctcttagctgagggagacagacaaactccattttggctccttcacttgccgctccttacccatcccacttcctcaaggatttaacttgtgcaagctgactcccagcacatcaaagaatgcaattaactgataagatactgtggcaagcgatagctgcagtttccaggaattcacccggttgatagtaccctaagcccctgcatttttgtccggttgatggtacccaaagcccccacatctatcaccttgtgatggatttaaagcccctgcacct

SEQ ID NO: 1562092 - DNA, 4001 bp, Homo sapiens
tgggttggctgaaggccccaggttgatgttcccattggccctggagggctaaagaaagaagtgattatgatcagcagatccctactccttggctacctccctttctcctggcccaggccctgatcccttctccaacaactctactaggcctgcctgcctttttcttttctttttttttcacctgcccgcctgcccgcctccctccctccctccctccttctacccacccacaaatccacttatccaccatcttacccacttctcaaaacagccttgggaggcagctggctgttgtgctaattgaataggcgaggaaactgaggcccagagaggagttgcccagggtctcacaggcaaccaggttgggatacgacccaggtgtctccatgacaaatctcatgatttttccagttcatcttgaagccctatttcaaatctctactctattcaccctgcaagtggctcatttctatgtgctcgcagtaaccctctcagcccctgacattgtctgggacccacagatttccttagcctcgggaagaagtgagcccccgatgatgggtgggggaccaagaaccactcacctgtggacttggggtcccagctgggctagagttcattctgtagcaatgatcaggcagctctggggggacagggaggagcaggcatgagagagttggtgttggggggtcagctccgcccatccagggcttcaggcaccactgccctctccatcctcccctacctgtgcacctgccaccgcctgagggtttcctacccgaggtaagcaacccctgcatggatggaacaagaaatgatatcccctggacccagacttcctaacaaacatctcagaagggataaagggggatggtcagggtgtggcccctcccaggctgattcttttcaagaactggggacacccagggcaacaagacccctgtgagccagggtagctccagaagtccaagatggccagggctggaaggatcttttcagggcataaagtctgaacccatcccccatttcacagatggaaggcctgtggcctaaaaaaggaccttcctagggccacatagccttgtgaagcacaggctgggctctccggactcccatagaggaacaatggcaaccctgaattactgtgcgcagtcccagctgggctctgtgctacgatctccttgccacaaggaattctgcccaatgcctcaggaaaggcagctgccctggaagccttgggctggggccacagagagacccaagactggccaatatctattcggggccaaacaacagaaggtgtgaccagctgatctatgtggccaggaatagtgtcttccttgcttccaccctgcaggggagacggggccagggtgcccaggccctgccacagattgcttggggccccacagtctcatccttgcttggcaaaggctgagagcagagatctcacctgaaagcccagttgccgcgcatctcaagaccttagtcttggcccactgtggggcctgggctgcagcccagcctctctgagtagagatttcctatctttacaagggggggtcctggaggcaccaacctcatggccttcttgggaacagagaaagtgaaggggaactgagaggatcccccagcccaggcttccctgagaggcccagccctgccaagccttaagagcaagctgcagaactgctaaggaagcgcagcctgcccctagccaatgccagacgtgtgtgctcctgcaaacggcccacaacactgccacaccctctcctgggctgaccccagtggccctttggccaggacccggcctccctggtcccacatacctgcgagtctgaggagaggcctctaggagaaccagcagttggaaccgaagacaggcagtggacaagagagcctctctctgttctcccaacaagggcctaagtgtctgtgcctggtgccggcctggccccagcacagagctcacagctcccggcagccgcgagggggctagctgatgtcacgcgggatccggcagagcttaagatgggactggagacttctgttccctggggaacaccatctcaccctagcggggacggtgggaggggtgggcaatagccccagggcagccctggagaccctcagggcttgttagactgtttgggtcagggtatgtgcagcatggtgtgtactgtgtgagtgttttgtgcatagagtgcttccgtgtgtgtctgtctgtggctgtgtatttcaggtatttgtgtcggtttctatgagtctgcgtagatgattgcatgtatgtgtcagtgtgaccacatttgtacatttacatcagcatatgtctgtgcatctgtgactgtgtgtgtcactgtatctcagtgtgtgtggtgtgcatatggatgtgtttcagcgtgtctctgtgtggtacatatcagtgtgtatctttgtatgtgaatatgctgtgtcagtgtgtgtgtatgtgggtgagtgtgagtctgtgtggatgtctgaaggtgtgtgttaagagcagtatgggtgtctattaatatgtgtgtataggtaagtcattgtgtgtgttcatagtggtgtatatcagtgaatttactctggggtgtgtgtgtgtatgtgtgtgcgcgcgtgcatgcacgcatgcgtgcggctagggggcctgtgtatacgaaccctgtgtagaccatctggagctgaagaaaaagtccccagacatcagccatggcagctgagagcccttcgcctcccaaaaacctgcagatgtttcagaggaaggaacctggagcctgggtgtctagctcagtccagcctgccttggtctttaatgagcacttggtccttttggcctttccctgcgggcccctcaagggctctggcccagtcctcagggcaggcctggttggcccacgactctcctgctgcgtaagaaacggtcccagagagcaccctggctcatgaaggccttgctgcctggggcggtcattaggttctcacagggtcccttcctctccccaggatcccgaggggtaggcagatgttctcaagaataaaggagttgatgggcccacagcccctgcccttctcaaactttctgtgtggctacagtatactacaggggagggacacatggggctagggcccagaaagttggtcagggagggaactgagcccaggggcctcaggggttctctgtgggttctgaaatgcggaggatctggaagtgttgaccagagaaaacctgagtgcacagtatcaaagccttccatcttgaacaaaatagaaatgtggaaccaattcatgatcagcaggatgtcatgttgacaaaacacatacccagaacaaggacatttattttcaaaaacaagatcctgatgtggccttcattcagcagcactatttataacagcaaaataattgtgctaatagtaacctaagtgtcccaccacagagcacttcagaacacttgccagctgcaagagctccctctcttgaccatataccgtgtccagatatggtcccatttctttgtaccccttttcagctaaactctttgaaagagttgtctggactccttgtctccagtcctcttcctgttctcttttgagcccgttccaaatgggctctcatcccaacacttcaatgaaaccgtggaccagtgacctctatgtgccaaagccagtgatgagttcctcatcctcatcttattcaacttctctgaagaatttggtgtgctcatgttccccatttggctttaggaactcttggttttccttctagctcactgactgctcttcctccatctcttgtgctggattttcctcctctttttatccttaaacacaggcctatcccagggcttagtctttgggcttctgtctacacgtacttgttctttagttgatcactaccattttagtggtttaaccaactatacttgtcagttcccaaatctttttttttctttctttcttttttttttttttgagacagagtcttgctctgtc

SEQ ID NO: 1562093 - DNA, 4001 bp, Homo sapiens
cccatggacctgtcagaggtgggacccatctttgaaagccaccctaggctgcggcttgagaagcagaagaagaaatgcctgtgcccgagctctggtacctctttcttctttaagatggactttttctgtagtaccttcactgcatagaacgccccatcagacttgcgcttggccagtaggacctgagaagaaacatgaatttgaggccctgtaggtgactttggacttcccaacagcagtacaaggcctcccgcctgcccctgcttttgtctgcaggtgcgagtgctctctcttcatacatacaagtggcagcaggggctggaagaggctgcagaagggaagacccaggcttcccaccctcaccaagtcactcaccttcccgtagttccctttgccgatgactttgaggaagtcgaagtccgtgggctgggcactgggggaagagggaaaaacacggatcagcatttgcaatgtctggaaacctggtgcctgagaacaaacctgggcttctttttaactttagaatggggaaatacagagagccttccaggagccatgcctcctcacccccgaagaaccccatgttctcccagccgaaagagggcttgtaagattcaccctggccccaggggaactcaaattcaagttaaacaacaggcagagggtagagataaaaccagacatactgcacagaaggcctgcatagaaggcagggttctggtacccaaagcccctcagaagggcctgaagtgtggggagttgctaacaatgcagacatttaggtggcattgcaggaagagggttcagcatgggcagaggctggggaatttgtgggagatagagctggggaaaggtcctgggcccagatggcagacagtcttgaatgctagaccagagaatctggattttattcccaaggcaaggggagccaggtatgaggggagtcaagtaggaaaggtgcttgagggaccagaactcactttgggttggctgaaggccccaggttgatgttcccattggccctggagggctaaagaaagaagtgattatgatcagcagatccctactccttggctacctccctttctcctggcccaggccctgatcccttctccaacaactctactaggcctgcctgcctttttcttttctttttttttcacctgcccgcctgcccgcctccctccctccctccctccttctacccacccacaaatccacttatccaccatcttacccacttctcaaaacagccttgggaggcagctggctgttgtgctaattgaataggcgaggaaactgaggcccagagaggagttgcccagggtctcacaggcaaccaggttgggatacgacccaggtgtctccatgacaaatctcatgatttttccagttcatcttgaagccctatttcaaatctctactctattcaccctgcaagtggctcatttctatgtgctcgcagtaaccctctcagcccctgacattgtctgggacccacagatttccttagcctcgggaagaagtgagcccccgatgatgggtgggggaccaagaaccactcacctgtggacttggggtcccagctgggctagagttcattctgtagcaatgatcaggcagctctggggggacagggaggagcaggcatgagagagttggtgttggggggtcagctccgcccatccagggcttcaggcaccactgccctctccatcctcccctacctgtgcacctgccaccgcctgagggtttcctacccgaggtaagcaacccctgcatggatggaacaagaaatgatatcccctggacccagacttcctaacaaacatctcagaagggataaagggggatggtcagggtgtggcccctcccaggctgattcttttcaagaactggggacacccagggcaacaagacccctgtgagccagggtagctccagaagtccaagatggccagggctggaaggatcttttcagggcataaagtctgaacccatcccccatttcacagatggaaggcctgtggcctaaaaaaggaccttcctagggccacatagccttgtgaagcacaggctgggctctccggactcccatagaggaacaatggcaaccctgaattactgtgcgcagtcccagctgggctctgtgctacgatctccttgccacaaggaattctgcccaatgcctcaggaaaggcagctgccctggaagccttgggctggggccacagagagacccaagactggccaatatctattcggggccaaacaacagaaggtgtgaccagctgatctatgtggccaggaatagtgtcttccttgcttccaccctgcaggggagacggggccagggtgcccaggccctgccacagattgcttggggccccacagtctcatccttgcttggcaaaggctgagagcagagatctcacctgaaagcccagttgccgcgcatctcaagaccttagtcttggcccactgtggggcctgggctgcagcccagcctctctgagtagagatttcctatctttacaagggggggtcctggaggcaccaacctcatggccttcttgggaacagagaaagtgaaggggaactgagaggatcccccagcccaggcttccctgagaggcccagccctgccaagccttaagagcaagctgcagaactgctaaggaagcgcagcctgcccctagccaatgccagacgtgtgtgctcctgcaaacggcccacaacactgccacaccctctcctgggctgaccccagtggccctttggccaggacccggcctccctggtcccacatacctgcgagtctgaggagaggcctctaggagaaccagcagttggaaccgaagacaggcagtggacaagagagcctctctctgttctcccaacaagggcctaagtgtctgtgcctggtgccggcctggccccagcacagagctcacagctcccggcagccgcgagggggctagctgatgtcacgcgggatccggcagagcttaagatgggactggagacttctgttccctggggaacaccatctcaccctagcggggacggtgggaggggtgggcaatagccccagggcagccctggagaccctcagggcttgttagactgtttgggtcagggtatgtgcagcatggtgtgtactgtgtgagtgttttgtgcatagagtgcttccgtgtgtgtctgtctgtggctgtgtatttcaggtatttgtgtcggtttctatgagtctgcgtagatgattgcatgtatgtgtcagtgtgaccacatttgtacatttacatcagcatatgtctgtgcatctgtgactgtgtgtgtcactgtatctcagtgtgtgtggtgtgcatatggatgtgtttcagcgtgtctctgtgtggtacatatcagtgtgtatctttgtatgtgaatatgctgtgtcagtgtgtgtgtatgtgggtgagtgtgagtctgtgtggatgtctgaaggtgtgtgttaagagcagtatgggtgtctattaatatgtgtgtataggtaagtcattgtgtgtgttcatagtggtgtatatcagtgaatttactctggggtgtgtgtgtgtatgtgtgtgcgcgcgtgcatgcacgcatgcgtgcggctagggggcctgtgtatacgaaccctgtgtagaccatctggagctgaagaaaaagtccccagacatcagccatggcagctgagagcccttcgcctcccaaaaacctgcagatgtttcagaggaaggaacctggagcctgggtgtctagctcagtccagcctgccttggtctttaatgagcacttggtccttttggcctttccctgcgggcccctcaagggctctggcccagtcctcagggcaggcctggttggcccacgactctcctgctgcgtaagaaacggtcccagagagcaccctggctcatgaaggccttgctgcctggggcggtcattaggttctcacagggtcccttcctctccccaggatcccg

SEQ ID NO: 1562094 - DNA, 4001 bp, Homo sapiens
tccctatacattttgtctactttatattttactttgtagcactgatgccttatcacgtatttattagtttttattttctatctccaactagaacatcagctccaggagggcaaatacttcctgttcaactattgaatcctcagcactgagcacagggcctggaatatagtagatgcccagtacaatttgactaatgaatcaataaatgaattgataaatgttggtacatatataaagtggaaaattacacaaccaaaaactatataaaacctatataaaccaaaacaggaacatacatgtgatacaatatcaagcaaaaaaccaagtttcaaaatagtaggtgttgtaggggtaccaattttgtaaaagaaaaacaaaagacatgtctgcacgtacacatttgtgagcacagctgccaaaaaaagactgcagggtcatgacccaaggtcacagcgggttcttaggttaggttattttaactttttttttttttttttgagatggagtctcgctctgtcgcccaggctggagtgcagtggcgcaatctctgctcactgcaacctccgcctcctgggttcaagcaattctcctgtctcagcctcccaaatagctgggattacgggcatgtgtcacgacgctcggctaatttttgtatttttagtcgagacgaggttccaccatgttggctaggctggtctcaaactcctgacctcaggtgatccgcctgcctcggcctcccaaagtgttaggattacgggtgtgagccactgtacccggccggttattttaacttttatctttgtactattgtgtaaagcttctcaagatattgctgttgagttaatattcaagtactgagttcctggtgggaacctggcatgcccatggcccatcacaccctcccccatcaccttgactgtgacccccatgcctaagcagccctcagttcctaaggctttcttctctctcgcaccacggtgttctaattttctggccagaagctggacatcaatatattctcctaactcttcagactccgcaaactcccactcaagcccctccatgagtcctcaagcctgtccctttcctaacttgccacagcccagacttgcctccctctgtcccactgttacatggacctgcttacagctccctggccctgccaaatggggtgtgggggtgggacagtgtcacacagttctctctccttggaacattccccaacaaacctggtctttccagctcaccttttcacctgttctcattgcctttcctggaagccagatgaccctccgatcccatgcaccctctcctgctgctgtccctgtcttcactgtaacttgttcatttacacgcctgcccagttcaagtgccaacttgatcttattttgttcccacaaccccacgggttaggaactatcatcgtccctgtttcaaggaggagaaaactgaggcaaggacagggaagtgacatgatcaagacagttaataaatgacataaccaggatttgaacccaggccatctgactgcaaagcccacggcctggaatttcaggaagacaatagaaagctagaaaaggaaaaaatgaagtcagtgggaaggaagtgaggatgtaagttggttagttaaggaggaagaaaattaggcagctgagaaagcagatagttgggagggaaggaaggaaaggaaggagggagaagggaaagaagtcgccaaggaagaaaggaaggaaagaaagtaaacaggtactaggaaagatgttagctaggtaactagtcaatctggagaccaataggcgagcaggcaggtatcctgctcacaggtgagcctctcacctgaaaactccaggttcctgctcaggtcctggggagcagccccatgcacggctctgccctcttctctctcttcatggtccttctgactggaggcacaatcctgacttgtcaagcaaccttcccagtcaggaatgacctgtcacccactcgctcctggctcccaaaccggctcaagttcaacctcccagccctgcctgctggaagctggcttcggggccttccagttactaattaaccactggacctgaattaccaagctggctgcacacactggctcctggatgggccctgcctgggggactctctgaattttttaaagcacaacttgttatgtgaccatgggcaactgacttcagctccctgagcctcatgtgaattggtgacggatggtgtgtcctgctggagggacggtttctgaagtccctttcaacactggaactgccgcactctctcaaggtccagcttaagtgctgactcctacacagccttccctgattccctccgctgagtcatcttccctttcgcttggaacctagtgaaccagcaactgaaaggttggtctcacacaacaccctcctccaccccttccctaatgggggccaccagcccctatgttcagtcatttcatggaaacttccaggactgggcagctcatttccccctgagccagcctctggcaatttcttgtgttaagccgaagactgccacccacagcctacccgaccaagcactgccctggcaccgttctgggagaatcacagctgagttgaaacctatgccccactctgcccttcagagatttgaggctcaggaaccagagatgagttcaccctggagaacagggaaggctttctcgggggttgacccaaagcttcccaggccctgggttcttttttttttttctttgagacagagtctcgctctgtcacccaggctggagtgcagtggcgtgatctcagctcactgcaagctccgcctcccaggttcacgccattctccggcctcaacctcccgagtagctgggactacaggcgcccaccaccacgcccagctaatttttgtatttttagtagagatggggtttcactgcattagccaggacggtatcgatctcctgaccttgtgatctgcccgcctcggcctcccaaagtgctgggattacaggcgtgagccaccgcgcctggccggccctgggttctaactcagggcacaggcagggcctggacccctggacaggtaaggaaagctctgcccagtgacccctcctgagcaggctgactttcacactgcttcctccattgcctttccattaaaatgtcaacaactttctggtaattctggtgccttaaacaccggctgctctgctgtgctccggaggagccctgcatggccacacaccccacctccaccaacacacatagcagcatgtgtctggccctggtccagataggggaggtagctggcccaagtgcacagagcaaatcagggcagcgcacaaggtcctgccctttccagagctcctgctgctgctgctgctgtgccaccaagctccctctcctctgctcttccagagctgcttaaaaaacccccaaacacgccacatactggtattggttgcataaagtgtatcaaataattccaacttacagaagaatgtcaaataaaaagtaaaagctttccctccagcccatcttcaatctcatttccagaggcagctgctgttaactaaagggtgacaatccggctgggcgccatggctaatgcctgtaatcccagcactttgggaggctgaggtgggtggatcacgaggtcaggagatcgagaccatcctggctaacatggtgaaaccccatctctactaaaaatacaaaaagttagccaggcgtggtggcgagtgcctgtagtcccagctactcgggaggctgaggcaggagaatggcatgaacctgggagatgcagctttcagtgagccaagatcatgccactgcactccagcctgggcagcagagcaagactccatctcaaaaaaaaaaaaaaaagggtgacaatccttccagatttttgtctatgtcttaatctatatgtatattaatcttaatctatatgtattaatctatataactgcatccattttttttccagaaaatgggccatcagtaattcac

SEQ ID NO: 1562095 - DNA, 4001 bp, Homo sapiens
tgggattacaggcatatgccaccacacccggctaatttttgtatttttagtagagacgaggtttcaccatgttggccaagctggtcttgaatccctggcctcaagtgatccacccgcctcagcctcccaaagtgatgggattacaggcataagccaccgcgcccggcccatctcctttaatttttatcataaatctgtgagacaggaaccatctattgttatcttcgtcatagactgagaaaacagagccaggcaggaaagggataaatcccacctccccagcatcctccagcacggggtaaatcccggggcacttgctgccaaccctgaagctgcatgggagctcctgttccccaaccctttgtgtctccctttctctgcccagcctggcctcaaggacaagccccttcgaagcagtaggaggtggagggaaccatttaacgaagtccttggggctcagcagtgtctctccacttgccctaccctggaggcccaggagcagcctggttttgcatcaggagcaagggttccgtttctgtgggctggagaggggctggtttctgtcaggagcaacagatgcgctcagccacaagggtgtgtccccagacaactcacacttcacttggaggtgaatctcgctctgagccctgtgattggccacggagagctggcagcgcaggatccggccgtggtcctgccaggacatggccatgtggagggtctccaggtggccgacgccggtgggctcaaacttctggctgttgaaggtgacagagcgagcagggtcctggccttgccactgcagtctgacctgctcctgcaggcatacgtagggagtggagcagttgaagtccacctctgtgccctcgagaagctccaccggggaggcaatggtgggcaccctgggctcctctgaggacagagacagcagtgctcaggacccgcttttgccacccctgagatccctcgccctggaaaccccagctgaggagagagccctggggagggggcttttaggggaaggaaagacgctttctactccagccccacttgggtgaatacaagggagaaccaggcctgggcctacgccggggctggaacagaggctgagactggctggggttagattcaggacaagggctggggctgagagccaaggggtccagaagcagcttgggaatccctcccggggggcagccaggccaccccacttatcacctgttactgtgaccaaggtgcctttcacatctgaccagcggttgacctcactgatctcgaagcggaagttgtaggaaccagagtcctcgggctgcaggtccttcagcagcaggttgcacaccctgtgctcggggttccccatgaactcggtgcggccgcggaagcgggcctccaccagcttggggtccgccgagtggctcaccacctgccgctggcccgagtagtcgtagtaccagatggccgtgatgccgtcgggcacctccacgtcggcagggaagctgaagatgcaggggataagcaggcaagaccccttcacaccctgcacgtcctggggactggagacgccccatgaggcctggcctgggggaagaacggcagggggacagaggggagggtgatacaggcctcagggtgccacagagccctgcgacctgccccagagaaggtgccccagctgggctcccaaattctgccctgccccgagaaatgcacacttagagcagcccttctcagtgccccaggggtcagtccactgcccgaggctgctcagaggtttggtagggtggctcgaagacagatggcagcttcctgcccagctcctggccactgcccgattgggccctcccttgacctcagcaaccaaacatgtgacccaggcatagtctaatctgccaagggctggacttatgaaggctggaccctggaagacaggcactaggcccgcaaagcttacctgctgggaagaatgaggccaggaggagaagcttgggcaagaagcccatagcaggttcttgtgctgctcctgttgcctaagagggtggtgcgcactgcgctggctgggctcacaggggcctccagggacacctctgggcactttagccccagcacctgctagaagtccgagcctgtgtccccacctcctctgctggccaacccaataagagggcagggctcttaaagacctctgagtcagacaccagcagagagccaggaggccacgttcccagctcaggctgtgcccaggaatgccctcacttggtggcctgcctcagaaaagcctgtgtgtcccttggccctatcccaagttctgctttcccagcccctcaaggataccaccctaaggcagatgaacagctgtttctccctcttccccacttccctgccccctccccaccacccaaaccaacaggaactggagcccagagatgcccagttactcactccaagacacccagctagaatgatggtttcttcctgaggcttgtctcctaccacctgccttactaactatagaccataatggggctttactgaacttgccgaagtgctgcctttaacagtcactcccctgctcaaaaaccttctgtggctccccattgcccgtgagatgtgaaaagtcctcatttcctgcccccagctctgtccccattccctgctctccgcagacccactctgggggcagttctgtctgctcaagggctccctagctgcccagctctatctccaccacagataatctttgcctgctgaaaccttattcaaccttcaaggagcagcatgaatttggcttccagctggaacttctcctttgaggttcctgtagctaccccagagctatctctattttccttgccttgttttttacagcttgtgagagcccatttctcaggacctagaactgaagatatgtgccccatagcagtgcggagcctaccaggcattcagcaaaccccttagtgactaagagaggggtgaggtctttaggggttcagagctgaggttcagagttggagtggggaggtggcaaggcaagtctaggtttgaaaggtagcatgagagcgctgtggaacacataccccacaaatatgagctcaatgtgtgcggagtgtaccatatccaaaaaggcaggccctcaaccatggagtgcccctggtcagggagtgtctaaggggtaccatagacctgagcccaaaaggaagagatgccagaaacacatataagtgaaactataaaactcttagaagaaaacaggtgaaaatcttcatgaccttggattaggcaatgctttcttaagtatgaaattaaaagcacgaaaaaaaaaaataggtaagttggacttcatcaaaatttaaaacttggccagacacagtggctcatgcctgtgaacccaacactttgggaggctgaggcaggaggatcactttagcccaggagttcaagacgagcctgggcaatactgcaagactctgtctctacgaaaaattaaaaaacaggcctgtggtcccagctactctggaggctgaggtgggaagatcgcttgagcccaggggaggggtcgaggctgcagtgagccatgattgcaccactgcactccagcctgggtgacagagcaagaccctgtctgaaaagaacaaacaacagctgggtgcggtggctcacgcctgtaatcccagcactttgggaggctgaggcatgcagatcacaaggtcaagagattgagaccatcctggccaacatggtgaaaccccgtctctactaaaaatacaaaattagctgggtgtggtggtgtgcacctctagtcctagctactcgggaggctgaggcaggagaatcacctgaacccaggaggcggaggtcacggtgagccaggatcacgccactgtactccagcctggtgacagagtgagactcttctgtctcaaaaaaaaaaaaaaaaaaaaaggatatgaatcaaaggacactatccagagagtgaataaaaggaggacaacccacagaatggg

SEQ ID NO: 1562096 - DNA, 4001 bp, Homo sapiens
ctttggcaaccacagggacaatccaccgtgtttttacataaggatctgttgctcgcagcagctcgctctggggttaccgcggcctcccggctccctctctcccaggcacacactaacaccggtttactctgcgcaccagagggagggctcactcttccctaattgcaacagcttgtctctgttccattccaggcagcatcgggaggacctctgccctcacctcctcccctcacaccctgaagtcaaacatgtggaaagtcgtatgtccatggggacagattctggggaagccggacggccctgctctgaaagccactgtcagtcagccttccccattggaccgggcaggggctgagtgaagcaactcggctcttttgtctcagtgcccagcacagtgcacagagtcagagtccacagagacaaactctcatagaagagacttgggttctacccttggctgtgtgaccttgggcatgtcgctggccctctctgggcctcagtttctgcatctataaccctggttacaggcgtctctccccctattactgctcggcattagccgaaggggtcccagtgccagtctgagaggcctgagcccgcagtttggggagtgcagcggtggggagcgggggggtgcttacctgaccaggcgcaggacgcggcgagcagcaggcagagcagcggcccgaggcggccgggggccgggccggcgggctccatgggccgcggctgcggagcgaggagggagagcggccgtgagtgcgcgctcgggcgggagcaggctggagcggggaaatgactaaggctcccccccttcccccctcccggctgggcctccccccgactccggaacgggcgcctggagcggccgccgccgccgccgcggtttttggagaccccccctccccgccccccaggagaaatggagagacggagactgggagagaccccaagcgcgcgagaaataaagccaggggcggccagagagaggcggcaggagagagaaacagacccaagggagccaggcagagagccagagacacggagaggcgagagggggagaaagagggggagagcgaggagcgaggagcgaggcggcgcgcagaccgacagaccgcgcgggagagaggaccgcgcgagcaggggcgaggggcagcacggccgagcccggccgcgcggagccgcccccgccgctgcccacctgccccgcccgggctccacacggcgcgggcggctgggctcgctcccggcccgcagtcccggccgctgcccccgccctcccggcagcccgaccccctccctccttccctttcccctcctcccgtcttcccgccgcccggggaggcttcggggctccggccccgccggcaccttctctgcgagcgagcgcccgcctgcgcgccccgggggagggagcgagggctgcgagctgcgcgcccggccggggagggcagcgtcctcccccgcgccggcgcccgggccccggctgctgtcccgggaaggcggccccgcgagccgccgcggcccgctggggctcgggactagacgagcctccggctccgacagcgtgcccgttcagaagcccgcgcggctggtccccagccccgaccggtcccgctctgcccctccccgtccctgccgggcccggacctgcgccgcccgcgagggctggaaggcactggaagcgccgccggggctgcccagaggccgggtccccgctccactttgcgcaaacttgtttttctaaggtcagcgctgcgagctggctacatcgtcctcttaaggtggaccggggaagttgcggccgacctcccctcgcctccggactccggccgcgcggctgctccccgcttcccactggcgagaggctggaggcggcgaaggagtcggggcgcgggggcgcggggggcgggggggcgtctgccttttaaccctccccaggaggtcgtgcctctgagccccaaagctgaaggcccctcttgggggtgggtgcgggccggaggggcccgatcctttcagagccgggccgaggtgaaggaaaagaaggaagtaagtgaacgcagggggaaggggagaggaagaagagatgatggtacaaaaatagcgtgtgtgtaggaaggacttcggtgccgcctggaaaagaggcgcggggaggagagggagcgagaagggggctgtggcgcgcaaccagaggggaagggtcggggccttcccagggaggtggaggccccctggccaggtgtctcggtggtggagggcggactgggcgggtgggaggcccaggccggggcgtgtgtgggagagcggggccctgaaggcctgggttccgggagaaggacaagccctgaggaagatgaggggaaggggagccggggccagaggcctggagttggagaggacagaaccccggttttcccggagggaacgccgttcctgtagtagccaggtcagtgatggggagtgccagtgtcgtggtcacctggcagaaggctccgcactgtgggaggaacacaagttcaagaccccgctgctaatgggagagaattttggttcacacagtggcggttaagaggacaggaatgacacaaggtgagagaaggcccaaccctgtaaatggacagaaagttgaggcccggagagggaataggtttgcttaaggccacacagcaaagcttggggtagaaacaagatttgaattcctgattcccaggttaaagacctgtgcaaagtaacaccactgcctcccctcctgccccgagcctcctggtgaaggcatggccctgctgttgtgcaggggggcagggaaggtgccacacttgagaacatgggctgaactccgtgggttcaaatcccccggctactgttatgagctgggtggactggaaagtgccttacctcttctgtgcctcagcttcttcatctgagacgaggccagcgtgagtctcaattgtgaggatttgatgagttaatatttgtaagacatgttaaaaagagcctagcacataccaagtgcaacataagcatttgataaataagtgaagtgtttgacaacagtccttgagaacccacagggttctgggcagcatttgaagtgcaagggaattttcatttctctgggtgtgggagagcacgaggtccctgtccatgaggaatttatattctactaggggagacaggtaagtggacaagtagaaataattaatgaagaacggaagattgaacttagagaaggagaggggtgagcgtatttagataagggggccagtaagacctccctgagacatgggttgctgaatcacaagtagggtcagcaaggcgaagatttggggagaaaggtgttccaggaagagggcccagcacaaggaggggaaggccccaggtggctaggccggaggagagaaagcgcagtatgcaggactggggagggtgggatggtctccaagacctgggtaaagagcctgcgtttattctgcagttgggagacccctagagggttttcagcacgggagggccatgtctgatttatgtgtctaaaaggccagtctgcaagcggagggtggactggagagagaggagcgtggaattgggcaccaatgagaaagattgttctggggttatcctggtatctgaggtgggtgcagggaaggtctccaactcttcaggccacatcgggtctagaccatgaaggtaaccagggaggctcctgggaaaatctgtcaccagactccatctggggtgggagtggagatgggggctgctgatgaagtcagagaagaggcagcctcctgccctggacttccagaaggctctgctgttcactgttcctcaagacacatacacactcacaaacctgctgggggattaggaaactggagattagggaaggataataattgaaccacctgctatttatatatagcacctttggcaaaggcgctcagcagggcttccctcacctctccccctggagggggccctgacccttgttctctgtccacata

SEQ ID NO: 1562097 - DNA, 4001 bp, Homo sapiens
tgtgctcacaagaaaggtgttggtgttcccagccggtgccccaggaaaggcaggctgcccatcggagcacttgctaatcagcgtcactgctcgtttgccagggactgaaccacagcctcctggtcggagaagggtctggaatagacatttagaaattaactcgggcccaattccctgcttcaggaaaattaagcacttgtgagtgacacttgtgcatttccaggccaggaaggatggcagggcaggaactcggacttttgcagggtacaaatggccagctcaggcaggaaggagcagataggagatgccactcactggagagacgtgaactgtatcagtgctcccttcagcccagcaaggacgcaactataactgaaaagaactgggggtggagggtggggtggggtggggggatgcctatgtgaattcctgggtttcaggggaaactgcagggcagagagaagcagctgtctaccccccatacttctccttccacccactctttgctagttctccctttctccctgctatcagatggttaccatctctagtcaaacgcaaaagggggtgttggacactgagctcatctttacctccctcctcaagggtgggaggtacagagagaccccactgcctacaacacagtttcaagacgacaaaaaacaagatccccatttttctctccctcccaactcccttaatgccatttctctgctccccccgccccccacccggtgccctcccaggagacccatggttttgcaaaacccatttaagaagcaagactcctgaatggtgacctcaccctttggtgaacatgcacagtagccttcagagcccgcctgccggcgacagccaggtgtttgatgtaggccaacagaaagacatggtcagagccacaggtaacatccccgcggagcacctgaactgcagggagctgcctggaagctcggggaaggcaggaggaagggggagctgggagcgcctcaaggagcaagaccaccagggagaggctttggcaaccacagggacaatccaccgtgtttttacataaggatctgttgctcgcagcagctcgctctggggttaccgcggcctcccggctccctctctcccaggcacacactaacaccggtttactctgcgcaccagagggagggctcactcttccctaattgcaacagcttgtctctgttccattccaggcagcatcgggaggacctctgccctcacctcctcccctcacaccctgaagtcaaacatgtggaaagtcgtatgtccatggggacagattctggggaagccggacggccctgctctgaaagccactgtcagtcagccttccccattggaccgggcaggggctgagtgaagcaactcggctcttttgtctcagtgcccagcacagtgcacagagtcagagtccacagagacaaactctcatagaagagacttgggttctacccttggctgtgtgaccttgggcatgtcgctggccctctctgggcctcagtttctgcatctataaccctggttacaggcgtctctccccctattactgctcggcattagccgaaggggtcccagtgccagtctgagaggcctgagcccgcagtttggggagtgcagcggtggggagcgggggggtgcttacctgaccaggcgcaggacgcggcgagcagcaggcagagcagcggcccgaggcggccgggggccgggccggcgggctccatgggccgcggctgcggagcgaggagggagagcggccgtgagtgcgcgctcgggcgggagcaggctggagcggggaaatgactaaggctcccccccttcccccctcccggctgggcctccccccgactccggaacgggcgcctggagcggccgccgccgccgccgcggtttttggagaccccccctccccgccccccaggagaaatggagagacggagactgggagagaccccaagcgcgcgagaaataaagccaggggcggccagagagaggcggcaggagagagaaacagacccaagggagccaggcagagagccagagacacggagaggcgagagggggagaaagagggggagagcgaggagcgaggagcgaggcggcgcgcagaccgacagaccgcgcgggagagaggaccgcgcgagcaggggcgaggggcagcacggccgagcccggccgcgcggagccgcccccgccgctgcccacctgccccgcccgggctccacacggcgcgggcggctgggctcgctcccggcccgcagtcccggccgctgcccccgccctcccggcagcccgaccccctccctccttccctttcccctcctcccgtcttcccgccgcccggggaggcttcggggctccggccccgccggcaccttctctgcgagcgagcgcccgcctgcgcgccccgggggagggagcgagggctgcgagctgcgcgcccggccggggagggcagcgtcctcccccgcgccggcgcccgggccccggctgctgtcccgggaaggcggccccgcgagccgccgcggcccgctggggctcgggactagacgagcctccggctccgacagcgtgcccgttcagaagcccgcgcggctggtccccagccccgaccggtcccgctctgcccctccccgtccctgccgggcccggacctgcgccgcccgcgagggctggaaggcactggaagcgccgccggggctgcccagaggccgggtccccgctccactttgcgcaaacttgtttttctaaggtcagcgctgcgagctggctacatcgtcctcttaaggtggaccggggaagttgcggccgacctcccctcgcctccggactccggccgcgcggctgctccccgcttcccactggcgagaggctggaggcggcgaaggagtcggggcgcgggggcgcggggggcgggggggcgtctgccttttaaccctccccaggaggtcgtgcctctgagccccaaagctgaaggcccctcttgggggtgggtgcgggccggaggggcccgatcctttcagagccgggccgaggtgaaggaaaagaaggaagtaagtgaacgcagggggaaggggagaggaagaagagatgatggtacaaaaatagcgtgtgtgtaggaaggacttcggtgccgcctggaaaagaggcgcggggaggagagggagcgagaagggggctgtggcgcgcaaccagaggggaagggtcggggccttcccagggaggtggaggccccctggccaggtgtctcggtggtggagggcggactgggcgggtgggaggcccaggccggggcgtgtgtgggagagcggggccctgaaggcctgggttccgggagaaggacaagccctgaggaagatgaggggaaggggagccggggccagaggcctggagttggagaggacagaaccccggttttcccggagggaacgccgttcctgtagtagccaggtcagtgatggggagtgccagtgtcgtggtcacctggcagaaggctccgcactgtgggaggaacacaagttcaagaccccgctgctaatgggagagaattttggttcacacagtggcggttaagaggacaggaatgacacaaggtgagagaaggcccaaccctgtaaatggacagaaagttgaggcccggagagggaataggtttgcttaaggccacacagcaaagcttggggtagaaacaagatttgaattcctgattcccaggttaaagacctgtgcaaagtaacaccactgcctcccctcctgccccgagcctcctggtgaaggcatggccctgctgttgtgcaggggggcagggaaggtgccacacttgagaacatgggctgaactccgtgggttcaaatcccccggctactgttatgagctgggtggactggaaagtgccttacctcttctgtgcctcagcttcttcatctgagacgaggccagcgtgagtctcaattgtgaggatttgatgagttaatatttgtaagacatgttaa

SEQ ID NO: 1562098 - DNA, 4001 bp, Homo sapiens
tggggtggggggatgcctatgtgaattcctgggtttcaggggaaactgcagggcagagagaagcagctgtctaccccccatacttctccttccacccactctttgctagttctccctttctccctgctatcagatggttaccatctctagtcaaacgcaaaagggggtgttggacactgagctcatctttacctccctcctcaagggtgggaggtacagagagaccccactgcctacaacacagtttcaagacgacaaaaaacaagatccccatttttctctccctcccaactcccttaatgccatttctctgctccccccgccccccacccggtgccctcccaggagacccatggttttgcaaaacccatttaagaagcaagactcctgaatggtgacctcaccctttggtgaacatgcacagtagccttcagagcccgcctgccggcgacagccaggtgtttgatgtaggccaacagaaagacatggtcagagccacaggtaacatccccgcggagcacctgaactgcagggagctgcctggaagctcggggaaggcaggaggaagggggagctgggagcgcctcaaggagcaagaccaccagggagaggctttggcaaccacagggacaatccaccgtgtttttacataaggatctgttgctcgcagcagctcgctctggggttaccgcggcctcccggctccctctctcccaggcacacactaacaccggtttactctgcgcaccagagggagggctcactcttccctaattgcaacagcttgtctctgttccattccaggcagcatcgggaggacctctgccctcacctcctcccctcacaccctgaagtcaaacatgtggaaagtcgtatgtccatggggacagattctggggaagccggacggccctgctctgaaagccactgtcagtcagccttccccattggaccgggcaggggctgagtgaagcaactcggctcttttgtctcagtgcccagcacagtgcacagagtcagagtccacagagacaaactctcatagaagagacttgggttctacccttggctgtgtgaccttgggcatgtcgctggccctctctgggcctcagtttctgcatctataaccctggttacaggcgtctctccccctattactgctcggcattagccgaaggggtcccagtgccagtctgagaggcctgagcccgcagtttggggagtgcagcggtggggagcgggggggtgcttacctgaccaggcgcaggacgcggcgagcagcaggcagagcagcggcccgaggcggccgggggccgggccggcgggctccatgggccgcggctgcggagcgaggagggagagcggccgtgagtgcgcgctcgggcgggagcaggctggagcggggaaatgactaaggctcccccccttcccccctcccggctgggcctccccccgactccggaacgggcgcctggagcggccgccgccgccgccgcggtttttggagaccccccctccccgccccccaggagaaatggagagacggagactgggagagaccccaagcgcgcgagaaataaagccaggggcggccagagagaggcggcaggagagagaaacagacccaagggagccaggcagagagccagagacacggagaggcgagagggggagaaagagggggagagcgaggagcgaggagcgaggcggcgcgcagaccgacagaccgcgcgggagagaggaccgcgcgagcaggggcgaggggcagcacggccgagcccggccgcgcggagccgcccccgccgctgcccacctgccccgcccgggctccacacggcgcgggcggctgggctcgctcccggcccgcagtcccggccgctgcccccgccctcccggcagcccgaccccctccctccttccctttcccctcctcccgtcttcccgccgcccggggaggcttcggggctccggccccgccggcaccttctctgcgagcgagcgcccgcctgcgcgccccgggggagggagcgagggctgcgagctgcgcgcccggccggggagggcagcgtcctcccccgcgccggcgcccgggccccggctgctgtcccgggaaggcggccccgcgagccgccgcggcccgctggggctcgggactagacgagcctccggctccgacagcgtgcccgttcagaagcccgcgcggctggtccccagccccgaccggtcccgctctgcccctccccgtccctgccgggcccggacctgcgccgcccgcgagggctggaaggcactggaagcgccgccggggctgcccagaggccgggtccccgctccactttgcgcaaacttgtttttctaaggtcagcgctgcgagctggctacatcgtcctcttaaggtggaccggggaagttgcggccgacctcccctcgcctccggactccggccgcgcggctgctccccgcttcccactggcgagaggctggaggcggcgaaggagtcggggcgcgggggcgcggggggcgggggggcgtctgccttttaaccctccccaggaggtcgtgcctctgagccccaaagctgaaggcccctcttgggggtgggtgcgggccggaggggcccgatcctttcagagccgggccgaggtgaaggaaaagaaggaagtaagtgaacgcagggggaaggggagaggaagaagagatgatggtacaaaaatagcgtgtgtgtaggaaggacttcggtgccgcctggaaaagaggcgcggggaggagagggagcgagaagggggctgtggcgcgcaaccagaggggaagggtcggggccttcccagggaggtggaggccccctggccaggtgtctcggtggtggagggcggactgggcgggtgggaggcccaggccggggcgtgtgtgggagagcggggccctgaaggcctgggttccgggagaaggacaagccctgaggaagatgaggggaaggggagccggggccagaggcctggagttggagaggacagaaccccggttttcccggagggaacgccgttcctgtagtagccaggtcagtgatggggagtgccagtgtcgtggtcacctggcagaaggctccgcactgtgggaggaacacaagttcaagaccccgctgctaatgggagagaattttggttcacacagtggcggttaagaggacaggaatgacacaaggtgagagaaggcccaaccctgtaaatggacagaaagttgaggcccggagagggaataggtttgcttaaggccacacagcaaagcttggggtagaaacaagatttgaattcctgattcccaggttaaagacctgtgcaaagtaacaccactgcctcccctcctgccccgagcctcctggtgaaggcatggccctgctgttgtgcaggggggcagggaaggtgccacacttgagaacatgggctgaactccgtgggttcaaatcccccggctactgttatgagctgggtggactggaaagtgccttacctcttctgtgcctcagcttcttcatctgagacgaggccagcgtgagtctcaattgtgaggatttgatgagttaatatttgtaagacatgttaaaaagagcctagcacataccaagtgcaacataagcatttgataaataagtgaagtgtttgacaacagtccttgagaacccacagggttctgggcagcatttgaagtgcaagggaattttcatttctctgggtgtgggagagcacgaggtccctgtccatgaggaatttatattctactaggggagacaggtaagtggacaagtagaaataattaatgaagaacggaagattgaacttagagaaggagaggggtgagcgtatttagataagggggccagtaagacctccctgagacatgggttgctgaatcacaagtagggtcagcaaggcgaagatttggggagaaaggtgttccaggaagagggcccagcacaaggaggggaaggccccaggtggctaggc

SEQ ID NO: 1562099 - DNA, 4001 bp, Homo sapiens
cacaaatatatatcaaagtgtgacctattgtgatagtatataagtttgttttgtgtattaaataaaattacaacacacgttaaaatctcattaaaatatctggcccatagaaagtaaaatatgtggcccatagaaagcatccaacacattaataacaaatttagaagtacatacatcacagttgtaactctggttgttgctaacaagtgtggtaggcaataattaattctatgtttacttccctgcattttctaatatttctgctagtagcataacacgactaaaagaatgaactttggagccggtcgacctggacttgaatctcagctgctccactgactgaggtaggggacaatgaatggacaagttcctccctctgcctgagtctttgtttggaaataggggataatagttgcagctttcacacagggatgttgtgaggattagtggagctaaaacaggcaaaatgctaataactgtgtctacatggtaggaagagctcaattgttaaactcttactgctgtcatttgggtacagtgtatgtgtgagaaaaataatttgaaaagtgagacccctgccctctagggcctgtgaggtgacatcacagcagggcccagtggggaattgagaggctgctgtgcccagccctgtggttctggggtcagctccatggcctgagaagggatcaggacaggtaacttgtctgggagctgtgagcagggttctcccaggctgcaccaggaaaggccctccaatcctgcctgtcttgggaaggggaaagaaattatccatgggaaatttaagagaaccaaaggaggttgtagtacctgttatgggctgaatgtgtcccacaaaatgcatgtgttgaagctctaatccccagcacctctgaacgttacagtttgggagacagggtctttaagaagtaatttagttaaatgaggtcattggggtgggccttaatacaacaagactgatattctcataagaagaggagatgaggacacagacacacacagaggaagatcatgtgtttaagacacagagagaaaatggccctgtataagccaaggagagagacttcagtagaaactaaccctgctgacaccttgatcttggacttcagcctccttaactgcaaggaagtaaatatctgtagtttcagccacccagcctgcagttctttgttatggaagccctaggaaaggaatataggacccagtaagcagcaaatgtggaacttcttaaagaggaagaggccacagagaaatgggtggtaagaatcaggtcacaggggagggaggagcatgggggaacagaggacaaagtgaggagcacccttagggaggatggtggctgaacactcccaggatacaccacaccactgccctactcaagtgagcactattacagacttcacatcctcagtttggtgaagagagagggctgggcctagagccacataaccctgttagggtgtctctgagcttactctgtggacttgggcatgtcacttggccctagggcctcaggactggtgaggatttagataatgattcttctctgctttttcaattgaaatattatcaaaatgtaagtaattgttgttgtggtggttgaatcgtcctgtggttcaatgcctctggtagccagctgcagatccacagagaaagtgctcagctccctgattttctgctctcagtcaaagcctaatccttggcctttcttggcagcacttgtcattgtccggaatccctgaaagtccagggacaggccatggctcagtgggcaggaaaaaagattttaaccgaaggcagtgctcacctgtgagtctccccagcagtagcgtcatcagcaggaaaggactaggaaggtggggccaggaggctggcacgggcattctggagaccttaggagcctgctctgtccaaacgtctgtgctgggaagatcgcagactctgctctgaggagagaagacaagccctgcctcccttagttcaagaggaagtggctgcgatggagtgaagcagtaacctgcttctggattgtgaaacagaaatcaggaacagcaagcagctacaatgcaagcagttatgcatgccccatttcaggagaatcagacaggcttagcagaaataatgcttccttcccacctgaggtcttaactccttccatgactcctaaccccatctttatgtcttcttggtgatttgccatttggtgctcttaagccaggaaggacctgtggttatgaaatgtttcctaaactttccatctcaagacctcaggatgtggttggcttgtggtctcattctacaacagcctcaaccaagtgctactcagttggggcaggatgagggatcactggacctgctcagtgttggagaggaacaggtctgctcttgaaatggttccctattccgaacttttataaatataaatggcaaaacttagcccaaattcagtctcatgtggccgttagcactttcatatgcctgcacccagcagaaggaattatttcctgacttcttccaggagaggaagtgggcttagggtaataaggatctgctttgtgaggtgaggtggggattatgggttatggaaaggggatatgtttattatgggggagaatatggagggcagattcctggagcagtcacatcgatttcaatactctttgctctgcacatagaacacctattccattcatcactgtcttcagatgggaactgaggagggagggagaataaataccctaagaagatgtgctaaggagttggggaagttactgggcctgcctaggttcagttttgccttctaaccttgggataataagtctcactgccatgttttagtgaacatcaaaagagataatgactatacatccctgagattcagtaggttattattgatactcatggtgccaggtgaagagagggaactcaaatattgcttttaaatggatttctactgcatgctgagtttcccaccagtggccttctcccatgttccccggacttctggaacccagcttttatggtgtacttggtctacctctgacactctgagatcaatttctccctctggatcctcttcaccctgctttttgtcaatctgtagatgaattccttttcttacaatctccagctgtgtgactttcaacaagacacttgacttctctaagccttaacttaattacatgtaaatggaagttataacatgcaccttgtagtgatatggtaagagtaatataagccatacagaaggtttgattcatatttaattataaccaaaaaattgtggctataattacatttgtgtacagggtgagttcactgcttccctgacatacttgtgctttagaaaaatttccttggtaggagaaatggtttctcctccatcatctgtgactaagaaagacctgtctggaaacctctctttcccatgctgggcttgcaatccttcacctatcatgagtaattgtcaaatgaaattgtaaaagtcatcacatttccatgcaaatttctttttcaatgtggcagatgcacagagggtgaaatcatcacctcctgctccacactcacagaaatgaatataaaaatgataaaatcatgttaatcgatgccaaattacactttaaaacaagaaactagtctctatatgacatgaagggtagtagctgctgtgtttactgcagatgtcctgtgctccaggtactgtgccaagcattttgtcagttacctcattaattcatcactctggtcccatgaaattagcactaccattaacctttttttataggtgaggaaacttgaggcacgcaggcaataatacatttgttcaacatcacccagcttttagaactagaacacaggttgtcacactccatggccttcactatgacacctctcataagaagggagagatatctctcaggaaggaagcagagaagaagccataacgtcaattaggcgcagcctccacagcaaggttgggatag

SEQ ID NO: 1562100 - DNA, 4001 bp, Homo sapiens
tcacttgggctttaggaggtgtcctaggaggtttgcctctgccttgtcagtggagctggaccttctcatctattttccatctgcatcctctgcctttcatggttcctgtatggggctccctttaaaagccttatagaaaatgtgttagccccagtctcctctactgcaaaataggggcactcatatttttctcggggctgctgtgagtattaaatagagaagtggtgaggctcaatcctgggccagctacgtaatttgtgaggccaagtgcaaaacgggaatgcaggtcccttgttcaaaaactattgagcaacacagcagaacattaaaccaagcatggggcccttctaagcaggaggctctgtgccactatatagagggcacacccaagaaccagccctgactcagcttgagatgcagctggactcaaacattccaactgactggtttaagcaacttctcttattttccatctattctattgcaacaatcattgggaatattttttattctgagtagtttagatttctgatttcctagtctagtgcctaaaacatagcagacactcaaaagtacctgtggaatgagacctagcaattatgattcacatcttagaattgaggaaatcagcttagagaattgaagtggtgtcttgagtcatacggccaatgagtaagggagcacctaggtccgaccccacacctgggttctgccaggatctctcctggggatggccaccccggaggaccaaagatgtcatggacagaatctagatctcagtagagcctggagcagaggcccagatgggcaggagatggaatgagcccactgagagccaagtatccctgcctggtagatcagagagttctggactcagaggctgagctatatattcaggggtctcaagactctggagctaacctggcctgcccctgagttagaggaaacatgggaatgataataataatcgccaagagttatcaaatctttgttatgccaggcacttatgggtattatcttgttaaattctcctaagaaagtcccaaggtgggtcctatttttagctccattttacagttggaaaaactgaggctcagaaagaaattacttaaactggttagtggtgaggtttgagcctactgcgtcttaagctgagccagggctggttcatggctgtgccatctatgtagtcgcacagggccctgtgcttagaaggagcccatgcttggtttactgctctgctgtgttgctcaatactttttgaacaaaagaccgcagttttcattttgcagtgggtctcataaactatgcagccggcccagggctgagcctcaccacttttctatttaatactcacagtagccctagagaaaggtcccatgagcgtccctgttttgtagaagaggctcctggggctaaaagagctgcagcatctgacgtgggcataggagcaatcaagctggaagccagtgggtgtgagcgcagagcctgggagcttatcacttcactacgctgcttcttgggacactgggggtgccctctgccggagtcaggcaaattttcagtggacccctctttactctatcttcatggggtcaagcttcttcaggcatggcagagcacttagtgcccctctagggactgaccagccgggggtggaccctgttctatcctagaccccacttacctgaggggacaaggaccagtgccagcagcaggaagcagggaggcaagtgggccaggcaggtgggggccgacatcgtggagcacatggcatcttctgtggtccccaagacttggggctcctctgctctcttgtgagtgttggagtctgaggcggggcccgtggacaaggcagtttctgcgtctcttggccacagctgcttggggaagtgttttcattgcagcaacacaaggctgttggtgcaataggaaggagcccggtcaaagggtttcctgcttttgtgtctgggctgtgattcctgtagtcactgtgctaaaaccttgccataggctccatcctaggtgcccgggagggaggtgggcactgaggtcataggacgcactccagaatcgggtggaatttggagcaaacattggatcttcctcttcttggctgtgcaagatttcaaagtcacttcccatttctgagccttttgtttcttcatctgcagcgtaggaacaacggcagttccctcctcagaacagttttggtaagattatgagaaataatgtgagggcacagaacaatgtaaatgctaaacatattaaccattattattcatgatgtgcagaaagtagaggaggtgacattgcttaagaagaaggatttattataaagcaagccccatgggggcctccttttagcactgcagggagggtacaggcctaattcctaaaagtataatcatgtgtaactctctcagcctctgtttcctggggtccaagtgaaacatactcagattgtgcaaacatttgcgtttgtggcatctttgtttcctgtaagtgatctgaacttcctcaggagcctcctggtgctggctatcaagaaggaaaagcttaatcttgccaattcatgcaatccaggcaatctctttagccacactgtctgggttcaaatcttggctttactcagtctggctgtgtgaccttaggacaatcatttgaccactttatgcctcggtttcctcatctgtaaaacaggaataaaaatgtggtagcatgtgtggggtggagtaagcactctataggctttcaccattgtcttttaggttaactcagtcttttaattaactcagggaaaagtacaagaacaactcagcctttcattatttcacttcctccctcatgcttcagaaggttctgggtgcagaggaagctgaagattctccagcaacagggtggcaggccttggatctgagtatgtcccctgggtcccagaggtctggtgtctactatgaggaggttagtctggcctggtccccaaggactttgcactgggtctgtgactggtcttttctagacttttgaggccttgcattgatacccctgctcaattccattactccctctacttgttctcctgtcaatgagatctatatagtgaaacttctttgaaagggccacaagcctagatgattccaccagaccctcagtactttccatgtcattcttacacgggaatttctgaatcacctgctcatctatgcagatttctttctcagctattgtttttttctaaagttttacttacaaataattttattttaataggcaaggcattgtattggttagctattgctgcataacaaagcaccccaaaatttagaagcttaaaaactaaatgttcagttaatttactattttgtgggttgacaattcagtcagggctccatttggtggttcggtcttctcatctcagcagattttggctgggaatgttcatgcacttgaggtcagctgcaggttggctaggtggctttgttactgcggttgactgattgttaacccaggtacctcagctgtcctctatgtggtctctcatcttccaggacactaacttagtcttgttctcatgaaaggggcagttttgagagacagtgcaaggtacaaggaaacttctgccatattcttttggccacatcaagttacaagaccagacaagattcaaggaatggaaaatagactttgcctcttgttagggaactgcaaagcctaattgcaaaaggtgtggatacaaagagggggtatagaattgtggatatttttgtgatttatctgccatgggcatctacaggtacaaaattcagaggtctcagtgtctcatttatagggctcccagacattactttccttagggttaaccacagtcaccagtttttgaagacattcatttcctttactgtttctgatctagtgctcagaagccaggttgaatatggtttctttgtgatgtcgtggactatgaacaccctgggaagacaggccatgatcccttatgc

SEQ ID NO: 1562101 - DNA, 4001 bp, Homo sapiens
ggactttattttgaatggttttgccatcttactcggtatattccttttctatcgctgaataacaaattacgacaaacttagaggctgaatacaacacatattaattatttcacaatttttgtccatttgtaattcagatatagcttagctgggttctctgcttcaaggtctcaccaagctccactcaaggtgccagctgggctgtgttctcatctgggggtttgactggggaagtgttcattctaagttcactcaggttgttggcagaattcaggtctttgtggttgtaggactgaggccctcaacttctaggggcttccctcagttcattgccatgtgggccttctcacaggcagtttgcaacatggctccttgcttctttaaggccagaagttgcaaaaaaactctagtgtgatagatcttacacaacctaacatactcaagggggagacagtgcatcactttggccatattctatcagatagaagcatgtcacacacaactgagattacataagggtgggatagttgggagtcaccttacagtctgtgtacctcacccaataagtacagttaaaaattcaagtgagttttactagctttaagtatcttaagttagcttttacctaaatatttttagtcatccttaactctccattgaataaaaagaggaagctttatagttacccttcctatgtataaagcacagacagatataaatgcagtacataaaccaacaaagaatatatctaagttattaaaatttcatgttgaggctattatgagttgaattgtatgcctccgaaatatatgttgaagtcttaaccacaagtagctcagaatgtgaccttacttggaaatagagttacagaggaaatcaagttaaaatgaggtcattgaggtgggtgctaatccaatatggtggatgtttttataggaagtggaaatttggacacagagacagacatacatgggagtaagatgatgtgaggatacagggagggtggtgccacctgccatccaacaaatgtttgaggctaccactgctagaagctcagagacagacatggaacagattcaacctcacagtcctcagaaagaaccaaccctgcccacacttcgattttgaatatctagtctccagacctgtgagaaaattaatttctgtaatttaaaccacccagtttgcagtactttttaagagcagccaaatgcagtggcaacagagaaataaaaaactgaatttcacagaaagaagtgtaaaatctgccaggggccaggtgtggtggctcacgcctataatgcgagcactttgggaggccgaggcaggtggaactcttgagctcataagtttgagaccagcctgggcaacatggtgaaaccccatctctacaaaaaagacaaaaattagctgggcatggtggcgcgtgcttgtagtcccagctacttgggagttggaggcacgagaatcacttgagcccaggaggtggaagttgtagtgagccaagatcgcaccactgcactccagcctaggtgacagagtgagaccctgtctcaaaaaaataagtaaaggtaaaaataaaataaaataaattacaccctccagaggctggagggtgagagctgtgatggatgctgtgccccgccctgtgaccataggtgtgagtcgtttacctgagcaaagagatttgcaacagacatggccaccgggagactttgtcagaattggggaccatcccagtgtagtcttctgagttctgcctgttctgggataagatggagaaaaccctcccaaaagaaattctatgggaacaggtgagggagagttcactaaacaggcagaggggagaacccaccacacacatacactgaggccccactcacctgccagttcaagcagcagatacagcagtaaggaaggcagaggtgggtggagtggggaggcagggatgggcattgtggtgaaacctggagcttgctctgcctgaatgcctgtcctggagatgccctcgactcagtgctccgagcagagaagacagttcttgcctctgtgatgtcagaggaaggggattgtgatgagaggaaaggccaggggactgggacactttttcctttgtgattataaaattgaacagacaaggttgcttcaagctaggaagttgctgctggaagtatttagctttgctggggctggggggcttgacacccacagccttatactccttcctgagtttcatcccatctcacaggttctccccaacttcatggcctttgcctatctaggagcctcagacacataggctagacaaaggcctcatccacatgatgcgcaggtatgggtctagctcctgcatgagctcaacatctgggcctgtctgagctgcacagctgaagaaagagacaagatgtctatagcctcacccacttggtaagagttggactttacaatggatgccctttcttgcactccagagtagttagaggtaaaaaacaagcaatatctgctgtgggctcttggcttttctgtgggtccctccatacactaccaggaactgcttcctttttccttcctgcagaggaatcaggcatggctgagaaagacattcgagttgtgcaggtggtgatgatttgtgctttagaggatggaggaggcctgcagggaaggcggagctgcggggaacactctctaggagggagagtaacatgcctacaaacacctgggaaggtgagggctgcctctcctgcttgggctggacctgggaccagctctcagagatgggattggaggggcagaagaaatgcccccagaaagagggaggaagcagcatgttggcatccttctctctcagctctggaatgggttcttcctaagcacaaatgttgtgttcagggacactcagcccacactcagctggtgaccctttaatgtccaagcatccacaggcaggcactggctgccatggctgtttccccattgcctcctcatgacttctgcctcctcctcaggaaccagctagatgtcagggccgggagaggtgttagaccctctaggaaaagaaagcagagccaggctggcacgttctctctgagacgacaagagtccccatccccttgtgatgtcatcatcctatcccgttgttctgaaatgatgaattccacaaaggaattcctatccatggcccctgcttggaactagacaggaacattcctccagcctccatcatcctccccttcccctactctgaggaatcttctcacctttcattagactctaagttccttggagagtcagtactcacgggtcagtatccaagagtgccagctttggaatcagatataatctaggctagaatcctgaacgcacctcctaagagctgagtaatcttgggcccatgatacagacctgtatattctgcaaccttcttgacatcttcatttgtatatatatatatatatgtattttttttttcgagacagagtttcgctcttgttgcccaggctggagtgcaatggtatgacctcggctcactgcaacctctgcctcccgagttcaagtgattctcctgcctcagcctcccgagtagctgagactacaggcgcccaccaccacgcctggctaatttttgtatttttaatagagacagggtttcaccatattggttaggctggtctcgaacttctgacctcagatgatccacctgcctcagcctcccaaagtgctgggatttcaggtgtgagccactgagcctggcctctttgtataccttaaatattcaagtttgagtttcagatctgcactcacaaaccttatcttctcccacaccatgcctgttttgtatatggtaccatcatctaagcagtttgtcaaaccaggaagggactcatgttctataccctcacttatccacttgttaccaagtgaaagggggttgctgcctgatgtgctagaagccaatactgtgacaccaggcttttgagaaaagaaaagctttttattgcaag

SEQ ID NO: 1562102 - DNA, 4001 bp, Homo sapiens
gtatacatacttttgtcaaataaaaataaaataaaatatttattttgttaaaaatttcactgaaaatagaaagagaaccaatgattaaaaatgaaatctcatctgtgcatgtacatgtacatgcataggcacatgtgcatatatatgtgtatataatgtgtatatatacacattcacaaatatatataaaagtttggcttatcatgttagtatataaggttgttttgtgcattaattacaattatgacaaatttaaaaatctcagtaaaatatttggcacatagaaaccatccaacacatttttaacattttgggaaaacatacatacactagtgttttacctctgattgtttctgactggtgtgatgggtgattattaatctaatgtttgcttgcctgcattttctaatatttctacacatagcataacatggttaaaagggtgataaactctggaactggtcaacctggacttgatcccaactgctccatggactgaagtaggggacaatgaacaggttcctgcctctgcctcactccccatttgcaaatagagcacaagagttatagcttccacacagggatgctgtgaggattagttgacttaatacacacaaaatgctaagaagtgcatctgccttacaggaagagagcaattgctgaactattactgctgtcatttgggtacagtgtatgtgtaaaaaaaataatttgaaaagtgagaccttgccctctaagacctgtgagatgacatcacagcagggcccagtgggcaactgagaggctattgtgcccagccctgtgaccgggggtcagctgcatggtctgaaaaaggggtgaagacaggcagcctgtctgggagctgtgaacagggctctctcaggtggcaccaggaaagacctcccaatcctgtctgcctgggggaagggaaaataaattctccagaggaaagtcaagatgaccaagggagatggtggtgcctgttatgggctgaatgtgcccccaaaacgaatgggttgaagccccaatccccagcgccttagaatttgaccatatttggagacaaggtctttaacccatttatgcccgaggttgcaatttttttttaatttgaaaaatcagaccttggcgatgcccttgagcagtaggatataaataactcccgcaagcttagtgatccaataacggagcactaggcataaatgggtgaagcaatttagttaaatgaggtcactggcggggagccttaatccaatatggctgatgttctcataagagaaaatgagaatacagacacacacagaggaagaccatgtgtcaagacacatggaggagatggccttctacaagccaaggagaaagacctcagtagaaactaaccctgctggcatcttgattttgcaattcagcctccagaactgaaagaaagaaagtaaatgtctattgttttagttactgagtctgtggtgctttgttgtggaagccctaagaaaggaatataggacgctgtaagcatgaaatgtggaacttcttaaagaggaggagggcacacaaaaatgggtaggaggactcaagacaggtaaggatttaataatgattcttctgtgtttgtcaaataaaatattataaaaatgtaactaattgtgatggtggcagaagcctcacaaggtttgatgcctctggtagccagctgcagatccacagagaaagtgctcagctccctgatcttctgctcttggacaatgtccagtccttgaccttccttggcagtgcttgtgcttatctgaaattgctgcaagtccaggggcaaggctaggtccaggaagcagggagaaagggttctagcccaatgcaatgctcacctgtaagtcccagcagtagagtcagaagcaggaaaggaccaggaggatggggccaggaggctgggacaggcattttggagacctcagaagcctgctctgttcaaacgtctgttctggggagatgtcaggccctgctctgaagacagaagacaagccctgcctccctcaattcaagaggaagtggctatgatggaatgcaacagtaacctgcttctagattgtgacttacaaatcaggcacagtaggcagctacaaagcaaggagttaatcgtgctccattttcaggataatcagacagggttagcagaaataatgcttcctgcctgcctgggacctgtgctccctcctcgtgtccccaaacccattttcaggtcttcttggtgatttgccatttgaggcttttaagtcaagaaagatctgttgttaggtattgttttctaaagtctttatttcaagaccctaggatgtggttggcttgtggtcttgttctgcaccagcctcaaccaaatgccactccgctggacgtaggagaagagttcacaggacctgctcaacactggagaggaaccagatcttctcctgaaatgattttctattccaaattgctataattggcaacacttagcccaaattcagtctcttgtggaccttagcactttcatgtgcctgcacccagcagaaggaattatttcttgactccttccaggagagaaactgggtttgaggtaataagcaactgctttgtggagtgaggtggggattgtgggttatggaaaggggatagggttatcatgagggaagattatggtgggcaggttcctggggccgtcgcatcaatttcaataccctttcttctacacacagagcacctatttcattcatcactgagttcggatgggaaatgaggaaagaggaaaaatccatgctcctgccaagagtgtgtgccaaggagttggggaagtcgctgggccctcctatgctcagtttcaatctcctaaactgggaatagtaagtctttttgtgcagtgttttagtgacgattaaagaggtaatgagcatatcatgcctgaaacccagtaggtcattattgatactcacggtgccaggtgaagtgcgggaactcaaatgttgcttttgaatggatccctcctgcatgctgagttgcccaccagtggctttctcccagcaacccaggcctcctgagacccagcttatatagtgtatttggactctcgctgccaccctgaaatcagtttctccctctggattctctaaatcccgctccttgttcaaccatagattaattcctcctcttacaatttccagctgtgtgattttcaaaaagacactacttctctgagccttggtttgattgtatgtaaataaatgttagaatatgcaccttgtagagctatggtaggaataatataagccatactgaatgcttgactcataattaattataagcaaaaaaacatggctataattattttctgtgtacaggaagagtccactggttctctgccaccgttgtgccttagaaaagccaccttgttaaaagaaatgatttctcttccagcatctatgactaagaaagacctgtccagaatccttcatctcacatgtgggttttaggttcttaatctgtcatgaataattgtcaaatcaaattgtaaatgttatcatgttttaattgaaagtcctgttttaatgtggcagatgtacacagggtgaaatcttcccctccttctccacacccacagtagtgaaaacacaaaatgaaaagaatatatgaatcaatgtctaattacacttgaatacaagcaattggcttctatatgacatgaaggaattataacagctatcatttattgagagtttcctgtgctccagatatggtgccaagcatttttctattggtaatgtcattaaatcattgctctgaccccatgaggtaagctcaaccattaacctcctttcacaggtgagaaaacccgaggcacatggagagtaatgaatttgctcaagatcacccggcttttagaactggaacataggctgccacactccacagccttcacttttaatggttgtactatgatacctcttgcaggaagggagagacatccctcaggaaga

SEQ ID NO: 1562103 - DNA, 4001 bp, Homo sapiens
ttaagcgatcctcctggggaggatttttacaaacccaagaccaggaaaccccagggagagaacctctggcttgggtagcatgagtgcccacttgaacctggctggagctgtgtggcctcaggcaaagcatgcaagcttcccccgtctcatctgtgaacaaggtgcactacaggcgccacggggctgtggggagagttgcaggagtctggcacagagtgggtgctcagtaaggcttagtttcctttcccctccttcaggaagaccacagttaccacctgcaataaactgagagactccttcctgccgcaggtggagctgggggctgggcccaaaggcagatggagacaggggagctgtactcaggctgaaagcctccccaaagtctctgcagctcccttcacctggtcaaggacttggtcaggtcaaggccaataagcccctgggggcaaaataaagaccatacaatgggccagcctaggaggaggcagagtattagccgcacattttgtaagacagcatcaaatcattaactctacaaatttttgaaaaacttactatgtgccaggcactttccggaggacatgaggcatcgggtgaaaggaaaaagttagtcaacggcagccgagatgagcacgctgcccagaatattgtgttttttttttttttttttttttcagtatctcacttgggtcccatttcagatacagtgaccaagtccctgagaggacaaccatgtgattctgttcatgtagcccattcgtgcaggactgggcctgccatcatgtgtattttgtgcttctgaagatcatttttcagcagtgggggtaagagtgatgaatttggccaggcacagtggctcatgcctgtaatcccagcaatttaggaggctgagacaggaggattgcttgaggccaggagttcgagaccagcctgggcaacatagtgagaacccccacccccacccccaccaccgcctgccatctctacaaaaatataacgaattagctgggcatggtggtacatgcctgtagtctcagctacttgggaggctaaggcaggaggatcacttgagcccagtggttcaagtctatagttagtcataattacgccgctgcactccagcctgggtaacagaatgagaccccaactcaaaaaaaaaaatgaatttggattgagttaaagggagacctctccctctcttccaattgagaaatatcacccctttgagagtgagagtgcactgtaggctctacagctgaaatgtcttgagagatggtagccctcacgttcctgactttggagtctgactgcagcgcagagaggggcccaaagtcacacagcaagtgcgcacctgagatgggactaggacgggcgtgaagacaagctgcacggaagagcgtaagctccaagaggaggtcaaaggtggagcaggtgagtcttggttcttctgggacccccagaaaccacccctctttacagcctcagtagaaccactcccccttctccttgagcttgtttttttcccaacagcaaataaagcccagtcccagtcggggcaggggagaccattcttcctcacctgtctccaggccatccaagaacaaaagcaagcatacttactggtttgtcatcaaaggcttgggaagacagctctgctgagacgcatgctctggctggacaggttagggctttgggggcccttctggaagtctgccagtgtccttggtcctaggacacccagaactctctcagcctgggaggatcttcagggagaggctaggtgttggtttgggtagctcagcatctgtctgcagtcagcagtttgtacaccagggatggatcagctgccccatgctccttagggattctggactggggaaccctcccaagcacagccgagccagggagggaaggcccagggccctttgagctctgtcacagagacacaggcgtggggtccttggagctctagctccgactgcagactctgtggttctcacaaccacccgtttcctctgacggcatcacagaccgtcgaggagccaccttccccaagttcctgtttctaggggagcagctgctgccttgtcatgatcgtggagcaaaaggtttttctctggctttgtggcttagtcttgtccaaggaacacaggactgaggaaaatgagccggagttcccatgctggcctgaccataataatcactcagcgggacttaattgtagcaatttctgggatctcccaaactttctaaatccaagtctccagatagggagcccaggaatctaaattttaaaccctgcaggagattcccttgactgacgagtgtgggaagcactgccttctcagcctttaatgtgtataggaatcacctggggatcttgttgcactgcaggctctgattcagaaggtctggggcagagttcagtattttgcatttctaatacgctcccaggtgacccccatgttgccagtctggggaccacactttgaatagcagcagtatctggacagtggtctccaagtatggtccctagaccagcagcctcagcgggaatttgttagacatgcaaattctcaggccgcatcccagatctatggaatcatactctggaggtaggcccagcaatctgttttcatgcctccaggtgattccgatgcatgcccaggcttgatttttttttttttttttttttttttttttttacagggtcttgctttgtcacccaggatagagtgcagtggcacaatcatagcttagtgcagccttgacccaggctcaagtaatcctcccttctcagccttgagtagctaggactacaggtgtgcaccagcactcctggctaattttaaattttttttgtacagatgaggtttcactgtgctgctccatctaatctcaaactcctggcctcaattgttcctcccacttccacctccctaagtgttgggattacaagcatgagccacagtccatgcccaagcttgagaatcactggtctaggataaagaatctgactctggctgaattgtctttgatcagtgtgttaccttcagtcccactcttcattaagatttaaccacaccctctcgctgcttccccattagggggattagtactcttggagacaaagggcccactgcactgaaatgattcctgactccagctcagcccatgcagccctttctggggccttgccagctacagcactcctgctcaggttctcctttgatcctagggaaggctggtttgatttttatccttgtaggcacttggcacacagagctgaaggagccagagtggaggcacacttctgcaagagagttctaatcaggacgttagaatgggtgacagccactcagggatgtgggccttggcagggagggacttgagcttgagcccaccttcccactcctgctgccatacaactgtaatgcccgtcttcttatgatacgcacatcttcaaaacaagcctcaaggtgcagttcatgaatggggcaggaagtagggaatctctggtctcttcttaaaagaatcccacggcataactctccttttctacttagggaggcacctaagaattacaaaatttaaaatcctaggtctatccactaagaaatatgcactggtgttcctccctggctcctggccagagctgctaaaacccttctaatttcctcggtgacagaagtgttttctgttctaatgaggcaacacttggtgggctcctggatggggactggtcactagaaagacaaagccatcattatgagcttggggctttcagtcccacctcatcctctggagtggggagaggagctcgagattgagttaataattgataatgcttatgtgatgaagcttccataaaaatccctaaagtacgaggttcagagagtttccaggttggtgaacacatccaacacaccagaagggtggcacaccccaactccctgggacccctccagaccttgctctatgtattattattattattttta

SEQ ID NO: 1562104 - DNA, 4001 bp, Homo sapiens
aaatgagctataacttacagaacgaataggagttttcctggctgatggaggtgggagaatgaatgtggacaagaacaccagaagcaaatgaggaaagagaatgacagacttaaggctttggcctttattttgcaagtgatggggggcttctgtggaggagggctagggaaggactggaggcagggaggccagtggagaggatgtggtcgtggccatgtgaggcttggagcagggcgatgatgacagaggggggaccgatgctgccagattcaggataagtttcagaggtgaatggccaagacgtggggatcagttggatttgctggaaagaaaaaaggaagggttgagaatggctccagaatttcttactttcaaatctgggaggctggtaaggtcattcatgaaaatgagaaaagagattatgagaaagatgaagagtggaaggagcccaagaaatccaagtggccacaaccaggaggcgttcggttcccgggactggggccattcggaattccaggcctcaatttggtcatctgtacaatgaggaggtccgccagataaccccctaagggttactctaggggtttcggcgcttgggtttgcttcggggcgagctcacctgcggctcggcagcgacccctggcggtctggggaggcttctcctcctccttctcctcctcctcctcttcctcctcctcttcctcctcctcctcttcctcctcctcctcctcctcctcctcctcctcccctcgctggggccactacaagccgattcgccttgttccttccagacccgagggcctcagagccagggagaggacccctgatgagtgccccctgaggggagactgtgcacgcgcccaggatgctacttctccaccgaaggccagaaggatctttcccctcccctatactctgtgccctgcgtgtaacttccattacaagaccctgcacagggcccgcgaggaagacgcccccaaccccgcctgagctggctcctcccaacccttacggagctcgagcagacaaggagctaagtgggtccccaagagtcgggatcagcgaccctacggcatcctccctgaatctcgctgcccaggatccatactaacttccctgcctcccgtctccttcccgggatccccagtcgctgtccgctaagcctccagggagctagaggattggaggatccgccaggcaccgaggacccgctgacctggcacctgcctcggcaaccctgactcagttttcctcccgccctcgaccccacccccctcccaggccccactcccatcctcctggcccaactcattccctactagtcccgccctttcctgaccccaaaccaacctagtcccgccgcctcccctttaggggctcctgaccatcccccttcaacacacagccccctttttccctagttccacctcctcactctggtcccgctccctactcgagatgtccccgcccctttagtgccctacggcctactctccaccttgaccccggcctttccatcaccagacccgcccccttcgcctccgtccaaaccccttccctggccccacccctttccctcgtggccacgcccacctcgcgtttggcccctccccctccacactttgcgttccgcggccccggccccttggtttcctagtcctggctccattcccctctcaggcctagggctgggacccctccccgcccccggtcttggccctgcccccttcaacagacggtccgccccggcccctccccctcgtcccgcccggccctggcaggccccgccccctgcggcctctacctttgacgtcttcccccgggaggtggcgggggtctgcgaccgaatgccggcgggactctgggtcagggcttctggcgggccctgcggggggcagcgaggtgaccgtgaacctgcggctcatggcgcggaaaggagccaggcggccgcggcaaggtccgggatcgcacaagtggctgcaaccaggctctaggagggagaaagagcggatcccccaaccccctccgcccgcccgccccccgcgagacgcggcgccgcgcagggtcctagtgcccgctgtgcgaagggttcctgaatctggccacttcgctgggaggccctgggctccccagtgccacccgaagggcctgaggaggccatctgcaggtgagagtcgtccctacaacgggggcacctctgttagggtctcctaaacacctggggctcattcattcattcattcattcattcggcacatgtcgatagcgctcctgtgtttcggtcaatggtgcgagggatacgtcggtggatgagatccactggcttcttgccctcaagtggcttaaattctaataaggagaaaaagattataagtgagcaaatgcatagatgagatcatttgagattggatgtatgtttaaaactagggccatgggataatgggtaagagggaggactactttaggggtggcctgagaaggcctcctagaagatgtggtatttgagctgagacctcactgatgagaagggccagctatgcaaagatctagggggaagagttctctagaagaagaaacagcaaatgcagagccttggagtgagaaggagtcccgactgtccaagaaacagcaaggccattgtgtctggaagagagtgagtggagaagagagtgactggagatgagggaggagagaagggcagatcatgtggtcttctgaaggctttggggaggatcctggattttttgagcaggggaatgatgtgatccaatttataatttaacaggatcattctggctgctgggcgaaggttcaactaaagaatggcaagagtagaagctggaaatctaattaggaggctcctgcagaccccaagctggggggtgatgacagccagactagagtggtggcagttgtctgattccagttaggttttgaaagtgaaaccatcaggacccactgatggatcggatgtgacacgtgaccataagagtgaagtcaaggagaaatcctggcaattcacacactgctggtgggagtgtagttaggcaaaaactactttgggaaactatttggaaacatctactgaaggtgaacgtacacatatccttcaacccagcagtttttctcctaggtatatacccgaaagaaatgactacttgtgatcaccaaaagacatttaccatgaatgttcataggggcattgttcataatagccccaaattggaatctaccaaatgcttgtcaacagtaaaatagagaaataagtcgtagtaccttcacacaatggaataccatctacaattctcagaacaatatggatgaatctcacaaatagaaccttgataaaaaagagtccagacacaaaagaatacataccctataacactatttaaatacagtaaaaaatagtcaaagtctatctaagctgttagaagtaatgatagtggcactgggcgcggtggctcacacctgtaatcccagcactttgggaggccaaggctggtggatcatgaggtcacgagttcaagaccagcctggccaagatggtgaaaccccatctctactaaaaatacaaaaattaaccatgtgtagtggtgggtgcctgtaatcctaggtatttgggagactgaggcagagaattgcttgaacctgggaggcggaggttgcagtgagcagagatcatgcgactgcactccagcctgggtgacagaaaaaaaaaaaagtaatgatagtggtaccccttggggagaagaggtagtgattgcaagcaggcttctagggtgctgataatgttttgtttctttctttttttttttttttttttttgtctcttgagacagaatctcactctgtcgcccaggccagagtacagtgtcatgatcttggctcactgcaacctccacctcccagttcaagaaattctcctacctcagcctcccaagtagctgggattacaaggtacccacgaccgtgcccagctaatttttgtatttttagtg

SEQ ID NO: 1562105 - DNA, 4001 bp, Homo sapiens
ctgagcccctgtggaaaccccaaggcctggtgaaaccttggcagagaaagcgggtgctgggaaatgggaccatacctggtgtctgagggaacagagagatgctctccatctgagtccccctctcagagtggaggcatctgaaggggatcccggatggaaagatccgcgtcgggatgcctggcgctgccgcagactcaactttgccaaaccccctccccctccggccagaagcccgcgggggagggggcggatgctggatgaggtgatcccagggtcactggggaggtggatgagagggccagctaggagttctggcacctgtataccactcagcccccaggaggaatgaggagttgcgggaagcggcggggggtgggggggagtcagacaaaggatcagggaccctggtgtccccagcctttccaagcggccacttggccctgagatccaggatccggaggacctcagagtcaaggttgccaatccctagaagaccctgctctttcagccctaggcgccatccgccagagggatctgcgggagtctaggctcatagggtcaagcagtgcccaggggaacgtttgaaggcgctgagcgcagacagcaggcgcgggaggcgcgctagtgcgcaggggacgcagcgccgctggagagtggggggtgggggtggctgacagccgtgatggatggctgagaccgctcgggggcggcggggggcctgggagcctgagggggtggctggccccaagacctcggagcaaggaagccgcggaggagggcgggggagagcgggagcagcgaaaggacttgtcccaagcccctcggctccttgcgagtctccgcacccaccgcagcgcgtccgcagtgtccgcgtcgcggcgctgaggaatcagccactgggaccccatttctgaggcctcactggggaagctagcagagctaactaaaaagactcccccccgccccgccctggaccgccccagggaactgagaggagggggaaagagggaagaaaggagggtgatcttgcttcccgtcctgaataggaacccacgggaaagcgagagagagattctgcaaagtagagctgaaaatctatggaggaagtacgcttcagtctgaggtcggaccttgggaagccttgggggaggggtcccagattgcaccaaggggacaatctgggtgtcttaaggagacaccacagcccggacggggggctgtcatatggctccaaaccccctacacacacacacacacacacacacgcacacacacacatacgcacgcgcgcgcacacacacacacacacacacacacacacacagccacctcttcccccatcttccagatggaagtcttagaacgagggactgcagcagactgcgccccccggctccacgggtgcctgctctgcgccaggacgccggggtcccctgtcggggaaaggagccctcctcccgccgtcgagctccacatcagcccattctaggtcttctatccccttcccaccgcctcctcggtttagctaacccaagtcagcccgaagccgtgggcagcgataatcccccggcccgcagctctgcccccgggcgcggcgcattccagcaccttggacagcgcccggagcattccaatggagctgagctccaggctgcaactggcgcccaccgcccgggtcagtcccagcctcctctctgaaggaggtggcccccgctccgcctctaaccccagagctgcctcctctcctcgctgccccctcccccgccgcccccggaccacagcttacccgggttggctcccccatcgccgtcctcgcagtccgtcaggttgtttagcatggtggcggcgcggcccctggtccggggatggctgcgccgcctcgcccgcgcccctctacccgccttcgccgctctctcgttcgctgtagctctgtctcgctctccgctccacggaggaagaagctgcagtgcccgcccgcccggcgcacacacactcgcacacggacacacgctcacacccgcgcgcgccccctctcagcagcggcgctgctcacctcatcccgtatgcaggaggcgtgagccactggcggggttttggggggagagcgggagggagagagaagagaagatgaggggcgggcagagcccgactagtggcccccttgcacaaaaactgggggattgcgtgggtgggatgaagggggtgcttcgggggacagggcctcgcctcccttgagcagacgcagctccccccacccactctccgggcggggcccggcacgtgggcaggtgccatcccgcgccctaaaaataacggcagggaactaggtcgcggccgcggggaggcggccccgcagcggctgcttgactgggggtctggggtaacccccagggggaagataaagggcactgaagtggccgtggaggtgcgccatggaacatggggcccttgggaagcctctctgcaagactggagaggccagccctgaagtgggggaggagaaccagaccctctttcataccactgctcaagagattggagctggaggcatgtagagcccagggcccataattaagcaatgtgctacccccaggggcgttcaggtcactgggctgactgacccaatctgtcttaaaatgggtggggtagcgcctgagaagttccaaggaactctctcattgtgcttagactgacaagagtcccagcgtcccacccccaagacaagtccctggagcccacagccagggaccttctgactgcggactgatctagagataagacctggtgaggaggagcagaagaggcagcagtgagtttccagggagcactgactttccatcagggatggtgcagcctctagggaggacaggccggtcctgaggctggccagggacagagtgggggagggcggaatgaggccgcctgtcggtttgagaccagattttctcctggggcagaagtgtctaatcccctaatccaggattgctttctgaggcttccagagccgacatgctctctgtcctcctcccctcttcccttaggccaatcccccagaagcttgatcatcctgggacccctcagagcccctagagtccaggtttgagccagtggtgcagacatctcaggaagtggcatcagaggtttgaaagctttgagtctctagaagatctaaacatctgagggtgggagcagatcggggtaaacaatcttcacactggtactagctctctccctggctctctaagttccagaaaagttcttcggttgggaaaagatcagtcattgtatcttacacacagctttcatttcacagatgaaaaaactaaggcccatagagggaaaatgactgcctgtggacataatgccagtggatggcagaatttggtctagcatccagtttgctttactccagtttaggactctcttcattgatagaacttataaaagtcgtcttgcctccatagaagagacaaggatgcagtcatatccatgcccctcagcagcctctgattattagctcctgaaaaacaaacaaacaaacaaacaaacaaacaggcactacatctgagatgtgctttattccttttcttgtgctcaggcttcagaggtgcagggctagaatggactcttggcttgcaactgaaggggaagcctccagaaaacctgcaaaaatcctaaagagccattcatatccctggagaccggggtataggacaggacttttttcaggaccatggacaggatccagggctcagctttacttgtattaatacaatttgtcagtggcttcagattgggtcaaccgtggagttttcagcagctgactcaaaagtgcctctgagggacctaccaatcaagtatcgctgccacttggttttttggatacccaaaggacctttcagggtggagagttagctattcagacaagttgtgggcactggtattcttggctctcccagagaaaaaaaccaccaaaagggtgagatgagtttgaattggtg

SEQ ID NO: 1562106 - DNA, 4001 bp, Homo sapiens
aaaagcacttttaaatgttccaggaatgtgggcctgtgtcaagtgttggtcgcatctcggtgtcatatcacatttccctggttctgccatttactaactgagtggcctggggcaggacttaatttctctgtgtctcatttgcttcttctgtaaaatgggttaatgcatggaaagaacgtaactctataaagtcagctgctgttgttaaaagcatgggtctgaatcccagctctgtcacttattgtgaccctaggacatatttcctattgcccagtgtttcctccaccataaaatggagattataatcctcatctggttgggtttagctggggattcacacaaaactgctagtgctgttggctcagcactgcaaagcacctgcagctccccggtggacgtcaagggatctgaaagtgcagagggttccttagccctttgtgagaggaactaggaaaggaatccactgttcacctaggaacatttgttaaccctttatttcccactgtgggccaagggctaagtgtgcagatggacgattctcctcctgggggcatttgtgacgtttctccagtctccaatatctgccactctccctcttgatacttgcaaagatcattactgcttcctgacagctgcggctacccccactgctactggccactgataccggagatagaaattatttaggcagatattcagggcaaaagagtcctcggcggaatttcccttctaacaaaaaagcagccccagaaatcatttcttttctaacaaagagcagcctgaaaaatccagctgcaaacatagataaggaagctggaagcttgcacgggggaatgctggtagctgtgccaatagagaagggctaactgggggccaggcatgtctaacacgaggctccatcttcccttttcttttaccacgtgtacagtaataaagaaatgggcaacatggcacagctcaggcagagaactcgcctgcataataaaagactggggtgggggtgccgagattcataccctgtgccaatggcacacctgggtccaaccagtttttcacaccctatgtagatcagacagcacctcctcaccagctcatctataaaactcccttgcatttcactgcagatccagcaacccatttttccaggacccctcttgtagcagagcgctattctctttctttcaactattaaatttctgctcttcacctcactctttgtgggtccctgtccttgatctccgtgaccatgagacaacgagcctcgggtgttacccccagacaagcctgcttctccaccgcgttccctgcctcagtggctgccaggtcctgtgccaagcagttggagcatgctcgccacagcttccaccctggctactgtttttactggaccagctggtttcggtcgccttttcacttccaggtttcttgcttccactcttgccctctatggttttctgccagcaaccaatgcaaccctttcaaaacaatcaggtatcaccctgttaaaaaccctgagtcccattaagaacaaaacccaaccttgtaacagggccctgcaggatccggccccgcctctcccatctcatgttctgctcctcccccttgctcactaatgccggccacaccagccttgctgtcggggatgtttcttcttcgccaacttcgcacgccacagcctgcctgggatatactctcttcatctcctgtgtttctggttttccttcacatcttcactcatcactgtctgaaactgtcttatgttccccaggaaagtaagcttcatgttcccctctattagatctccagtgcccggcgcatagtgagtactagtgtattagtccgttctcacactgctgataaagacatacccgagaccgggtaatttataaaggaaaagtttaataactcacagttcagcatggctggggatgcctcagaaaacttataatcatggcagatggggaaacaaacacacccttctccacgtggcagcaggaagtgccgaacaagagggaaaagccccttataaaaccatcagatctcgtgagaactcactcgctatcacgagaacagcacggaggtagccgccccgaggattaaattacctcccactgggtccctcccatgtcacgtggggattacgggaacaattcaagatgagatttggatggggacacagccaaaccctatcaactagggatttgttgacttaatgcacacgagccaaccataccccaacaaagcaggtactagccttatagtacacgtgaggaaactgaggaatgaggcatctcattcatgttgggaatattaattgaaaaacctgtcagctcctgtggcccttggagttccttgaaaataatgttatacgccaatacttattatagtactgtaaagatgcaccatatcccatatctcatttgtcagtggaaagaacacagatttggagccaggtaaaagtacctcttgctacctgtgacgtcttggacaagttcccaccttttggggccagtttctccatctataaaatggggataatgcctaacttaagagttattttagatccaatataaaaattcccagcccaatgcctggcatgcagtaagcaggcaattatattatttttcctctctactagtcacaactacccaggaagggaagttttcactcattcctggccatccgccccatgctgggcacttggggcatgctgactgtggtgaatgaaacagacagggtactggtcctactattatagaatgtttgcttcataagaacaggcactgactgtatcatctctgaacacaatggaatgaagctggcaataacaaaagaaaaattggaacatttacaaatgtgtggaaattaacagatttctaaacaatcaaggggtcaaagaagaaatcacaagggaaattagaaaatactttgagatgaatgaaaacaaaaacacaaaataccaaaactgagagtgtgtgatgacaacagtgtgcagagggaaattcatagctgcaaatgtccatattaagaaacaagacagtaactatgtgaggtgatgggtgttaattagctcagctgtagcaatcatttcataatgtatatcaaaacatcccactgtatactttatacttttttataaaaataaatattcttacaaaaggacaggcgctgtgtctgtctggctcaccattgtacccaatacccaacagggtgccaagtacccaatacccaacagggtgccaaggaacacaaaaggcactcaaaatatgtttgttgattggagtttacaaggaagaaaggtattttcttatccctctcttcccttcccacccaaacatagcttcttctaagaaaagaaactgaggctgggcaaggttaaaagctagctcctggtacttttgcatccacactcagtttacctgtgccttaaaccagacttcatcaaacttcagtcttcacaagtcacttcaccatttttgctctacctacttactgcctgtgatagaaatcaactcagtttgtttagcggtataaacttaaaaggaactttagatcaatcacttgtcttagaaggtaaccacaaaaatacaaagcaataaaaataaaaacatgttaacatgaatttcagttgcctgaaagctgtaagtctgcttttttaaaagagaaattggagttaagcagacttttcattttttgatcatgaccctgaaagagaaatatatttgacatcaaaactcagcacatatccttggtctatatatacacgtgaaagtttcataaaacaatacactgatattttccatgctgtattctatttcattttttaaaatgctggttgtatcccattaaactggtttcaaaataaatataacatgtacacaacaacaacaaaaaaaaacactgggttagagggccagtaagctcagcgagtatcagcaactgagacttcatccttgtctcacaaggactaaaaagagaataatgttctcattatgtggttc

SEQ ID NO: 1562107 - DNA, 4001 bp, Homo sapiens
agagcagagagaagctgtcgggacccctactgagagaatagagaccttgtgttttatctcttcttgccagagagctctgcctatggcctcgcagacagcaatcagtcaaggctcagccacccacacttccaccaaagatgtttcacaaagccttactcaacctctcacatcaatcccagaagctagcggtgtaatcgctccacttacagggaagcaaaacccaaagaggaaaggagattggtccaagatcttaagatccacaggtcagaaagtggcctggggtgggctgagttttgcaaaggtgacctcatccttcttccatcatttattgtgtttttctcttccacgtcgagaaagtctaatagcttagataattccacactaatgaacttgctgtgtgttagccctgggtctccttggaaccactggtgtcaccttcttactccatgtgcccaaggagggctccttcttccaggagaagctccctggtctcagctgatcggtgctgggtaatgcaccactaaattatacctcctctttacttttatttttgtgaacatttaatacctcactgagagatggtgaagcaacttcctggaggtagaagccttatcttacaagcccagtgccctctcatgatgccctggctgggctgggcagggcacaggtgaagaacccaaaagggacctgtggtaccatctccttccagcccccactagtgttgatttcagttatgactcctgaactccacctgcggcctttgatcttacaggggttacttccttggggagactgaaaacagctagggttctggattctgacaagccggggactgaataccgacatagtcacttgctgtgtgactctgagcaagtcactttctctccccgagccttggttttctcctctggaaaatgggtcaaataatctttcccctctgagacgcgttgaaatgattaaataaagtgatacacaaaaggcaaatcctcacccgtagtaagcactcatgaatcttaccgtcctcatcacgtaaggacctggtgcagaaaaagaccagtcactgcttattgggcatttattctgtacaaggtttagttataagagatttacatatattgcctcattgatattcaccgctgccctatgggtgggcactatcatttctcccatttttacacatgagtaaactgaagttcagagaggttaagtgacttgcaccatgtcacacagcttggcacccagtaagtgttcattgtgactgtcgcgtgaaatgtgcaatacagcaccaagcacagaattagagctcaggaaagaaagaattctgctaggcacagtggttcacgtctgtaatcccagtatatgggagaccaaggtgggagaattgcttgagtccaggagttccagaccagcctggacaacatagtgagaccctatctctattaaaaaaaaattagctgggcatgcacctgtagttctagccactagggaggctgcggaaggaggatcgcttaagtccaggagttggaggctgcagtgagctatgatcacatcactgcactccagcctgggtgaccggcgagaacctgtcactgaaacgaaacgaaattattcccatggaagtgagatccagaaggcagggtgggactcaagctctaaggagcagctgggaagagggaagaggcgttaggagcgttcacagcggtccgcggcaggtgcaagggagggaaggcgagggggtctggtggagcctgtctacactgggacctcagcggtctcccaacttggaggcttgggagaagaggatcccgcctgtggttgaccgggggcgcacaggcggaggaggcgttaccttgggcgggagggcgaagaccaccggcagcagcgcgagcggcgtgaacagcagcaccagcagccgccgcgcgctccacaccttcttggccgctgctgccagcgccgccatcagcgcgatcgcctggcggtacgggccggcccgggactgccccgcctggccccggcgccggcttaaagcctgggggagggtcggggaggggactgcgctggggaacccgccctctccctgctcctcctggaggaaaagggtggtgcctgcgcccctgggaccgggtgaaagaggcccgggaacgttggagaaagttaggcactagaattagcaaacgggaccccagccgcagggcagtgtggccttgcctcttggcttcccagcaatgtggcctggggcagctggcttatcctctcctcgcctctgtttactcgcctgtgagatggctgaggatgacaaggcgaggattaaggcgcgtactcctattacccgggttcaaatcctggcacggccacttactcactgcgtggccttcaacaacagcctctgagcctgaaagtggagtggtgataataatagtctacaccatggaatactatgcagtcacaaaaaagaaggacatcatgttttttgcgggaacatggatggagctggaggccattatccttagcaaactaacacaggaacagaaaaccaaatgccgcatgttttcacttataagcgggagctaaatgatgagaacacatggacacatagaggggaacaactgacactgaagcctatgggaggctggagggtgggaggagacagaggatcaggaaaaataactaatgggcactaggcttaatacctggatgacgaaataatctgtgcaacaaatccccatgacacaagtttacctatacaacaaatctgcacatgtacccctgaacttaaaagttaaatttttaaaaatagtctacaccagacaagaaggttgttaggaagtttaaatgagataacacatgtaatgtgattagcgcagtgtctggcagagcaggtgctcaatgagagttattgctgctgatgagttattcttatttttgggtttttttttcttttttttgagatgtagtctcactctgtaacccaggctgggctggggagcagtggagcgatctcggatcactgcaacctctgcctcccgggttcaagcaattcttctgagtagctgggattacaggcgtgtgccaccatatctggctaattttttttttttttttttttgtatttttagtagagatggggtttcaccattttggccaggctggtctcgaactcctggcctcatgatccgcccatctcgggcctcccaaagttctgggattacaggtgtgcgtcaccacgcccggccgttattcttatttttttttaaggggggtgagtcacttctattcacttctgattattctcaggtaaccatacaggagtgcaactgttgggttgcccagtatttgcaatgcttagctttttaagacactgtcaacctgtcttccaaagtgattgtactattttgcacttccatcaacaatgtatgaatcatccagtttctccacatctttgccaacatttggtgttgtcactgtttattttattttaaccattctgacagggacatagtaatagctcattgtggttttaatttctatttccctaatggctagtgatgtttaacatcttttcacatgctaatttgccatctctatatcctctttggtgaactatcttttcctgtcatttgcctgttttctacttgtattatttggttttttacagttgagttttgaaagttctttgcaaattctagatgtcagttctttgccagttacgctgtttgcaaatatttctccccgtctgtagcttgtcttttcagcctcttaactatatatcaccaagcaaacatttctaattttgatgtagttaaatttatcaaatttttcctttggatgatcgggttaagctctctgcatagccttagaccccaaagagtttctcgtatgtttagtttgctttgttctcacagaagtgtccaaggaagagaatacagtcatgggttcttagtttctgtttctggttgggccagtaaagccccttcctcatccctcttttccactcatcacta

SEQ ID NO: 1562108 - DNA, 4001 bp, Homo sapiens
cagacagtcggctacctgaggcctgactaggaccccaggctgggaatcctccatcctgctgggggcgcgggggacggggggtgtgccaagaaccggaaagctttgggcagcttgaacagcttcctcccaccactctgcactccctgagcccagcagcctgcttcctgtgaactttctagagcaaacggcccctgtgcagaagcagcatccacggctgagcaaacaggtggtcacatggcccctccattcagaaaagggaactgtgcggggccgggccaggcgagcagcaaaccggagagtgtgggtgccgccctccagctctgttctcgcctggcccagcctttgtgatgtggctgcaggagggcgggctaggaaaaggcgtgcgtgtggcagccttgacccacaggcccctccagaatccttggcgctacccaataagggcctgcaaaggaagttgaagagctgtggcaagggctcctttttaaacatcgagcctgggagggacgtagtgaaggctgcggcaagggctcctttttaaacatcgagcctgggagggacgtagtgaaggctgcggcaagggctcctttttaaacatcgagcctgggagggacgtagtgaaggcggagccactcaaaccagccgccagtgaggaggccctgaatccctggggagctggccctgcccggcaggcctggatgaacgtgggtgggggaagaggaagagagcaaggggcagggcccgctgagggcagccctcccctctaattggcgcctgacagggctgtgatctgggctgccagcttttcccatgcagccagcgctcccttcatctgggtgccaacatccgatggtggcactgcccctttgggccttcctacaactcttcccagcacttctagggtcctcagccctcatacagctgggaactggtggggccagaaggtgccattaccttgccatggtcagggtaggtaccctggggactcagtgcaggcaggagactgctctggaacccacagggcctgagtctaggcccagggtccagccacttaaggcctcagcccaagacccagagccaaggggttcagcagtgtgggggctgctctcaggagctccctggcagaggccctccccagctgaccaatggcccgcggtcaccatctcgcccggtttctgaggcgtcacctgcccagggagcctcctacaggcagcagtgctggtggccaggcgacctgcccaggccctgcttctccccaccaccaaatgctccgagagctgaagccagcggggagctcgtcctcagcacacagctggcacgtggtggcaggaccccccccaaccccgtccagctgcaggctccagcccgtgccccctacctggcctcctgactgtcctggcgcctgcttgtcagggtcatgcatacacagggtggttccacctggcgaggggtatgcctcctgactgtccaggacaatgcccctggcctggggaacatagccctgcctggaagagccccaggaacactggctgggatagggcacttgccaggtccggtcctggaatctcatggcagggaggaaggacagggcactcacttccttccacctcccacaaggaacacagggggccccacagccagaggagcccgcccagctcagccctccccacctagcatcgtcccacgtggcagtatctcagctccctccccacggccccatctccaccgctcccaccccccctcccctcacccccgccacacctggaccactgggtgtccccggccatgtccctgcgggcctcgtctgggggtggctgcatcgggcttggggtgctcagacggcgtgggcacagctgtgtcccggggctgcctcccagcccaggctgacccacccgggcagcaccgcccaagtccacgtgtcagtcccagcgcgcttccgtctggttctctcaggacttgtcgcccccagacggccaccagggcgggcaggcggggcagggcggggcataccactcgggtgcccgccccaccctgctgacgtcggtccctgctgccccataggagcggggccaacggtcgccctggctgggtcgccctgactgtccgacgcgccctggctcagccccagcagaggttagtgtgggggcagagggggattcccagcagcaggccggtcagactggggcttcagagaagggccctggtggtaagcctggtccaagaggtgccagcccatcccttggacacgacacggagccatggggccgtctgtcctctgtctataaaatggggaatgatggcagtccctgccttaccgatcaaataaaatcagggataaagtcttaaccaagtgcaaagagagtaaaagtacagggtcactgatttttaaaatggatctttcggggcagggatgggtccactcctgagcccttggaccaagcctgggagagctggacaaatccagcgctggcccatgtcttctcagcagatgcctgtgaaggttgtcattggcccctgggttcctggacaaaaggtgtcctgaggacccatcacaggccaggttctgggctcgggggcaggggtgacggggtggggcccccactctgtgtgctcctgctgccatgccaaggatgaagccagcaggggaaggcctcaaccatgcagcctttccccaggaggcggcagggcctgctcctcaggcgttgcccccacctccactagggcccacctcagtccatcctccacgcagcagccaccacccaggggccgagggagacacgtctaaggcagggccttgcacttagaacagacccacatttaccccctccctccccctagccctcaggtctccaacagcccaacccactgcactgcagggcctgctcccagggccctctgaacagaaagacacgggcaccctgaaaagcaaggtcatactttcatccatcctgacgtagggtaggtgaaaagatggtggcagagagaggtttattgccccaaacagccctagcccatagccaggaagtttggaaactgttgctaaacgtatcgctgtcaacagcaccctctttgaggtgattcgcttccattcactctgtgatggtgatttcctaccgagatctgtgatcatgctgcagcagacatttgccatctggttacccaaagtccccttcctcctggagctgatgttctggggcaggtagacaaaaatcaaagtagtgaaaggggtagggaaggggtgttacttcaaataggttgggctgaggaggcacccctggacacctgagtgaaggctggatgagctgaagaaacgggccatgcagggatggctgggtgggtgaaggggccatctcacagggacattataaagctgggtgctggtagtggccagatggaggctctccacgcttctggtggattctgagagctgccccgcacccaagcatctttgaggcctaaggtgaaaaattatgtagggacaatagacagtcaacacctgggttttcaaggacacagggtgaccttgcggacagggcagtcacagccagcacccactggcctctgcttctggaaggctgcgtgcctccctcttgttgggcctggcccacctaacttcttgtttatttcaagtgctgctatagggagacgatgctagagattttcctaaagcaaatccacacctcactacgtatggcgcccgttgctcagcctctgcatccacaccccccacagacgccccaggagaccccgcacagcttcttgtaaaccaagacaagccagccctgggcctggggctcctccctgcaccccacttagccctgcaaccttccagcccaactacaattctcaagatgaggagtccatgaaaaggagactgacagatgacactttcctctgccatgactgacaggcagcagcaagagggaagaccgcggtactggacatcacgtgcgggaactgcctcaaaggtgggggcacctttcgggctgagctaacccagtcaa

SEQ ID NO: 1562109 - DNA, 4001 bp, Homo sapiens
tctacatttttctagccaggtactggttttttttaagctggccgccatactcagctattttttttttttttttatagaaacaggagtcttgctgggttgcctaggctggtcttgaactcttggcctcaaacaatcctcccacctcagcctcccaaagtgctgggattacaggtgtgaaccacaacacccggcccaggtacttcaataggcattttttaaacatgtcaacagatgtttaaacttaattgacttaattgaccgtgccacagtcagagaatacaactgccagacaaccatctaaaatactgtcaacataaaaagttcctgaaatacctattgtcttaaaaaatcaccctccactctaagcaaagaaaccaaaagagaaatgccttggtattaaaagaaagaagctggttgccattttggcaaaggaaatagcctagaaagcagatacctcatgctcaggatgtcacatggaacaggctggacacacctgctgcctccctttaactagcaggtgtgccatgagagcttacactgggcacacccactggtgcccaaaagccattaaattggggatgaatgaaaagagaacagtagtaatacgttcataagtgaccctgatagagccaaccataacccagcacagaattctgattttttgagctgaaaagggccctttatacatctcaccaggttcaaacaccttcaggggaggcaggcaacgtcacctgcaacggtgaaaaaggcaggtgtagacaaccagaaacggtgaggcccaaacccaacagcattcaaatacaaaagcataaaataaaaatgctccagccaccccaattccagccttttgcttcagagaggacgaagccggctgagggaggtcacatggccaattagtgacagctcaaaccagactgcctccggactcccagtcccatgtcctcgcacatcccggggccttctctgcgcgcagatgacccaattgtcagcagggactgcatcttcccccgcccgtctcccagcactgcaagaatagaagtagcacctactacaaacgctgcagacccagaaagcccttatgggtgactttcttccacctgcagttgccctcatttaccctttgccctgacaatcgataatttcccatcagtcacgcttaaacccccagcctgcaggccgacatcctatcagccacccatccaagggggggcatctaggaccaaacgaaggagaaaatcctgcgccttaaagtagtcacactcgaaatgtcattttttccccccgaaaggtggcaaggagggggactcgcgaccccccagggaacaggccagaaaggccccggggtcggaggagctgcttctaaaattacttcgcgcagtctttgtagaagggaagaaagcaagaatgtaaaaggcaccctcttgccgcccctcctgatgcccctgaattccagggggcgagacgatgcccgtgcgcaccaccgggggaggggcgagggaagcgaccccaggacgcgcgggcgcagagcccgggaggaggcggcggcagccagtggggttctgggggcgccccatttgcctccccgctgcgcggcctgagggcccgagcgcgctgtggctcccgtggcgggaaggggtgggtaccccgggggcccggcccggccggcagaacggcaggagctgagggccgccgggcatcttgggccccggggccagggtggccggcgggcgcggggtcccgggagatgggtcggggtgggggcgcgcaggccgcgccgcggggccggtgggtgacagcgcgcgggggccgtgccaggccggcctcgtgggcgcggcgagcacctcgcggccccgccggcaggtgcggcccgcaggccgggcagggggcgcggcggccgggctctcacctggctgcagctcgcgtggttcccgtcctgccgccgcgcctcggcgccgcagtgcccgctgcagcctccgcctccggtccccgcgacagccgcctgcaaaatggcgccgcggaggggcgggccgggggcggggtgcagcggagccgcccgcccccgcgccggtctggggcccacctccctccccgcccccgacccctgccctcgggcctccccccggggaggggctgctccctggcacccggcagcgctccccggaacatcccgggcctcgcacccagccgtccccttcccgttcctttcatttccctcccctgcgcagaaagatcgccccccttcgcgacccttcccaccagtcacacctgttcctggggacccacctggcaagcagagcgctggtccctgagtgtcctggtccaggtcccccctttttaccccgcctgccaccgagccctgtcattgctcgagcgtgataagcaagcagtttgtggtgcattgggctcagtgggttggatgttttaaaacaatttcaccgcttctccacttaggtagccagtttttttaacctaactggagaagaagtccttcttacctcatgcagagatcgtaatacagaccaaggcttttcagacgtgaattctctgggggtcgtgttaggctaggggcgggttcacattcagtggctctggggtgcagcccaaaagtctgcacttctaaattgtccccaggtgatgcccccgggtgaggttcttggaccgctaagcagaaaggccaagtgtaaatccctggccctcggtcttagagctgggcagcctcactttgaggacttcattaagatgcagatggctgggccccacccccagagttgctaaggctggaggtctggcgtgaggctccagaatctgcatttctgccaagttcccaggtgatgctgatgctactggtctggggaccacacgtattgagccactgctgaaatctgaatacaattttttaaatgttctaataattagtactttcttaacaccttccatcttgaaaccgttgtcatggttgctttactaactgaatgataatgtactagttcccgggcaactcttgagaaacagaattgtagacggtgtctgtctgacctcacatggagagaaattgattttataatcagaattatttatgtgttttacacagttttggaaagtgacatcacacatattaatgcagttgggggagcagcaactaaaggaattttatgaaataggcaagtgtggtctgtgtcttgacaataatgtgtcttcccatttatttatctaataactgcatttttatttgcttatatttaattttttagagacaaggtctcactctgtcacccaggctggagtgcaacggcacaattaaggctgcagcatcaaccttccaggctcaagggatcccccaaccttggcctcctaagtagctgggatgacaggaccacaccaccaggtccagctaagcttggttttatgcgtcacgggcgcccatccttaaccttgacaaaatgaaccttctaatttgactgagacctgtctcagatatttgaagttcacaatccctactgggattcagtaagtagggaaaagaaagtgttggattgcaaaattcaataatgtcgaatgttttgatccccgttgaagatggagaaaataaaaaacaaagatgcggccgggcgcggtggctcaagcctgtaatccgagcactttgggaggccgaggcaggcggatcacgaggtcaggagatcgagaccatcctggcaaacacggtgaaaccccgtctctactaaaaatacaaaaaaattagccgggcgtggtggcgggcgcctgtagtcccagctactcgggaggctgaggcaggagaatggcgtgaacccgggaggcggagcttgcagtgagccgagatcgcgccaccgcactccagcctgggcgacagagcaagactccgtctcaaaaacaaaacaaaacaaaacaaaaacaacaacaacaaaaatgctgtgaccagcacccagagaaaaactcacgcattgccccgtaaccatcattctacaccagtgagagcatagagc

SEQ ID NO: 1562110 - DNA, 4001 bp, Homo sapiens
gtctcccccacaaccccctaccccttgaaaaaagagagcgtttaaatgcacacaccctgaactcagaatgttagttctggaatctgtctgacacaaaagcacactggtgggcacggatctatgcccaaggggctcaaagaagcagggtttgcttctgcctcctccaccccagttcactctgcagctccggcagatctgaagcccagctaatggaagtaacctcttaccctcgaatgaccccaaattccttacctaaccattctcccctactcccagcaaataaccttgcttcctgatttttggcaactggtcatgagaagggcatttcctcatcccccacctccccttatccacgaccccactttcccatgagggacctctcttccctgcctcgagtactgaagacccctcctttgggtgtcctccatatttcaatgctgacctccctttctttattttttcttaagatgggtatgttgcccaggctggtctcgaactcctgggctcaagtgaccctcccgcctcagcctcccaaagtgctgggattgcagacatgagtcaccacgctcggccctaccacccttgtctttggaaagtttacatcctcccagttcccacaatcatctccccttctcagctcagcttctcaaaaaagccacgtacagtatttatttcctcctcctcacttccttcctccctttaccccaggcaatctgggctgcattcttgtattcctctgaaactgcccaggtaaattagccatgccctcaaaattgcacaatccagggaatcttttgcatatgcatcttaattttctggaggcatttggcacagctgtattctctcaggataatctctcttcttttgactttgtgactgcatttcctagtggttcttctacttctctgactgtatttttttctttcttctcagattcttcttcctcctgctcccttcaaaaaaggtgttggggataaggagagtgtggctatgtccatttctgttgtccctgcaaaagctcctcaaggccatcacatttctactgcctggatctccttaatgtcctctggatcattcttgctcagaaagtcccaccttggcctctcctggaaccaccccgagtccctaggctggtgcaagtatactccctccatgcatcacagcatttagaaagaaatgtatggaaataagttgtttttctgtttctctccctcactaattgtcagtgcatccagggcagaggtcttggtttatttaattctgtatgccagctcctcacgtggtgcctaccacacagtaagttctcagttcggttactactgaagtactcagttagtactcaatgactttacttgttccaccaaaccaacaggggctgcccgctgatgagaggtgaaatgcgaagggaaagaactcaggattaacccccagggttctggagaattggaaactgaattagtcaaggttctccagagaaacagaaccaacaggatatatagagggatatataaaaggatatgggccaggcgcggtggctcacgcctgtaatcccagcactttgggaggccgaggcgggcggatcatgaggtcaggagatcgagaccatcctggctaacgtggtgaaaccccgtctctactaaaattacaaaaaattagccgggcgtggttgcaggcgcctgtagtcccagctacttgggaggctgaggcaggagaatggactgaacccgggaggcggagcttgcagtgagccaagatcacgccactgcactccagcctgggcgacagagtgagactccgtctcaaaaaaaaaaaaaaaaaaagaggatatgaaagaggggatttattgcaggaattagctcacgtgattctaaaggccaagaagtcccaccgtatgccgtctgcaagctggggaacctggaaagctggtggtgtccttcaccctgagtctgaagatctgagttcctggagctgtgatgtccaagggcaggagaagatgaatggccctgctccagaagagggtgcaaatgtgccttcgccctgcctttttgttctgtctggacccacagtggattggatgatgcctgctcacgtgggtgaaagtggaacttttctgtctactgatttaaatgcttatctcttctgcaaacaccgtcccagtcagacccagaaataatgttttaccagctatctgggcatctcttagcccagacaggttgatacatataattaaccatcagataagccaagtggaaaacataggttacaggcaaaacacagaaggctccagtgccagggtatagaaatgagacttttgggttgggcactgtggcgcagacatgtaatccagcactttggaaggctgaggtgggtggatggcttgagcccaggagtctaagcccagcctgggcaacatggtgaaactccgtgtctatataaaatacaaaattagccggccgcgatggcttacgcctataatcccagcacttagggaggccaaggcatgcagatcacctgaggtcaggagttcaaggccacctggccaagatggtgaaaccccatctctactaaaaatacaaaattagccatgcgtggcggcatgtgcctcccaactactcgggaggttgaagcaggagaatcacttgaacccaggaggcggaggtctcagtgagctgagattgcaccattgcactacagcctgggcaacaagagcaaaactccatctcaaaaagaaaaaaaaaaaattagctagtcatcgtggtgcacgcctgtagttccacctactggggaggctgaggtgggaggatcatttgaactcgggaggtggaggttgcagttagccgagatcgcgtcagcctagcaggctgggagacagaacaagaccttgtcaagacagaaagaaagaaagaaagaaagaaagaaagaaagaaagaaagaaagaaagaaagaaaggaaggaaggaaggaaggaaggaaggaaggaaggaaggaaggaaggaaggaaggaaggaaggaaggaggaaagggagggaagcttttttcaataagggaatttaacctagaccctcatggacacacttagtctttgagggggaaataaggaaaaaggacaaaaatctatcagtagttatataaagtagaaaagaggttgaatgggagggacaggtaaaatgaaaagaaaaagaaaagagtttcaaacaggaagtggatgacagcaaatttgttttgttttgttttgtttttaaagaaaagaggcaaacaaaactgttggaatttgggatactgtcaccctctgggggcatagtgactaagcaaaggcacaggggtcttctgaagagctggccatgtgtgatgtcttgctatgggtgctaggcacacaggcatattcactttgtgagatttcattaacctgcacacttaagtgtgtttctctgtatgtatactacaaaaagttgttttttgtttttttttttgagatggagtttccctcttgttgcccaggctggagtgcaaaggcacagtcttggctcactgcaacctccacctcccaggttctagcgtttctcctgcctcagcctcccgagtagctgggattacaggcacccaccaccacgcctggctaatttttgtgtttttagtagagacggggtttctccatgttggccaggctggtctcaaacgcctgacctcaggtgatccccacctccccccgccccgtctcagcctcccaaagtgctgggattataggtgtgagctaccgcggctgggcttgttccctgtttcaaacagcttggtctctgtctgaggtggggcctggggcacaagaaaaggctcagggtcttgaatgggtcccaggtgctgtctccaggaatgtgtgccttagaaaagagggatgtgtctgtactgcaggatgtgaaggtttaagtttgaatatttctttgatcctagaataaatgagttatacacctcatgcagccttggcgagaaaaggcacagggtccctgg

SEQ ID NO: 1562111 - DNA, 4001 bp, Homo sapiens
cagccccctgtcactgattgacttaactatatgagtcacatccttcacccagaaaaaaatgtcttttatattcttgaaagtggtgggaactctatgtctcatagagccccaacataccagaaaaaaatggccagcgtgtaatccactaggaatagccctttccaaaggtggcatgaactataaactggtttttcactggagaaaaataaaaaaggaaaataaaaatgggattcgggaaaacccccttagtgagactgtcagtagacagaagtctggcagatgtgaatctgccctgggagagattctgcttccctcacaccggcacggcccccttcctgatgtcagaacccaaggctacgggatctgagatccaggagagcaatggagagagccgtggagtcttgaacagcttcactgaagaccaagacggactctctgctattaccataaatgatgaagtctgtcaagcggtctgctaagactgaatgaagactgacgcctgtttcacttccccaccaagcaggagaccagccaagctgggggagatccctttttaaattcatggcacctttgaaaatattttacggtgactatcaaaatgtctttattctgcacctcatgacatcttgcattagagctacgtcgacctcaacaccacagcacatacttgtaactgtttttttgtttgtttgttttgttttgttttgtttctttctcacaaccctttacatggctgttttcccactaatcgtgccacttccacggccgggatataaaaccattttacaacagttattctcccatgtttttccttcattttatagacagctgaatcccaggatcgaagctgtttcagcagacaactgttgggagcacacaagatctatttcagctcaagaaaggccaaggacaaagacaagacaaaagttgtgggttaaagggcagactttgcgcagagcaccggtagaggagcggacagtgtgatgcgtggtccactgcaaaccatttcttccacagcagcagctctgcaaaagggacctctgaggaagaattccctgtcttcccagtgagtggtcattttaggagaacaagtcccctactagcccatagctggagggccaacactttttctctccctgaagttcccggcacctgttctgaaagggggttgaagagctctctactcgggccatcccgcctgctctctggatggagaacatacggacaactgtgtgttaagcagtccccttgaatccttcagcaagccaaggagtatacaggtggtcacctgcacaggtgccgggtctaccaccacaactttatccctggccttgggggctgatggagagtaagactccccaccaccgccaccagcagtacctccagctcgcgagtaagcagcgcacaggcgggcacaggtaaatgttcccagggcggccagacgcctaagcctgctggctgctggcgctcagggtccccacctccatgcctctgcgtggggcagggggagtcctcgtgcctggcatcccactccccccgccaacccagcccgcttatcctggggctccggccgggccgcccgaaggagccccgcgcccagccccgggagccccgagccgccggagccgcagcgcccactcggggcaggcagcgtgcactcacccttctgctctcgcaggctcgacagcgaccagagcagcagcgccaccgaggccaggaagcagagctggctcagcagaaggtccctccggcggcggcggcggcggcggcgacgcgcgcggtcctcgtcgccggacggccgcatcctcgggcggccgggcggcggcctcggcgggcggcggccgctcctgtcgcgggcggccgcggcggggacagcggcaggaggcagccctgcgcgcagcagccgcgcgtcctcgctgcgctcccacccggccgccgcctccgcctcctcttcctcctcctcgccgctgcccgtctcctcgtcgtcgccctcctcgtcgctatcgcccagtccctcctcccctccctcctcctcctcctcgccgctcgcccgcgccgccgcctcccggcgctcggggtcccgctcctcctcgcgcgccatggctcccacgctccgcgcccgcgctcggcctggggcggcggcgcggcgggggcggcgggggcggccgggaggcgggggcggagggggcagaggaggaggagcggggaaggaccgacggtaggagggcccgccgctggccaactccgccggttggcaaagccaccccggactggctctggcctcgccggctgcaggagcgcctcgcggggccgcccgcctattccatggtcggcgcgatgggggccggggccgggccggagcgaacagggagcaccgagcgagctgggagcatgagctagcgcagctcccggcagcctgcagcggcgaggctggtcgggccagggttggcggggggcagtgcctgggacacagcccggcgctggccggcatggcggggagggggcgcgctgggaggagactgggctggggagggatccctgtgtgcagtccttcaacccttctgtgccaggggaagagggacggcgcagggggccccctctcgggaagcacacacgctgcctcccagaggccgatcttcaccaagaaggattcgctggaaactttcggaaaaccgaggggctcttcagcctcctctctacgtgctacctggagtcggggcgccgcgagtgcgcttggctgcccgcgcccagcctctggcctcgcctcttctcgcgggcctcccgggtttccctctgcccccttgcggggatccccctgtgcgcccgactcgggatctggaacaggcctccccagaggctgttagttccataagggtgtccggctcccccctctgtcttgggctcacacttcgctttctgttcgtgctggaccaagtccaatactgtggctgatcgaagtggggacagctggcacggtccctggagaggcggcctgaagaggcttctggccttgtgcaggtaacaccagcctgccctacctccaacgttagaatcttagtcctcccatttcccccattctaggtctcctgcccctccttgctgaaggtgtgggctgccctagagatggctggactcacgacctgccgcaggtgcccatttggaggggatccctggccatcccagacacagcccactctccctcattgggcttccctggactcttcccagatgctagcctggggctgctggctgggctgaggaggagatgccattgttggggcggagggtgggggggcgctgaaaacaaaagaccttgtccagaaagggatcacctgaaaccaggtgtctgtctaggtgactgtctccatggaatccattcagatcagggaatctagcttcataccctaaggaggtgggaaggaagcagagaacctctgtataaggctcccctgtctaggtctgttcaaatgtgtccccacctgtgactgacctaccccccccgacctcctcccagacaatccctgacagcgcccggggacagcaaggtcacagcaaagggcaaaggaagtggttataggtggcctcctttccagagaaaggccatctcacccagggagaccagagacttttcctttgtgggtatatcatttatgactgctgttctcagcctggcatcttccagacactcagagtacctcccccacaatgcctgagtggttttccctttgctttggctgcagatactaaggagggtgtaaaaatacgagttcatccgtgctggagtgtgtggggagaattctctagttgtgttatctccatcaagcttttgcagacacagaaaagaaagtttaggagctgagaagaattcaactaaccaggaaagtcactcaaatagtgttttctagtgaaaacgagggaaaatagaaggtgagagagggaatctggaattaattgagttaggaaatgaacacaagctccaggggaaaataccataggctcaa

SEQ ID NO: 1562112 - DNA, 4001 bp, Homo sapiens
acacccagccctcgctctgcccatagaaggcactcagcaaatggctgttgggttgatttagcaggaataggaggtgcaggaacaaggggctagggctaagctgagtgtccttaagaagaccttgacctctctgggcctcatttttttctcaggctctggggcactgtgctgtgggggttaagaggatggactctcctgtcagagccggaactggtcaccagttttaccattaatccaccatgacaggccacgtggtgcagtggttaggaatgcagactggagtcagaatgctggggctccttcccagcttctcctctccatagctgtgtgaccttggggaactcacctcacctctctgggcttccccatctacaaatgggatattaatgcctaccttctatgcttacctacatcatagccagtgttagcgactgtgattctccacagaacgactcagagcaaactttgagaagttaattcagggccgggcgcggaggctcacgcctgtaatcccaagccgaggcagccggatcacgaggtcaggagatcaagacatcctggccaacatggtgaaacccactctctactaaaaatacaaaaattagctgggcgtggtggtgtatgcctgtaatcccagctacttgggaggctgaggcaggagaattgcttgaaccagggagctggaggttgcagtgagcgggatcacgccactgcactccagcctggcgacagagtgatcatctcaaaaaaaagaaaaaaaaaagaaaagataattcaggtcacggccccgctccagcttaaaacccttctccagcttgccgtggcatttgcaataaaatctgaacttctcaccacggcttacaaagccctgcacacctctctgccatccctttgacctcagtgccctgcccgctgtgctctggccatcctggcctgggccacacaaactcattcctgcctgagggcctttgcactgttgctgccacctggaagctctttctccagatctcagcaagacccgcttctgaggaagttctcagctccaaaacgtcctactccagaaaacccaccctgaccacctacccaaggaacccacgcccttggccttcacgccaccccattttatgggttccacaacaccttatctctctctgaagttattcataaacgtgtttacccagctgctcaatcagaatgccacctccatgagagagaggtttattgtctattttgttcattgctgaagctctaacccctatatcaatgtctggcacgtagtaggtgctcactcaagaatcaacgactgatccttcgaggcttctgaatgcagagagaaaaatagagccctagtcccgagtggcaacaaagccattccccacgcgtcccaccccaatgctgtgttagaatctccttctctgtcccctctctgcagaatcacgtccagaggagggggttcgtctgttttgttcgcagtttcgttcgcgacagcgtccccaggcccacaacagcgcctggggcacaaccgcgctcagcgaatcgatgaactgctttgcttctttcggagcctccatttcttcatctgcagaccaggaacagctgcacttgcctggggctgtcggatcagggcgcccgggagagtgcctgggcccgagtgggcgctgcagcaagtgaggggccacttttccggggcagaaaggaagatggaaggaagcgcgaccgagccccgtcccagcccccgccgcaggcctgcagtctcgggctggccacccgagaggcggtatccggccggggcggccctgggggagccagggggcgcgcactcttaggggagcgtgggggcggtgtctacaccctgggaaggggtcgggcttccagcaggcagcgcccgatcgggacttacccatggcgagcgggactcggcggcgtgctgggggcgctgaggggccgggcgcgcatcccccgccggagtccccaacgccgctgccgccggacaaactttccggcccgcccccgcctctgtccctcctgccctgccctcccgcgcgcagcgccgccaacgccacgtcggccagccaggccccgaggcctggaggcgggacggaggggagcccaggaccgcccccggccgccccaggcctggcaaggaccccctccctcgcccactgtcctcccgggggcccccacccgccatctcccgggtccccttcgttggtagtcctcccctgggggggacacaccagcaagccatcctccctggtagaagaccccacacgcactgtcttcccctggcctctttgcagggaagaggtgccccaatcactggtccacacttgtctggcctccccagcgtgcgcacacacacaacacacacaacacacacatctacaccgagtgagacactcgcgcatacccactggagccgctcactctctcatggattcatccctcattcactccacgcttgggtttggacaccaccacataccaggcactacgctaggcttgggatgggccgaagaacaaaacagaacaggtcttttgtttaccttctaggaggggaagagtttacattctaggaggggaagacgaaaaagaagtaactaaaggatcctgagaaatatcagctagtgataaagactaggcagaaagttaaactacggtggtgggttaggcagacacaggtggctgctttagcttgctgatctgagaagaggatatctgagcagagatccggcattccccgcagggggaacagcaaaggcaaaggccccggggtgggaaggagcttatggggtacaaaaaacgcagaaatgaagccagagtgtctggagcagaggagaagacagggagagaggagggagatgggagctaagggaggggctttggtgggccagggtcaggaatgtagatttcaaccccatcagcaggacagataactggggagttctaactggttaagggccagaatactcagccttcccacctgggaggctgttgcaaggtgagaagttggtttgggctcatgtcactgtggtgaggttggagaaaagtaggcagatcacatatatatgctccgtaagaacttacagactggaagaggggcagcttgtggctgggaaaggagatccagagttctgtcttggctgtgtgacatttgaggtgctcagcaggcatccacgtggaaataggtgggcagttggctatgagcctgggattcaggaaaggggtaggctggggacactgccactaatgctcactcaggcaaaaatgcacgtacaagcccagcactcacatgggcgcagccttatccagcctctcaatacgtgttcacagataggcacctttgcatgtgcaccagtggctgtaccctcaccagtcaaagtcacagcgacccctaccgtacaggtggatacacaggcattcttccatgctgaaggcacaagcaggtatctcagcaaagatgacagcatccataagacctctgaaccaggggatccttgcacagtttcaaaaataataatagctggggcagtttgaaaacatggctccagaattcgttgttccttcccttgaaataaaagtgggcttgtgactggtttgatcagtagcctgcagagtgacactgtgtaacttctgaggctgggtcactggaatactggtgcctggatccctgagccttcatataaaaagtctgattacactgagaccctcctggtattcgtggcctagtggcatcctcttctcttctagatgtcactagaagtatcacttagcaacgtctaatgaatagaagacggcaaatatggtggatgtcattttcggattaggttataaatgatttctgtgttgttcagtttcgagatctctcacttgtttgctctgatgaagcaattgagctgccatgttttgagcttcccaatggagaggcccacatggagcgaagctattgaatcacatagctaatgcctccaggcaataaccagtgagggactaaagccctt

SEQ ID NO: 1562113 - DNA, 4001 bp, Homo sapiens
acgggccccccgccttagaacttcgggtgggtccagggagtccctaatcctgagctgcccctgttcaccaagtccggtgagactggtgggcagagcgtcttggaggagctggccccagggcttggggagaaacccccccggcacaggaaagggttggcagacgtgtgtggccagccgcgtggaggtgagcaggtcagggaggccagaaggcctgggtcctgccgctttggcctcagtagggggcactgagggtgcgggagtccattttagaaaggagtcccaggtttgagggctctgcttgccccacagaggctgggtggctgtaggttctgagccctgtccccacccacacccctaaatgcagacatctgagtcttacctgggctgaaggctgcaaccggggcccccagaaggagagggctggtggacaggcttgtaagggcagcggcagccatgacctcgtccagccgggcttttcctggggtggctctggaggagatgggggcggggtgcgggtgacccagccagagctctgggcccctcccctggtcggtccacgtgcaggcctgggcacgcgtgcacaccaggctccccactcccagccctgggcatgaggcctggctcctcccccagctcaggttgcagagagagctgaaagccacccggagccgccaggagcagggccagggtctcctgaagcctgagttctccacatcgcgggcttggctccactgtggttccttcagatactggggctgggcaggggtctgaagccctggcagaggggcgggccaggcccaggcctccccccatcacacattaaccagggttgtgcaacagcagctgtgggcctcacgccaggcctgggaggtgggagtggccagcagccggcagcagccagggggagactgggctggaagcacgggcagctccccaggccccagcgagccaggccagggcccgcccctgccctggcagccagaccgaggtgtccggcctggcaggggttgggaggtggcggtcaggagccccagggattcctggacagtcgccccatgccgaccgcgcagcctcttctgcacagagacgcacagccacccgctccgggttctgagctctagccccgaggaactgcggtggagggaggtgtagggactcccagtcatcgatcatttctgctcagctcctccagggctgaagagcttgggggtggctggtaattacaaacctggggccctgacctggcctccgtcggggccggtgtctccgcaccccacccaccgcccctgcgcacaccgagtcccgaggcaccgggcctcccgctcacctctgcgctgggacggggatgtgcgccgacggagtccggggccccgccgccgcccccgtccacgtccggggggcccccaggtccgaggcccgcggctccgactcctgcggccgcgcgaactccaagcccgcgaagccgccgcccacggaagagccctgcggatggggagggggcagactcagcggaggcggtggccgggggaggggggtccctcaacctccgccgcggatccgctcggcgcccgcctcgaaaaccggctgcggccggtgtggacggcgcggccccgcccccggccccgcccccagcccggcgcggcgggaagggctccccggccgcccggcgcagccccggcgggacccacggacacgcgcggaccgacgcggccgccctccccgctgccccgcccccgggggcccgaagtttgggcagcactgacgccatctttgcagcgagagaaacttggtcggcgcccccgcccaccggcgcccggtacctgcggcggcgtgggcaccgtcacgggcgcggcgcgcggccccggaccctccgcgcgcagccacggcgcctcggcccgcagcgcactggggtcccggccggcggcgcggggcggggggcgctccatggccggccggccgggcgccgaggctgcagcggcgagggctgactctcaggacgcggccccgggccgggccgggctggccgggccgccgacccccgccctggatccggccgccgcccgcgccgcgccgcccggaggctgcccggcccgccccgccccgccccgtctcgtcccgccccgccccgccccgtcccgtcccgtcccggcgcgcgcattggccgcgcggcgtccacaccgcaggcgggcgggcccggccggccgcgctcccgccggccagcgcttcgaggccccgccccgggcccgccccctccgggtcgctcccgcgctggcctagggagggaggcccggcccggcacagctccgaggcctccgcccacctcgcgcgcccgcgcgccccgccggggagggcccgttccccacgggcgcgctcgcagagctgccagagccggggaaggggccgcgattgcttggcgggcttcccggcagcaggttactctttaacgctcgactgcccacctccaccaccccttatgtaacaccaggctgggtggcggagccctcccgtggagtccagggtccaagtcccacccgggggcggccaccctgccggctgcgctgccccctaggagtggctgggaccccgtgcccgcactgaccgagagtctggccggcaggagcaccgcctcggctaggcccgggcgccccgggggcagccagtcccccaaggccagaggggacagctccaagccttccagagaagccccccgccccaacccgcccagctttcaagaagagcaggctgcgaggctggccgctttcatcctgcgctggcgctttatttagacgcgggccttctctggagcccggggaggccgcggctgtcagagcggccaggacctcacggacctcacgggctggcagcccggggacctgggactggcgctgtcagctgtgaggcggggcggggcgggggacgggcctcactctggaggaaggagcacaggtccttgagtgttcagggcagggaggcagggaggggtctccagcccctccctaggctggggcagctggaagcagggggcgtcccagccccgcacgtgctgctcctgccagcagggtcccccagctcccggatgctctcatacacgttttccagggggccgctgtccacatccagggccctgagcgggagggtctggtaggccaggtcacccgccagggccagaatcgctccctggcccttggggtccagcgggtctgtggtgggtcctgggtccctccttttaggcttgcagaccctggagtacaggacgtccacctggagacaggaagccaacccgaggaggggtcagcaccatccaacctgctgaggatctgccggccccacccacagcgccctaccctggcccacgttacctgagcggccggggtcacctcagtcttcccctgctgtggctcttggggactgcgatgggtccctttgcgcttctggacgcgggcatactcggccaccacagggctggccgccaggctgaccccgggaagggccgccagccccacgttggaataggtggcctcgaggccagcgcaccctgcggtggctgcagctgccggcagagcccggggcagctcctggtgtgggaaggcagagggggctgcctgcggtccggtgatgtccctggacacctccagccagtgtgggcgcaggagatccatgctggcaggccgcagggctgggggtggggtcagggcagagttcactccgggcagggggcaggagcgggtctggcccaggggttggcacgcgctgcacagtaagccccgcccggccgcccccgccccgccctctgctcacccctgctgctgcgcgggccccggtgcagctcgtgcagtctggtgtccgacttgctgagggagcagaggtgggtccgcctcagtagggactgggggcgaggaaggctggtcggtgccctgcggaccccaccctggtccccgggacagcctggcactcaccgcttccgccgccgtcgcactgccctgcagcctcgcccgctgcct

SEQ ID NO: 1562114 - DNA, 4001 bp, Homo sapiens
aaacggagccttgaaagacgccccgggaagtcgcggggcacagcgaaggcgggagcagccccgggtccgtgatccagcaaggccgtctcgccgggccccggagcggaaagcgccttgggtcgggccatctggtgttcggggcccggtggagtcctgcttaccccgatacatggaacaacccctgggaggcctctgctcccagaaaacctgccttccgtggccccagtgatagtgcgctccagggacgccgcggggccaagctgtaagggaccggggttgcctagagctgaagtctccttcggcccagaaagctgcggcctgccagcccctgctagctcggaggtcgttgccaagactccaaacctgctccctatgtaggagtcctgcgccgcctggtggggagtggggggttaggaataaggggagagggcctagagagcaggggccattcttagcctctggagagggcttcgccagggtcacacggggaggagctggccgcctctttgcggtgcagccgggatttcgggcgagaggggcgagtctgtgcacaggtaatgctggattattgcggactaaatgtgtttgtgtgggagcatgtgtgtgctttcgtgtgtgtatacctgtatgtctccaacagggccgcacccaagggagcaggctggttcctgtctgcatgcatctgtgcatgtgtgtgtgcatatgttcaaacgaatattcgtgtgtttggtatgtgcaggtatatgcttttgtttgtggagctgtaggggtgtacgcaggtgcatttggggatagtactgtggtctatatatagatacatgtcgtgtgcgcctgtgcctgcgcctttgttcgtgggaaggggggctgtgggcatgtggtgtgcctgcctatatacgtgtgcgtgtctatgcgtgtgtgcggggggaggagactccgacctcagcgatttccccttcttctttcctcccaaaaatgcagctgtgaatccgttccagagtccaagaccaaaccgtgccctccaatcctgattttctttctttctcatcgcttcctgctccctccccccatttccttcacttttgcagtgtctccggacaggtgtctcagaccgaacttcagcctagcggtcttgcagctggtgccgttgggagggagcgtgggttagggcggaaaacaccgcctgggggcgtaggtccccgcgcagggctgggagggatggagaaagggagattcctgggtacaggagggggtctccaggccgagatcaccgggcgactgtcgggggcagagcccggcacgctgagctgggaggggggaggacaggcagaactgggaatcccgcgcttacctggatggcgttggtcacgttccagcctgcctcccacgccgtgattttgggcttgtcgtggcccccgaattcgccaccacctcccacctggtccttggagccggagggcggcagaggagctccgctgcctcgctgataatggatgtctccctcgacgggcgcttcagcgccctcgtccccgcagggctctccctcggctttcaggatgtccatctgcaggccctggcggtgctcaaagtcgaggtcgtcgcaatgcgcgaagcccaccgcctcctcatccgtggccgcctgaaaacccatcctggcgaacatgccgctcatcttggcctgggacttgttggacacggacgtggccacgttggacagcttgctgcggagcaaggtggccatggcggcggtggggacagcggaaaggacagaaggacccgaggatgcggggaacgcgatgcaagaaggcgagggctggggggcgcaaagtcgctatctccgcttgctctccgcgcggcgccccggggctctctggctcatgaccctcgcagctggcgttcgaggctctctcagggctggaccgggcaagctggcagcaggtctggcggagcggcggcggcggcggtggtggctagtgcactgcggagctgccgcggggcgcgagctgggctgcggagggcggcggcggcggcggcggcggcagcggcgtcagagcagctacgcgaagctggcgcggcgcccccacccgtgcgcagcccaatgcgctcccgcccctcggaatcaggcggtgcgggggtgggggattggagagaggaaatacccggaggcaggggacgtgaggaaggggctaggagaagagaaagggggcgccgagggattcagacgtgagctgggggcagaagaagggcgcccttgggaaggaggcgggagggagcgcgtgaaagagggagcgccgagggcaggggaggtgggggggcgaagtgctgcatttctaggggaggtgctaagctcgcatcctggcccttcccacctcgccgccgcagggtgggagggggccggcgtgggctgatgctcgcagtctcccacccccggaccaccccctccagggtccgggagctgtgcagccccagatcctctggctaaggactggtctgggcgccccgaaagcccgcaggactgagttgtcagtctctcgcggagcgggtcgtctataagtcagtttccctggcacccatccttcgcgcgtaaacccggccgcgagtcccccttgaaggtagaagtggctggcatggatcgctcccaaggaagctcagcctcaggctcagtcacccgggttctctccgcccgtccagggacgccgcgagggaagcgattgtgcggatcgctcgccaccagccgctctccaaatgcgtgcagaatggaggcgaaaggttggcttttctctttcttttcgtttgggggtctggaagaaggcaggactctatgaggacacctctcgtcagcctcctagcgggtctgcgaatgcccacgccgagaggggcgcagacggggccaggcgcggaggaaagaagggctcgcggcgctgcaaggcggaggaagcagaggctcgcggtgcgctggggccctgctccgacggccgcctccaggctgtgaaagcttgggctgtttgtgttgattggggtacgggtgtgtgagcgcgagtaagggagagacccagagacaaagaccgatgctgtatcagactctgcttgaggttggatcagtgtggcctctgagaatgaggtttggtaaccgcgtgtgttctgtgtctgtgtggttttgcgcgcattccagtgtgtgtgccagagctagtgtgttggattacgtatgtgttcccgaatggggttgcctgcgttcgtgcctgtgttagtccctttgtagtagtctccgtgagggtccgctgctctgaatgggtccctgcgtaagtccccagctgatgtcctggccgggctcctcctgagcagtaaaccgcagggctccacctggcagtcccagcctgaatggagaagtagcggctgtgactggaagtgggggcgggggcggacggaaaaaccgaaggaaacaaaaaaggaagcagctccccatctcccctctctcgaggccctttctccctgggaaccccagccactctttctctgcagtatttctagattagctcacgtcagcgcacaagtagggcggcccgagggctttggccagagagttggagctgccaggacaagacaggcttccctctctacaccctcccgcctcctgccacctcctcccatcccaagcccctcccagtctcccggaggaggcttctctccagatagggaacctccaccacattggacagagatgctcctaacctctccccaggtacccccttaatttccccagaagctctggaaagcccctagctcctgcctggtggaaaccaagacagaaatcctcttcttagcctccagctactaagaccaaaaaacaaaacaaaacaaagcaaaacaaaaaacaaaacaaaaaaagacccctctatagaaccgtcctccaaatacagacactccaagtcatgacaggacccagaacaaagacaggaaagagattcttcctccaaacacagagatcctctcctccaaggaggctt

SEQ ID NO: 1562115 - DNA, 4001 bp, Homo sapiens
gagtgtgggctttggagttagacactgagaatcaaatcctggtgtccctactcactactgtgtgaccctaagttacttgacctctggactcagtttctccaactgtaaagtggcatcaggtacagcattaaatgctggctcatggtagaggcttactcccctcctggtccccttaacagtgaaacttccccagaggaccccgcactgccagtccaactccttcaccccctgctctcacttcagcccatctccactgctccaatgagtcaccacaccctcctccctgctgccccttcgaaggcttagtctctattctttttgttgttgttgttgttttgagatggagtttcaaggctggagtgcaatggcgtgatctcggctcaccgcaaactccgcctcacgggttcaagtgattctcccgcctcaggctcccgaggagctgggaatacaggcatgtgccaccatgcccggctaattttgtatttttagtggagacagggtttctccatgttggtcaggctggtctcgaactcccggcctcaggtgatctgcccgccttggcctcccaaagttctgggattacaggcgtgagccaccgtgccgggccggcttagtctctattcttaccttacacaatggatcacttcctcctcctagaaaaaaccttctcttgggtgccacgataccacattctcctggtttttcttctgcttttctggactccttattggtcttttttgctggcaccttcttgtcaactcaatctataaaaattgggtgcctaaagcttggaacctggcttctcttctctcttaaatcttaccctacataatctcatcctacccaatccacttgccaatgatttctaaattctttacatcagccctgaccttttctgtatcagactcatatatctaactgcctatttggtagctgcactccaaatatctaaaacttaagatgccctaagaagatttcgtaattatttctcacgctcccaatctatcccaaagtcatttagtaaatgccagcataatacacttggttacttaagccaaaaccaaaaatctatgatgaagtcatctttgaccacttatttctgtcatttctcaaatcctgccctgtcagttccactttcaatacacttcttgacccctctacttctcttcctctccattcccactaccacagtctaagccacaattatctttcacctgctgactgccactggtctaactggtctccctgtttcctctttcgcccctaaggcctggaatctataaagcagccagagagatggcacacgaaacagatcatgccctaaggctaagcccagctcctcagcctggtccacaaggaaggcctctgtaacctcattcttctgccactggtcccagcacccgccacagcggccccctgccacgtgtcaaacacatcaaacctgtgtttttctttacttgctgctcttcctgccttcagctcccttccgcagacctccgcttggctgaatactttctccaatgccccacccctcccaatcctcgtggcactcccacctctgacgtttccttgtttgctcacgtgtttactgcccgccccaatcccaccgcgggaagcagcccctcagagggcagggccgtgtccgattccggcccgggtcccgcacccaggacgtcgcaggtgctcaggaaataccagatgagccggcgtccggcaggtgccttgcaggagggcgcttggagacccctgccccctccacagacggcgaaactgaggcccggggaggggcaggggcgtggcgtgccccatgtcaacccgcgcagatcccgggtggggagcccgcttcccttctccagccccggccccccagcctctgggagtgcgccgggaggccggccgcacacccactcacctcggccctgggagctccaggccggaatctccccaccggaagtgcgaggccggatgccgccgccgaaccgcggcacgggcggtaacttccgccggaagctacccaggggctgggcggagccggggcgaaaaggcggggcggggcagcacgggggcggggcgtctgttgtggtcgggttctgaggtggtctggtctttctgaggtacagcgtagttttgtcctccgcgaagtccctcaggctcagagcacagccgtgtaattgtctgcgtctctcccgcgctcaatcaggggcttgctttggaaccccggtgcctgctagtgttctgcatacagtgagcatccaaaaaatggtaacttgtttacttttactgaacaaattgtttttcttatgtccagtctaatgctgggcaaccatggaatgaaccacgaagataagtatctcatgggctttttcttctgggagctcaggccagctggggccattacaacttaaaacttgggcgatccagaagtaatacgaaacatttgtgaaatattttctgtatgaaactttctaagaattatctcaacttcaataggttgagtagggagagagcatcccagatagaggaaatgggagaatcctaaaggagggtgagaaagctccagccgtgcctggggctcacaggttgtttgtaactgtggtggttaaagtagccaagaggcaggttgcagtggccccaaaatgccagcctagggagttcagattttcttcatcttgcgggatggattaaaagggcagcatttgcagtcaagaacattaggccagggcaagctagggttgcacattcagacccagttttgtgcctttcgccctcctctagcctcctcctgggctctctggcagtaagaccagctgcaaacatggatccttacaagtgactcagctgggatccctggcccctctgaacagaaggctcaaggccagagtgtaagcagtgttttatgcaaactgcggctgtcaccgccgccagctggcatcatgcaggcattagttcattcagtgcttaccaagcacctacaatggtacccatcactgcccaaggtcttggctttattcagtcctcaggcttgtattgcatgcactttctatgccttttgaaagagcctgtcctcacacccttctctctcagaggcaagagatctattttcatcaccaccctcatttaagtctcccagctaccaaggccaaggtttggagcaacagcctaaaacaccagctggaaggctgggcactatgcacaggcaacacacagggtaaagagcgtgtcttctttgtaaggcacaagtactcgagctgttccctggctgtgtccctggcagggagaagagggaggatgtgttcatgggggtgtacagtatgccttaccttgctgtacccagcagggttgagcagaaaacgcttcgtcccagtgcagcaatctgtgaacactcttaaccagcaggtgtgtgtctgtgtgtgtgtatgtgtgggaggagcgaatgatgaggaggaagggactcttggaaggtgactaagggctccagctggagctctccagagtctcccagatacatggagatcaagtcttgtcaaggtgaaatcttcaccattgggcagggggcaagtacagacaaacagctgttaacaggaaccacagtttgtacatgaaagagtatttattgaaaacatggttactgacaggaagctcctggctgctctctggttacaatcttggctcacaactggaagtgttacatactttttacttcccctcaattttatttttccccaaggttccatcctaagataggtagatcttatataaatatatatacacgtctgtataagtatggcctatagtaatgaaaatatatagtacactcttcattgggtagtacctaccatgccaggccaccaatactgaatgccaatgtgctaacgtatgtccagggagagaggctgtgtgtgtggtttacaagtgctgcagcaccagggaagccccactggcacaggtgtggcctcagccggcctcagccagctccctgaaatcatggccaatggcagaaa

SEQ ID NO: 1562116 - DNA, 4001 bp, Homo sapiens
agaattcttggcccaaggctagtcagataacaggccattgtcacagaaaaccttgggtaagaatcccagagggttcacctggtccaagtagcccaggagaatgggcagcctgccctctcaggtccacgggggatccgcccatgtctagcttcccgaagagtggaagccaaaagcattccagcactagagtggcccagataggcgagcaaagccacaggactctggtgggtaggctatgcaccctggaggcttttgcccgacaagctctctctgcacacacacactccccgagaggtactcacttgaatcctcgaagtatccattctgcgacatggtgggagagttttctgcaagggaagcagaaaggtcaccagccccatggaccaagccctggacctcctgtgtgcacctgtctccccgccccccgacctggctcattccttcgctcttccgagggatgcaacccacgccaccctagggagaaagggaagcaggggacagtgctcgggagggggccccatagcaggggaagccagccttaatctcagaaattcaattgcttagcccatctgctaggggctgcccaggcgggccagaggcgaggaggagagacgttccagggatgtcttcccaccgagttagtaccagtaccatgttcgctaatccaggttttcctgagaaaaccctgccccgctgcagcgagaggaagggaccgggcccgagcgggcctctccccctctctcctcggatgccaaggcgggggatctctctgcacatccctcttctcactctcagaccggtcctgggggccataaacgcccattgcaggcgcagttcccccgacccccgtcacgcgccccgggtcacacgggggccgacaggcaacggtctccagtcctgggaccgcgtcccggccgcctggaagccagagccgttggtccaaaagggagaacaattgggggtgggaggagtatctgagggacacatgggtcgggggaggctgcgccctccctgggccggtccccggatggtcccggctgtttgtgcctcgctgtcggaggaaggaagcgacaggaggggccgcgtgcacgagaggaaagcgcctccagactcggagaccccgggggtcggggcgcaggatgtgaatgcaggcgcggggcgggagccggggctgcatcctgaagtggggggcgggggcgctggggcgcgtcccaggccgtgggcgacgagggtctgggagggttgggccggtgcacactccgcttccgtcccggcggcccacgtgcaggtaaagggtcgtacaaacctgggtcctggcggggacccagggctggccctcccgtgtcagagcaagggagaaaccgctgcggccgcgcagggcacggtcaggggtcccgggactcccaaaactccaggggttccggggctcccaccgcggcgccggacgggaagatgcccgggcggaaggtaaaatgagaccttccgaggcggcggcccgccaggctcccaaaagctcggcgctcggggcgctgggagccccacagctccgccctgcccactttcgagctccccgccctcgacccgctgcatcagctgttcaaacctggtaagaaattcaagacggcgacagcagagccctaatgaaaccaagcgcgcggtggccgcgaagccgcgcccgggcctcccgcacccgcgccctcctccccgcggctgggaatcccgcagccctctcgcccaccggccccggcccgcgcaggcagacggcatccgcgttctccccggggtccccgacgggagacggtggcggagacccgggcggccttcccgccgcgcccccgggttcaggcacccaccgcacggctgcagatggaacacgcgcctggtggccgcggccatggcacactcgcgcactcacggccgggctcctcacgcggcgctccggcgcttctggaccccaaactcggcgactcgggcgggccggcggcgggagccggcgacacacccccacgccgcgcctgggtcctaatgccgctcagacgccgcgcccgggcgcggtaggcagagctgccgagggctgggacccggccgcccgccccgcgccctcacccgcgggaggctgctccagccgggctgggctgctccccgccgcccgcagctgctgggccaaaccgagtagacccggctccttcgagcctgtgcgcgccggacccagcagacccagcgtcgcgagtttaggggctggacggggccggggagcttctgggaaaacgttcgactgcgccacgagcccaccgagctgtgcgactgaggcagaccccgggagggcttcccccgcgtccgctttaagtacgcggccggcccctgtctcctcctttcgaccggggacctccgcagggccacgcccgctggctgccccgcctcctgcatttatcccggtagctccggccgcaagtccttctcctcctcctccaggaagcgcgccccgactgactagacggacctccgtgcattccccgggctacgccctcgcccgctgagacggcgctctccgagctcggctgctttgggttttcgctgcgagcctcgccaacttatctgccagcctcttcacgtcctcggccttctatgaggtcaaggtcatggttcgccccctttttccttccccaaatggcccttgcgccctgtcccctttcctggaccggctgcgacccgcccggggacgcgccttttcggggcgcttagtctcctgcgagtagggcgtgtgcgcgtgtgggtgcgcgtgctgcgatgcgatccggcaaatgcagctgacgaacccctggcctgatccacggtggctcccagtagaaggctctacagcccttggaaacggaacacgcagctccgtaaagcgctaaccaacctcccgacccctccggccgccatcgctttccggctcagccgcgctgggacggagtcctcggccactgtgccctaaccatggtagaggaacggggacaggccggggcaagcccacctctgcgaaggaagggcttctggcgcgttggggaagcctcatgcatagattgggtgagtaaggctggcccagttctcctcccggcaagataagaacgcattaggagggaagcgctggagtgctcctcttggcgacggatggcctggggctctgcgacagactgagtaccccaccctcccccagcgcgactccaggaggccttgtggaagatcccaacaccatgacctgcaactgacttggggctggccacatagtattttagcaggggtgactctggagagacaccaggtcatcctgcgcaccccttgggacctttcctagacgccctccagctagagctccagtccaggcactgactcccgggtggcgggtggaggctgaggaagagctgaaggacacaggcggatgtcgcccccggagcatggctgcataggtggcatgcaggctggatccctgaaaagccaccttgccacccccagtctcccccatctgggaatgccttggcttctgcacctgctcccagcagctcccaaacacctggtccttccaacccacttgttccaggaaagcctctgggatggagggcgcttccccttaccacagtctcctcagcgctcctcaaaggacctaacccctcagcccactgaggaaagaggagcccatgaccaagccgcccctagtcggctatgggccccctctgtccgctccctgaccgtctctcaaaggaactggcactgagcccttctctgctacacctgtgctctgcccctgcggttctgttccctcggccttcctggagggaacccctgaggcccacacgcctgctgcctccagactgaccgtttcagaggctgtttccttcagtcctcccacctgcctcctgtcctgtgtagatcgtctgacgctgaaggcaaatactggtgccccagatctcctgtcctgtgccccactgggtccttacataggcaggcaggttgagggaccc

SEQ ID NO: 1562117 - DNA, 4001 bp, Homo sapiens
gagtttagcctgggccccttctgggtaggaagccctagtgcctcctgcatcaaagtccccagggactggtgactcccaggcccaggcctgcactacctccagagcccagagaagaaatattaggtcaaaagacatccttgcctttgggaggccaaggcaggcggatcacgaggtcaggagatcgagaccatcctggctaacaatggctaacatggtgaaaccctgtctctactaaaaatacaaaaagaaattagccgggtgtggtggcgggcgcctgtagtcccagctactcgggaggctgaggcaggaggctggtgtgaacccaggaggcagagcttgcagtgagccgagatcacaccactgcactccagcctgggcgacagagcgagactcaaaacaaaacaaaacaaaacaaaacaaaacaaaagacgtcctcactgctttggttctggagctcatgataaactccttcctccccgggtcaggcttgccttgtttaaactgtctggttcccctggcccgaacttgtcccagcctcccctctgcccctcaaccagcacccactagtcccctccactgcccttcacacagccccgttcttcccccattcttcccctgatgccctcagctctaccttagacttagtgctcaggtcccctagattaaggacctgcccagctgacactaccaggttcctggggggctcctgcaatgccaagtcctagtcccagccccatacgtaacctgcccaccagcagcctagcacacagagccccatgtcctgagggctctgggtaagggaacatcagccctgtgtctacgcactgctctacaaacaaccctcgaatggtcaggtcactcatggggctaggcacaggacacagcctgaagccagcccagagacatgaggaggaagacagctggactggtacaagcagggacagcaggaaggtgcccgagggactgcagcacagaggccttatatttctttaaagagacaacgacagatattccctccagggctgggtgaggacagagggacaggggcacacagaattcttggcccaaggctagtcagataacaggccattgtcacagaaaaccttgggtaagaatcccagagggttcacctggtccaagtagcccaggagaatgggcagcctgccctctcaggtccacgggggatccgcccatgtctagcttcccgaagagtggaagccaaaagcattccagcactagagtggcccagataggcgagcaaagccacaggactctggtgggtaggctatgcaccctggaggcttttgcccgacaagctctctctgcacacacacactccccgagaggtactcacttgaatcctcgaagtatccattctgcgacatggtgggagagttttctgcaagggaagcagaaaggtcaccagccccatggaccaagccctggacctcctgtgtgcacctgtctccccgccccccgacctggctcattccttcgctcttccgagggatgcaacccacgccaccctagggagaaagggaagcaggggacagtgctcgggagggggccccatagcaggggaagccagccttaatctcagaaattcaattgcttagcccatctgctaggggctgcccaggcgggccagaggcgaggaggagagacgttccagggatgtcttcccaccgagttagtaccagtaccatgttcgctaatccaggttttcctgagaaaaccctgccccgctgcagcgagaggaagggaccgggcccgagcgggcctctccccctctctcctcggatgccaaggcgggggatctctctgcacatccctcttctcactctcagaccggtcctgggggccataaacgcccattgcaggcgcagttcccccgacccccgtcacgcgccccgggtcacacgggggccgacaggcaacggtctccagtcctgggaccgcgtcccggccgcctggaagccagagccgttggtccaaaagggagaacaattgggggtgggaggagtatctgagggacacatgggtcgggggaggctgcgccctccctgggccggtccccggatggtcccggctgtttgtgcctcgctgtcggaggaaggaagcgacaggaggggccgcgtgcacgagaggaaagcgcctccagactcggagaccccgggggtcggggcgcaggatgtgaatgcaggcgcggggcgggagccggggctgcatcctgaagtggggggcgggggcgctggggcgcgtcccaggccgtgggcgacgagggtctgggagggttgggccggtgcacactccgcttccgtcccggcggcccacgtgcaggtaaagggtcgtacaaacctgggtcctggcggggacccagggctggccctcccgtgtcagagcaagggagaaaccgctgcggccgcgcagggcacggtcaggggtcccgggactcccaaaactccaggggttccggggctcccaccgcggcgccggacgggaagatgcccgggcggaaggtaaaatgagaccttccgaggcggcggcccgccaggctcccaaaagctcggcgctcggggcgctgggagccccacagctccgccctgcccactttcgagctccccgccctcgacccgctgcatcagctgttcaaacctggtaagaaattcaagacggcgacagcagagccctaatgaaaccaagcgcgcggtggccgcgaagccgcgcccgggcctcccgcacccgcgccctcctccccgcggctgggaatcccgcagccctctcgcccaccggccccggcccgcgcaggcagacggcatccgcgttctccccggggtccccgacgggagacggtggcggagacccgggcggccttcccgccgcgcccccgggttcaggcacccaccgcacggctgcagatggaacacgcgcctggtggccgcggccatggcacactcgcgcactcacggccgggctcctcacgcggcgctccggcgcttctggaccccaaactcggcgactcgggcgggccggcggcgggagccggcgacacacccccacgccgcgcctgggtcctaatgccgctcagacgccgcgcccgggcgcggtaggcagagctgccgagggctgggacccggccgcccgccccgcgccctcacccgcgggaggctgctccagccgggctgggctgctccccgccgcccgcagctgctgggccaaaccgagtagacccggctccttcgagcctgtgcgcgccggacccagcagacccagcgtcgcgagtttaggggctggacggggccggggagcttctgggaaaacgttcgactgcgccacgagcccaccgagctgtgcgactgaggcagaccccgggagggcttcccccgcgtccgctttaagtacgcggccggcccctgtctcctcctttcgaccggggacctccgcagggccacgcccgctggctgccccgcctcctgcatttatcccggtagctccggccgcaagtccttctcctcctcctccaggaagcgcgccccgactgactagacggacctccgtgcattccccgggctacgccctcgcccgctgagacggcgctctccgagctcggctgctttgggttttcgctgcgagcctcgccaacttatctgccagcctcttcacgtcctcggccttctatgaggtcaaggtcatggttcgccccctttttccttccccaaatggcccttgcgccctgtcccctttcctggaccggctgcgacccgcccggggacgcgccttttcggggcgcttagtctcctgcgagtagggcgtgtgcgcgtgtgggtgcgcgtgctgcgatgcgatccggcaaatgcagctgacgaacccctggcctgatccacggtggctcccagtagaaggctctacagcccttggaaacggaacacgcagctccgtaaagcgctaaccaacctcccgacccctccggccgccatcgctttccggctcagccgcgctgg

SEQ ID NO: 1562118 - DNA, 4001 bp, Homo sapiens
tctgccctgagccctgcagtggctccctgcagcctacagatcacagcctgagccagccctgctccccctgccctgaccactggctcctcaggccatccggtcagcaccctaggcatgcaaggtcctgtcctccaagctgagggcttccctccctggagggcctttttcaagactcacttggaacctcctcctccaggaagtcctcctagatccctgcctcacccctggccactggcagcccttcctgtcttgtgggtcccctaaggttcctcacttgtaggtactcccaggaaaggggcccttatagcccagaccccactgatgcctgacagacacctgtgcagaaacaaggatgggtcagcagcacgcctgcacctgccagggagtgactcaccctgactcacttctactcccgccgccagtttccttggcacatcccaggccctgttcccccagtgtcctgagtttagcctgggccccttctgggtaggaagccctagtgcctcctgcatcaaagtccccagggactggtgactcccaggcccaggcctgcactacctccagagcccagagaagaaatattaggtcaaaagacatccttgcctttgggaggccaaggcaggcggatcacgaggtcaggagatcgagaccatcctggctaacaatggctaacatggtgaaaccctgtctctactaaaaatacaaaaagaaattagccgggtgtggtggcgggcgcctgtagtcccagctactcgggaggctgaggcaggaggctggtgtgaacccaggaggcagagcttgcagtgagccgagatcacaccactgcactccagcctgggcgacagagcgagactcaaaacaaaacaaaacaaaacaaaacaaaacaaaagacgtcctcactgctttggttctggagctcatgataaactccttcctccccgggtcaggcttgccttgtttaaactgtctggttcccctggcccgaacttgtcccagcctcccctctgcccctcaaccagcacccactagtcccctccactgcccttcacacagccccgttcttcccccattcttcccctgatgccctcagctctaccttagacttagtgctcaggtcccctagattaaggacctgcccagctgacactaccaggttcctggggggctcctgcaatgccaagtcctagtcccagccccatacgtaacctgcccaccagcagcctagcacacagagccccatgtcctgagggctctgggtaagggaacatcagccctgtgtctacgcactgctctacaaacaaccctcgaatggtcaggtcactcatggggctaggcacaggacacagcctgaagccagcccagagacatgaggaggaagacagctggactggtacaagcagggacagcaggaaggtgcccgagggactgcagcacagaggccttatatttctttaaagagacaacgacagatattccctccagggctgggtgaggacagagggacaggggcacacagaattcttggcccaaggctagtcagataacaggccattgtcacagaaaaccttgggtaagaatcccagagggttcacctggtccaagtagcccaggagaatgggcagcctgccctctcaggtccacgggggatccgcccatgtctagcttcccgaagagtggaagccaaaagcattccagcactagagtggcccagataggcgagcaaagccacaggactctggtgggtaggctatgcaccctggaggcttttgcccgacaagctctctctgcacacacacactccccgagaggtactcacttgaatcctcgaagtatccattctgcgacatggtgggagagttttctgcaagggaagcagaaaggtcaccagccccatggaccaagccctggacctcctgtgtgcacctgtctccccgccccccgacctggctcattccttcgctcttccgagggatgcaacccacgccaccctagggagaaagggaagcaggggacagtgctcgggagggggccccatagcaggggaagccagccttaatctcagaaattcaattgcttagcccatctgctaggggctgcccaggcgggccagaggcgaggaggagagacgttccagggatgtcttcccaccgagttagtaccagtaccatgttcgctaatccaggttttcctgagaaaaccctgccccgctgcagcgagaggaagggaccgggcccgagcgggcctctccccctctctcctcggatgccaaggcgggggatctctctgcacatccctcttctcactctcagaccggtcctgggggccataaacgcccattgcaggcgcagttcccccgacccccgtcacgcgccccgggtcacacgggggccgacaggcaacggtctccagtcctgggaccgcgtcccggccgcctggaagccagagccgttggtccaaaagggagaacaattgggggtgggaggagtatctgagggacacatgggtcgggggaggctgcgccctccctgggccggtccccggatggtcccggctgtttgtgcctcgctgtcggaggaaggaagcgacaggaggggccgcgtgcacgagaggaaagcgcctccagactcggagaccccgggggtcggggcgcaggatgtgaatgcaggcgcggggcgggagccggggctgcatcctgaagtggggggcgggggcgctggggcgcgtcccaggccgtgggcgacgagggtctgggagggttgggccggtgcacactccgcttccgtcccggcggcccacgtgcaggtaaagggtcgtacaaacctgggtcctggcggggacccagggctggccctcccgtgtcagagcaagggagaaaccgctgcggccgcgcagggcacggtcaggggtcccgggactcccaaaactccaggggttccggggctcccaccgcggcgccggacgggaagatgcccgggcggaaggtaaaatgagaccttccgaggcggcggcccgccaggctcccaaaagctcggcgctcggggcgctgggagccccacagctccgccctgcccactttcgagctccccgccctcgacccgctgcatcagctgttcaaacctggtaagaaattcaagacggcgacagcagagccctaatgaaaccaagcgcgcggtggccgcgaagccgcgcccgggcctcccgcacccgcgccctcctccccgcggctgggaatcccgcagccctctcgcccaccggccccggcccgcgcaggcagacggcatccgcgttctccccggggtccccgacgggagacggtggcggagacccgggcggccttcccgccgcgcccccgggttcaggcacccaccgcacggctgcagatggaacacgcgcctggtggccgcggccatggcacactcgcgcactcacggccgggctcctcacgcggcgctccggcgcttctggaccccaaactcggcgactcgggcgggccggcggcgggagccggcgacacacccccacgccgcgcctgggtcctaatgccgctcagacgccgcgcccgggcgcggtaggcagagctgccgagggctgggacccggccgcccgccccgcgccctcacccgcgggaggctgctccagccgggctgggctgctccccgccgcccgcagctgctgggccaaaccgagtagacccggctccttcgagcctgtgcgcgccggacccagcagacccagcgtcgcgagtttaggggctggacggggccggggagcttctgggaaaacgttcgactgcgccacgagcccaccgagctgtgcgactgaggcagaccccgggagggcttcccccgcgtccgctttaagtacgcggccggcccctgtctcctcctttcgaccggggacctccgcagggccacgcccgctggctgccccgcctcctgcatttatcccggtagctccggccgcaagtccttctcctcctcctccaggaagcgcgccccgac

SEQ ID NO: 1562119 - DNA, 4001 bp, Homo sapiens
ccttgtgacccccacccctgcccgccagggaacaaccccctttgactgtaattttccactacctacccaaatcctataaaactgccccacccctatctcccttcgctgactctcttttcggactcagcccgcctgcacccaggtgaaataaacagccttgttgctcacacaaagcctgtttgatggtctcttcacatggacgcgcgtgacattcctaatatataaagagtttttaaaaatcaagaacaaagagaccccatatagaagagggccaaggatatgaacaattcagagaaaaaggtacaaataagctttaaacacatgaaaatattatcaccttcattcacaataggaaaactactccaggtgccatttctcaccatgagattgtcccaaagcctgacaaaatgactcatgttcaaggttattatagattgcgatcttgttggtaatagcaagttatgggaaattttctcctgggtggctaccaacagagagggggctaattaaagggacctgctggaataccacatacctgtttaaaggaataagaaataaggaaagcagatcttggtgactgataaggaaaggtctccaggctataataataatcttgaaacaaaatcaaggcaggtaaatggaaccaggaaaaagtgtactgccttttggtcatagaagaggaggaaaaacatgttttctttgcttgtacttgcacaaagcaacccttgaaggacacacagggactgcagggatgttggtgatgcctctgtatatcttttttttttttcttgtgacagagtcttactctgtcaccaggctggagtgaagtggcacaatctcagctcactgcaacctctacctcccgggttcaagtgattctcctgcctcagcctcccaagtagctgggactacaggcgcccaccactacgcccagctaattttttgtatttttattagagatggggtttctccgtgttagccaggatggtctcaatctcctgatcttgtgatccaccctcctcagcctcccaaagtgctgggattacaggcatgagccaccgctcctggccctgcctctgtatatcttttaataagagttttgatttgtgaaccatgtaaacatattacctgatgcaaatatatggttacctgaaataagatttcaatctggctttttttcctcctgaaattatatcactctctacgtggcctttggagaccacttcctctagccctccagagccattctgccatctgtttacccctttgtcagctaccagtggcagcccacctgtgctgttactaacaactttcttctatctatccttagtctgagcagtaatatgggagatgccaggagtgaggctctggagccagctgtttgagtttgaccctggctctgctgcttacaatctgggtgaccctgggcaagtggctttgcctctctctgcctcatctcctcatctgtaagtaggggatagtgatagtatgaactccgtggtttgttgtgagatataaggatgctggtgagtttatgctgtttccaacagtcccagcatagggtaagcacctctaagggttactgatcattatcgtgaaatggcaggtttggtgacatcgttatttttgtctaattcacatgagaattaatacatgactatgaaaatttaaaaaaggaaaagattcccctactaggtatcaagtgaactcaccagtggtatatgcacctttttgtagagacacgctaactgggccaatcttcacgttttgtagatgggagacgaggtccgaaggggcagaggggctctcctgggatctggactggatcctctgcagcaagcggcctgtccgggactcctcagttcacgctgcagtctttaactccatacttcttccttctagtacaaagcaggagtgtccgttgtggccacgcctcacccaggaaactcctgaatcctggcagctcctccccacggttcccacacacggaattccctcacagggctgggacttccttcctcataccttcactgagcgaacccaatgctcagtggcctttctggtcacctccttttcctctctgggaggagccactcctggggtgtaacgcagtcagatcccctagcagtcccgctctgccccctcccttctgggggcctcagactccattccctcccttaggaagctgacttgactaatagcacaggtgaggcccactccaggcgtgccaagaggacccaaggagggaggggaagctcccagacagcagtggcacacctttgcctgtgctgtcctcccagcctggagcaccagccccctctgctgtccacatccaagctttctacaagactccgtcctccaggagacctctggctgcctcaccttctcaggcgtcctcaccagggcccatgaccccttcatttcaggttgttcttgtgtgggtgcatgcaggcacataccttgagactgaagctttttgagggcaggggctgcttgggaatctgacattttgaaggtggaagggcctttctcaatgacttagcttaggatttgtaaattgttaactcactggccactgccagacagcagatatattactttggtttgcccagtgtgtttaacaatttgttactgtaatcagcagtggaggggatggcaagcaaccttcagcatttctggcttctcaggaatattttggaagaagtggccccccactttggcctctttctctgttctagactcgggccatcttggagctctcccctgcggtaacatctggaaccagttgcctgggttcaaatcccagcttcaacccttacaagctgagcaagtgacctaacctcctgtgcttcagagtcttctcttgcaaaacagctataggctgtcagtaccaacatcagaactgttgctaggaacatgcactaaagtgctaaaactgtgcctgccacatagtgagggctcaatgaaccatcattataagattactatttcagcaaacgtatcagttgcattcaaaaacatgtagttattggccaggcgcggtggctcacgtctgtaatcctagcactttgggaggatgaggcgggcggatcccttgaggtcatgagtccgagactggcctggccaacatggcaaaaccccgtctctactaaaaatacaaaaattagcccagcatggtggcgcacacctgtaatcccagctactcaggaggctgaggccggagaacggctccaacctgggaggtggaggttgcagtgagccgagatcatgccactgcactccagcctgggcaacagagcgagactccatcttaaaaaagaaaaaataaaaaaaaggcgcagtttttgttagacaaatggccactcaactaaaggactacatttcccagccttctttgtagctgcacatggccatgtcatcaagcacaggccaatgaattcaaatgcgactttgagtagtctccttagcccgtttcctgtttagaaaaaaaagtgcagctcgttgccagcactcatttaattttatgtaaacgtgctatttgaggctgaagcaaatctgattctgactgctgttttttttttttttcttttgagacagagtcttactgtgtagcccaggctggactacagtggcttgatctcggctcacagcaacctccgcctcccgagttcaagcagttctcgtgcctcagtctccttagtagctgggattacaggcgtgcaccacaatgtccggctaattttttatatttcttagtagagacggggtttctccatgttgccaggctggtctcgaactcctgggttcaagtgatccccacgcctcagcctcccagagtgctgggattgcaggcgtgagccaccaagcccagccctaaatctgactgattttcaatgtgaaaataacatgtaaaaactgtttttgaagttatttctaaccagaactaacatcagactcatctatttcagaaaaactggattcatcaaacgaatctttggtca

SEQ ID NO: 1562120 - DNA, 4001 bp, Homo sapiens
gggaggcaaactggagtctcatcactttccaaggtccaacactgtttacttagcacctttgtttctccaatttacattattttcctggcattatttctgcaagttgaagaagccacctcaatttgcccagttgttgatctgggcatgccctaccctactttacaaaatccctctcagatttcaaacggctcaaatgtcacctcctattaccccatcttaccacacccgaatttacccactccactgcgtatgttcccacagctctttcacactgtgctgggattgtgaactagtacaatattgctataataactgttactgtgactacaaaagttattattttctgagcactgctttattccaggaactaggtaacacactacctctcatttaataggtataacatgtctgattgggtatgattactttccgttttttactcatgcataactaaggctcagggaggttgcaaaacttcaccaacatctcagttagtggcagaatcaagctgaaaacccaaacttgaaatcgctgggctatattgcctcttttattttgtgctgctgaggctgtttagtgtctgggatggagcagctgctcaataaataactgattacatgaaatgacccccacatggccaagaaatatatttgaaaagttatcaggtgaaggactccagtatcaatgaaggggttccttattcatcttcacatactcattccacaaacagtgatagggcatctacaatctgcaacagactctgccctgcaggtatggagatgacttttggacttgcccaaaagtacctggaggacacagcccgtccttccccatctccccttgtccagctaacccccttcctctctacacaccagccatgctgcctgtcactcaaaagcactaaactctttcttgagccaggccttttgaacctgatgttatttctcctatccctcattctggtcattcaagtttctgctgaatgtcactttttcctgagtggactccccaaccttaactctattttgcttccttcagaacacttaacccattcatgccagaggttgcaatttttagaactgcagacgtgagaaaaatcagaccttggcgatgaccttgagcagtaggatataaataactcccacatgcttagcgttccaataatggaacactaggcacaaataacgttaattaatcacgatctgaaaccaccttgactaattatggtcttcttttcccactagaatggaagctcccagagagcggctcctggtcggcctcctttcctaccacctgcccagggcctggaattgagtagatggctaacagttaatgactaaatgaaacttagtgaaggagaaagacatgaaaactgatcgttatacaggaggcgactggctacgtaggaggtgggtgtggagaacccggacgacttcctggaggaggcggaagagggctcagtaaccatgagattaccgaaaactgggaaagtaaatatggtttgtattttccgcaagacagctctccgggcctgcgctgggcagtagattcccagctcgagggaccgatctccaggggaaagcaaggcccacctgggcccaggcccgcccatcccgccctcctcgtaggcaccggcttggtcagtcctggccaaccagcaaaagaagctccgccttccggggccggagggcggcctgaggcgctcgctgtcacccgccggggcccagccccgccgcctccgccgcccgggaaaaagcccactcactcctcttccgccatcttctcccccatcctgcggagcttccaggaccaccgagttcggagccgcggggctagcaggacccgcttttgcttccggcttccgctggaggcgcgggcgggcgagcgggaggcggggcctcggccgcgcgagggcggccctctgtccctccgtctcagtggcccgagggtgggagaaagcgcgtgggaggattgcttcttagtctctcccggggctttcgggacgcttgtccggcctgggccacatgaccacctgggaccgagagattccggcttttccccatcacagggcggggacgttttggggaaactcctctgaggtcactgtgactcaccctgagggcaagcaagcaccctccacccagtgccctcgacttcgctgtgctaaaagagtttgaaaaaggatgcccagcctgcagcctaagcggagagaccccagggggacacttccccacccgagccttagtttccttcggctgtggagaggaataaccgcctggacttggcaggactgtgcagcattccatctgtaaacatgtgttgagttcagactatatgcctagcgttaaaaaggatgctgatgatctaggggtggaccattcattaaggggttcattgattcaccacatgcttagtagatgcttctatgtgcctagcagtgaccggtggggtggggatgcagggaggaacaaggtgaggtgagaggggtaggtgagacccccatcgggaggactggggctgaggactttgaactttattggccgcttctgttgctacctcccttcctgatccaaggcactctatctcatctggataattgcaacggctccattcagggtctctgactcacccctgttccttacggacttccacacagcagcttaactcatcactcctctgcttagaccctccaatggcttccaatctccagagaaaaaaaaaacgtggggaatgtacaggactcaatcctgcccccttttcccctctgaagtgtgtgggaggggggcatggggctctatatctcccctcccacacactttgactttccactattgtcccagactcaccaggaatacttccaccgttgcacttactgagcctttatctagaatgctcttcttctgggtagctctttggctcccacctctcctacgtttggccttttatttaacccttatcttgtgtgttagacctccttgaccaccctacttaaaatccaaggccccccgccttccctaaactatttttccacatgacacctaacctaccatatgttttactcatacacttgtttgttaaccatctccctccatgagaacggaagcttcatgaatgcagaaatttttgtctgttttgttctccattttatctgcaatgcctacaacagtacctggcacatagtagacactcaataataaataatcattgagtaaataaatcagttaattctagcacacctagaagggttttgaactgagaagtaacctaagctttgctgcctgttgggagttgactggggattggcgagagagagaggatggaagccccaaagccagcaaggaggcttttgcaataatctaggtgacagctgatggcagtctggatgaaagtaatacggtggaggtggcaggaatggttggactcctggacgcatactgaagacaaggtttgctgacggactatggcgtataaaagaggagttaagcatggtgtcagggttttggccccgaggaactgggtagagaagaaatctggctctaaccttgggttctccatcctctgcagtctcttaagactgctaaagctgactgagagaatgtcatcaggatccaccaatgtttattgagtaataataaacttgcttccttcctgcaggtgtggtgttgggctattgtttccttaattctttacatagctttgaggtagataccatcattatccacagacatagagaaatcaaggcacttgcctgcggtcccacagctagcaaatgacaaggctgggattcaggcacagagccagtgtttttaaaccagtagccctgctactctccactgccttaatttctctggctcttaaatgggactaataacctactctcctccgttagcacagagcctggcgggaatgacctggtctacaaaggattgagagtggggttctctctggccacacttgtcaactgagggcttgaggctaccattttctaccagcaccaataa

SEQ ID NO: 1562121 - DNA, 4001 bp, Homo sapiens
gctctccaccatgggagggacttgcccagcacctgctttaggggccacacccagtgagctacagattaggtcacggccactcgggagggaagctccctcatgaagaattttccaggcaccacctgctgaccttgcccagcaggaaggcaggacacagcctgctgagggcggtcagggcagcctggctgtggtcagcgtccaggtctcaccgagtggccggcctctgccctggctccctccagcagcacagagggaagtcgggctgtgtggtctcggcccgagcaacatcctactggtgtcctgcgatcactgacaacccagaacagacactctggcccagtaaccgcaggcccagctcttgggacgctgttctgggtctccggcctgaccctgcagtcgccttttgcctctttaagaacagagtcgtaaaacaggagcccaagcctggatcagacaaacctggagtcagacctcttcagcacttacaagctgtgtggcctagagtcaatcacttaacctcttggtgcctcagtttactcatctataaagtgggagtgataatggccacctcgtggggttgctagggactgaatgagacgatgctcaaagcaggggtaccatgcccggcacattccagcactcaacacctaacccctgctgtcactgtccttgtcattattaccagattcacaagcggagccggctaaggccaaggagctgtcctctgagatccatttgctcccgctgctgggaatgaaaacgtcgctgacaccgggctctgcagagccagtttctgattagatggaggtaacccaagttccaaaaaccacagctgaggagcagcagctgacaagctggttgcatggatgtggaaaactaccgcgttccagccgcctccagacagaaacaggacgcatagccaggtcccacggcagctccaaagagggccttgcacgccaagcggggcaccccccagcctgagggttcaccaaccacgcggaccacgcggaaacctagctgggcttctctctcccctcggggcgccagtgcgggaggcggtttctcccttggaagtggaagtcagatctgcttccaggttcccggtctagggccggtctagggcagctaagcctgcctgctccttcctttccatcctccctggtcaggggagcccaacagcaacgcgagggcacccgaccctctgcctgcacctggagggcgcccgggtccccccaagccacggccaggacgtcgcgtggtggggcagggaaaggggcgccgccgctgctggaaactagccctgtgcgctccgcccgcgctcccctcccggagatgtctcgagcgcctctggcgcgaacaaagcccggccgcccccgagaaacttccgtgcatgaaggtttcctccttgactcggcagcagcggccgccgcaggtgggtgactccgcaactctggagctccgcggaggcgcgttcgtccccagctggatctgtggggcctgcgcctgcgcgcgctccgggccacctgcccaggtcacctgccccggccactccgacagtccctgccagggccgcagcccctgctcacccgcttccccccggcacccgctgcagcgtggggccccttcgcctcggtcctcctgcgggcgactcgggagctcctacctgcgcagccggcggcgggaagcggcgaatttggcctccgattccgctcggtcctgccctcccccgcggagaggctcggggcgctcggccggtgcccaggcctcccgcccccgcgcgcatccccccggcgctccagcccctgcccacgatggcggcacctgccgcgctcctacgccagcaggtcgggccctgtgcacccgcgccagctccccgctccccgcgcactcaccgtccccgtctcgagggcccggccgccgcgccgcgcagcgctccacgctctggcctccccggcagccacgcgccgcttcattcatccgctggggccgcccccgccgcagagggaggggcggggtttcctgcgcggggcccgcctcaccccccacggccaatggcagcggcgaccgccccctcctcccccccagggcacagaggcgggaacgcgcggcgggggaccagggcgtctctctccggagcgctgccgcctcctggactccccgctccagctccaaggaccggcatcgctgccgcagccgggaggccgagaacgcgcggtggcgacgccgccccaggccacgcggcgaggcggttccgaacggactcgggattcgctcctgggcgctgtggggccgagtggagccaagcggccgtttttcagctccgcccttccgaaaggctgccgcagggtcggggccacgtggggcccgcggcagaggggctgggggaacgccacgggcggccctggtgaaggtgcccgccggtctcggcctgacccccaggccctgttctggcacgcgccccacctgcgcgcacagtgagaccggcgccctagcctgggaatccggggaatctccagcccgttgccttttccataaccccgtcttctttttcacactagctctgagggtggaaggcagggaggtgccagccacgttcccttccacagagggaactccctgttggaattcctaccccggcttcctgccgtctgtcctggaacacattgctccaggcctccgagcctcagtttcctcgtttgcaaaatgggggcgataacagagcgtcctcaaaggggataagacggaagaagttggctcatatcagggctcataattgttgccaagtattaacaggtaaccacaatcacactccacaaagcttcccttttagtgtcagtgaaattaatttaaaagaagtttccgaaagtcaagtgtgtgtgtgtgaatcctgagataagtcaggtaaggggggaaatgaccacctcacggccccaggctggtgaggaagtcctagccacggaggcggtgctgcaggacctggcctggtggcatagcgtggcgggcgggttcaccgtggagagacgaaggaggtgctgcggcttgtgagaaaaggcccacaaccccatgcagttatttatgaaatggttttccttcctccagggcttggggctcctgcccactcgtatcaggtcccgggacccccccggtggtgtcctcagggctcccgccgtcccaggccgccctccacttctggaagcagacacgaggccacgagacccactgcttttgggtatctgctttcattcctgacactgccctttaagagaaaaaagtacccacattgttcccagatggagagggtccctcccagagggtgaggcactgccacaggggctcacggccctgccaggagtggaaggtgcacacccagaagtatttctcctgtgaaggaagggggctgagcttcgctgcagacctggcctcaggtgtggatgagcttcgctgcagacctggcctcaggtgcggagtctgcgggagcagcatttccaggcagacctgacagaaggtgcctttgagaggtggtgagctccgtgttacaggaggcttgtgagcacaggtagcccatcttctggtgatgatgctggagaagcaattcaaatgtcagaagcaggactggactctgtttccaaaactcacgtctggattctaccccctgaaaacattatttacacaatgtttttcctttaaacaattcacacatttgattaaaagggtaagtttattttttaaaaagtcagtgtcaattaccacaaagaggtcaccataaaaatagataaaaagaaacaaaatggcattaaattctagccaaatattgctgcctgtggagggctcccggcctgagacccgcctcagaccccaccaggcattctttgggattcctgcataggcaccattggaaaggtaaatccagagcaaacatttcaggtacattcgtgcaaaatgcaggccctcagtcctgtcctcaaaggcaaatgctggtgcccaggctcctcaagaggccc

SEQ ID NO: 1562122 - DNA, 4001 bp, Homo sapiens
gaccaaacagctcagattatgtggggagaaagcacggatcagggctgcttctcccaggacaaaaaaaaagtctgtgacgaaaagagaaacaaaaaagaaattaagatcacaggtaaaatccaatataggaaggccaacacagaatctcactgaacatttacactgaatgggaaaagacagggaagcgctgaagacaaaggcagaaagagtgtagagggaaggaggggatgagccaggaagaagagttagggaagatatgggagaagacagttctagggagactgagtgccgagaacctctgaagcatgcaaacccagaagaggactgaagcatgcaaacctggaagaggactgaaattaaacatcctcggagctgaaatggactagtgatgaatgcgaccaggttaatgaacatctaaatgaccacaaatttcgggtctttttcctcccaaaaagactaaacagtagggggaaaagaaagcttccttctgattccagtattctatactttgcaggatacagcaggccctaggatgtgtcccactgagtacaaatgcggacaacgttttaaaagttgccttcagaggccgggcacagtggcccacacctgtaatcccggcactttgggaggccaaggcgggcgaatcacctgaggtcaggtgcgacctgaccagggcgaatcactttgagaccaacctgaccaacatggtgaaactccgtctctactaaaaatacaaaaattagccgggcgcggtggtgggcgcctgtaatcccagctacttgggaggccaaggcaggagaatcgtttgaacacgggagacggaggttgcagtgagccaagaacacgccactactctccagcctgggcaacagagcgagactctgcctcaaaaaagaaatttaaaaaaaatttgccttcagagacagttttaaaaacataaatggctttgtagcatatttatttacaaggctatactaattaaaacagtgtggcaacgacattaagatcagcggaacagagcaggtaactcgggaaaaaaaaggatttcgctgcttaaatttgtggctcttttgtaaatggaatcagggacctagaagagaatataattctccacatccaactggttcaaggcttagtttcgttagtaaacagttcacattatccaaaaagatgttcctgaacgtggcctcaaagagctaacacgggtaggccctgacgatcgtccttttccatctctcagatgaaaatgggtaacccagggtcacacgcttgttacagccagagctagaccttgaattccaaatccaaggctctgctgcgtagatgaacgagttgtgaaaaggcttcacatcctggtggtcagagttcacccgaaattcacattcgaaggtagaaactccacccaaacggcggccagggaaagtacactctggagaaaaccaacacctccctcttgggatcctcgggtccacgtcccaaagtggtttcacagggcgggatggggcaaccctgagtgctgtcaagggcttcgtgctccgcgacgcccccaggacctcaggaggccgccggcccgaggctacctcatggtgggggacagcccggaagtgaccccgtagccctgccggtcgcaaggccgcctgggtctggaggtcggagccgtcccctcggctagggcgcctcggggtcgtgaccttggtctgccctccgtgtcgccggggcccgcaggcttcagagttcgctcccctcgctaggcccgacgcctagaagcctcctgcgggccgcctctgcctcgcctctactccagggccggcgtgcctgccctccacggagccgacccgcgccccaaacttactcaaagacgtgctccgaagtccagatcttcatggtgccggcaccctgagagatgtccgggtagcgccaggggacaacgaggcacagaggctacacctgcccctgccccgcccccagcaccccagccggcggcgcagtgcgcaggcgctgtcgggcccgacgcgagggacgtccagacgcgcggccccacgccctatcccggcccgggttttgccccagccttgcgcgcggcgcaaggaaaccccgcctcttagcgccgggcgcatcgcgccggcgcagtgccgccgacggcagctggaggggccggcgcgggcgctgtgctgcgcaggcgcggcgggcttgtagcgagccttgacctctgggcagagttgggtcaggtccaggaggtgcctgcgcgcccgcttggccctccttgtccttctggcccagcacatcctcgcctggcatttcgaggcgtgtggacgcatgcggtcagcctgctgacatagatgttcgttgtggtggtcacttgtgcaaaatttcctggtgccctatagagagttccagccacctcctgggtcagcccgggctgttttcccaaatccaccagccacccagccgatcagctgggccagtcccacctgcccgccaggagcttgcagccctcggaggggataaataaggcgtgacgcggagaagctaacatcagacctgcccatgaataatacccctacgagggatgcggtccggaagcacggtgccaggggtcgggtagaaaagcttcctggccgggcacaccttgccctaggtgcataggatggatctgagctgagatgtctctcccagagagacttccctcgtcaccgtttctcaccttgttgctctgctccgtcacaatatcctgttgcattttttatagcacttacccctctgacatcatcttgttaatttatttgtgaaaattcacaatcgaactgagttcttgaaggcaagaatcttgccggtcttgctcaaaaatcatcctcagtgtctcccatatagtcaaggctcaatgactacttattgaaaaatgaaaaaaatcaatagctatttgtgggatgaatgaattaatggagtcatctagtttatttgttgtaacttccgctagactgtaagcccctgagggcgaggctcttgccagacttgttcagtgatttcccccttcctaaatgacaattatttgttgcatcaatggatgaaagaatgactaagaattgctggggcaggaggaggtggcatgtggtttcattcagagatgagccttgtccagggaacagactgcctggcttagctttcagaatatggcttcccaccctgctctcctgcactctccacagccgtctacctcctaacagaacaatttgccattttcaatgaaggttatggaggaaaatctttacatctagttacttagaagcttgttagaaggaccacctcattcttgttcttagcttgtttgattgttaaagacaaaaagccaggttaatttaggagggaggataatttttcaaaataacataagtcctttatacaggaaaacaaaaattacattagacaggaaggaaataatatggttgggtagttgctaagtgcaatttgtggtacctgagattttctttttttaaacctacagtacttaagagtgatttcttggggaggtaatgctttaagggctactgagagtacctcagccttgactaagatgcagttaacgtcgctgggtgttaaaaacactggttcaagaaccatcagcacagaacagcctgtccctgctattcctggagttccatgaggctgttcaccattcagcattcctgttctgtttattttagagaacattattctgctctcaagttcaaaatttctgtgttttagtcatgaaaattaaatgacacctatctcccgtgcccccaacacacatactatatcagtctaattttacttactagatctagagtggtgggatggggcatggaaagatggagatccaggacccaattgtcttctctgcgtgtctcctcatggtagaaataataccacctcttgcttggatttggagggtaagacttacataatgattatctcctggagactctgttaggagacacagaggaagcaaattaatggttttt

SEQ ID NO: 1562123 - DNA, 4001 bp, Homo sapiens
gtctcattttcaccgtaaaactctaaactcaaagcattgaactagataatcctcaaactccactgatcctttgtgatttcacctcagaaaacatgatggaaacaacctgaataataaattcttagtgcacatagtgctttgcagagcactttcaatctcattatgtacattttaccgataaagaaactgagactcagaaagacacttgcccaggacccccacccagagacactagaatagaatcaaagccacaggcgatcctatggaaatcctggccctgagacctggagaacagttctcttgaaggacaagggagtcagacagaggctgtgcttggagtagggttcaggagtccccctgcccatatgcctgggcctccagagggttgaggctgagagggctggagggagctcagtgtgccctcatcccctgcttacctttcacaggggaaacgcaggatttcccacacatgcccatgcaacacttcaagtcacgcttgcactggccatccatctcacagaaattgggggggttaagcatcaaacattggccataagtcactgggcacttcccaggcttcctccttgctgggtgagagtgaggctaccggtcagaggccttgtactttatacaacccctcccatccccactttttagagtgagcccctgctccagcttcagcaggggggatcatcccctccccacctctatcaccaccaccttctccctaaggcggcccccaaacatagcacctggctctcctagaacttcaggccccccattgatgcaggtggccagccacccagtgctgactaggtgggaggcttccaactacctggctatctaaatgcccgctgcttcaccagctgctggctaccttcctgcttagggcagtgtgactcactgacggattgacaaggaggcctggcaggacccatcacccagttccatccctctaatgctgtgtccccaggctcactcctctctacccagttccccgacctgcttacttgggtttggggtgtcaacaggatccaggcatttgatgccacaagtgtcaggacaacatctcttcttccctggacactgccagtcactctggcactcaggtttcttgtatctaaggcactgggcagatttcttaggaggacagactccagctttgaaggcttttgaagagaaagtcaagaggtcaggaggaggctgggtactgaggacccatcatgcctcctgaacaaagcaccacttttgagggggagagacccttacctcagtagctgtccacaaagcccaaagggtcatgcctgcctgatctccaggtgtattgatgggcttgattaaattagacaaatggacaggggacgtttcacacccaagaaaagggcagcaggcttctagtcaagacctcccacccaagagcaaaacaaggctacacaaaggcagagaggaaggctgggagtgatggagatggagagaggtaaacaaagataaatagaaccagtgtgagagaagttgagagctaaagcccaaggcagaagcacagagacaaaatagcagaagcaaagacacaaggaagcagagtcagaaactaatgatttgagagtcgcagacaggtgaagaagaaggcggagtatgagagagagagagagagagagagagagagagagagagtgggacctgggctgacagcatggctgcatagaggaagcatttccagaagctcaaactgtcacacaaaccttggagctcagccagacatgtattccaccctcagggaggtctcccgaaactaagctgagggatcagagcctacagaaggggacacacccacaccacaaggagaccccacctctgaccctgcagcccagattagaccagagtgactccaacttacactttccagagccttccacagcccaaggtgccagagttcccagggcaagcagcaccaggaaggggaagaggccgctggacttcatggtgaaggcaggagtgactctgatggccaatgccaaacctcactatttattctttcaccagtgggtgtggccccaccagaattctttcggcctctcccagctactattgcataagcaggaaacgtagccagagaccagaaatcctgacaccaaggagattgtttatctttcctatgccaggtaaggctatgaggccaacacagcaactatcagaaaagaaagggaagagattggcctgggaagttggttgattaaagaggccatctcagtgtccatctgagccctaaacatcacaagatcccaggccattagccttataggtggagagagggaagaagtggtcaattgcaaaggtgctacccggacctggaactaaaaccagacacagactccctgctgagactttgtgcaatacattctattctcacattgctaattctgattctcacattactggactctcaggcattgtgaaactctgctgattactcaatgcagtttctttctcaaaagttcagctcgttcaaccaactgatacttagttccctgaaatatttacaccgttatatccccagtgcctgttctgtgcctgacacaggaaaagcactcacaaatgaaagctgaagaagagctccgctctccacaaatctctctggagctcagttgtctcagctgtgaaatgaaatgatactaacaagtcagcccttctcagagggttatgaaattaagggcatgaagggactctgaatgaaaagaacaaatgaatagtatcccttcccactaaagagaattgaaatgaatctgagataaagggggaaagcagctcatcagtcactgtaatctacatttagctgtgagataatttgagatcttagaggattgcttcctaaaattccccaaaatcccttacagatctcacatgacagcaaaaaattaaacccattctatttgctacccagtctgcataggttgcttctaattataaagagagcgaccattatctctaaaattcagcccatagctgagtgtagggtcgcacacttgctgtctcagctgcccaggaggctgaggtgtatggattccttgagagtaggagtttgagaccagccctggccacatattgagaccccatctctacaaaaaaatgtaaaaaattagccaggcatgatgacgtacgtatgcctgtagtcccagctacttgggaggctgagccaggaggatcgctttagcccaggagtttgaggctgcagtgagccatgattgtgccactgcattccagcttgggggacagagcgataccctgtcttaaaaaaataaaataaaataaaattcaaccaaagctcatctagctacaaactccaagctcttgactcattatcttcatgcttggaattctcccattcattcctaaggtgaaggtttgtggaactttccacagacatgaaagacccactcattatcaagtagcgatggccccacatgaagtatttaagtattccacaaccaaacaggcaactggcagcagatccctttatacaaaagtcactccatggtttgaattttggtggatcagaagacttggacataatcaatcatcagtcaaattttggtggaaaaagaaaaggaagaaaattaatatgcacaaggtaactactatgagccaggtgcattcactcttagttggagtacttagtagggtaggtaagagagaaatggaggctatgatttccaccaatgggtaatgacactctcaggtcaagatttttgttctcacttccaccacccaggggataatttgatttctctcacagagttcctgttctctctctctctctctctctctgtttgttcctattttcctcagtgccacactcaagaaattatctggagttttctaaatatttatttcttaaagaatgaaaaggggctgggcacggtggcttatgcctgtaatcctagcactttgggaaaccaaggtgggcggatcacttgaggtcaggagttcaagagcagcctggccaa

SEQ ID NO: 1562124 - DNA, 4001 bp, Homo sapiens
gaaagacagaaggcagctgggtgcagtcgctcatgcctgctttcctgcactttgacagaccaaggcagaaggatcgcttgagcccaagagttggaggttacagtgagctatgatcccaccactgcacttcagcctgggcaacagggttataccctgtctcaaaaaataaaaataaaagaagtaaaataaaatgggaagacagaagaaagcaaggtgccacaaaaagctttggtaaaccaaggcccaaggttttccaagtcagtattgaactgctgtccacatgcaaacttttgagttcaacttttaacaaattaaaagtacaaatatgcatacaagatatgagaaagcaagaagcacagtaaacaacttttaaaaaaaaaacgcaaaccagtggtaaattggatgctaagacttacagagaaaaccctacatttcagatgttataacagaaattacatataagtatattgggatgacaaaatctcttttcaactttttggaaagctaaattgacgccctaacatcaagtcaatgaactaaaagcacagaaaaaaacctgtcaaatatccattgcatttagaacatgcaataaattgataatacactgtgaatctagttaagaagcacgggttgaacaaagaatgggccaggccgggcgtgatgtctcaggcctgtgatcccaggactttggaggccaaggcgggtggatcacctgaggtcaggagttcgagaacaacccggccaacatggcgaaccctgtctctactaaaaatacaaaaattagccgggggtggtggcgcgcgcctgtaatcccagctactgggaacgctgaggcaggagaattgcttgaacccggggggcggagatggcagtgagccaagatcgcgccactgcactccaacctgggcaacagagcgagactccatctaaaaaaaaaaagaaagaaagaaagggctgtatctttagcccatgccctgaatcaatgttccttgaactttaaggtacacttcttgaggaagattctgattcagcagctctggggtgagagtcatgaagtgtaattctaacaagctcccagggatgctgatgctggtggtaggtgaaatgaacttggagcaacaaggccctaagtaactggaatattagttttaacgctagccaactggcttacaaatatcgttatgtctaggatccaagaagtaagtgtcaataccattaattcctacacccggccaaaaaaattaaaaactaaaaataaaaaaaaatagttcaggggaaggagaaagcaaatacttgtttatacagtctagcagtgctaagaaccataaaatactgttatttgtctcaacctagtagatgtcaaggtgataaaatgtaggctccatgagttaatggattttttttagctaactcctgaatccttatggcctagcacaaattaggtactcaagaaatgcaatgaataaatgaatgaatgggaagtatatacaaacgcaatctgtatttacctcacatctccaaaaatgtctgggaagggggaggtatttgtactgctggatgcaggtagccatgatttgatacaaatacctggcccatctactgcattccctttgtgcaaagacagttaactttcctgaataatatctccaccgtaatgcccatgctcatggcatcctgatgtttagcaactttttggctttttgaaaacaatgaagaaaggtggaagtacagggagaaggattcggaaaagtctcaaaaaatcaaagccaaaaaccaggagggaggagatgggcaaacagttcagttcacttgaaggaacatctgaggttgtcagaggtccatgtgcttacctatgatggtggcggggtttgggctcgggctttatatgttttgttactgtccagggtcactggcggagtagtacctggctgtggaaactcggactacacaggtagccggaactgcagccaaccttcagaagcttaagggaagcactttcgcgcttacttcctccttcccagggtctccgcgcgcgtttgggaactcagccgccgcccaaacacaaaatgatctgggcagcttcgctgcaggattgaggccacagccaggatttaagatggcagcgaaacacttcgatggcccgtggaatctgcccaaaagaaaaatggcctctgttcagaatatcgcggctttcaaagtgggcccaaaacaaaaatggcgccggacgcaggctatttttaaaggctgggaccccaatgactctcattagcaaataacgtatcatggtaactcacggtgctaggcagttgaactgaccgagagaaaaaaaaacgcttttctgtggtgtgttttcttaacattggaaaatgactagctcaagaatggaacatatattcggtgcgaaagattgtgagaaaggaaaggtagctttcacagtgccggataaattttaataaaaatagccatgtttgaacataacttcctatatgttttttaatgttaaaagagaataaaagttttgtcctggaacccagaagcaggatggggaaatgccgggtgaattatctaatctgtgaagagtacgagctgcgaaactccgcacttccctgtaagccctcaggaaggactgagggcggatgctttagtagaaggcaactagctctcacggcgcatgtccgttttccaaacccgatcccgggagttacgggagagtaaaaatcctgattttccagacaaccgcacagagaggcgggatactggcgctgagcgacaaatccaagcgctttgtaattggtcatgtcaggacagagagcagagcgcagtggactatttctttctttcattcaataaatcattgtcaagcgctcaccaaaaggcagaagctgtgccattttgatatgttatttaaattttatgcgttcttttaaaatttcagtttcaacaatttgctggaatatacgctgaataaacttcgctccccgttttttccggtgacggccgctgttggctggagcttcacggaaaacccggagaagcggagtgggggcggcccggcgtcgaccgcagagctgcgcgtgctccgtgccctcgcgcgacgcgaaggttgtcgggatccgcggcagcagcggctgcttgagatctgtttctggggcctctggcggtggcggcctggggcggcgcgacggctggtgcgcaggtgagagcgctgggactctaggtggaaaagcccgctttgtgtccggccgaagagaggggaaggggcttgtaggcgcctccctctccacccccaaaggtcaccggtgtcctcactgaaggatatttgagggcggggacaaggaggaggctggctctctgtaggaggcgaaagaccgacctctgaaatagctgccgatggtaaatgttgcggtcggcacggatgcgggcggcgaggaggtcttcccgccggtggggagagctggaggagtggcgcctcaccacgctcccacctgcgctgccgccttctacgccgaacctgtgactccccgtcccctccctcgctgggaggggccccgtgtgcccctgactgtctggagggtgcacggtgtaccccaggctgtcgggaggtgggggccgccctccgacggcgttagagacgttgtgcagcgtggccctgccagctacgtgaaagcagccgcggggcttgcagggctgtggaccttgtagggatgaccctctaaggtcatgctcgtcttcctccccgataagaccatacccaaatcctgttgccgtttcagagactcaatatgacggtttcattcattcattaacatcttcagtttatccataaacagatatacacgtgtctacagcactgccgagttagtagatacggcagtgaccaagagggacttgcacggtcctgactccatgttctagtgatgggggagaaacaatacgctccctatccatgagttccgcatgtgtgaattcaaccaactgcggatagaaaatattttggggcg

SEQ ID NO: 1562125 - DNA, 4001 bp, Homo sapiens
gtgccatcagggttctgtttcatccatattaagttttttgtcatccaggacatcataaatcatcagatggggggttaggtagagaggctggggctggaggtaaaatctgctatttaaaaccatgagaatgatgtacatttaagatctgtatgtttgcaaattgatgcttgatttttaaaatcataagaaagaatgaaacggggaagggtttgtaaatagaccagagagagaagcggctacggacaaagccctggggccctccaacatttggagctgagtgaaggagctgtctgaaaagaagtctaagaaaaagggcagccaaggagggaagaaaaccagaagccaagggaggatactggttcttgaaggagagtgttcaaggagaccaggagaggtggaagaagacttgcttttgggggcgtggagctcactggagagcttggctgaggctgtttcagtgaaggggtgggaccgaagtcagggcaagccagcaaaagaacggaagagctgtgctctgaaggagcgagtgcagaaggctctccagagaagttttgctgtgaagggaagaaggtccgaagctggagggaatgagggattaaggcgaaaagggggctacaaaattggagagacagggtgccaaggcatatttcttataatgctgtggacgatccaggggaatagaagccacttctaacactggagagagaggaggtaactgaagaaagggggacagggagaggaccttggagtccaagcggaggcagggccagcggcaggaattgggatgccctctccgcctaacaagaggccagggggcagtggtggccgaatgcaaatgtgggggcttcactgcacacactttcggatgcatggcaccccggcccgcgtcgctcccggtaaccccagggcacctactgctggctccaatcacggccaagttgcccccacagactggtacgtgatgtgccaccaacagcaggttctgcaaacaacctgtgggcacctctcactatacgtgccgggcaccgagcgtatctcatcgggccaagtccccctggcgcaagctccgcgggcccctcaactgctctaaaggagccctcgcccctaccccagggcagtggcttccctcagcccctcccacaaagtgagccctccaacacacccgaaccctttgcgagcccggctcccgccaagcccgggacaacccgtgagcccctagttggcccttaagagaaagctgctcctcaccctgcccggggccccaaggggaccacccggacgcccggagcccagagggggaagtcagcacagcctctcctggcgttcgggccatcacccgggagccttctgtcctctccccggtgcccaccctcccggcagcccgagtcgtcgcggggcgtccgcgcccggctttgtctgcgcccacggagcgcgcctgcagggcgcccgggacgctcccctcccgcacgtagcccgggggtccgtccggccctctacccccggcgcccggcccgggccgagcagccctggcgccgggatcgccgccaccccggcccacaccactgcttaccccggcggaagccaggggggcgcggcgccccctgctccccgcgagcctcccggaacgccccgcacccccgcccgagcgcccgagcgccgcgctggccgcccaagccccgggccggccgagccctcggggaccgctccgggcccctcaccctctcgcggcggccgcagcccctgcctgcgcccgggggaggctgagagccggggcccggggccggagagcgggcgcaccgtacctttccctgctgagccggggaagtaagtctgcggcgagcggcgctccggtctcggcctcctccgtctctcctcctccgccagccgcctggcttcctcctccagccgccgccgggaccgtaggggcccgagccagccgccgcggcctgtgtggggccccgctccgcctcgcgtcccctacccaccccgctccggcccggccctccgctccgcctctgggcggggacccgccgagctcctccccgggcccgccccgccgggagccgggaagctagaagcccctgaagccggagactgctggatccctgcctcggaaacccgggtcccacgcccacatctgggcccgcaccccctccctccctagcaggggcccccctcccgcaggggacccacagcgggacaggccccggcgtgtagcacagggcggcggcagaggtccagaagccaggagggtagaggtggccctggagaaatggggtttgatgctcccctccaagagggaaccgcttggggacaggcttcaggactgggacaagtgaatttcaggtgaggtttcctctcagcagaaaaagccttgtcattgcccaagctattccatcccctggaagcctcttctcctcacccctccccacaaatccctatgccctcttggggttaaatgttagtctacatgtcacaacctcctctgtgaatcctcctgggtcaccaaggagagcagaatatttgttagctctcagaattatatctcctggatttgaattctgcccctaagtagccttaggtaagcttaatctctttgcttcagtttcttcatttgtaaaacagggttaataaatagtacctactccaaagagtttattaaataaggccgggcgcggtggctcatgcctgtaatccccacactttgggaggccgaggcgggtggatcacctgaggtcaggagttcaagaccagcctgaccaatatggtgaaacccgtttctactaaaaatacagaaattagctgggcgtggtggcgggcgcctgtagccccagctactcgggaggctgaaataggagaatcgcttgaacccgggaggcggaggttgcagtgagccaagatcacaccactgcactctagcctgggtgacagagcaagacaccatctcaaaaaaattaaaaaaaaaaaagtttattaaataaaaatattaatatggacttgatggattacaaatgatgggaaactatgcaaattggcttggtgtaagcagacaggtaatttatatgctgacataaaaggtggtctgactgattcaggtaccaagaagcacaaaatacatcaggatttggtcttccttcccctatctttcatctctgttctttgcagtaggaagttggcttccagcagctctaggctccaccctcacagcccaagtcctcatttatttcagcaaaaagccaaggtgacacctagttgccttggactggttcacatatcattccaaactaatcactgaggttctgatattcagattagttgagtctgagtcacacacccatccctagagtcaattcatcctaattcatgtggtggagagtgaggaaaggtgatttcagggccctgtttatctttagaaggtgaacggacccagagctgtgtgccaagaacacattaagttcccaaaaagtattggccatggttgaagaccttcattacatttcaggagtgccagtaccttttgaacatctttctatgttaggggacctttccatgtcatgaatccccaacccctccccacatgccaaagccagaaacactctttcccagtctcctttgcagctgaagcgctggcagcagccaggccctgccaacaagatgcaccactgaaaattagtgtatggaagtgagcaatgctgggaacatcaaacagaatgtatctttaaaaaataaaaataaaaaagaagagaagcaagccatgtgaggaggcaggagtcacccagaatccaccgggaggagggtggaaggatggcactggaggcactaagggcaacagtggcagagatgctggagtacttgccccactgaactgaagatgcacgtctcagttgcccattgctacataacaagctgccccaaatatagtggtttaaaacaacggtttttttttttttgagtcagaatcttgctctgttgcccaggctggaatacagtgatgcgatctc

SEQ ID NO: 1562126 - DNA, 4001 bp, Homo sapiens
cagagaggttaagttgcttgcccaaagtcacacagcaaggaagcagagcaaatgccaaggaaccatttttgtgagagtttagcaggtaccggcactttgccaggtgcttcccatatgcattcctgcatttagcctgtatagaaaccccaaaagctgttctcatgcccatctgaaagatagagaaaatgaggctcacagaagagaaacatcagcctaagttttgagaaagttctcaaagaaggattcagagccaggcggggggtctgacaacatcctgtctggctagggagggggcggacccgggagagggtgtggccgggtgggccccttcacacctggcccccacagcaaggtgttggttgcacctttcccatatccagctccgacccatttggctgagaaacaggctgcaggggattgggaaggtgtctgctttgcccatctgcttagctgatgaagaaagtttctgccaaacgtttccagagagccaggccctggaacttgagctagaagttagaagactcggggcctcagtgtccacagctttgggaatgagaacagcaagcccagattcacaaaagctgccagagagagcaacggtgggggcgcctggaggggcacgtaccagtgtgggtccggacatggccttgtagcagccagggcctagagaaggccttcccgcaggttccgcagacgcagggcagcgtgtggcttcggatgtgcatcttgagggcacccaggctgaggtattccttgttgcagtatttgcagttgaaggcctttcgagcctggagatccttggcctcagagagctgggccagctgcttgggcacttggcccaagcctgggaaggcagcataggcctcggcctccaaggaagagactgaagtagaggagaaggacgaaggagccggtgagggtgggctggggggctgggagcctttcccactgtcctcatctgacagggaggtcagctctgccaccctgggactctcctggagccgaagggaggcccaggcaattggctgggcttggggcgccaggacagagtcccagatgagcattggcagcgaggcggtggggttgaggatctccggaggtgggatggctgccagcaggtgggcctggtcgtagggctgctggaaggtaaactctgagggagaaaaagcagagtcaggcgttaattaaatcattcactcaatcaacaaacatgagcccaccgctggccaggggctgggtggggccgattctcaatacataattagatcaaaaaaattatccacaggacagaccaggttcctgccctcctcgcccaggtcacccaatctgagtctctcacacgtaggacccccagttgaaggaggtcatttcctgatctccctctcctaagtccccagtctccagcctgaggccagaaccccatcatcccagccccggagccaccaccctgccccaatccccctcctcacacacatctcgtctccccacccctcccctcaaccctctggactccggactctccccagcagcgtccagagggccctcctgacacaggcctcctctccttcccctcttgcggagctcctccgcctctcgccggctacaaaggccccccaagctgaagacccctgccctctacacggcactcccccaaccacccagacagatccccggaactggggacccacttgcccggtctcccgagcccgcaatggtccacaaaacatcctgtgactcgatcctggctcaggcaggccgcctccctcaggtgccccccacgcagccttcgcctgtctcccccaaacctcctggagcccagaacccctccaacgcacctggattagagtcctgcagctcgctgtagttaggcttccgattggggtcggagggcttcctgacgaggaaagagcgcggcatagtggtcgaggcactggggtcgccgattcgcgcagcagtagcgcagaagaaccactcgctaggccgtgccgcggcgcaatgaatgcagcagcgccgccaactcccttaagtactccgggggggtggtggggggtgggaggggcggggccttatctgccacgcccctttgtcacctccgcgccaatcggaggctcgtctccgccgaaggccactccccgagcaggtgcgccggctgctggccgggctcgcgccgcgtggcggtgagagcccgggcggggactcctccgaggcggggttcgctggcgcagcgcgggtcgtccccggtgctggggctgtccggggcgggacgtcgagcgaagcgaggcctctgcgaggtgggaccccggcaggacgccgcgcgcccaccggctcagcgcccggtggtctgagcgcttctgacgccccctggcgctgcgcgccggccgggacacctgaccttccgacgcccgcccccgcctcgggcttgggagggggcggaaatttcctccgcccggctggcgcctggagagcgtggcattgacgagggaaacgcacatcactggggaggaagcgaggaaagggacaccgcacgtggctctcggcggcttgaaatgccacggcctttttgcaaagcagcctggcccagctagccaagagcacccgttccttcccttatccagtgtttacggagcgcccagcacgtgtggggcactgtacctggggccagggcacagccccggacagaacactcagagcctctcccgaagggtagcttctggtccagtgagggagacagacgaagtaaacagataattacaatgcaaagggaagtgtgctttggtgggggagagacgggacgcggcgaccgttaagaggcgggtcacctgacagggggtcggggtgacttcccagaggaagtgaagaattatcaagggaaaaggcccgagggaagaagtggcaactgcttcagagtaactcctagagagcagcttccagggatggggtgggatgggcatgcccggaggggtcagatgtgctgggccccagggcctcgtaggagtttggactttgcctcaagggcactggggagccaccgaaggattttcagctgaggagggacctggttagagtttcgttgaaaaagatccctgtaggctggcgggagaaagaaggcatgggccgggcgtgtctcctcaccccgtgaagatcctcgatcctgtgtctaaaggctgtaacacggctccataggggccctgactgaatgcatgtggggtgggcccaagtgaggggcagctgcacccccaccccagcttccctgggaggcgtaccaggcccgggggtggctctgaaataaacctcacaggtctcaccgttcttgtttccacctgtgaaggaagactataaaaacctataagcaccccacaccaccaccaccaccaacctgaagggcagaactactgtctgtttagtcacttggtgccgggtgtgacagccgtgaacaaaatcgtcctcccctggttctagctggagagcgggcagtagggtgggggacagaggcagtaagcagtcattaagcggaatactccccgtcccgtgtcaatttagctccaatcaggatcctttgcttgaagccaaagtgaggccagatcaccccctcctctgctcaaaccctcccatgcgcctgtctcagagtaaaagccaaagtcctctcctcagccaactcggccccgctgctctgaccccagctgacattggcttgagcctctctccctcccccatgcacaaggatcccacccccagccttccttctgttcctccaacatcccagacctttcccaccttggcacctgctgctcttcctcctctcccctacgtctcttgctcctagatcttcacgctggcttcctttcattctttgtttcagcagcaacttcactaactgctcagcctcgtttagtgaagagagaaatggcaaattcaagccacagtgagctgccatttcacgcccatcagaaggacaacaaggaaaaatttggtcactatcaagagttgatgaggaggtgaga

SEQ ID NO: 1562127 - DNA, 4001 bp, Homo sapiens
atgataggaggtatgactatctaaacacaatccaagttctcatttggggtcttttaaggggatcatgatagcgtttctttaatgcattgtatagattattacatatgacgctgttactcttttttgctaatgactcaaatggcataattttgactctggtcatttttatgccagttttatctacatcaaacagagagaaatacccctgatgacttttgctctctcagatgctccaagcctcagagtagaaaatggttaaagtagttattaccacctcagcaaaatcccgcagtgccataagagaaattgcagtagacctttaggtcagagttaagttctagtttaacaccatggttctttacctgcattaccctgaaggacacacttggattctcctgaggaaggccagtcttaatattgtcaaaatctaaagctatcagcctgcgataaccagtgctgatagcaaatacttccagtaactctgaaaccgtggccaaagaggttaaatctattcagtacaggaccagtaaaatttctcagatatgtgtttttgtggatgaatgcttgtattcatgcctgattgcaaggatgggggaagaaggaaaaggaagagtgattcattcttaaagttgattctgcttagttcagctaatctcacatttttatcaaatggaaacatagagagagatgtatcatccctataaacagatagcattggcttcttcatatatacagtacttatgctcacccaagatctgtagacagatctactctgtgttaaaaaacaaaaccaaacaaaaaccttgataccctgctggaggataaatccatattttttaaaaaatgtatttattttctacgtaaaataagggtcagagggcaacacagaagatttccacaagtagactattttgttgaagctatgcaggaggtgaggaggggaacaggaaattgtctgcaaaggagtctctgtgaggaagatttatttctttcttgttttcttttaagctactatgactcctctattaagggtctccgtaagaccggggtctcagggagacaatttggtctccagccctggcacatccagccccggccaggcatttctgccgcaggcagatgaggcgctgcggccggaccgctgtccccggtgctgaaaggtcgagggcgcccgcgcgagccctcggtgttgctatccagggtgctgagcgcgggccgccgcagtccccgaagccagcccacccgcgccagccctccgcagagccctcccacccggcacgacccgcccgcctcccgccagcctgcagttgacgtggagcaggcggcataaatcaagtccgcggggcatggaggctgctgtcgctgcagcagctcagcttgcccggggcgggaactccccctttctcctttcgcctccccagcacccacaccctgtctcccccttaattcttccctggataatagcaccctaacgacaacagtcataataatagggttagaacgacaggggaggaaaactcaacagcctaaatatctctgaaaactgcatcgcaaaatggaagaaagagggggtcccactactgtttcaaaagagtaagttattattcggtacgtaccctcgctcttcctccccgtcgctccatttgcagggctcccgtttcccttttccccagcagctcacctcgaaaacactttataaagcccccaccagacgtgcacacacggaataccgcaccctaagtgcaccaatacttgtatttacccaagcccactcggactgcccagctgctgtcccttctgggtatgcagccatcccgagccagagccacgacctggggaggggggttcttacctgggcttctcgggagggttgtgttctccgggcctctgcaggttgcaactgtggtggagccgccgagcagggagggaaggaaagacagcgcctgacctccccgaggtttcgtcttcaatgcaacgtgagctctgccctcatcaaagatggccgtccgttttgacgtcagcagcttttaatagccgcccagcgaggggcgggaggaagtgggggcggggcacggcgggggcgggggcggggcccgggctgcggcgcgcttgactcggttcccagtgcgctggcctgcaaacctgcgtgttttcaccttctataaacacccgcacggggcgactcttatgactccattttaacactcggtcttgggcaaacgcgttcatcccgcaactgcattcctgatgttctttggtgtgtgtgcgtgtgtgtgtacatatgtgtatatgtgtgtgtatgtatatatgtatgtgtgtgtatattttataatacatgtataatatatgtataatttgtgtgtatgtgtatatattcccccccacccccacccccaccccctttcagtggaatctgtggttgagtcatctaaggagaggggaaggcagaggaggggtaaaaggtagtgatgggaggggtgggggaaatttcagcggcgatttgttttctccgaagagggtccgtaggggcatccccgtccaccctcgccagctccatatatggccaggctacgtgggttgctatttttatgagtgattgcttcatgttatcgaagcagcgtcgagggcttgtggctctcgttgctgtggtcagccgggcagcgaggctggcgcacgttattttgaactacgtcagagccaggctctctgagctgttgcaggagtcgggggaaggagaagggaagcggagttagcccagccagcgtgggtttgcaaggactcgaggcttgaagttgagttgtttgccgagggcaaaaacggatgactctgctttcggtggaatttgcagtcggtgctggggtttcatgctgggtgtcttaggggtaccccacggaggcacagacgccccgagggaaccgtccaaacggccgggaggaggtgggggattcagagcaaggacggctgggacacggccgaatctgggggttcactcagtgcgcaaaccccggggtacccgtgcaggctgcctcggggggccctcggatgctcaaatcagggcggggagacaaaggctacttgtgctggtcgtattagagattaaaagtgataattataaagcaacaaccctaactgtcctccctggccgtgcccgggcccgggaagggggtggtgcgcggatcgctcggcggtggcagcctcccggatgattcacaggtgttggggaggctgtcgcggggctctccgcagggagggagggctggggagcgcgtgggaggtgggggacctcgtctgaggaactgtttgtacttttccgggaaggatgcgattagaagtcgtgcctcgcaatgttaaaacttgatggcctcttttaggctatggaaaatccttgtctcgcttaggagaaaccatttagagctgggttcggaaaagcggcgtacaacctctccccttgcaccctcgccccccacccccgccccaccacacacacacacacacacacacacacacacacacacacatccctagctggcctgagagccaagcttaggcaataatacggcctttgattgcgctccattgcggagggagggaagcggggtagggggaagggaagaagagttgtgaaggcgctgcgtttagaaagagacgggttgttaagaatttaataaaggatacctttaatcgaaattagtagacataattgtttcttaaagattccctggcctgaaggcttttttttgacgtattgatgtttttgccataataattaacagtgtttggatgttaattaaagccaaattcctaaaaaaggcatgttgctgaaatttgtttacttaaatattcattaaacatttaagattgccatacaataaagaagaaaatctgcaaagtccttagatacttaattgccaataaaagtctcttgagtatggctcttactttcattataaagcaagttggaatagggggaaaggggtttgaatgcaatgtactgcaaaatc

SEQ ID NO: 1562128 - DNA, 4001 bp, Homo sapiens
ctgctgccagcacacaagaatctgctgcttctgttccctcagagactccgcccttggatgccaggattttccaaacccaatgctgggctacagtcctccttgggaccatcatttgctagaatgatgtcacaacctttgcagtggaaatgttgctgcctgcctaggccctcagcctggtgacccaatacacttcagcattcattacccctggcagggacaccatctgcaggggtgtggaagagacaggcaggggatggggaggagaacaggactaaaagcagtcacctcttcctctcttcccccagcctatctcccaagtcctgagttcctgagaacctactatgtgccaggcacaggcactattttaggtgcttccacatacatctcatttaattttcacatcagccctctgcgggctgtacccctagatttacagatggagaaactgaggctgggggaagggaagtcacttggcagctcagggatgtcaacataggactgtctggcacctccagctccttgaggcccacaaggtcaatgtttcacttaagaagtcagagttgaaagagatcaactgaggaaaccccaattatttcatgaaactaaatttaaattgccttagcagaggggtccccctgacatgtaaaagctgcttgagtgatatactaaaattatacacatcatttaatccaattcctgcatctaacagatgagcagacagacacccacgcctagagaattttaaaatggctacttgtggccaactagcaagttaagggcctagaaccccaatctctggcactttccttacacgactctgcctgcagagatcacctttttctaagaagctcctccagcccatcccgacaccaccagatgggcagagaaggcagaggaaacgggcagcatgtgaccggcctctctttcagtctgcagggttggggaagggaatatggggctccccaggctagtaggtgttgcaaacagcccagatcccggctggggagtggaaggcttcacatcccagggaagctccggggagacggaggctcagatcgtccactctaggacttatgggcattttttccccagatctactgcagggccctgatgcttctcagagggaaagatgggatggaagcagtcattggcacttgaccttggggtgggggtggggtctcatccttctcccacccccaggtacccctgctcctcctccaagaaggaaaagagaagcttaaatgtttgccaaatgccagaaggggaagacaaataaaattggggggtgggttccctaaaagcctcctaatcacccactttgggcatcttctctgctgcaatcagcaccctctaattcttacatttcagggagggggagggagggaagcgcttaaagggatgtaggggaatgaagggagggtaagaatgagtcacgattaacccctcttaggctggtgccctccaagggattctaccgcagcgagcggttgcaagcggcccccacctgccgcggtgcagcgcagggccagctccccgctccgccgcggcctcctcacctgagtccactggccctccgcagccccgccggctcgcaccactccggcccggcttggcgcagcgcctctgcagtcgctgctgcagccgcctggccctgatcagcgacctgcggggttaggaaaaagagatagaccggggcgggtgagcgcgggcggggaacacccaggcagctgagcccccggccgctgacagctgggccgctgcagccagaaggcttggagggcaggctgcctgccgggtgctccgtcccctcctcctcgcggcccgcggcccccaccccaccccctggcactcggcactctggactgcggcgggtgcagctgggcggtgggcccggagatccccggggtccttgtcatcacctgcggaggcttccatggcttcagctgccctgcaggggccgccgaattgctctcccgagcccctgcaggaggcggctagctgggtgctcgccggggctggggctgccgggagggaggggcggggagggtgaggtggatggaggggaccagccagtcggcggctcgccggcagctgcgtaagcggcccgtctttactttccttcttaaagagatagttagtatcttgctctagagggcctgggaacagagacaacgagcacacggggagcggcggcctctcccacctacacaccagccggtattttgagctgggcgatcgattgggcgtggtggaaagcgtcttggtcggctgtgtgaccctgtgcaagtcccttcacctctctgggcctcagctttttcttctctaacatggggtgatgataccagtctcactccctggcacatagttggctctagtgaaatagtaatttttatctaaaagcctttaggaacatttttcattgcccaaaccaagtctgagtaccaggggtatttaatgtgaatgacaagcacttgggctactaacaatgatagcaggaatcttaagtgtctgaaaatggaaatgttttcctcttaagtagtaaaaaggtgaatcattggaaagatctcggagagataaacaatcacaacttaaaatgttaattgtggctcttttccctctgtcttccatctgtcacagggaaaacaagaagaccaaaaagtccaaaaaactggattttctgcctagcccttccatttctagccatacaactttagataagttaactcactttctgggcttggtttcttatctgcttcatgtgtgggaagtaggtggagtgggaatgggctccttctttctgaaccaggcctgtctgatctgtcattactctgctctaaaccatccagtggttttctgtatcgctctccgccacatgccctcatcttactccagctctctgacttcatcttgcgtggctctccccatcactcacttttctcccatcaagctgtccttcttgctgaggcctcactgctgggcctttgcatttgctgtcccctttgcctagaacacaccagagagccacatggttcaatccttcctttcctccaggtctctgctcaaatgttactgtctcagagagggcttccttaaccattctacataaaatactaactccctcctctccacctcctttgcccctagttttgctacacttaattaccagctgacatagtgtatatttactatgtgtcatttatcactcccactagaatgtacacttcatgagggaaggaactttgtttttttcccttgctgtatttccagtgcccagagcagtgcctaacacatagtaggagctcaataaatattgactaagtgaatgagaaagcaagcacacattgtgccaggccccagtcttctatgggaacactaggccagatgccatcctggaagtccttttgtcttaagtctcttaaggctcttaagtccttaagtctgtttactctcgccggtgctgaacttggtaccctctactctctgccccaagctgacttttccaagagaagaatttgtaaagtgacttcactgatttacatcatgactctgcagtactggcctggtgagaaacagttaatattgataatgtacatgaaaaaataattattttaagtttactgttgcttttcacagtcaaatcttttcctgtatctctgagctgcaataaatccattactttttttgcaacaaatgctaataaattttggagaggacattgattctattttctcctgtattccgttaaaccatatcctatcagatagccattattatattatgttttctagaaaaacatggcagagcaatttagcaggaataggaaactagttgaaaaagccatgtgaaatgttgaggtcttctgtccaaaacacctaatgctatattagcaagttaattgataaaatgttttatctgctctaatgctcactgaaattatataagtgacatttttacacttaaaagtgaaaccaaaggaagccatgtaattattacatgtttag

SEQ ID NO: 1562129 - DNA, 4001 bp, Homo sapiens
aggtggaggctgcagtgaactgagatcatgccactgcactccagcctgggtgacagggaaagactccatctcaaaaaaacaaaaacaaaacttgactccacacaaagatactgcgagcctccctcaggttaggtggttcagtttccattcaatgaccattttaaccagcttctaaccacaagggatctgaacctttagggcaacattcactggtccagctcaactaatgtttactgggtgctcactgtgtatctggcactgtgataagcacagtacatctcatttaatccccaaaattgggcccattattatccctattttacagatgaggtcactgaggctaggagaggttaagtaacttgcccagtttcacagctgggaagctgtgttggaacctagacaaaatgaatccagcgcctattctaaccagttatccaaacaatatcctaccaggtttccctgcttccagtcccatcgaatatacatgccagagctagagcaatctttctaaacaccactaagcttatgtcattttgctggttaaaatccttcagtgggcagggtgtggtggctcacggctgtaatcccagcactttgggaggccaaggtgggtggattaactgaggtcaggagttcgagaccagtctggccaacatggtgaaaccccgtctctactaaaaatacaaaaaattagccaagtgtggtggcgggtacctacaatcccagctacttgggaggctgaggcaggagaatcgcttgaacccgggaggtggagtttgcagtgaaccctgatcgatccaccgcactccagcctgggcaacaaaagcaaaactccgtctcaaaaaaataaaaataaattaaattaaatccttcaatgacatgcctcaccaccactgaggtaaaattaacatgcaaggcctttagtaactagcctcctgccaattcttcccgtcttcccttctttcttcctttctcctccagcaactttttctcagtcaacaaacgcagaaaaatccagtaactttttaaatcttgttacccttcagcctttgttccttcagttctccgggtctgtaatattccccccattttcgccgggaacattcttgctaatcttttaggaatctgctcaggaaccatctatttgagaaaacattcttaccccgccccgctgccgttacttttaccgaatgaccacactgaattatattatgtgtccccagctacctctgtgaaggaagcaaacatatttcagagagtagccccagcgcctgagaagtcaggcacaggcaaacacggaaacgtgatgagcaactgagtggagctcttcctccattcgccatcaccctcctccgccctcctctccatccagcagacctagcgagactctagcgtggtccacgagccccttccacccacttccgccaactctttctcagactcacaaacttccgcaagtctgagccttttaccgggtccccctgcggctccagtgcctgctccgaagcccgggacatatatttattcggcaaaagttaacttagtgcctactgggtcccaggaattatggctacagcggtgtcgagagccgcggttctaccctcgcccctgccgagcgacctcggcctccgacaccggttccaaccttttcctcgaccccatgcctagccgaaccgccaaggtcctggtctttcccgcccagaccgagcggcctcggcccaggccttcaccgccctaagtggctccaacccacggcttcctccccgatcagtcgcggttcccactccacaacagactcggaagctcccgcgccgccagcctgtgccctccttaccatggtggcggttctgatggctctgatacccgccggattcgcctcctcagaggcctagcctctctcccacagccgatttcccgccgccgctaccggaaatgcagcaccacgtaaaatgcggtcgggtagaaacctacttccggtccagctcactagccctggagttccggccccggagcggagcttctgccgagcagaggcggggcctggggactgggcgttaacatccggctttgacgtaaggagagccttaagttcctgtttggacaccttcctagcttaaatccgtactgagagctgctctgtgtcacactcatttctcttcaccccgcctttcccattaacctctcggtcctcatttcccatcaccctccccggctctctcctctacagtcactattcttgcttttccctccactggctggacgtgctcctttttcagcccctctgcatttgctttcgcctctgcctggaatggtagtccccaaggtataccagaaggctgctgccctcacctctttcaaggtttaagcttaaataacattttcccagtgaggatttccctagccatcctgtaaccttcccacccacctcatcctcatctctcctgtatttccctcttgctatctaacacgctgtatatttttgttagttattttattatcccctccccattagaatgtaagatccataagggtgtgaatttttctctttgtgtattactcattgctgtagtgcctagaacactttagcacaaaataagggctctacccatatttgctgataatcgcatccagtcgtatgacatttattttttttctatgacttttttttttcttttgagacagagtctcagtctgtcaccaaggctggagtgcagtggcacaatctcggctcactgcaacctctgcctccccggttcaagcgattctcctgcctcagcctcccgagtagctgggaatacaggcctgtgccaccacactcggctaatttttgtatttttagtagagacggggttttgccatgttggccaggctggtctcgaactcctgacctcaactcctggtctcgaactcctgatccacccactttggcctcccaaagtgctggaattacaggcgtgaaccatcacactgggcccttcctatgacttttaaatacagcatatacacccaaggctttcaagtttgttcctctaaccttggtctcttcatttaactcttggccctttatatccagctgccagcgtgatgtgaatgtctaataggtataccaaatttaacatgttgaaaactgaattcttgattctattcactgtttctaaaaccacttcaccagtgttccccatccccgaagtttcttggattaaaaaagaaaaaaaagaaaatgacaaatttgaagcatatttcattcttctctttctctgccatcgaataatcaaattcatcagcaaatcctgtggcccccaccttcaaattatcttgaatatgattgttgtcacccactccattgcgtccactctagtcatagccaccatcgtctctgtcttggatcattgaacgagcccgtaacttgtctctttgcttcctttcttgttctcacggcagccagagggatccttctaaacgtactgggatatcagatgatgtcatgtcctggtctccacttaccaaaaacttcccagcacacatggaataaaatctagctctgcgctcctctccaacctcattcatctccgtcaacattgccctcattcatccttctccagtcacactaatctccttgctgttcctcaaacccagcaaggagagcttccaccttggtgctttgccatcttcacaccatctctaaagggtgtgttctgttgtcccgtttcctgtcacctgtagatgaagaggcgaagcctcatagaaatgaattatgttgcccaaagtggcggagtcagagtgggaatataggtccgtctggctcctcagctgttcatttgcccccaccttacccagctgcctaacacttcattcatgcatgcatttaaaatcatttttatttagcatctactaaggccatgcaccattattgggatagagtcctttccctcacggagctttacatcctactgagaaagacatagtaaaccaaataaataagtatgcaatgtaacattaga

SEQ ID NO: 1562130 - DNA, 4001 bp, Homo sapiens
tagaaacagactgtacacactgtcagttcctacctatttttgttttttaaaagccttcaaatccctataggaaatgggataaaccattatttcaggcactaagatgatgaggtaagaggttttgaggcagtacaatttttaagacagtagtaaataaacacattttagtagtgaacaagtattctaaaaagcacttaccttcctttttaattttgtcattcatattgttgatataaattgtatgatttggtctgatatccatgtttgtgttaaattcttcaggagacagtaaaaaatctgttataaaaaggaaggagtaaattatactggactgtggcataaggacacaacacaagaattattaacttttcatttctctttcaatcccagttgtcagaaaatgtcagtttggctgtagcctttattgtatctccagcacctactagccctccttttcatacagaagaagaacagtttctcacattcaaaacttggagcaccaatacctagccagattttagtaacaccatttaattcaacacatttatttttacacttacgtttcacttatgacacgtgacattttctttccacctcctcaatgaaataattttaaaatgtagatttgaagaaaaatgaccaaagtagcaaatgtacatccagtaaaaatcataaggttagacattaatgaagtttgccaactacttaatgggtgcacttacaaagtccttccatacctattaatttgtatacagcatcaccaagctgtctggactccaaggttatctctaaccgacttgaaagaaaggagctcaatgacagcagtgtggcatgacgattaaactcagattccagtatcagccagatgtgaattcaaatcctatttatgcttcttactagctgtttgcctgagggaagttccttaacctctcaggtcctcatcagtaaaataagaatggtaacagaacctacccaatagaactcagaagactaaatgaattctagcacagttctgcatcagcggtaaacacttaagagtagctattattaacagctattaccaggtaaggaacttgcctaaggtcacacagctaataagcatcaggcctggaaattcagcccttgctttctcctctacacttgtcttcctcatataccacactattgcattttttacatggtttttacttgcaaattgtgaacttggatgatttccttgtgtgccccacatattcctttatctcacagtatttacagagcatccactgtatgtgaactgcattggatgattgacaagggaagagcctacaagcaggggctgcacttgtgcaggtaacaggtaaaacgtaacgcttctcaaagccttgcgaccccctaaatcgaaatctggagaaggggcaggggtcgcaaaggagacgacgaaagggaagtgactgaggcagaggtcaaagtgaaggtagggggacaaaggggaggctcttgcagggtttcatgcgaggtttgatcgtgggctgcgttgttacagggacaccctgaattacccgccaccaccaaaagggagccgctggaagacacctgaaagcgcagtgaactgtccacgcctcgcacgagcagactgacattaactatcctttacttcgtacgcgcaagcctcccgcctctccagacacaagcaccttcgcccaaggccccctaacgaagtccaagggagctgccacgcgatgcccggccccagagtcagtctcctcacccccaagcctgcccctccgagatccaaacccgggccaaacgcgtacccaccccagcttcgcgcttcgtccgctcccagctgcaacaggggagaaaagggccgaggagccaggaaaaccgaaacagcgaggtagaaggcgcacgaacccacctaaggcctacgccgactactgtaagaaccaaaagcaggaaacggagccaggcaccggaagcaacgtagccacgctcctcaatcgagcgccgacaagtctagaagccgagcacagagccgatcgatgcttccgggtctctggcagccagggctggcaatctctctgcgcgtgcgtctgccctgcgggcaggagaagagtccggaaatggaaatggggaaagagaagggggttgtgaggaccatgctgcgagggaatagtgaaggggagtgaatcatttcccctaccacgaccttgcgaagctttacccggcgcaacagtgccttccacctttacaaatcctatgtaattttacaggcgctgcccctcatgctatggggcagttagtcctggtttcgcccttctttgggctctagctaccccggtttaaaatcacctttaggatagccagttcctcctgcctccgagtctcctctgattcatggggctctgcaggaactgtcctccaacactgtgctgatgaacttgaatctcagaggctactcagtttgagggcccagggcagacagaactggtgtctgcccaattctcatctctcaccagataaggcaaccatgctgactagaacccagtcatctgtaagatcatctgcctcaattcactcgaaaaaataattccctaccacccttcccactcttttcttccaacaaaaggtctagatttttctagggtattctaaggagttagtatttatgccaagctgaatgggagttcccaaagtgcatgcattcattcatccatccattcatcagatgtctgtaaagcatcacctggaatatgaaatggttgttaagagtcaactggaacctaatcttgtaccctctgcttaactaatctctctgaccttcacttttttcatctgtaaaatagggatcctaatagtacctccttctagttgttgtaagcattaaatgagctaaaataaatgtaaagtgattggcacattgtcagacacaataaatgctcaaaaatgttatttctgaattctggctataacttggttctactggtgaggcaggtagctgtcaaataagttggttttatcagctgggaatttttattttttaaaaacacccaaagttgcaacaacttgaaaataatataagctttttaagggtggggtttttgtctgctctgttcactcaagtacccttagtaatgggaaaagtgactgataattaatatgcattggataattcaatgaatgacatggaaaactaggcaacagtaaaacaaatatgctttgaacatgcacctgagtgtagagaatgttaagggatcacagaaaagcatcgttttattatatagatctaaaactagaagaaatggctgagtgtagtagctcacacctgtaatcctagcatttggggaggctgagacaggaggactggttgagtccaggagttcaaaatcatcctgggcaacatagtgagatctcatctctaaaataaataaaccaatgagaagaaatgtcctatctcagtcaaagaattatatctttaacaaattaaaagagaatataaacttaatataaacaatttctaaataacaaaggacaagctgttttgcatattactatgagcatctcagcaattagttctgtttgataataatgaggatggctacactactgagaataaactatactctgtattgtataaggggatctagccaagagttgataactgttaaaagagaataagatgtgattatacaaaaacactccaacctgggaagaaaataccacaagaaacacagaggcctgaagacagactgcatgttgtgttctattaacaattaaattacagctattgtacattacactgtgagaaggaaatcatccattgccaactcagccgcaatggtctgcatgcacttttccaggttcttctaaaaagagccagtgcattttcctgtccttgggcagtcactctgggcattccaataacccgttaatgattctcagtggtttcctgaacgatttgagaagccagttattgagaacagtacaggaagggaatgataaggatcgaatagcttttc

SEQ ID NO: 1562131 - DNA, 4001 bp, Homo sapiens
gagattgggggtaagactggtgcccataccctcattttctcatttctcctttttagcccctcttggttggctgcctggggatctgcccttctacaggaaagaatcaacttccctgagcactctctgagggacagtagctgataattaaggttcaaatcccagcactgacactcactatgtaatcgtgggaaaatcattttaactttctgagtctcagtttcttcacctgcaatatgggaattatactccctacctttcaccacttgttgccaggatgaagtggatcatgagactagtgtcctgggcacagcacctggcacacagtggtggcattcaccaccatccccaccgcctcagccaagccaaacggtctggaggcactagtcaacagaaccagtaccagggagaccccagagggtacggtatgtattcaaggtggagacaaaggctgataccctttcccaaagcacctgctgggggctgggaccctgagaaacagatgggcaggaatagtgaacccagcagctgggggtgtgcaaggattttaacaactatgtttagttgctttgggagtatctgctggcctccatttttcctctccgctaacagcagtaattaactaggcacctacagtgtgctggtgtggtgagccctgctctcagaaacatcacaactctgtcatcctcttatacagttgaggaaacagattcagaggcgggacgggacttttgcaacctcacacagctgatcctggattcaaacacagtctggttgcaccctaactgcaccccactagcggtcagtcctgggggctgaaagctctatcctgtgcaaggtggagatagtcagatcaggagacccaaatccagctgtcagggctccctgcagccttcctgggtccttagattcctaggtccttgctggccttctgcctgtgaccccagcctgtgcctgcacccaggcctcctatccacccctgtgcttcccagactccaggcttcccctctgcacccaccttggttgcttctcagggactccctcctccctgtcccactggtgtcccggcctcaaccccctttctccacactctgctttccgggggacccctcttgtccttgatgttcatgctggttacccctcagacccccccgcctccacacagaactcccacccacgtgtccttggtgctcccacaatcttatccacacctgtgtcttccgtgccccctaaggccaccaactactgaaaccccctccaaccttggtgtgcccagtgccctccgttacctgtttcctcagaccccccttacccccagacaggaagcctccagctccatgtcctgggcgcgctgccagccccctgcgccctcggctgcccccagacaccacgaccccgcgccctcggtgtcccgcgcccacctttgatgctgatgcccagcccaccggcgtcggccttgcgcaccgtcacgcggcgccgctggagcagtagcgcctctggcagctgcgggggcccggcgcccggctccgcggcgccgttgagctgcgcgggctcctgctcccgcggagcgccgggctcgggaccagggtcgccgtcggcggggctcacggtcagcacgtcctccgccagactcagcagcacccgctgccatcgctcgccgccggcccccgagcccgccccggcgcgcagctccagcagcccggtgcgcggggcgcgcctgccggacgccatcttcgcctccgagcccccgggccgccgcgctcgccctgtcccgctttgcccagcccgctccgaccaagcgcccagggcagagggcagcgggggcccggctgggccagccgccaccctaccccggccgctgggggaggagctctgggggcggggctaccctggggtgtggccagtgctggggagggggcctcgggcaaatgcaggaggccggggcggggcccgggagccgagggccgccgtgtgggactacctagcggggtgggtcagaagggcggcggggcgggccactaagtaaggcgaaagcccgggaggcgtggtgctgggcggggcgtcagggggcggggcttcgcgtcgggggcggaacccagtgagcccgcgcagggggctcggcgctcggaatgcccatcgagggccgggactgtaactcccggacgtgggagcgcatgaaaaagagacagaaccacgtatcctggtgcgaagcactgggcatcgggctgggctgcatatggcggagggctgggctgcgtatggtagagcgttggactccaaggcttgagtttaagaggtagacaccgtctgggcgtggaggctcacgcctgtaatcccaacactttgggaggcctagatgacagcccagaagctcgaggctgcagtaagccgcgatcgcgccactgcactccagcctgggtgacagagcgaaaccctgtgtcaaaaaaaaaaaaaaaaaaaaaaggtagatgctgagccgcgagagaccttgcgggcacagttgctagttggggagctgaggaagaagttggtttcctatcggggagggcgggggatggggggtgggggtcgaggctttggtctgtgggcgtggcttatcgctggcgtggcttctaaagatgacaggccccgccccctggaggagaccgctaccgacaccgcttagggcttgggggaggtgtgggcaggatccccacttcaaaactggagggaagtttaagagattaacccctggctgtgttcacagtcgagtatagaaaagcctgaagtcccacactttgaggcctggcagaaaaaaaacagaactggtgtgtgggaagagggttgcaaggtggggctctgggtctgggcgactggagacatggtttctaatctttgctgcctctgttagctccaagtcgactttggtcccctcacgtcactgctctaggcctcaatttcctcatctgtaaaatgtggatcataataatacctacttcactgggctggtgtgaggattaaatcaatgtgaaaacacgtggtaaactgtgactccctattctatagaaataatcactttcatttagtgaatgcttactcttacctagggctggcagaatattttccaagtgttatctttacattagcctcctggagtagctaagagcacccccagctgggcacagtggctcacacctgtaatcacagctgaggtggcaggatcgcttgagccttggaggtccaggctgcagtgagctgtgattgcaccatcacactccagccttggtgacagagcaagaaaaaagagcacccctattatacagaagggaaaacttggatttagtctaattggcctaggtcacacatttatgagtgaggaagagctgcgattcaaacccaggcctgtttgacaccagtgcctgggcactgaaccactctgctagacagctgacaaatacagaggtaaagcatgattgtaatctgaaaaatccaccacatcacacagctcaactggccttcatacctgctccttgtctctatcctccattcctagctgggatatgttgagcaataaataagtaggactacaccagtgtttagcctccctgaacttttgggtaaaatcctccacataagataccatcaagaaaaaaaagagggggccaggtatggtggctcatgcctgtaatcccagcactttaggaggccgaggcaggtagatcacgaggtcaggagtttgagactcagcctggccaacatggtgaaaccccatctctactaaaaatataaaaaaattagccgggcgtggtggcagacacctataatcccagctactcaggaggctgaggcaggagaatcacttgaacccgggaggcggagattgcagcaagcagagattgcaccactgcactccagcctgggtgatagggtgagactccgtctcaaaaaaaaaaaaaaaaaaaaccaacaacaaaaaaaaggaattgttttaagttagagtggtaggtgtcaaaacaggagagaca

SEQ ID NO: 1562132 - DNA, 4001 bp, Homo sapiens
ccaccaaccctctaagtctagcccttagggacaaggtcgggtgcttgagaactgattgacctgtgcgttataaggacacagcaggccctagatgacaaacattttcaacccaaagttaaataatgatgacatagctaccatttcattgaccacgtcataatgccaggcacactgctaagggctttttgtccattgtctcatttaactcctgctgtaatcttctgcattttccccattgctataatgaggaaacggaagatgaccaaggttaaacaactcacccagagtcaaacaactggaaataagtgggagtcaagattggtctggatcgaaagcctatttccttaactaccagcccatgcaacttggatctcaagtttgacccagataacatctgtctctctgtatctcacatcttgctacaatttgcaaaaaccttgtgggctgggtggggaagtgcacacaccagttctcttagtctcaaaaccaggttaagaggaaggtccttaatccccacttcagtcagtctcaaggaaactaagtcttgtgtgaggatttgctcaagttacatcccctttctgacctcagtttccccatttgtaaacaaggtaaccatttataactacatagacccctcaggaagttggggtcttccctacttgctcctagccatacttctggactcacagcccaggggttctagaccctcactcaccacgtacttggagggcgggtccttgacaacgttagcgctggtcacttcgaagagcagccgctggggtgccaaggtgttccgggacttcttccagaaatcctgcagctgccgcgccaggagctgactgccccactgcccatcaggtggggggctccgttctgcagacacatgaccagtcatatcaatgggcctagggccagggtcgacatcaaccactgacgtggcctcactcatcctcccagtgtgaggcaggacttaccccctttttacagaaatggaaactgagggacagagaggcaccgaggagccaaacaccgtgcctggcagacagtaggggctaaattaatagctccaccctcaaaatatcgttaatacatcatttccattcggatcccaagccctgtacatttaatgcctgcagcaattctgagatgagagtgagttctcccacttgacacaagggaaaacttggctcagaggggggttaagactctctcaaggtcacacagccaagaggtggcccaggcgctttaagaagtgtgggagtttcagctggatcaacttagcgccctggatgctctgggaacgcggctgggatggaggcctaatcgagccccagggttcccgcctccgtcctcctgcactcgcctgcgtcttctcctgacgtcccatccccgaggggcagctggtcagggccagcctcctcgtcgtcctcgtcctcgtcgtcctcgtcgtcctcggcgctggtgaagctgagggtgccgctgagtcgggaggacaggccctcggcgtcgtcgtcctccagctctgagctctccggaaactgctcggcctctggactggccgccgcctccccggggccgtcgccggccaaggcgtgccgcagccggtgcaggagccgggaggccatggcaccctggggggagcgcgcgacgctgtgtaccggatcccggaggaggggtaccccagcccggcgcaggaggaggaggggcggggcccgaaccggagagggaggggcgcggtgaggccccaccccctggcagtccgaggtcttgcgaaccaggggacccagccagcatcgctttccccccaacccactcagcctaggaccgcgttcctccccggaggggctcaggaccctcccgatgtctcttgcgccgcctcgtgcgcctctacctcctgcgtcccacggtgcattcaggggcgcgccgcgccccaggggtccgggtgcagccccccgcagcccatggaggtcggccgggttctgcagggctccgccgggctcaggccgctcagagcgccgctcgggcagcttcctgccgccgccccgcctcctgccccgcccgctcgcccgagccgcccgagaatcccgggcccttggctccaggagggacttgggaagcctgggtcggcctgagggagtcccaggcctgccgcagagtcatcccagtccggccaggcgcgtaccctccttgaatcctcccaccccacccacgtcatctccaatctgtcccactcatttccacccaacgctctttaacttcacaaagtaattatgcaatagtagggaggccatgtctcccgagagaaaacgaagggccaggagaagatgcgtgatttgggttggttggaatctgacctcgctgagcctaggttttctcatatgtaaaacaggaacaatactgctaaaactaattttgcagctcttgtaagaacgctcgtcccgtgcctggcatagagcaaaggctgacgaaatgatcacttacataatgattattgtttctacagtgttcacaggcttgcacaatctgatttgaacctcacacatgggaagtaggcaaacagggaaactgaggaccagagagggtgagttacttggcttaaccacacagcttgccagaggtttctttctttctttctctctctctctttctttctttctctctctctctttctttctttctttctcttttgagatggagtctcactctgtcacctaggctggagtgcagtggcaccatctctgcttactgcaacctccgcctccctgggctcaggtcatccctcccacctcagcctccccagtagctaggaatagaggcgttcgccaccacacccagctaatttttgtattttttgtagagatgggatttggccatgttgcccaggctggtctcgaattcctgggctcaagtgatccacctgcctctgcctccctcagaggtttctgagtatggggcctggagcccaggtcccctgctgcatactgcccttttcctgtgcagcaggcctgataatctcagtggctccccagctttgttttatcttttatccgcagggcagctgcaggtcaagaaaaagttattgtggcttcctgtcacaaagcctaggtatcagttgttagggcagattttgatagttatacaatacaataaataaaatcaaaatctctccaaagtagctcctaccctttctgagtggcacaggagagaagggtgggggaaaatgccttgggataagcagaaggtatttcagctccctgccctcccatgtgagcagaaaggctggggttcttattttctgagggtccactttctacatcctgctctaggcactttactgtcacatctctccctcacagcgtcctggggaagaggctgtaactggacattaatggtccattttcaagatgaagaaactgaggcaaagtgacttccccaagatccacatctgggaaatagaggggctgggattttaagcctaagtttgtgcaattttatttatttatttatttatttttagagagggagacagagtcttgctctgtcgcccaggctggagtacagtgatgcaatcttggctcactgtaacctctgcctcccaggttcaagcaattctcctgcctcagcctcctgagtggctgggactacaggcatgtgccaccatgcggctaatttttgtatttttagtagaggtggggtttcaccatattggccaggctgatctggaacacctggcctcaagtgatccacctgcctctacctcccaaagtgctgggattacaggcgtgagccactgtgcctggccagtttgcacaatttcaaacctcgaattactcttcatttggcttatgggcaagatattgggacaaaaaaggcatacttcattcattaattcaacactcactcattcaccaaccattggttaaaaaataacttgtccttcggtatatgccttacatgtctgggcacaaagctggtcttcatgaaaccatgggttgttagag

SEQ ID NO: 1562133 - DNA, 4001 bp, Homo sapiens
taactctcttcgctacagatacggacagtttctgtagcctctaaaacaggcaggaaatggccttcataaccattctccaattttgctggaggatcagggtggtggaagtcattttaaaaaccagctgcaatatactgtactaccagagagtggggtgaagcaattgagtccttttacctagctgactccgaatcaagacagctaaaagaatgtaccagaaagaaagaaaaaataaaatgctaccaaaatcccaatccattatctaccctttatggagaaaagtacctttataatgttttacaaagaatcgtggtctcaagtttccactttgttttagtaataaagaactttcaaaaaaaaaaccactctaaacaacaccctcctgtatagaaagctctattttaataattaatgcaatgatacccttgttggaacaatccagccgctttgaaactctggtatttacttactagatgaacaagtttctctatggaggtgcctttaacttctcaagaaatgtgtaagttaagacggctccaaattacattttaagagagccttgtatttttagaggttctttttcatcggtcagaaaaacttacgttgacgattctgcaagaaaggttgctcgcaaaccatgcatcgcaaagctaccgaggcaaatttaaagaaccaatgaaaaagagtggaggctcgtctgaatctttaattggctatgggaatttcaatttattgcataaataatcttttagacctcaagatacacgtgacctagggacagtttacatcaatgggcaagacttaaaaatagacaccaagttcagcaagtatttgagcacctactaaaaattacacaactcccacaacaacgcattttgcgtttctaaagttgtaagcagcatgttcggacgcttgatgcaatttcccaagttgtttgggccccccccccaaaaaagtcttctcagtaaaaggtggggggaaggagggtattttgggggcaacaaaccaaactggtctgtcgcatgttaagtcaatttcacgttcacctactggtcaccacgaagccgaggaaagttttaaaaagaacattccggggtctccagagatcatctctccaagtccgctcggcaccggcgcctgagctggggctaaggtcccgcgtctctggttctgtcctaatagaatccgggacatccacagggattccccggggcagccttcagtgaagaccagggagaggggccgcccgggtctcacgggtgcttcccgcgctggggatggcggcgagcagccacggcctatggacgcgcaagggaaagaatgcagcgaccccggagctcgcagggccgcccgcccaggagtctgaggctgggaggacctcaccttgctgcggtcctcctcctgctgctgcagcaactcgggaaccgcggccatggcgacgcgggactcgagcaggggccgcctggctgtgcgaggaaagaagaagctgggccgccgccgccgccgcctgggcgcctctcgggggcggccacggccccgcctccgccggcctccctgcccgacggcggcaggaggcctccggactccgccaccatcccagctgccccgggagcaggcgagcagggcgccacgtgctcccccagagcagcctcccagtccccgctgccgtccatcttggagccgggcaaagacgccacgtggggcctacccttgctccgctccacgaggaggccgccaaccgcagggccgcgacacggacgggaagcaacggacactctcccagcaagacgcgtctagagaaagaccgcgtttcggtgcggggggaatttattactcagcccgagtccaagatggcagcgagcgctgacgtcaccagatctcgtgagagcagaagggcgcgatttggaggctcccgcgcttcggagacgccggcccttccgctcggagaggtactccctgcctctaactggtggcgcgttggcggaggccgacgaaagcctcgggtggggcgtgagcgccgcggggcattctggacctgctttgccttaggctgtgcctaattcgaaaccaaagcgcgggacggatgaaagtacgggtcgcgagaggttgttcgcgccttgagagttaagcgaagtgtggtggcttccaaggtaccgacacttgccgtaggctgggcttttatttaagtcgtcttttctctaatccagactcctgccacaggggccaccgccgtcctggccccgccaggggtccgcacccacggcggagcgggaggcgactttttgcggtcacagtaatgggacctcagcgccgccaccagctctgaccggcgagcgacgggaccctccaacccgatttccacgtctgtgcaacgggttcattctagacccacggtagagggtgtgaggaccaaatgagaagtatccacacagaatacttagcagagagcctggtgtctaggaattagtcgtcgtctgtcacctaggactgtgtggccgccatgggacgggctccatctttgtgtttttccgtgtctcgcacacgcctcccttcctgggcgtcacattcctgcagattagaaactgggacgtcttgcctcaagctgtctactaattcgcatttagtatgtgtcggtccttcgggtattgagtcttgatttatttataaattttttttggaggcagggtctcgctctgtcgactttcttaagaaagggctctgtccaaacatgtcgaaaaagttcacaattttgatgtgcaatatcattctgatgcagctttcgctttgatggttgttttctctccaataggaatacaaacataaaggccttcgaccgttgcaaatagactaaagtgaaaacaaatctgaatgaagatgaagttatttcagaccatttgcaggcagctcaggagttcaaagttttctgtggaatcagctgcccttgtggctttctctacttcctcttactcatgtggccggaagaaaaaagtgaacccatatgaagaagtggaccaagaaaaatactctaatttagttcagtctgtcttgtcatccagaggcgtcgcccagaccccgggatcggtggaggaagatgctttgctctgtggacccgtgagcaagcataagctgccaaaccaaggtgaggacagacgagtgccacaaaactggtttcctatcttcaatccagagagaagtgataaaccaaatgcaagtgatccttcagttcctttgaaaatccccttgcaaaggaatgtgataccaagtgtgacccgagtccttcagcagaccatgacaaaacaacaggttttcttgttggagaggtggaaacagcggatgattctggaactgggagaagatggctttaaagaatacacttcaagtaattatctcaattctgattctatatgtttgctatgttttctataatagagagcaacggtgtcaaaagaatgaggtttggttttgtttttttaacttactagcaaggaactcccttcagatagtaattaacattaaatagcactttatgtgtattaactcacttgatcctcatggtagtcctgtggagtatagatactgttatccacattttacagatgaaactaaaatagatcaaatatttgactaaataatacataaaattcacttgttttataagctaccaacaatattagaattgcttgttttccttgattattgaaaaaagtcacctggtaacagaattctagttgtttgctagataattctgtttagaatccagtaaatacccactgtcctacttattagcgtaaactgactcgtaaatttaaagaccttgaagcagaccagaacacatgacctatatttagaccttggtaaacataatcagaggttcttcataaggatctgaggataaatacactttaaccttcaacttctaatttactaacttggacaagtgaggagaatagcttccttaaatttaatattccattcaaaaacaaagaccattggcactggtg

SEQ ID NO: 1562134 - DNA, 4001 bp, Homo sapiens
ccaagacttagtttcccattatttcatacttgccccaaactccctttcagttaaccataacaccatctaggccagaccacagcaggttatcagcatcagcagagatcagaaaacaaaaataaagccacgcgtcagggtaattatttatttttattgtctctttattcctgtaatgtaaaaaggaaaacaatgtcatgtaactctcttcgctacagatacggacagtttctgtagcctctaaaacaggcaggaaatggccttcataaccattctccaattttgctggaggatcagggtggtggaagtcattttaaaaaccagctgcaatatactgtactaccagagagtggggtgaagcaattgagtccttttacctagctgactccgaatcaagacagctaaaagaatgtaccagaaagaaagaaaaaataaaatgctaccaaaatcccaatccattatctaccctttatggagaaaagtacctttataatgttttacaaagaatcgtggtctcaagtttccactttgttttagtaataaagaactttcaaaaaaaaaaccactctaaacaacaccctcctgtatagaaagctctattttaataattaatgcaatgatacccttgttggaacaatccagccgctttgaaactctggtatttacttactagatgaacaagtttctctatggaggtgcctttaacttctcaagaaatgtgtaagttaagacggctccaaattacattttaagagagccttgtatttttagaggttctttttcatcggtcagaaaaacttacgttgacgattctgcaagaaaggttgctcgcaaaccatgcatcgcaaagctaccgaggcaaatttaaagaaccaatgaaaaagagtggaggctcgtctgaatctttaattggctatgggaatttcaatttattgcataaataatcttttagacctcaagatacacgtgacctagggacagtttacatcaatgggcaagacttaaaaatagacaccaagttcagcaagtatttgagcacctactaaaaattacacaactcccacaacaacgcattttgcgtttctaaagttgtaagcagcatgttcggacgcttgatgcaatttcccaagttgtttgggccccccccccaaaaaagtcttctcagtaaaaggtggggggaaggagggtattttgggggcaacaaaccaaactggtctgtcgcatgttaagtcaatttcacgttcacctactggtcaccacgaagccgaggaaagttttaaaaagaacattccggggtctccagagatcatctctccaagtccgctcggcaccggcgcctgagctggggctaaggtcccgcgtctctggttctgtcctaatagaatccgggacatccacagggattccccggggcagccttcagtgaagaccagggagaggggccgcccgggtctcacgggtgcttcccgcgctggggatggcggcgagcagccacggcctatggacgcgcaagggaaagaatgcagcgaccccggagctcgcagggccgcccgcccaggagtctgaggctgggaggacctcaccttgctgcggtcctcctcctgctgctgcagcaactcgggaaccgcggccatggcgacgcgggactcgagcaggggccgcctggctgtgcgaggaaagaagaagctgggccgccgccgccgccgcctgggcgcctctcgggggcggccacggccccgcctccgccggcctccctgcccgacggcggcaggaggcctccggactccgccaccatcccagctgccccgggagcaggcgagcagggcgccacgtgctcccccagagcagcctcccagtccccgctgccgtccatcttggagccgggcaaagacgccacgtggggcctacccttgctccgctccacgaggaggccgccaaccgcagggccgcgacacggacgggaagcaacggacactctcccagcaagacgcgtctagagaaagaccgcgtttcggtgcggggggaatttattactcagcccgagtccaagatggcagcgagcgctgacgtcaccagatctcgtgagagcagaagggcgcgatttggaggctcccgcgcttcggagacgccggcccttccgctcggagaggtactccctgcctctaactggtggcgcgttggcggaggccgacgaaagcctcgggtggggcgtgagcgccgcggggcattctggacctgctttgccttaggctgtgcctaattcgaaaccaaagcgcgggacggatgaaagtacgggtcgcgagaggttgttcgcgccttgagagttaagcgaagtgtggtggcttccaaggtaccgacacttgccgtaggctgggcttttatttaagtcgtcttttctctaatccagactcctgccacaggggccaccgccgtcctggccccgccaggggtccgcacccacggcggagcgggaggcgactttttgcggtcacagtaatgggacctcagcgccgccaccagctctgaccggcgagcgacgggaccctccaacccgatttccacgtctgtgcaacgggttcattctagacccacggtagagggtgtgaggaccaaatgagaagtatccacacagaatacttagcagagagcctggtgtctaggaattagtcgtcgtctgtcacctaggactgtgtggccgccatgggacgggctccatctttgtgtttttccgtgtctcgcacacgcctcccttcctgggcgtcacattcctgcagattagaaactgggacgtcttgcctcaagctgtctactaattcgcatttagtatgtgtcggtccttcgggtattgagtcttgatttatttataaattttttttggaggcagggtctcgctctgtcgactttcttaagaaagggctctgtccaaacatgtcgaaaaagttcacaattttgatgtgcaatatcattctgatgcagctttcgctttgatggttgttttctctccaataggaatacaaacataaaggccttcgaccgttgcaaatagactaaagtgaaaacaaatctgaatgaagatgaagttatttcagaccatttgcaggcagctcaggagttcaaagttttctgtggaatcagctgcccttgtggctttctctacttcctcttactcatgtggccggaagaaaaaagtgaacccatatgaagaagtggaccaagaaaaatactctaatttagttcagtctgtcttgtcatccagaggcgtcgcccagaccccgggatcggtggaggaagatgctttgctctgtggacccgtgagcaagcataagctgccaaaccaaggtgaggacagacgagtgccacaaaactggtttcctatcttcaatccagagagaagtgataaaccaaatgcaagtgatccttcagttcctttgaaaatccccttgcaaaggaatgtgataccaagtgtgacccgagtccttcagcagaccatgacaaaacaacaggttttcttgttggagaggtggaaacagcggatgattctggaactgggagaagatggctttaaagaatacacttcaagtaattatctcaattctgattctatatgtttgctatgttttctataatagagagcaacggtgtcaaaagaatgaggtttggttttgtttttttaacttactagcaaggaactcccttcagatagtaattaacattaaatagcactttatgtgtattaactcacttgatcctcatggtagtcctgtggagtatagatactgttatccacattttacagatgaaactaaaatagatcaaatatttgactaaataatacataaaattcacttgttttataagctaccaacaatattagaattgcttgttttccttgattattgaaaaaagtcacctggtaacagaattctagttgtttgctagataattctgtttagaatccagtaaatacccactgtcctacttattagcgtaaactgactcgtaaa

SEQ ID NO: 1562135 - DNA, 4001 bp, Homo sapiens
gcccagccagcggcaggagagctcaggaagcttccagcctcccagggagaggtcaacacgtgcaagctgggctgtccctaaagctgccatggcacctggaagcgtgcagatggagcccggctggcacccagtaggtgctcatgtccactgaaaaagcaaaggcaaagcctgctgtccgggggaagccctagggtccccacatggccacagggaagtcctgttccaggtgggcagttgccctcctctcactgcgaacatggaaaggcactggccacgaggggccaatggggctgttgtgtgcacaaggtctgccccagggagggcaaaagacactgtcctgggatttaggaagctgcctctgaaccggttctcccacgacatcatcctccaggctgtgggaccgttaggctgggcggaagtggactccagccaaggggatgttcccagatgtcatgctttcaaactggacccgcccagaaaggcaggcagagacaggcctgcgcccgggaaagccctgggtaacgactcaggatggcattcaggcctttcctgggcaggggatggccacaggtttccctggcggcggtgtctatcaatcccgtcccaagaaggagagcctgggcgtggaggttctgggcagctgaaggcagagatccatcccttccctggctacccacccccacctcagcaacgcctcccagaacgctccaaagctttctcaagtccccgctcccaggttagggccctgtagccagttccaaggtctttttcaggagcgcgcttcccaaataaagttgagagggggcggggggaatgagggagccccagatccacctcagagtggtccccagagggcttgggcccctttctccggattgttcagtgggaaggagggccggctggtgcctcaggcccgcgggactgtgacagccggcgacccctgcgacctccctttctacccgggcgcccccaccttgagatagtcgttctccgagcgcagctcctccagctcccgcaccaagccgctgggcccgcagtccagcatctcctcggtgaggtcggagaaggcaagcgaggcgctgagcggcaagcggctgctgcccaccgacgacgcggccaccgacggctcgtccggggaggcgggcggccgcgggggctgctgcgcggagggcgcgggctgggccggctgccccgtacggacccccgccgggcccccggccgcggactcggcgtcgctgctcagcgccagctccaggcccagcaggcgcgcctcctccgacgcgcagtccgacacctccgagctgctatccgtgaggctggggggcggcggtggcggtcgcggccccgcacccgagcgcggacggcccttggcacggaccccggtgcggaccccggccacccgcacacccgcaccgcgcgccccgggagccactgcgcgccccttcttgtccggccgtgaggagaacgcggcgctgcaggcgactgctgagcccgggcctgggccgcggcggcccttagccagcgaccagccggccacgtctttgggccgggccggcgacggcgcgcggtggctctttttcctctccggggcaggcgcgggtgcaggcgcgggctggggaccgcagccccggaccgggggctcggccgccggcgcctccatcgcggcctccctcggcctcagcgagctgcgcgcatggcccaggcccgcccggcctcgacgtccctggggagggacccggcgcggctccggccgctggggctgcggctgctctcggcccacctcggccccgacaccgcgtccccgtcccaagccccgccgcgcggtctctccgctgctctgggctcggagagtgcggcccgaccgcctccaggcgccccggctccggctgcggctccgcccggcgcccgccccctcggcctcgccgcgcccccggagcgcgcccgggcccccgccgcccgcacgccgatcgctccctcgggctccgagtccggctgcggcccgggccccggctccgcccggcgcagcccgccccccgcgcagccccgccagctccccgccccgccgcctcggctcgggggcgcgcggttccgcgaacaaaaggcggacgcggcgggagcggcagggagggacgcaggcagggagcgagggagggatctgcgaggcaacagcgaccccttcgagggtcaggctggcgcgggcagccgcggcccgggctccctcctcctccgctccgccgcctcctcccctgcccgctcggggaaggcacccggcggaggcgcccctgcgcccggcgtccgggcagggcctgcgagagcggcgggagccgggactcccgggccgaggccgggcggacctcagttcgcaggaacccgcatccatgcacgcccagcgcctcgcccctcgccccgtgccgagcgtgcgcgaactccgcccccttagccggcatcgccggagccgcgatcccatcgcacagatgcgtaaactgaagcctggggtgcacgcgccaagctcacggtctaggcggcgccgatgggacccaaagctcacacctcccgggcgcgctcgggctccccctgcctcggcttccctctcctggcatagggaccgtgaagccctgtgtgcatgcctggctcgcgcaccttgaccggcggatatttctccccatgcgcccccgacccgggtttcaggctctgtacggctaaaatggaagcgacccgtagctaggcgcggtggctcatgcctgtaatcccagcactttgggaggccgaggcgggtggatcacgaggtcaggagttcgagaccagcctgaccaacatgatgaaaccccgtctctactaaaaatacacaaattagccgggcgtggtagcgcgtgcctgtaatcccagctactcgggaggctgaggcaggagaatcgcttgaacccgggaggcggaggttgcagtgagccgaggtcgcgccactgcactccagtctgggtggcagagctagactccatctcaaaaaaataaacaaataaataaaaacaaaaataaaatggaggggacctattacgagatgtcagcctagcggatgctttggaaggcggttttggcccccgtgggggctggcatgggctgggacggttgccctgaccccacacgtccccaccaggagcagtgcaggaggacttgagctctgatgggcgtgttttctttcctcccgggcgtctgggcgtctccttggctcctggccgtgttgattttcccatgtctctcacaccttccccagcccccacaccgcctggccgctacgcccccatccctgagccaccgcagggcagagctggattgagtgctttgccccacagatgtaccctcgtccttagggtgccccacaccccttgccaccagaagggcagggctgtttttgcccctttacaacctctttctcctcctgttctctcctccccctcccatttatcccctgctctttcttcctccttcttctcccatctttccccttcctttcccccctccttttccaagtcttccttttcctcctctttcccctcttcttcctcctgcccattttctccttcttcttcctcccccaattcccttccttcacctctgcacctgcctgtgacacagcaggcaccaggtccacttctttgtctctgtcccacctcccccacacgctgtgaatacactcctggggcatcccctctctccagaggcatgacttcatctggatccaggtgagtgagtgctcctccaccccaacgctaggtgccctccatacggccaagtgaggagcaggcactcagcaggctcttggcaaacacttccgcaggggcatccccaccccctcctagcaagacaccagctcccctcacggcccactgactgtccacaaaccctgtttgcacaggcgccaggtacactgagggacgcagtggtgggcatgtcagtgcctgaactcatggagcacacagtgtgtgttgggggggaccacaaaagac

SEQ ID NO: 1562136 - DNA, 4001 bp, Homo sapiens
ccatctgcgtcctcacattgaaaagggtcctcacggccctgggcgggcgtgcttgtcccccatgttacagaaggaacaatctcacacacatgcacacacaaacatcctccactaacccccacctcccccaggctccgggcccccagcatgccttagcctagagcctggcccatgacaggattcctctcaccaaatgtgtctcagcctagacacgctagttaacaaccaaaagctcactgctctggtcacactgcagaaagaacaggcccagagttagacaaacctgggttggaatcctggctatgtaatttagagcctccatttactgatctgtaaaatggcaagtggggatggattaggtgcttcctccaggcccttctgagctgacatctagactggctgcacttcactcacatctagaatcaccaaggagggaaaacacacacacacacacacacacacacacacacacacacactggctgcacttcactcacatctagaatcaccaaggagggaaaacacacacacacacacacacacacacactggctgcacttcactcacatctagaatcaccaaggagggaaaacacacacacacacacacacacacacacacacacacacacacacacacacacacacacacggcagggaaggtgatcacacctttccgttctccctggggcagctactgatgtattaacattctaaaactaaggaaatccaccctcctgcattctcccagttcctccaagaatgaagacacagacatcctgtctgcctattggctatgaataataacaattcctcaggcgacttgggttcactgcttgcaaaatgttttcttgtctattcacacttccctgattcctgatgaccatcgtatgaggttgtccaggcaggttccatcacctttacttatttttttttgagacaagagtttcactctgttgcccaggctagagtgcagtggcgccatctcggatcactgcaacttctgcctcccagggtcaagtgattctcctgcctcagcctcctgagtagctgggattacaggcgcccacgaccacgcctgggtaatttttgtatttttagtagagatggggtttcgccacgttggccagactggtttcgaactcctgaccttaggtgatccgcccgccttggcctcccaaagtgctgggattacaggcgtgagtcactgcgccaggccccatcacctttattatacagatgagaaaaaaagcagctcagagaagccaggtaacttgcccatggccacacagtaaacgggagagtcaggtttcaaagtcaggtcttcagactccaactctcagattcctccatccacacccagtgggttcctacatgttctggccacatggtacgtgcttaatggttagtggtgatgaaaggctggaagacctcagatcaccgggtctttgaaggtctcaggtgacgtgtctgctcggcagctaaagctgcatcttagaatcctggcacctcagtagttaataaccttcagacttccttggctagaagggacccaaggtcaggcagctcaactgcagccaccacatcaatctccctctgaacccttctcaagcaatcattccacaaaccctctatctttatccaagcatgcaaggtcatcccgcctctctctgaataattaaagtgacagtgagctcactaccttctctgtagaagctccttctatcttctcactgggagagagttgcccgatttatgctttcctcacttggaccccagagcagaccataccagactggagatcacagtccttcgcagttgacagttcccagtgacccctacaagggggaggtaagcctgagcagggccacccaccagacctggtgggacctccttcaactctgctcctgcaggggacatactggggatttggagtcctttcccttgtactcagtttctgcatcttagaggcaaagtagtccagaaaggcagaaaacacatcaagagtctaacacatgcttactccaagccctggcagcctagcgaccctgctctgggacccactctggccacagttttcccatctgtggaataaacaacacaacacctccagtaataacccctctatttatggtccacatttagtctctggattttgaccctgcctctgtgaggctggcggctgggataaacagatatacagagaagttaagggactaacccaaatgtacacagtgagaagtggcatgggctggccttgctctcctctcttacccacactccttcccctctctggccttagcgctgttcttgaactcaacgagcattccaatttcccttagcctgaaatcttcttactccagaccctcactcagttggctccacggcatcctgcagccctcagcctccctgtgcaccccagcccccaccttcgtgtgctcctggcaaactgtcccctttaccctcattatgatctgtgttgtgatttcttgtatgactattgtttaattctggtctccccaaaagctctatgaaaacagacacctcatcctcccttgtccacagctgtatcccagatctgccctagcacacggcaggttctaaataaacagctgccgaatgaaccaatgaggggccaggagaaagagcccagcctgccttgggtgatgaagaggatctattctgccctcacagaatccacaagagaacaggctgggtgcacatggaaacatgtcccgtgcctctgacaagagcagtgatcagaggtttactacataccaggtgctctaatggtgtttgcaggaatcagctcatttaaccgttgaggttggaaagcgtgttactgtcccatttttacaaatgagaaagcaaaggtccagggcctttaagtaacttgccaaagatcacgccgtcaggaagcgacagaccccagatccaatagcagcacgaagcctgagccactgaatgaatggtggaaattacggttccatcttggcccaaacgtgggatgtccccagctggaccccggcccctgtgagatcccgggctcaacccccagcctcctgggactgttttcccctttaaacagtcatgggtgcctcaaacagactttgggtcagagcctgatgacttcctgggatggacaggggcccatggagatgggtgcctaggagccctgaagcaaagctctgcaacccatcccccttcaccagagtgagtagcaggaaccgggaggcaggggtgaggaactcagagtttcggttaaggccaattcaggcagcactcactggaagcagctcagagcaccaagagggcaggagcaaaagacccttgtcctggctcgtcacctccctcctcctcctcaccttccacttgccctctccttaccaccggcttctgaagactcaaagagccgactgaactcccagttgccaacaccgaacccggcccttgggaagacatcctcccatttaacggatgaggagactgaggcctggcttggggaaaggtgtctcttgattcagacagaccttgtccttccatactacaagcatttacagaactcaggctggagagcagatcccggggaaaatggggagacagagacatagttgagcaagacaccaacactctaatgagggagaagcccatttggtcagaagagccacaaggaaaagttaaaacctaagtgctgagggcagacataaaccagcagcatgctgtgagctccacagccaggggcactctgggtgttgtgccaggccatcatccactgacaagagtcggcaacatttcagcctcctccaaaaccgtgcccagccagcggcaggagagctcaggaagcttccagcctcccagggagaggtcaacacgtgcaagctgggctgtccctaaagctgccatggcacctggaagcgtgcagatggagcccggctggcacccagtaggtgctcatgtccactgaaaaagcaaaggcaaagcctgctgtccgggggaagcccta

SEQ ID NO: 1562137 - DNA, 4001 bp, Homo sapiens
ccattaaggcagcgacgccccgttggctggagaggaaacctagggctcccggatcaaaggatttcccaggatcgctctacactcgcccccgcttttgcccggagcgggcgaagagtgcggctccgctgggaccagccccctcctccccagaagcattaagcatgcgcacgaagggggtgggccccagcggaggggcgggccctagcgctccggggataaaaggggtgcgcccctccccccagggaagggaggggcgcaggaggcgcgtgcgttgccacccggccgcatcgcccccctaacccagagaaggcgggccgggcgagggaggagagattccggagcaaaggagggggcgggtcctccggccacgaggaggggcgtgtgcaaaaggggggaggggtgcaggtctgtaggagaggacgggaggtgtatcggagggggctggctgctggtggctgtgcaggagggggcgacgtggggaggggcttgggtgtcggggaaggggtgggggttgggctgccttggggtgtgtctgcgggggaggggcatgtctggatctgaggggggatgggcacgtccaggagggggcaggctgcgcgggagatggggtgccagcctcggcctccgaggggccccaatacctgattcctgtatgtaaacagctggtttgggggcgtgcgcgccccgctgacggtgggctcagtaggtgaaaaccaggtctgcgatgctagacgggcgccagtcccccgcgatcatctcggtaacctcgggggtgcagtagtccgggaactcgaagtgcgacgtgcccgagggaggctgcaggtccgggtcgcgatccagggcgctgcagtccaggccggccgggccagggggcagcctggacagaaagcccagcgactcctcccccgacgccaccgtctcctcttcaccttcctcagccgctgccgcctcctcctcctcttcctccggctcctcgtcctccgacggtgtcggggaggcggcggcggcggcggccgccccctcgcccgacggcccttgggcgcgctccgcttgtccccgagcggcccgtcccgccgggaccatcctccacagctcccgccccggggtctcgaccaggcgcacttccagcagctcctcgtcgtcgtcttcatcgtcgtcctcgggcgccgccgccccgccccccaaaggccctcccgctgctcggcggcccccgcggccaggcagctgcggcccgggcttgagccggctgccgccaccgctaccaccgggggggcggggccgcgccttggcgggcgcccccttgctctttttgcgcggccggtacttgtagtccgggtaatccgccatgtgcttgagccgcagccgctccgcctcccgcacgaacgggatcttctccgagtcctgcagcagctgccagcggcggcccaggcgcttggagatctcggcgttgtgcatgtcgggccactggtccatgatcttccgccgttcgtgctgcgaccacaccatgaatgcgttcatcggcctcttgatgtggccgctcggggtcttgcaccagccgggctcgcgcgccccctcctcggccggcccgggtcccgggggcggcggcccgccgtcccgcttggccctcgcgccccgctgctgcaccatcgcgcctgggcccggggccgctagacgccgccgggggccgtccgcatcctccgcggctgggggtgggggaggaggcagcggcgacggaggggcggccccgccccgcggctcggcccggcccccgcgaactggggagcgaggagctgggcgctcgggcccaacggacggcggggggagaaggtcagcgcggtctcaggcgggctcggcgcgcccccgccgcctccggcaagttgcgtcctggctcacaacacacattgttttgcgggggccgaggaatcgcaccctccgggcccccgcgggctcttcctgcagcctctggctccgccgcggcccgcgcgcgccgctccccgcccggccgccgacgcctttcagtgtctttctccccgcgcggccccgccggcgcgcgcaccacccctccccctcgccgtctgcgggccgctgcggcgcgcgcggggccgccccgtgtaaacaccgaggtgcccgcttgggctgcggccgggccccgcctcgcgctcgggcgccgcgtcacccgttgctgggcagagaagccggtatttgcatctcccaatcgctggccgccggagcggggcggggctcgggctgcggggctgggcggtctcgcggctaggattgggggagaccggcgagatcggtttcttttcttaggttaggggttggaggaagggtaggggacgcgagcctgcttccatctgacgctggacgcttgtccctgccccgcgttgccttttaaattttagctcattccgagacacctgccgtcaggtaggatttccgccctttcctctttcagggacgtcttttcggaccatcccagaagagaatttggggggcccaagactcaggaaagcttcttaaggggacgaactcaggttgtcgtagatgttgccccccgcctactacacacagggtccgaccacatatgggaccagcaaatgcttttggacctagtgaacaaatccctttctcatatatatgtatatttaatctcgttcgaagctccataagaatccggagggagaagggaatatgataatatgatgcccagtttccaaataggaagcaccgaggacacgcagactaggattcgattcccaggctcgcggtcccagctgtctctcccctgctcagcaccaagggccgcggggcacctcgcctgccagccaaaggtcctgagctgggcggacttcccgcttttcacaaaccgcaggcgacattcgaggatgcgtgggtgcgccattcccaggtcctaccccaccccgtagcctgcccggtgcccgacttgggcgcgtcgccccacccaagcctggagaagcgtgcaggggcacggggcggagccagtcctgggggcgtggccgggtggccggcacgaggcgcgtggcggggaggggccgcgcgctcccggctcaccacgtgtgagccagttcgggcaccactgggcgtgtgccgcccctgggggaggtcaccttcacggcgtcgtgagcatgggcgatgggagggggcgctgaggcctcgcccttgggaagcaggagctgggaggtgcccggattagggtctttaaggtggcattccgctggggcgtagcgggcatggtttggggctaggagaatgcgcctctggcggtacagctcacccacttctggacgagcgaaggccaagagccgagcttgagggtgtggggcggggaggaaggaccgaggtgcggctccgcggcgcggggggcggggtgggggtggtggggagaaagaaattggagcatccctggagggagggggcgactcttaaaggcacagggtgcttggaagaggaggccctgctcccgtccaaacggtccctccgcctttcagaagctgagatctggaaaagcctacgtgtaaaacctttacatctgcagcctgagcagtctacccgatggagtcacacttcctgagttcacattcccagtccctccttttccttatcctgaaaatggggataattcagtttctccctcacatggtggttttacagattaaatgagataatgcatgtaaacacatcctgatacctaggcaatgttcaataaaacttatgatagacgggacgcggtggctcacacctgtaatcccagcactttgggaagccaaggcgggcggatcatttgaggtcagaagttcgagatccgcctggccgatatggtgaaaccttgtctctactaaaagtacaaaataatgagtcaggcttggtgacgcgtacctgtaatcccagctactcaggagactgaggtatgagaatcgcttgaacctaggaggcggatgttgcagtgagccgctgcactccagcctgagtgacagagt

SEQ ID NO: 1562138 - DNA, 4001 bp, Homo sapiens
gacccagctccaggctcctcctttatagaaagcaaacatctgtattcctcacattgcaaaagtctttgccacagtgacgcttctgatcactgaaacttcttggaagaaaagtttaagagtttaattaaaaattaaatatattgtattaggtatattttttaaaagggcaaagtaaaaaatattaatacaatctggttgtagaaaatacactgcaagaaaaggagcaggtgcttcaaaaatgtaaccctggcaactctgccaacaggtcctgggctcgggcttcctggaaaagccccgggacacgtgggaactccaggcaccctcgcaggggccccccgagggcaggtggcccagaagcccaggaagggtggcctgggaggtggaacgggcgcaaggccgagcatcactggctcctagggggctgtgacatggaaccaaacatacacgcgtatgagagagcagagcggcagcgacgcggtcggatcggtcgcgggggctgcgggaggaagcgctgcagggacccgggcggcgccggcggcctagccggagatgcacgcgctgtaatagaccgcgctgctggcgtccgacagcgcggagatcaggctgctctcctctgggcaggacatggcgcgcgggcccagtttggccagtgccacgtggtacgggagcccgggggcgtcgggccgagtccggctgcagttgaggtactggtcgaactcggtgaggtccacgtcggcccacagatcggcggcgggccccagcggctcggcgctctccagcggcggggcctcgggcggcggcgacagcgggccggggtacgggccgggcgtgcccagggtgccgtagtacaggccagcgagcggcgccgcggggggcgcggtcctgagcgcctccgccaggggagccccgtagcaaccgccggggtcccgcgacaactcggtgggcgcgtagggcgcgcggaagggccgcagcgcgcagtcctcgggcgccgcgggcggtgggaagaaggcagcctcgccgggctccaggccgtccagaggcgagcgctcgggcgtgggcagccccaggccgtcgaactcggcgcccagcgggggcagctcgcggaaggcgcgagccgagccagacgccgcggggaaaggctcgggcggtggctgcgggggcgctaatcccgggagcaggaggccgggctccagccgccgggccttgcgcgcctgcttcttgcggcgcggccggtacttgtagttggggtggtcgcgcaagtgctgcacgcgcagccgttcggcttcctccacgaagggccgcttctccgccgcgttcagctccttccacgctttgcctgcgggccgtgggcgccagtgagtggaacgccgtcgggcgggtgggcgccgagccctccgtgcgcccgggacgccccgcgagggtttggcgcagcccccgcaccccgcggcccgggacccctgccccccccgccccaccccggcccgagccccccccgccctctcccccttctctgccgccctcccgccgctcacccagcatcttgctgagcaccgcgttgtgcaggtccgggttctgctgagccagccgcttgcgctcgtcctttgcccacaccatgaaggcgttcatgggccgccggatgcgcgactcgtctgccgcctggcgttccccgcggccggccgggctgaggccatagcgccccggctcggggctgcgcgggggactgcgctgcgggctgggcggcgaggcgggcgcggcgggcgcggcgagggcggcggggccggcggcgaggccgcgcgtgtcagcggcggccccgtgtcccggggcccatgcacagtcgcggcgggcgggcgggtcgtcctgtgcgccgtagccgggcggcgatctctgcattccagctgggcgcggcctgggcggaacggagcgcgggagcgcggcgggcgggcggcgggcactggggagccgggcgcaagggcaggccaggccgggagggcggatggcggtggggacggcggtggcctcgggccgggcgggcgcccagatatagcggctcagggccaatcggcggcggggcgggcgggcgggggcgggtcggggccgcctcctccccgggggctccctttcttctcaggccgggcgggattccgctgaggcctcccccgcgcacagcccccccacctcccccgcgacctctcagaaggagagaccccccgggtgggaaagaaagggctgctgatgagggccggtgctgccagactttcggaggcgagctgccacccacccacggagtcggacccccgggcagtaactgggggagggcggcagtgtcccgctggttgccgttccccgccccccgctgggaggctccatggggaggagagggccctttttcacaccaagttctggggaggctgccttcccaacagccggtaagtccttcctggagtgcagcgccttcagaaaaggccccgtctttggggaggcgctctgagtccccaggggcgcccatgctggaaactctacacccatgtgtaaccgtcagcaccagggactttgagtgcctttatgggacaagatggtcttctgtcctcactcccaaaccaactctggcacaaggcaaagctgacacagggagggagagagcagaggccctggacggagcccacaaagagaagggggagcagggacgcagaggctgtggcgtcctccctgccccccaagggcccttggggaaggggctgggaccctcagtggcttgctggctcccctgcccagcccaggccaccgctgcagcaagaggcagggcctacctgggtccttcccactggcccctccctggaccctctgacctgggcgggggcgggttccggaggagcgtccagcttcctgaattttcactgtccccttcctactccatcaggaggggatctgggctccagagctgagggtctccctctggaggtcctcccctcccactgccacgcatggttctactggagaagggttgggtgtccccagcagccctccaggcagggtcagaatctcgccacctcgcggcacatctcctcatagcctggaggctccccagctccccccgccacactatgccgggagccccatgggtagaggccacaggtcttgtgaccctgagcctgtgtggccagaagctcttggttctctgtccctgccagcctcgctaggccacatccagcctgtgttatgaatggggtgggccccacgtgggccttgcagtgccccttagaggctgttcctgaactgtccccaggggcactcctgccctgaggccagcacccccacaggggcactcccaccgagggctgtcgcggtcggtgtccagccctccccaaagccccacatcacagtctgtctcgacgcccatcgtcccagcatacggggctgggtctcccagtctggtctccagatctcccgtccctccagtttgccccacgggcctagcacctcgttcacagacactgagccagtgctggctaatggggggcccgtggggcaccaggaggtgcggcccctggcttttctggggaggcaggcagggttgtggccacagggatggaggggctcacaggcctctgccggatgctgctagtcctcctttaatctcagtatgggtggctggacccttggccgagtctcagtgtgggtgggcctcctgggcagctggcaggagggtgcagggggggtggggagccgtgcgaagaccccaaagggctaccacttggcggaagctctctctactcacaaccttagggttgcagtcaggggtcaccagggcctggctcagcctgggcagtggctggtcactgcggcctgggaaagaggtcctcggggtcctctgcagtagccctcacacgtggggaaggatttgcagttccctgggggccctgcttggtcctctgccacccccgagagcccagagtcactggagctgctctaaacatagtggcaggcagtgtccggcatgacct

SEQ ID NO: 1562139 - DNA, 4001 bp, Homo sapiens
tccaaagcacccagggcaggggctccagggaattcactgcccctcacctgacagaaagaggctcagcagcgacacagccgtgaacaggaagcggatggaacagacctccctggggaaccggagggaggctgaggccccgacctgctcaaccctccagtccccaccccagggtcctagacccagctcttgccaacatgactcaatcagatctgaatcggctcaagcgccagcaaggttccggccctgctccccaccccctccaaagagctgttcctggggcgccagcgtcccttcctctgacctgtacatgctgaccagcacgtctcctgccagggataacaacacgctcagcccctggaagagcaggcctgaggccaggacagagggtcagagaggggcccacggcagggagaggcggggctcagcctgcgtggtgtccgggttcagaaggggcttgggaggggccgggggtgggcctggggctcaggaagagagggtcggctaggataattggatgggggctaggaatgagttgaggctcggagaggggctcgatactcaaacgggggccgggggctcagagagaactggagttcggagaggggaacccgagggtcagaggggatcgcagctggcctggcccgtactcagaaagctcttgaacacccgcgggggaggcatctcctgcctcagatccagggtcgggagaaggtcgagcggctcctcagagactactggagacccagtcggttctgcgggaacccaagggctccactggggccttgcggaccacagacctattttcccctcgagaccgggccgcagattgctcagtccacaagccagacagctgggaagtctctcacaggctttggtcccaccgcagccctatcccggctccagctccgccctctgaagccccgcccctcagggaggctccgtcaagagttggtctcctggccgggcgcggtggctcacgcctgtaatcccagcgatttgggaggccgaggcgggcggatcacctgaggtcgggagttcgaggccagcctgattaacacggagaaaccccgtctctactaaaaacacaaaaattggccgggcatggtggcgcacgcctgtaatcccagctactcgggaggctgaggcgggagaatcgtttgaacccgggaggcggaggttgcggtgagccgagatcatgccattgcatggcatgggcaacaggagcgaaactccgttgcaaaaaaaaaaaaaaaagagttggtccctcccccaaacggatgacccgcccccagccttagatcttggtggaacccaattgtcctgggagccactcacgctaacattgaggccgcgccccctcagtggcacccaaccacaagattttccccgccccttcccataaccgtccaggacaccgaggctccgccccttaagggatctcatttagcaccatccctttaccctacaggacccaccttgtaggaggtgcccagatatcatcttagccccgtccccgcccagcaccgccctttaggccccgccccctccactggctcacccggggtcgaccccgcccgcacccgaggccccgcccctcacggttgccgcgccacaggctgtctgccagttgtggctccgaggcgctggcttctgctgagagcttcctgcccatgtggttcctccgggcactcccgcgctcaaggcgggctcaccgcagctcgggccccgggctcttctgccctcgggctccccaggcccgggctccgctgaccggagccctttgctgtcctccgaggtgatgctcattgagctgttctcgctgaaaaagttgggcgtgtgcttgcgcgaggacgaggccgagcccgggcgggagcttcgccgcatcctgaccccctgctgcctagtcactgacgctaaagccgccgctgcggtcgccaaggccctggggcctccttcagccgctgcgcgccgcggggaccccacggaccctgcgtgaagtcggcaggccccgcggccgcacctgccctcccgctgtgtcccggccggctgctgacgtcacagaggagcctcggtctccgcgggctgccctggccgcgcgtcacggagctggccgtgacgtcacctggagccgtagccatggcagcctctccttctgactttgttgttgtttaagagacagggtctttctcattgcccaggctggagtgcagtggcctgatcatagctcattgtaacttcgaactcctaggctcaagcgatcctcccgcctcggcctcccaaagcgctgggagtacaggcgtcagccaccgcgcccggcctcttttacagcaagcgatgatgtcacagcacttcccagaaaaccccatctaaaatggcactcagtctataacagtttttttctttctttctttctttctttctttctttctttctttctttctttctttctttctttctttcttttttttttttttttgagatggagtctcattctgttgcccaggctggagtgcaatggcgcgatcttggtccactgcaacctccgcctcccgggttcaagcgattctcccgcctcagcctcctgagtggctgggattacagacatgcaccaccatgcctggctaattttgtatttttagtagagacggggtttctccatgttagtcaggctggtcttgaactcccgatctcaggtgatccacccgccccggcctcctaaagtgctgggattacaggcatgagccactgcgcccagcatttttatttttattttatttttattttttgagacagagtcctgctgtgtcgcccaggctggagggcagtagtgcaatctcggctcagtgcaacctccgcctcccgggttcaagcgattctcctgcctcagcctcccgagtagttgggattacagacacccgccatcatgcctggctaatttttgtatttttgtagagacggggttttaccatgttggccaggctggtcgtgaactcctgacctcaggttatccgcctgcctggggctcccaaagtgctgggattacaggagtcagctactgcgcctggcctcttttaaagcaagtgatgacgtcacagcacttcctagaaaaccccatctaaaattgcacttagcaaataccagtttctatcccccttccctgttttgtttttctcctcagcacgtgtcactaacatgctatatatttcatttctctctttctttgagatggagtctcgctctgttgcccaggctggagtgcagtggcatgatctcagctcactgcaacctccatctcccggcctcaagcaatcctcccgcctcagcctcccgagtagctgggactacaggcttgcgccaccacacccagctaatttttgtattttttgtagagatggggtctcgctatgttgcccaggctggtcttcaactcctgagcttgagtgatccacccacttctgcctcccaaagtgctgggattacagatgtgagccaccatgcctggcccatttatttatttccttattgcctgccatgcccactagaacataaacttaatcagggcacagattttcattcactactgtatcctccagcacctagataagcctagcatgtagtaggtgctcaaatatttgcaaataatgaatgttaagaaggagcagggcatcactcagggcacttctaaatacttagtcccctttgctctgcaagcccttcagccccctcctctcatcctagacatcaggtcagagagctcattcaggatctgtgggtccctcctccagacccatttttcccaggggtctgtgggttgagaattcagcacccaccaatcgtcatacccacactcaggctgcacacctgagccatggaggaaagaatgaggaatcagatggtcacagccagaagactagaggtccccaaactcttgctatgtaacagaatatcagtgcagcttatagaaattcagcttcccaggcacaccttgtgattctactgca

SEQ ID NO: 1562140 - DNA, 4001 bp, Homo sapiens
cgatgccatcactttagtttctcattggtacctcccaagaatcctgggagatcagctggagagcaaagaaacgggctcagaaagatggcatgaggtacgacaagtagctcaaggttagcagatgatggacccgataatccaagcctggccttctgacttggaacctgtattcctctcaccaccccacgattcccatgtccagcaagcatttctgcagcccccaccctctgcctgagctggacccagtcggggaatggggatgggtgggacaggtagaggacagcaataaaggagacacatcctgcctgcagctctagctggaagagcataccacctagtatcaaagtaggtatgtgctctaacttcatactgttctgtccataaaaaaataaacaatttaaaatgtatattctcttaaaaaataaaaatgcaggccaggcgcggtggctcacgcctgtaatcctacaactctgggaggccaaggtgggtggatcgcctgagattgggagtttgagactagcctggccaacatagcgaaaccccgcctctactaaaaatacaaaaattagctggacgaacacctgtaatcccagctactcaggaggctgaggcaggagaatggcgtgaacccaggagggagaggttgcagtgagctgagatcgtgccattgcactccagcctgggcaacagagcaaaaactccatctctacataaataaatgtattgcaccactggagaggatagtcacacatgcatttaccattcttgacttatctaagagaagctgccatcacgcctctggccccagggtctgttttttggtagtctgagaaccattcaaacacagagacattaagcttccgaatactgctgtaatttttctccaaggaagtcagccttgaactcaaagagactgattttttacaaagtcagccagtctcaagctcggctcagcgtctgctgctctataatcgcaccacagtccacacccttgtttgttgctgaaaaacaataaataaaggaaagggatccaaacagcccagctgatgttcaaaatactcacaataaggacaggaagcctatctaaaacaaatctcaaaccaacctgggtaggtgagggaaaaggcggaagaaagtaaaagctaaaagataattaagggcaagacaagcctggacaacatagttagactccgtctctacaaaaaaaaaaaaaaaaaaaattaggtgggtgtggtgacacccacctgtagtcttagctacttgggagtctgaggtggggggatccactgagcccaggagtttgaggctgcagtgagctatgatggcaccactgcactccggcctgggtgacagagcaagaccttgtctcaatcagtcaataaggaaaggaaagaaagagactaacaattactgaggttctactatgtgctaagcattgggcttcccactttacctacatcatcccatttaatcctcacaactctataaggaaaacaggctcttcccattaaaacaacctgcccaacagagtttgaaagggtcagagctggaatctgaactcttgctgggaggcccttgatgcctgggctttctccaatttacctcactcatttattgttacatcagtaccatttaccaagggattactgtgtggcatccctctgctaactgctctgtgaaaaccaatgaaatccacaggatagatccaaggttaaagaggaaactgaggctcggagaggccaactcacttaccctaagtcgtaaggctaggaagaagtggatctgagctctgaacctaggtctaacgccaaaactccgactcttgcaaagccatcctgctgcatctgctggacagctctactcgaaagtgtttggctaagttagaatgccttatggcggcgcgagcagagttgagttacaaaaattcctgtagtagcaaaattcccatcttcccacaccgaatggggctaggagagctaatctctatatgatgtaagctcaagggccaaggaaagaggctggtcagagacatcggccagtgatgaagcagctgacatcatccctgctgaaaacattttctgagaatacaagatgccttgtagctggtcatagctggtgttttttctgagcacagagccagcaattcattcccagcactctgcaagaacaacaaaatacgctctctgcaaaaacatcgtggttacaggagaccgagacagcccagcgacagaagctgctaatttctccaagcaacccaaggattggaacgccaagccgtgccagtctggtggaaaaaaaaaaaaaaaaaaacccaaaaaacaaaaaaacagcactgtgaatatcctgaacacagagacaggcaggtgcccagagtcaacggctccagtcagcacctcctgcacccacaatctaggtaccttcttgaaaagcaagtcaatggaaaaagagatattgcacagtcagggagccagtggcttctttagttattttttgaacatctaagaggaaagctgtatctgtttagagtcccactgcatggaagtgaagtgattccgagtagctaagcattagcttggctttacctcagctggcccattcaagcagaaatgttccccaagcagcatttgaaggcgccccctctctgcacaggcagacctattttggtctgtgcactgcccctgtccacaggtttacacatccctggtctagctccatcagcctccaaacaggagacggggaagtcagttcaaccccctccacctccccacccacaccaatgcactcgttccaagcaagaggctccgagaaacatccaaggcaccttccactggctgtgaaacaccagaaggtccccacactcctactagattccaaagaaattcacacagagtccttccaaacctctgaaaataacctcagcggtgctgaaagaagcttccctagtggcagctgcctctctcggagaagctctgaaggaagctgtttccctccctgcaggggacagaagctggcggctgctaagtcccagctcggtcattcctacagcctcggggggccacgtcagttgtgaaaaacagcccagtctcaaattctggccccccctacggcttcgtgaattgaatgaagtaacaggaactatcacttattggacgcctgctgtatgccagaggccctgcatgatctcattccatctccactccagccctagcaaccaggttcaatcacttaaataggcaactgaggctcttaagatgaagtgacttatccaaggtcacacagtgagtacaaacccaggtgtgccgccagagcctgaactgggaacccctgcgcggtaactgcctcgtggcgaaatcggggtgtccttctgtttggccagtcgccgaagaggggtgttcctcttgggcggccctgagccaccctcggcgggtcccaggagcctgcgaggcagctcccgggagaatgggggtcctgaggataggctgggggtcccgggagcgccgaaacagcgggcccacctgtagtcctgcctgccgtgagggtaccccgctcccgggccagccgagccctgccgctgtctggcgccccctccgcctggggaagccccgaaggcagtttccgcccgcggccgcccgtcactcaccctgacactgccgccgaggacggcccggccgagggaagcaagcgagaggcgcggctgccgccggagccgggccccgtcgggctctagcctctccggccggctgcaggggtactgagaccagtacccgggggccagcagcgacccggaaacactcggcccggaaatgatgtcaccatgaggcgggcccgaagagagggtggaccacggctgcgcgctggctccgggaagcggtcgatgcccgcggccgacggagactacaacccagaggcggaggacaaagcggaaggccgaagagcgaggacgaaaccggcggaaccgcactttggagcctaacgagccatcgctgcgtctgagactggga

SEQ ID NO: 1562141 - DNA, 4001 bp, Homo sapiens
acgccaaaactccgactcttgcaaagccatcctgctgcatctgctggacagctctactcgaaagtgtttggctaagttagaatgccttatggcggcgcgagcagagttgagttacaaaaattcctgtagtagcaaaattcccatcttcccacaccgaatggggctaggagagctaatctctatatgatgtaagctcaagggccaaggaaagaggctggtcagagacatcggccagtgatgaagcagctgacatcatccctgctgaaaacattttctgagaatacaagatgccttgtagctggtcatagctggtgttttttctgagcacagagccagcaattcattcccagcactctgcaagaacaacaaaatacgctctctgcaaaaacatcgtggttacaggagaccgagacagcccagcgacagaagctgctaatttctccaagcaacccaaggattggaacgccaagccgtgccagtctggtggaaaaaaaaaaaaaaaaaaacccaaaaaacaaaaaaacagcactgtgaatatcctgaacacagagacaggcaggtgcccagagtcaacggctccagtcagcacctcctgcacccacaatctaggtaccttcttgaaaagcaagtcaatggaaaaagagatattgcacagtcagggagccagtggcttctttagttattttttgaacatctaagaggaaagctgtatctgtttagagtcccactgcatggaagtgaagtgattccgagtagctaagcattagcttggctttacctcagctggcccattcaagcagaaatgttccccaagcagcatttgaaggcgccccctctctgcacaggcagacctattttggtctgtgcactgcccctgtccacaggtttacacatccctggtctagctccatcagcctccaaacaggagacggggaagtcagttcaaccccctccacctccccacccacaccaatgcactcgttccaagcaagaggctccgagaaacatccaaggcaccttccactggctgtgaaacaccagaaggtccccacactcctactagattccaaagaaattcacacagagtccttccaaacctctgaaaataacctcagcggtgctgaaagaagcttccctagtggcagctgcctctctcggagaagctctgaaggaagctgtttccctccctgcaggggacagaagctggcggctgctaagtcccagctcggtcattcctacagcctcggggggccacgtcagttgtgaaaaacagcccagtctcaaattctggccccccctacggcttcgtgaattgaatgaagtaacaggaactatcacttattggacgcctgctgtatgccagaggccctgcatgatctcattccatctccactccagccctagcaaccaggttcaatcacttaaataggcaactgaggctcttaagatgaagtgacttatccaaggtcacacagtgagtacaaacccaggtgtgccgccagagcctgaactgggaacccctgcgcggtaactgcctcgtggcgaaatcggggtgtccttctgtttggccagtcgccgaagaggggtgttcctcttgggcggccctgagccaccctcggcgggtcccaggagcctgcgaggcagctcccgggagaatgggggtcctgaggataggctgggggtcccgggagcgccgaaacagcgggcccacctgtagtcctgcctgccgtgagggtaccccgctcccgggccagccgagccctgccgctgtctggcgccccctccgcctggggaagccccgaaggcagtttccgcccgcggccgcccgtcactcaccctgacactgccgccgaggacggcccggccgagggaagcaagcgagaggcgcggctgccgccggagccgggccccgtcgggctctagcctctccggccggctgcaggggtactgagaccagtacccgggggccagcagcgacccggaaacactcggcccggaaatgatgtcaccatgaggcgggcccgaagagagggtggaccacggctgcgcgctggctccgggaagcggtcgatgcccgcggccgacggagactacaacccagaggcggaggacaaagcggaaggccgaagagcgaggacgaaaccggcggaaccgcactttggagcctaacgagccatcgctgcgtctgagactgggacccggaagtaaacaggccggacgtgacgcaagccgctcggcctagggatggtggctggccgggttgtcatggaaaccgctcaggagcagggagctgggagctatgagtgctgactgcgtgaactcggcctccacttcccggacctgccacttatcatgatccacgagctgtactcatgactccgcacaagcaagcaggggctgacggtcggatccctcgcccccattttacggacagaagtaccgaggctcaaagagagccagtgagatgctgaaatcacgcgtgattggaatccagccttgctagggctgcgggtgttacgggccgtgggcggcggttaagagcgtgggttctatttttagttttgccacttactagctgtgtgaccttggacaagttacctaacctctctgagcctcagctttctaacctgtaatattaaataataaagccaggcgtggtggcacgcgactgtagtcccagctagtcgggaggctgaggcgagaggatggcttgctcccaggtgttcgagaccaacctgggcaacataacgaggccacgtctcttaaaaaaaaaaaaaaaaaaaaaaaaaaaaaaaagccgggcacggcggctcacgcctgtaatcccagcactttcggataaactatatatatatataatctgacatccccaccagaccctgagcttcttattcatctatttccccccgagctctgcacatgtctgatgaggaggcacacaacagatgttcattgattgtaggattctcactctgagtcttggtgaccccagctaaaaccggtggggcttgtgtgatgagtcagtgacacaatactgggaaacgtttggagaaccagcaatctgctgctgtccaaacagtagcattactgtgtttacctgtcgttgcctgagcaccgctcaaagtccctgtgttctttatcagctcatgtttaagctcctctcttaattatctgcaatgtgatgatgttcacaggaattccatctgagacaaactgtcccaccttaagtctgcctcttacagcaactcagcactctggtttggtagctcttacaatattgcattttcacgtggggctgcttaaaaaagtcccctccagctctgtgggtctatgacaggcaaaagagaaacaaagattttgaagaagggctttaccagtaggaaaccctggtcatcatctactatcagaaaagacccaaagtctccaaagacagtcacatttctcagttttttttttttttttttttttttttgagacggagtctcgctctgtcacccaggctggagtgcagtggcacaatctcagctcactgcaagctccgcctcctgggttcacgccattttcctgcctcagcctccggagtagctgggactaccggcacgcgccaacacgcctggctaattttttgtatttttagtagagatggggtttcaccaaggtggtcaggatggtctccatctcttgacctcgtgatccgcccacctcggcctcccaaagtgctgggattacaggcctgagccactgtgtccggccatgtttctcatcttttaaacacagttgaaggcttgtgatttctctacttggtgatgtagaaatgacaggagcgtcctttcccgactttattatataatgattaccagattatgtaagggtcacgtgacaatgattaggcacttctacttccgaagagccaacaacacgaacaatctacctacctctttctattttttagtttttttttccatcaccaaagtaatacatgattccaacaatacagagga

SEQ ID NO: 1562142 - DNA, 4001 bp, Homo sapiens
ggagaattcaaatacctaggacttaatataagaaattctggccaggcatggtggctcacacctgtaatcccagcactttgggaggccgaggcaggcggatcacctgaggtcgggagtttgagaccagcctgaccaacatggtgaaaccgtgtctctactaaaaatacaaaaattagccgggcgtagtggcaggcacctgtaatcccagctattcgggaagctgaggcaggagaatcacttgaacctgggagacggaggttgcagtgagccaagatcatgccattgcactccagcctaggtgacagagcaagactctgtctaaaagataaaaattaaaaaaaaaaaattctgggtaggccaggtacggcgtctcacgcctctaatcccaacaccttgggaggccaaaacaggcagattggagcagcctgggcaacatggcaaaaccccttctgtacaaaaaatacaaaaattagctggatgtagcacgtgcctgtagtcccagctactcaggaaggctgaggtaggaagatcacttgagcccaggaggttgaggctgcagtgagctgtgattgtgccactgcactccagcattggtgacacagtgagaccctatctcaaaaaaaaaaaaaattctgatcaagtcttcaaaacaacataaaagcagccttaactctccaagcaggggcccctacctcagataatttccattgtatctacctgacaaaacctatctcctgtcttagtggtatctggagaaactttagggtctggaagtccctgatgaaggactggaatttgtcagaatggctcaaccaccagctctatccccatccctgccataggccctcctcccaaccctgtctgcccaagaaccatacggagaaaccaccctacatatctggtgctatttcatccatctacaagcaggagccaggaggctggccccttttagatctcactaggggcatcttcccagaggctgtgtgggcatgtgcctgctcccaccgcgccccctccacagcaccctctggctccggatgggccatcatgaaagcttgagcggcccagatcaggtcctcttcccgaactcctgggacgggcacggtggggatgccagcgatcatcatggcgagggtgaggatgcagatatcaggctgggagctggcctccttccccactgcctcagagggtaccggtagaacccgtggtgacagcccacacagcatcaggggcctaggcctgctggggccacccaggtcaggggctctgcttctggagtagccattgtcccagcccaagctctccagctgcctcacatgcgggaatttgtggcagtttcggctgtattccttccgtagtgtctcccagctagtccccccagggcagcccctggcttgtggcattgccagggctgggccccaggcctgggcagcaggtgccacctgctcagctttctggctcagtgggcctgttccaccagaggccaccaccactggctctacaggactacagaggccaagggacaagcctggagaagcagccccacctgcagagacaggaatgaaatggaacgttattctcagttctttgaggagggggccctgaggggcagggcatgggagcagagcttgggggcgtaactaagaccagccccagcggactgtctagaggttgggaactaggtgttactcatatccacactcccagtccccaacacggagtaggtgatggagaagcgtttgttgaattaatgaatagtgagcaagcgggtagttattgattggcaaggatgtttggaatggcttttcttctaaaagaattgattctagggccagcccccaaatgcccagcagaaccgccacctccccagagccagaaagcaacttctcaggggaagctgccgcactccctccaattgcaggtgccccccgctcaccttggccggaaggcagaggacctggatgagtttgtggagtcctgaagtaggacatggcttccccaaagccccggtttgtgagggaatagtgatctgccgcctgtcctcccttcttcacccttctagaatgtcacctcatagaccctccccttcacacttggaatccactttacagcgttgacctattcattctagaacctggacatgacaataggatgaggttaaaagagcaccagaccaggagctgggtgttctaggttcttgccctaaccttgaacgagtcacccagatagttttgttccttgatatccttatctgtaaagtgtgtctgatgactgcccactacctcattaggagttttgaggatgaaatgagatcatttgtatggaagcagatgaccagagatggaaacacaggagccaagtgcttcgtgccttgtagagtaagacttcgggtcagacccagtattggtatttttctttttctttttttgagacagagtctcactttgtcgccatgactggaaggctggagtgcaggagcaagacctcagctcactgcaacctctgcctcctgggttcatgcaattctcctgcctcagcctcccgagtagctgggactacaggaacctgccaccacacctggctaacttttgtatttttagtagagacagggtttcaccatgttggccaggctggtctcaaactcctgacctcaagtgatctgcccacctcggcctcccaaagtgctgggattacaggccaggtattggtatttttcaaaattcctcaagtgattataatatatgacaaagttggaaccttttttctagggacatacttctcaaccctggctgtacatgagaatctcttgagaagcttttacaaaacacaatgtctaggcctaatttcccaacaaatcaaatacgaatccctagggatgggatgtgggacaccagcactctttacatatcctaagatgactctaacaagcagccagcctagggacccctgctcttttgctccgacctgctgacctgcagtgattctaaacgaagtgactctcataggctgtaggggcaaggagaccttccagtgatcaagatgtcagcatcggctgtttatttctggtcttggctggcagcaatgtggccaacttcggaccagccagccacaggtctggggctccaggatgcagctgtgctctggtgcactgtgggtcttcactcatacttgcagaaatccttaagttctttgggcaggtggagcccatcaatggccagccggtgcaccatgctcctttgtatcactaggcggcacagagtctgcagggatggcactgtgggaagaagactgtgaaaggcaaactgaactggagggtgggtctgaggccaagatccagaaggtctaggtcatggtccccactttgtcattaaatgtgggcaagtccttactgctctctgggcccagcctgcttcatggggctgagagaagcacctcttcctgagagctgccacaaagctgcagccctgtttatatcataacacttagcacaatcccttccccattcacttagcagcttctgggggcaggggtagtgtctgatttgcctgtgcaactgaagcctccagcacaggcctggcacaaagagggttctggtgcattgagttcatgaaatgtgatgagaggtataactgcaatgcttaccagggctataatgaatcatactcagcattaagaagctctcagtctggggtttgttatgcctcgaagccaatagccaatatgcccaagtctatgagcatgtttctttcttttctttctttttttttttttatttaaagagagagggtcttgctctgtcacccaggctgaagtgcagtgctcagtgaactgcagccttcaattcttgggctcaagcgatcctcctgccttagcctcccaaatagctgggactacaggcatgcaccaccatgcccagataattatttaattttttgtacagatggggtctcactttgttgcccaggcttgagctagctagcttgcttgcttgcttgctttct

SEQ ID NO: 1562143 - DNA, 4001 bp, Homo sapiens
ccctgggggagtgaaagcgcatcgcatctgagcttccttgtgtgggtgttccgaggttccttgcctccttcctaatagaagagtctcttgattttgtaatcggacgaattctgtctgcgttgaccctccccaccctgccaccaaaacagtctcagcctgggcaaccaagaccataggagatgatggggctgcacaggtattctgctacctgttcagatgaccccagttgctgagcttctgctggagagagttggcggggacataattgtgcatctccaccatcttggggaagtaaaacttgatgacctctgcaacaaggactgagggagaggggagcagacatggaaagtgggggcatgggtaaggaaggaggaggtgagagaaggtgggggtgggagaatcaggcatggcagagtggtggaacccaatggaggggtggagatgcggaaaggggaaggataaggagggagacaaagacattaagattagtgataggtagaggagactaagtctccagcatacctcagaggagctgcatcccttccccactaatttaggaatgggaatactgagtctctggtcctccagtagagaatgagtcagccagtgcaggggctcacacctgtaatcccaacactttgggaggctgaggcgggtagatcacctgaggccaggagttcgagaccagcctggccaacatggtgaaaccccatctctactaaaaatacaaaagttagccaggtgtggtggtgcatgtaaacccagctacttgggtggctgaggcagaagaatcgcttgaactcaggaggtggaggttgcagtgagctgagatcatgccactgcactccagcctgggcgacaagagtgagactctgtctcaaaaaaaaaaaaaaaaaaaaaagagaatgagtctccaagagaagctttcaggagcccagggaattcacatggatgcatgatgcacacacacacacacacacacacacacacacacactccaacaccaaagttccaggagagtaaaagactcacgtaagcagagacacatgtgataagatccccctacacatagatacatagggcagaatgtgtagacacatagaacaaacacatgctagacacacataggcacacatgtagaacacacatagacagaagcacaaaaagccacatatgcacacagcctccccaaatatacagatacagagatgcatagaagtacttgacatgaaaagatgacagataagtatttctgtcattgagatcccaggagacattcctagaaacacaaacaccttcacaatcacaaagaaacacatgcacacaagacccccccaaatacaagactaaacatgtcaacacatatgaacacacacatgctcagactcccagaagacatagaacacatagcaatgagtgagcacatacagaaatgcataaatacatatgcagacacatatcttaatcattaatgtccctggagggagttagaggcaccccccccaacatgcacacaggatagaacatgtagacatacatatatggacacacatcgttcacacacagatgcaaatagaaaacaagcacacacatctaaaatttgaagtcccaggaggcagattcctccccactcccacaagcacacaaacacaaagagtttgcacagagacccgttacacacgaacatacaggacagaacatgcagacacacaagggcacacacctccatcgctaaagtcccgggagaggtttcgcttgggccgggacagagggatgttgtctacccacaggtacagctggtgcagcgcctcctcgtccacgctgctcgccattggcgtcctcacggcctggccgccccagcggtgccgggtcccgccccagcctcacgacccttcaggcgcttcctttctcgccactgcagaagcccataactgcctctgcctgcctaatccagagactcacgtcccagctgggagcggccatattgttttctgaaaccatggaaaccattcccgactctcctgggtacaaagacttctgggagttgtagttttatcccctccccgctacctcctctcaggcccgagctttgaaaaggcggttagctgcccttgtcttcttcccaagaaagcatcacttctgtgcccacgccacctagtgaccagccactcatccattttgggaccagccaaagccaaccaggaccccagaattcctgcatctgcacccctagggtggggatcccccttcttggcccttcagccctttagtcccaagtgaagggagcactccagtgttggtcagctttatttgggggtgcgttgttgataatctgccacccaaatggattgcgtgatacaactgcttcctgcttcgtccctctccaaaaactctatgctcatggggccattgccactcgcccttcccagcagtgttctagtggggtatttaataggtaacccagactcccagggagaacaccagagttcaaggccagtaccttggcaggtcatttaacttcttaactctatttcctcctttgtgaaatgacgatggttctcacttatttgtcccaaacccctcatcacccgtcaatgagctattcttccatggattagaaattcatttcaggcagggcacagtggctcatgcctgtaatcccagcactttgggaggccgaggcgggcagatcacctgaggtcaggagttcgagaccagcctggccaacatggctttcgccccgtctctactgaaaatacaaaaaaaagttagccatgtgtggtggtggatgcctgtaatcccagccactgaggaggctgaggcaagagaatcgcttgaacccgggagtcaaaggttggtgagccaagatcatgctattgcactccagcctaggcgacagagcgggactccatctcaaaaaaaaaaaaaaaagaaagaaaagaaaagaaagaaacaaattcattgcagtacccataagggggttaggaatatgggtccctccttagtgaagaggtacttctagagtcaggatgagaagagagtttgactaacggcatggccttgggcacctgaccggaccgctgcctggtttctcatggctttacctaccttataggggctttgtgagcatctaaagcatttagcacagagcaggggccctattagtatcagctggtactatcattaatgagacagtctcagttccagcaagaactgttctttttcgcaggagacaaatggaagtaattcgtcttgttggaacctgcggtgaggtagctgggttaaacaggagcacctgggcaagcaggcaatgctcctcctgctcactcgagagcaggtggggcttccttgtggccttctggtctccaactccagggctcggatttcgggagggaaggtggtggcaagggggatcccaactactttttgttgtcacttcaaagccctcaaggcctggaggggattcctgaatgccagaagtagaggccaagagtggaagtcacccccatttcttgttttaaagtcatatatagtggtcttgattttccataaggggccataaccagggcaggccagggacaagagatgaactggatactcccccattaacattcccagtgttggagaggagaaacttggtggtaaaggtgggccggggatgggaaggaaacacagaagtgatgtgccagcctcaggtgaggtgggaaaaccggtttggggcccagagctgccagccatgctcaagcccaggccctcccttggttggaactgctggggcctgagggcctcagtgaggaggggtagggagggaggggctggctctgaaaggaaaaagggtaggatcagcaaagggacctgacctcacctttgtactgggggccccctggaaggcactgcacagggagttaccaaccatcctctgcctcttgggggtgcaacctgttcctagcaatttcaccttcctcctgccactgtgcctagaggtggccaccaggcttgga

SEQ ID NO: 1562144 - DNA, 4001 bp, Homo sapiens
agttcttagcaaatatttgttaatagaaaaccaccaccaccaccccactgagcccctctggggcaggattaaaagtttctttgtaccctccttttatgtttctgtcaccatgtgggcagttttactcttcatggtagctagtagaatttccaacattatgtgaagaaactaaggccagataaatgaagtacctgtcctaatgtcaggctaggaagcagtaggaccaagaatcaaacccagcatggttcgactgcaaaggcttgcaggttctccatccatcttggttgttgtaaaatgagtgaatgcacagatgaatgatcacacctatggtggaacttcaggcagcagcctagggcttggaaaggttcagactctgtcttatcctcctacctgcaaggctgacgctaagggtgcaggagaatggggaagaggcagaatagcttattcaatccaggtgggaggtggaggggcatgttcttaagacatcctagtcactgcatcatcggcccttagacccttacaggtgactctgtaggggctggagtcccatctgctcttagttttctcagtcttgcttctctgctcttccattccattaaaccaaaggaaaatcacttgacttgcttcttttttatgtaaagtagataatgacaccctgtgtgtgtgttttgagtgtgacagaagctgttctaagtgctttacaagaatctattaagagctaagttatactgagagcttgacatacatcagactatttgattaataaagcagaaaagatggttaatctttttttatagaagaagaaactgatgctcagagaggctataaatgatgttcctgaggcacagagtttgtaagtagaggagcctggaccagaacccaggtgtgtctgactccaggaatgctcatactgtaaaccactacattcttcttacttatggcagacattttcaaacttgagtatgcgtcagaatcatctagaaggcttgttagagagacccacctccacagtttctgatcaggtgggactgggaactagcatgtttccagttgatactgctgctgctattgctgtcagactaggggacaaactcgagaaccactcatctataaggttattgggaggtttagagttccatttatgtctaagaatctatcattaatagctccatgtacatacatgcagagaactatgcttgcacatgcaagaatgttcactggcacattgacagtgataatctccagagggtaagattttgataatttttcaccttctttcttacccttttgtgtattctaatatgcatttttatacagggcatcctactggctgcttaaaaatcttggaaactgctgcctaccatccccatttccagcagattatcttagctataactgcacttcatctccccacttccatttgcagattccaagcttccacagagaaagtggtccaggaaggagccttttctgacaagtgcatctaacttggctaagtccctcactctcaaattctggctctgatctccttttcccaacctctccttgcctgccaccagccccaccccagacattgaaggccccttttcctgctttacttatttcattttctatagcactttgatcatctatcatttgtattaggtattgtatgtctctctcccattagcatcttaatttcacaaaggcagggtctcaggctctttgctttaacctcagcacctaggacagtgcctggcacataactatgtgcccaacatatgtctgatgaagtgaattgaactgaattgactctcaatccggtaaggtaagaaatgggctctgtttgtgctgcatcacctcccccaccaccccgccccccagcctgattcccagtctattctttgagatcccacatttcataccaacctcgtgctagttctgatcgaagctctaggcagagagtgagaatcaggagaaacgagagagaggcctgaagctgcatggtgccactcagccagtggctcagcctggggttgccattttagggagaaaagggaccaaggggaggagcctggccccacatccagctcattcacctttaactcaggcttttcatggggctgggctgcctcaggaacagagtgttcagccaaagcacagcttcacctctctcctcctggccttatctgatctggccacccaggctactttagtaccacttcagggtggaagcctttttcacaataataaaaagacagcagccatttttgagtacctttccttttccaggcaccatgcaaaatagttttcacacattgcttcccttaagtctacacgggaatcccacaacactaacactcccattttgtagatgagaggaggttatgctactttgaccattgttacatggacagcaagtttcagagacaagactgagaccccggtctgtctgcttcagtgccctcgtatcactcattcattcaacaaacattcatcaagtacccacactgcaccaggcaaagtattagatgctgcctccatcccatctgggtgctcccaggaaattatggcaacaacacacacaaacacattggaagtcagaaacagtcacctacttggaggaggagcagattcattatattttaatagaaatatcaaaagcaccatgtagaaggagggcccagctttgtttgcttcagagggtcatggtctctagagacacacccccagaatccagcacattccaactgtctcctttccttgactctctagagatccattttttttgaaagacaaagccagcatgctttagggagatttagtgagcctcagatttaaaatttgaggttgtgatgggtccagctattctttttcaagaagcattctatcatatatttattattatttatttttaattgagaaataaaaattgtataaaggcagtccccaatttacaatggtttgacttacagtgtttgactttatgatggtgcaaacacaatgcacagtcagtaaaaacagtacttggaatacccatacaaccattctgtgttcacttttagaacagtattcaataaattacattagatattcaacacttcattataaaaggggctttgtgttagatgattttgcccaactgtagactagtataagtgttctgagcaagtttaaggtaggtaaggctaagctatgatgtttggtaggttaggtgtattaaatgcatttcaacttctgatatcttcaacttaggctaggtttattaggctataatctcatcataagttgagaaacattatatatttatgaggtacaatatgatgttttgaaatatatgtgtgtatatatatatagagagagagagaaattttctctcttagcaattttcaagtgtacaatatgttattaactacggtcaccatgctgtgcaataggtctttacaacttattccgtctgtctaactgaaattttgtaccctttgaccagcaccttcccaatacttcccacccccagccccgggtatccaccattctactctctgcttctgtgacttcaacttttttagattccacatgtaagtgagatcacctggtatttgtctttctgtccctggcttatttcacgtaacctgcaggttcatccacgttgtcacaaatggtaggatttccttctttttaaaggctgagtagtattccattgtgtatacataccacattttctttatccatccagtgacggacacttgggttgatttaagtccagctactcttgacctgggcaagtcatttaacgtcttccagcctcagttttctcatctataaattggggttaattatgttgctttagcatacttcccagaattggtgcaagtgttcaataaatattcaaatgcctcacacattgtgaatgcacacacaggtatatgtcttttgcaagggatgcgtgtgtgtgtgtggcaatgatgcctttttgaaaatgggggtgctaactggatcagcagcatacttagttgctacag

SEQ ID NO: 1562145 - DNA, 4001 bp, Homo sapiens
tgcctggctaattttgtatttttagtaaagatggggtttctccatgttggtcaggctggtcttgaactcctgacctcaggtgatacacccacctcagcctcccaaagtgctggggttacaggcatgagccactgcgcccggccaacccaactgttaaaacttcttatttgagcaatcctccctcttcccactccaagcaaggttagcccctgatcaattttctctatcttaggatgtcaaaacctcttcttttactacccccaaggaccaaggacaggattagattccttacggtggtttgtattttgcaacacaggctacttcacgttctattttaagcttgaagttgttaaggttgccattacagccggagaagacaaaagtttcacatcttttggaggttctgttgtagaaatatctaaagtgaacttcatagcagcttccaaaattcatgtccaatttgcagggatctgcatgagaggttcccattgagttagtgggaattggtaaggactcagcaggagaacttgtctttatgggcccttaaaaattcctacgtttagcctggaactattctcatattcaaggactctgaaagatgtggttttctcttggagttagagttgcttggaaatgttgcccttgcacaatgcaaattggttaaaattccaggttgttgtcgtgagcagtgtattggagaaggagaagtagtgatcagtgaaaaaggaggttccaccactagcttgtgcagggcgatgagcttccctacatttcctatcttacagtttattaaagtacagtatcctcctgcttccccacatcatcttcctttccttttaattgcccacataggacatgcaattcagagtgcctcctccccagtttcatacattcactatactacctatacttcaaaatttaagtaaccatggctgctgctatctttaaagcaggatgcatactaaaatgctaaaatgcataaccttggggtgatgctcgttcatcctcataccccgtcatcttctcctttcttgccttctcagaggcaaaccctctgtttttattgttaagagttgggtagtaagtggttggaacagccacaatcatggttgtattgacaatccaccttactcaagcagccagcctggaatttactctctggtaaagttatgtgcataatcttatttcatactcacaaacaccctctgcagcaggcacttttctgatcttcattttacacatggggaaactgagactaagagaataataagtggttgagtgacttgtccaagggcacatatctgctaagtgaacaggtccagaacttgaagtgtctgacttacggtataaactgtgctactttctcgtcccctggaagcgctgagccttcacacactatctatggaagaaagtctcattgcctctcacatttacattgtgagctcctctaaacaggaatcatctgtccaagagttctgtatatgtccatagcccagatactgaaaatgtcttaatttgctctgtctccaaccccctttctctctcatcccaatacataatcatcaatggtctgggatctttgaaatttgtcacacaacctctgattcaaaatacttccagtcctttggacctcctataaaagaggtctccatctggaaaggactttgtgtcatttctgttttttctcatcaaacatccagaggacccctagtgtaagtaatgccctgagtcaagggactaagtgtctatgggtattgtcatgaaaggaagaccttcctggactacctagataacacacttttctcccaataccttctctctcattcataattgacctttggatttattttctgccttagcttcatacctttgaggtctccacatatcttctccgcaattttattaacaccacccaataacagggtattcaatgagcagaagatgaagaatcttagaagaaatcccagcttggcagacttcatggtgcagcaagcagcaggcaggatagttgtggtatcacctgatgttatattttgggcttgatacttgagacggttgagctcacctaccccaagggccaggactggacattactaggtgttgagttgaacagtgagtgcttgggtacccagccatgaagctgaaggccccaaactgattagacccttgatagtgagtcccatgttcatctagaagcaatagaaacttaaggatcagagcttctgcatatatttaatcatgaagggtagaatcatcagagtgaggaattaaaaagggatttcttcctttctctttttgaccttttatgcacagaagaaactaatcatggcacaagagaaagagtgcaatagcactataataatagtaacagggttagttataacctagagtactacttaattccaggtgctatttttaagtaatttgtatatactttatcatcatatacaccctatgaagtaagtacagttattaccatcatttaaggatgaaatggagacagagattaggttacatgtacaaggtcactcatttattatgtggtagagacaagatttgaacttggcttcagagtttttgttcttagtcacactacactatgttatctaggaacatgaggacatcttggatctgttttctcctaaaagttttgaagttttggcttacctttacaccctaaaaccacctgatgttgattttttggtaaggtataacataaggatcctttttcatttttcagtggttccagacctatttattaatgagttcctcttctatttaactgcaaaataattttgcttaattatgtgggattgcttctgagccctttatttcactccactgtatacccccactccaaagccacacttaatctcttgaactttgtttatcttaggattttgtattttcatataaattttagtcagtttatcaagttattcaaaagacctgtttcgggccaggcgtggtggctcatgcctgtaatcccagcactttgggaggctgaggtgggtgaatcccatgaggtcaggagttggagaccagcctggtcaacatggcaaaaccccgtctctactaaaaatacaaaaattagctggttatggtggtgagttcctgtaatctcagctacttgggaggctgcggcatgagaattgcttgaactgggaggcagaggttgtagtgagctgagactgtgccattgcactccagcctgggtgacagagcaagactctgaccgaaaacgaaaacaaaaacaaaaacaaaaacaaaacacctattttggatattcatttgaattgcactggatctacaaatcaattggaaaagaatgatatccttataatattgtctttgatatatatatttccatctattttgaccttcattaatattttaaagaaaggtttatgacatttctcatgcaggtgttacaatcttatttatatttttaatattattgtaaatgctatcttttaaaaaaatcttcaacttttattttaatttcagcggtacatgtgcaggatgtgcaggtttgttacatacataaaccatgtgtgccatggtgatttgctgcacagatcatccctacacctaggtattaagcccagcattcaccaggtattcttcttgatgttctccctctccctaccacccccatgatatgctccagtgtgtgttgttccacttatgtgtccatgtgttctcatcattcagctaccacttgtaagtgagaacatgcagtgtttggttttctgctcctgtgttagtttgctgaggataactgcttcgagctccatccatatccctgcaaaggacatgatctcatttctttttatggctgcatagaattccatggtgtgtgtgtgtatatatatatatttcagtatcacattttctttatccagtctatcattgatgggcatttggattgattcatgtctttgctattgtgaatagtgctgcaatgaacatatgcatgcatgtgtctttataatagaatg

SEQ ID NO: 1562146 - DNA, 4001 bp, Homo sapiens
tgtaagattttcccagatcaatactaaagtaactttttattttattcttttttaagactaggtaattggggtggggttttaaaaaaagacaaaaaaaaagactaggtaatccatgtcaataattatctctcccattaaacctttactactgcattaaaacaactgtatttacaaataaatttcatttgcttgtaattttacttctcaagcaattaccaatggaaggtctcccttttacattaatgactaaatttacaactgtaattttatcatattaacctactgtaatctagctgaacttgaatacaaactagacttgacatactactgatatatgttttaattaaaaagtgatacaatattggctttgaatttctttcccaaaaatgcaatgcaaaaatttcaaaagaaacaccttttgtggtcgcacattaccctagttgatctcatgccttaaaatcggctcttttgaaatttagcgatacaaaaaggaaaacgtttaatcactaccctggaaagaataaattgtgagttctgcaacaaacggttgacttggcagctattacgccactctacagcaaaatgcgaagactaagcccagttttctgtcagctgactgttaatttcacaagccatcagctgcaaaaaatgttgttctgttataaacaccatgagcttattgtctaggaagagaaatcaaatgcactctagaaaacgggcaaaatgttgagagttttaatttccacaggaacttcagaatttttactgaaaacttgtgtttcagaaaatgaattttaaaacatttaatctattctaatattgggaggtaaaaactgacccaaatactcatttttcctagtttggagaaaaaaagtgttgcaggataatactgtaaccaactttaagatacaatcagattcgtctacatctgcgatattaacaagggacttgccactctccttttccctcactctcccaagttctccctcaaaataaattcttttgtaaaaattggtttgtttgtaggtttttcagattttttggtggttggtttgggcttaaaaataaaaggctgaaaaactttgctcaaccaagaaagcaagtcgaggaaacaaaataaagtatttttaagtgaaaatggtcaataacgtagtcatgttttctgtggttaattctaacatggatagctggagggttcctgtaattgattttaaataaatcatttaaaatatgtacattctctccacttgcaaaacaattaaacatgttgtcttattataaaccacttaaaatgtgttgatgtccttgttaattctgagaaaaccattcgcttactgagagaagacatacaacactcattttctttctaaaaaaaaaccaaaaaataaaaaccaaaaaaaacccttaaagtttaaccaaaaattttatcccaaaaaacgtttaaaaaatacaaagctaactgtaccccaaactccccaacctataaggatcttaggaaaccttccaacccagctgcagggagcctctggaacgttctagaaggggaacatcctagaagccacagaaggggggctgccacctggctttcttttttgagttcaaaataagggttcaaagcaggtcacgggtactcaggaaggatctttttgggggttcctggctggcccgccaaggggtgcctcctcagcctcaacactaggaggcagcccggggccaggaagagcgcccgacttttctacagagtggctgcgtcgcgcctcggcaccagctcctgtacctggaggccaggcggcttcccccagttgggggctccctgccacctctcctcagggcagccagcagggactccctgtgtcggtccaaaacgtcgaagaacgaggcctcgggccccataggtgcaaaggccatgagggcagacggctgccagaagctccagaagcccctgtcctaggctgcgcccttggggcgtggctgcgtgcctttcccgcgctttctgagcggccggcgtgcccacgccacacacccagaggcggggctggacaggcgtatgcgtagagcacggcgtggagtgcgcaagcgcagggctctcaggcgcggtcccacctgtgaggccctgaggcgggcgcctccctgagtgtgggtcgcgcaggcatcggccctgcgtggctgagctgagagatgtttgtgtggcgtgctgcggatattggacctagagtcccttgaggtgatttaattattttgggggttggctatttagggacagcaatatcagcgatttttcattaaaacacataatgatgaagatccagctgtgtgggataacagttctcggcaatgggttcagctgtgattgaggtgaacgcaatccctgtccttactaacgtttcatagcagttgaatgcctccaaagccctttgcactcaggtccctcttctaattcccttaagaaccccaggaagttcctaacgtgtcatcctaattttgcaggtgccaggaaaggtcagctcagagcaggcaggcctgggttaaaatcccagccctcgcactccgtagggcagaccaatttggcaaagaaaatccaggacaaccagttaaattagaatttcagataaacagcaaatccttttttttttttagagtaactacgtctcgtataaagtttgggatatacttttactaaaaagttattttgtagccttgcacagtggtactcacccgtagtcccagctactagggaggctgaggcaggaggatggatttagaggctccaggagttgaaggctgctgtgcgctaggattgtgcctgtgaatagccactgtactccaggctgggcaacacagggcgatcccttctcaaaaaaaaaaaaatagttctttttttttttaagtgaaaggtctcacatatttattactgaacccagccaaccaacgcattcatcacagattcagagagaaaaaatatattctcaataaaacatgtacaactctccagagagcggtgacattttcagcttgatgtggtaacatgactgtgaccttcagacagcataaatatgtgtgccctctcatgtgcaattccttataggcccagctcggttcttcttcaatgtctccttttggagttgtacctgattttattatcagttttcatccgaatccactggggacgattttgcttttgtttcttggccaggaattgcttaatcccaaaagtcttgtgggaaagacatggcgagaagtggagtcaagcacacaccacgatggcagagaaaggaatgttatttcattgtttatgtgaaattcaaacttaactggcatcttgtattttatgtagctcctctccctctataccatgtcatcccctgacagacttggtgagtggtgcctttcccccacttgctccaagccttctagagcagaagataggaattctgaagcccaaggaaaggagtcctgactttgggaaggaggagaggacagtggagcgagaccctggaacaaggtggttccaaggcctttgggggcctggtcctgcatgggtggggtgctggggcttggccccagaagagctacttgggagaactgttttgttctttccgttcctggtaatttgataattttccaactaaaactagtttcccatcataaataatgcactccctctgttcacagggatggttgcctgtgttgatggctgttctgcatgtaccaagcactgtgttgatggctttacattgctgttatcacaaatacttcctcactgcctaccttgcaccgggcaaggtttattaccgaggacacagctgtgaacaaggcaggtaaaccccttcctcttagggagctcggagcctaaaaggaggggagaactaaaggcaatcaggtgaacttttttttttttttttgagatggagtttcgctcttgtttcccaggctggagtgcagtggcacaatctcggctcactgcaatctccgcctcctgggttcaagtaattctcctgcct

SEQ ID NO: 1562147 - DNA, 4001 bp, Homo sapiens
gcctcagtgtccaaggatatttacagtcttgcagctgcacttcataatgaacctttagaatcctgggttttatccttacttaggagtggttataactgtctaagtttctaatctcatacctcgaatgtgattataaaaccaagataaaataaataaaagggagaaaagttaagaaggaatctcttcccagatgagatccctcagggtcagaataatcacaagggtaagtagatgaatagcttgtgagttacaggcattccagaggcaaggatcgtcttgagtagtggcctgaattgatatttagtgatgcataagtggtggatattactgcaatttccttcatacaactgacaggagttgagcaccttctcttcacattgctccaggtttcagatcctcaggtgggacaggccagttctgaggtttctgatagacacctcccagcgttggacagtgccttttgttaagaggggaatgcttttggggaccacagcctgtttacacacaactcaggctctagagctcctttagcctcttccaattgcacacacgaatgtaattcactgagaggaggactggccccagccagacccacctgtcctgtgatcttagaacaatctgcctttcctgtgggtggatacttgctctctggatgatcaaatgatggaagattgcatggggctccctgtgccacttctctttccaaacaggaggctacctgtttgactacttgggcttgctcctcaggcagatgagctcacttctgctgctcagagcagagtgacacgggatgtcctgtggggagtggggaactgccttacataaggacctcacagacccaggctctctcttaaaacaagctgacaactttcctcgagttcctcctgcctaggacactctgcaaacatcccggtgcaataagagtgaaaaaaaaaaaaagtgtcaagttggaaaatacaagtttgttttaaagatgctgttctgttttctgagagcagtgtgtcacaatcagccctgctttctgaagtgttttggaaaagaatgtctgtgacgtcacatttcaaagaaatactgtggcctcaaatcaagtagtgagctaaaacaatgctccactacacaccaataataactcgcctttcaaacagtgatgcatttctcatggacctgggaagaatgccatctccaccacataatgtcagcaaaatgtactttcacttcctctttttcttctgaagcatgacggttgtagcaggtctcttggacaaaaatatatgcaaagagttggaactttcttaattcttccctccccgcaaaatgcttgagacaaaagtctagtaggtacatttgtattttagggagcctgaagctgtgtgagtctgtgtgtatcctcttttgcatacagaagacattttctccttaatccacacctaaactttttggtagccaagcactttctattaacagagtcaacagtcaaaacatgtaaaaacccttcataagatgaactctaagttaggacagcctcaaatatcttcacagagaaatattgaaacgttcaggtaattcagagaagagtaggggagagtgcctcttacctgggcttccttcactattccattctttgtgcagtttctgctttgtgagccattgctctgtttcttgtgattgtgaagtttcccgttgcaaacagcaccacctccagggttagccatgggtgtgaagtgacagagcccgggacaggttttccttcagaggtctctgcaggctttagttttcagtctgcgaggggatgggataaagctctttggggctgagcccttaaaggaatcttaccaatcaggcttttccagaagaagagcaacagcctatctttttgtcagatcgttgaaactaaaacaaatggttacctttatacttctcaactcccgtcaaaatgtgaactccatggcaacaaacctgcttccgaaactgtaaaggagattgtccatgctggctccttctggggactgagggaacctggggactgaacaacccagtggcaaagtgtgaggaggcgggctgggaggtggagagtcttttaaagacacacacacacagcacactcacagagtcttctaagtaactgagttctgagttaacctctttttcccaccccctctctcctgcatgtaattgtggtttttggttgtaaaccaagctcaaaagttaatatttctttttgctataaaatagcattcagaggtggttgccagggcctggagggatgaggcaaagggaagttattgtttaatgggtacagagtttgagctggagcagatgaaaaaggtatagtgatggatcagtgcacaacaatgtgaatgtacttaaactaaactgtgcacttaaaaatgattaaaatggtaagtttcatgtgatgtatacatttccataatttacaaatgatttgaaaagatttttaaaaacccagtattcaaaaccaacctatgttaaaatcagtactataataagggggtaccaatccatcaagaattccagtaagacagatgttgaggagacagaatatttgatgactgcgttatctttatctcgtgaccttgggggaggtatttacccactttatgcctcagtttttccatctataaaatatctgctgaggtagaacaaaaatcatgctgtagcttgggtttgttactgacgcaggtgtgaggtggttgatgactgcagggtcccagtcctgaaacacatctggtttactcactaactcttattctctcaatgcatgaatcttcaaggctttgtttcttcctaccatcatcaaatggcatggtgacatgatttgctggagagtcattacaacctgttgagtcttcccaagtccacccttgtggttttcctgagtcgagacttctttagcatcagactctaagaaaagaaaccaatttattggggcagtagacaaaaacaaacaatcaaacacacacacacaaacaaaaagaaagaaatggcccctgtttccagagcctcatgtcctgtaactcagctcccttggacagggttcagttctactccagattaatgtagcttttggaggtggacatgctaacgcttctcctaactatgacttgcatatgagggtacctgcctttaccatcccaaggaatgctggaggaataagataaggcctgaggccaaggtgaaagacggagttaataccaagtgtgttcagcccagtttgtgtctcaagttcaaaaattttatcgcatttctctcaacctttatcatcaaagtagaagtagattttcactggtctctcccttccatggctgtttcactgagatttgggggctaaactcttgtaggtttattttcttctaagatttaggaaatggagagatgaagaggtagaggggagcactattgttggcccaactgcctcacgttacttagaaagacaagttgaagagagggcgttattttccctgagctctattgctcagtgcaaagcatttttttaataaagattttgaaataaaacttttttaacattagatgtctcttttctttcttcttttcttcttctccatctctttcctcttttcacatttgtccttttccctttcctcccccaccctcctcttctttttcttcttctttttcaaattttctttttacaagggacaaaaggtatatataaaataaatcttaaaacacagctgaattctgctttctccgtttccttcccctaattgcaattgctaaggttaggtaatcacacatagatttctgagaaatatctactacgtgctctcactcttgaaacttttctattttacttaccgtattggaatgtgtgcattgttgtgtgtacaaaattatattaacacaccaaccatttggcatcaggcactgctggtatgtatagtcagtggtgactcattgcttcataccatctccagttaaaataagcgaagagttctgttgaagtcagtggtaggtttagg

SEQ ID NO: 1562148 - DNA, 4001 bp, Homo sapiens
gatccccccacctcccacccggggccggggggcgcagggccgggcagcccaggcagaggcggcgccgactggctcagatttcagatttggcctagacctggcccgggggctagggcccagctcgctggcttctctgggggatcctatggggagcatgagctggagggggtccccacgcagccaggaaccctgcgccccccccgcccagccccctccccccgctgcatcacaacaaaaggccgcgccgggcatggccccgtgcgcccgcccggcgcttgggtatcgcggcttggcccggagggggggtgggaattgggggggtggacaggagtccccgccggcccgcgatccgacgccagggtggtccggggcgggggctcccccgcgctggccggggcggggggtccgcggaggggcggggggcgctcacctgggccggcgggcgggcgggctcaccggcagacggacgcacgggagggcggaccgcgggacgtccagcgggacgggcagacggcggcctggccgctccggctcccaggccggaatggattccgggccgggagagacagatcgagagagaaagggaggaggaggaggaggaggcggcggcggcccggggaggggaagaggagggagggagcgcgcgagctgggaggaggggcccggcaggcagccgggaggaggaggaaggaggaagcgcgcggggacggattccccgccggtgacccgggagagacccaggggcggcccgagctgggggtccgggcggggtggggacaccgggcacagaagccccgcctcccactccgccagggcgccgcaccccgcgggccccatccgcccccaggccaaaatgccctccccaacccacccaccttctacgccccagatccgcctctcccgaaatcacgattggtaataatatcagcgggcgtggagcgcccgctctgggccaggcgccatgctaagctgctcaggtcgacttcagggtttaatcctaaccaccacctggcctgagcggcggaagatcgccccactttacagatggggaaactgaggcactgacaagaaccaggccttggactttagccttgacctgagtttctcaaagtaggggctggggcaggagggacagggtggggaggagcgacatttattttaatagttacgggttcattttaagtgcataagggcaaaacatccctggcagcccatcggaagtcccctagttctaattattactgcttaggaggggctgaccagggcatctgagtggcagtcacacttccaagtaagtaaagaggctaagtacctctgaaccagggcaggaaatgtagcagaaaaacgggacattgaggaaatgctgctttaggccacaaagactcccctcttaccccctggcgcaggctccagggctatccttttggggctgggcaccccacccttggctccttacctgtcctggaatcctagcacagggaaaggtgggcctgggtccagctttaaatatcacacctgcctccatattccttctttgaaagttctcccatttcacagatgggaaattaaggcccagacaggtcaggcttctattccctgggcaaaggtccctgctgagaggagctgggaggagcaccctagaatgtggaaggcaaaggcctctgggtacaacataccttccaggagaccaggaatgagcaaagccttactctacactgatctaggttcgcatctaggctagctgcccctctgctgtggggtggacaagtcgatcagcttcccagcccagccccctcacctgtaaaaccggagtgaacatggccacagaagattcctgggaaggttggaactgaccagtgtgaggatggtcaggttgtgctagatgaatggtagctcttgcggtgataaactgaggctagaggggaaaggggctgcttgaggtgccacagccagtcaacagcagaagccagcctgggctggtgaaatggccgcacttgtttgcaaggctggcttaaagattaaccgcagcttcccagggctcagggcgggcccccagctggaggagcaggtttctcagccctcttccattccttagacatgtctaaaggcctttactggccatactgggctcgggggggaggcagggacatttacccagtgacacgctggagctggcccttacctacttgcaagaaccaactgtgctcatctcttcccaactccatattcaagaatgtcacactgatagctccatgtcagccacagtgggagtatttaccccttggacatcggaatacgctaccaatcaagcctcttttttcttccagagagctggttattcaatatgtacgagcacatcactaaactcatccccaggagttcaacagaaaattctgggcttttcgagaactgggatgacagagagcttaaaagcacagattttggaccagacccaggttcaagtctcaactctgccactttgcagataatgtaagaagcctcagtatgccaacctgcagagtgggctaaagatatcacagcccccagaagacgcatgtaaggatgaaatgaggtgatgcccgctcagcacatgtgaaatctctttctcattcataccctacatgctcttatcagagaggaggcaacttagacaagtaaaggttctgcaagcacagatgcagcttcccacctgaagccactgccgacttcaagggcctggctcagcggctgaggttctcaggaggatgtggccagcacaatggttccattattgagcgtttgaagcactctttatttttaactacccctctgggcttttgctaggctgtaacccctgccaggaaggctcagcccctgtccctggctacctcgccttgttcttcaaagtccagagtaaacgccaccttctccacaacatgcttcctgacacgccctgatggaggcacgtgctaagtccgttctgagtgtgtctgtccccaccctgagggcagtgaccaaggcctggcccatgcccagcacggagcaggcactgcccagttggccaggcagcacacactgacttgggacctacagacaagagttcaagttccagctcttcccttcagtgactatgtgaacctgccttctctgggcctcagtttactcatcagtaaaacgagggtaacaaccctggcaagttccaggattgtgcagttgggagttgctggtctggcctggtagataagtgactctttgtgcaaattattttgcttaaaacattctttgttggtaaagcagcaactcattgcttaattcctgcaaatcatcgttaatggacagcaagcatttattgactaccaactgtatatatggccccaggccagtcttagaacaccaacaggaaccacttcccaacccaaaagcacccagcagatgatagatgctattgacgtcaacattgctgagatggtgagtgctggttgtatagtcctctgtctccagaaacctcctcttccctccttccctcaacctgggtgggccaaagccacaactgagggcagggtggagggggtagggtgaggcctggccctccacgactggcagtgaacccacgagccagagttgtcccatgacatgggatcagaggtgctgcccacagcacacctagtgccctggtgaccctggctcaatgatggctgatctgctatgcccagccccagcccagctcacccttgctgcagcagccaggaaactggacccatcacaggcctcagtgggaaactccagaacagttctgccattctccacatggtgtgctgtgagtggtctagttgaagccaccaggctcagggctacaggacagggtgggtgggggatgggctctagcctgagtctgtggaatgggcttggcacctcccctggcactgcacttcacagtttacacagagatgtcgtgctgtgcaggccctggtctcctcccctcctctacctgcctcctgctgtccctccacaagcagtccctg

SEQ ID NO: 1562149 - DNA, 4001 bp, Homo sapiens
aggagagggcactctgggagggacacagtttaggagcaaaggcccaggggcacgcgggagggcctaggcaggcagtcagctgagagaggtgacacactgtaaatcatttccttgggtggaaagaccacatcaccacatcaccaaaaaggcctcgtggctttcattcaatccctcagcagagcagtcttttccgacactgctgtgtgtgcagtcctgtcttgcgaacctccactgccccatcactggagggatgcagggacagccagactgtggtctctgaggtctgggctttcattccagcttccaactatagggccttggtcaagtcacttcccctctcttagcctcagtttccccatcagcaaaatgaagataaacaagagtctgtacctcctaaaaggtgttcagtagatgttggcagctgtcattaccactggcccagttttatatgtggcaaaactgaggccagaagggaaaagtgaattgcttacggtcacccagctgctggctggcaggacggtgccagggctatttctttctcaaggcaccaacccatcctcttctagaatgaactagccagcaacctcacatctcacccatctttctcagccaatgtgtccagtgaacaattcatttattgagcatctactacacgccaagcctctacctgcagaagcgcttagaatcttcgcctgaggattctcatttcacgtatagggacttagaggggcagtctcttggcccaggtcactgggtgagacaagaagactcggtgccttgatcccccagccagggggctgagaagagggtctgcaacaggaccagcctggcccacccttgaaaccaagtctgatcccagctgcactgtggctgtggctgggcctggacttaccccaggtgacccagcaaccactgccccaaattgtacagagtccatgaagttcaggaggtcttgcccaggggcacacacaggctctgtccactcctaagtccacctgaaggacgcaggggctgaaaggataccacacaggtgagccccttctgttcaccccatccttccaccagcctagcaattccagccaggcccacctgccaccaatgaggaacccagctcagagaggcaggcagttgtctgaggacacacagcagggcaagtggcagccctggtggggactcaaacccaccccaatcccagcccaggcagacaggtggacctggcccggtggccaacccccaaaacttttgccaacttctgagccggctggtagctgggcctgctcaggggcgaggctgggggctgtgggcaggggagaccaaacgcagtctggcccagtcccttccaggccggcagcaccaggccctacccgaggccccacgagggcagggaggtcctggcagttcggcctggcgccctgaccccggggcccctcagcccgccctgccgatccccccacctcccacccggggccggggggcgcagggccgggcagcccaggcagaggcggcgccgactggctcagatttcagatttggcctagacctggcccgggggctagggcccagctcgctggcttctctgggggatcctatggggagcatgagctggagggggtccccacgcagccaggaaccctgcgccccccccgcccagccccctccccccgctgcatcacaacaaaaggccgcgccgggcatggccccgtgcgcccgcccggcgcttgggtatcgcggcttggcccggagggggggtgggaattgggggggtggacaggagtccccgccggcccgcgatccgacgccagggtggtccggggcgggggctcccccgcgctggccggggcggggggtccgcggaggggcggggggcgctcacctgggccggcgggcgggcgggctcaccggcagacggacgcacgggagggcggaccgcgggacgtccagcgggacgggcagacggcggcctggccgctccggctcccaggccggaatggattccgggccgggagagacagatcgagagagaaagggaggaggaggaggaggaggcggcggcggcccggggaggggaagaggagggagggagcgcgcgagctgggaggaggggcccggcaggcagccgggaggaggaggaaggaggaagcgcgcggggacggattccccgccggtgacccgggagagacccaggggcggcccgagctgggggtccgggcggggtggggacaccgggcacagaagccccgcctcccactccgccagggcgccgcaccccgcgggccccatccgcccccaggccaaaatgccctccccaacccacccaccttctacgccccagatccgcctctcccgaaatcacgattggtaataatatcagcgggcgtggagcgcccgctctgggccaggcgccatgctaagctgctcaggtcgacttcagggtttaatcctaaccaccacctggcctgagcggcggaagatcgccccactttacagatggggaaactgaggcactgacaagaaccaggccttggactttagccttgacctgagtttctcaaagtaggggctggggcaggagggacagggtggggaggagcgacatttattttaatagttacgggttcattttaagtgcataagggcaaaacatccctggcagcccatcggaagtcccctagttctaattattactgcttaggaggggctgaccagggcatctgagtggcagtcacacttccaagtaagtaaagaggctaagtacctctgaaccagggcaggaaatgtagcagaaaaacgggacattgaggaaatgctgctttaggccacaaagactcccctcttaccccctggcgcaggctccagggctatccttttggggctgggcaccccacccttggctccttacctgtcctggaatcctagcacagggaaaggtgggcctgggtccagctttaaatatcacacctgcctccatattccttctttgaaagttctcccatttcacagatgggaaattaaggcccagacaggtcaggcttctattccctgggcaaaggtccctgctgagaggagctgggaggagcaccctagaatgtggaaggcaaaggcctctgggtacaacataccttccaggagaccaggaatgagcaaagccttactctacactgatctaggttcgcatctaggctagctgcccctctgctgtggggtggacaagtcgatcagcttcccagcccagccccctcacctgtaaaaccggagtgaacatggccacagaagattcctgggaaggttggaactgaccagtgtgaggatggtcaggttgtgctagatgaatggtagctcttgcggtgataaactgaggctagaggggaaaggggctgcttgaggtgccacagccagtcaacagcagaagccagcctgggctggtgaaatggccgcacttgtttgcaaggctggcttaaagattaaccgcagcttcccagggctcagggcgggcccccagctggaggagcaggtttctcagccctcttccattccttagacatgtctaaaggcctttactggccatactgggctcgggggggaggcagggacatttacccagtgacacgctggagctggcccttacctacttgcaagaaccaactgtgctcatctcttcccaactccatattcaagaatgtcacactgatagctccatgtcagccacagtgggagtatttaccccttggacatcggaatacgctaccaatcaagcctcttttttcttccagagagctggttattcaatatgtacgagcacatcactaaactcatccccaggagttcaacagaaaattctgggcttttcgagaactgggatgacagagagcttaaaagcacagattttggaccagacccaggttcaagtctcaactctgccactttgcagataatgtaagaagcctcagtatgccaacctgcagagtgggctaaagatatcacagcccccagaagacgcatgt

SEQ ID NO: 1562150 - DNA, 4001 bp, Homo sapiens
caagattcggggctggggcacggccatgccatcctggcagactgggactgggcaagacggaggacacagtctggcacccctgccccggtgacctagggggcaatgggggcagcaggaatagaaactgacatgaccagggccgtggggctgggcttaagttgaagggaatgaagatggagacaggaagaggtgtgggaccagggacagagaggcagcggcctgaggcactgactccatggacgctctgtccatggagctcctcctgcagccagggcccctgccttctggggtctgctggcagggagacgcaaccctctcacgtgtaaagggactcaggtccctcccagcaccgtggggtgtggggatgagacacaggtgtttccccaaaacatcgccagcctcctctgaagcccacatcagggcttgggggtcagaggtgagcccctgtgggatcctgagatgcagaggatgtgtctgaggtctctccctggggcgtggggccaggtgtctggagctaatgacacctgagtgtggttagtcttttaatctccagcctaggcaaatagtcattagctttgcctatggaccgccctgctccaccacgagccctgccctccaggaactgctgaaggggtctgtcctccacacctggggtgactgtgagccccttcccatcacaaaggctgcttgccccccaaccactgctcaggacaagcggggcaggtgtggggtgagggcctggggcccctcagaaggccccttcctgtgactccggcttcacccgcccatgcaacccccaggacgatgtgtgagtgccaaagggcccccaggaggctggaagtggccctgagcaaggctgaccccgaaggtctccagggctcaggccttgcccagctggatgccagaccaaggcagccgctcagagcagccgcactgggcatctggactaggcgcctctgcaacccctgctcacctgccctcacccagagctcctggagcgtgggcccctgtctcagcccccagtcccagcccctgctcacctgccttcacccagagctcctggagcgtgggcccgtctcagcccccagcccctgctcacctgccctcacccagagttcctggagcatgggcccctgtctcagcccccagcccccagcccctgctcacctgccgtcacccagagctcctggagctcctgtcatctggtgcctcccagcccccagcccctgccctccaagcagtgaccgatccatgaacactggactccctgtgtgagggcgggagggcctggccagccaggcagggtcctggaggaaccgcctgctgggtgtccagctggtgcagctgatgctcccccccacaggacctgaccacgcctgccggagcctcctctccctctcggcagcccacagcggacactgctgttttcctaccacacctgccggcccggggcccatcagctgtccctgaatgaatgcgtggatgaacgaatgaatgaacagatagccacggacatgcgatttccaactcaaaatcctgccgttgttctggactccccagctgggggcgaggcaggctctgactccgaggccgaggtactcacggttggtctgagagcgtctcaggagaagccttggccacgtgggtgatgggcacgagcccggcgctgggctggcccgaaagcctgcgtgcgaagatgtagccgcccccctcttcgagggcacagagcctgtccccgcggcggacactcagctccccgccacaccgcgccgtgaagtcatagagcgcaaggaagagctgagggaaggggctgcaaggctcggcggggagcgtgggcactgggtcagtgttggggtccagggacccgggggtgccatggtccggctcgccgcccgccggccagatcttgtcccagaagaaggacaggaaggccagccgcctcctgaggaacggctccatcccccggggtcaccacgctgggcccgagggccatgggagcccgcgagcccggaagaggaactggcagggccggtgggacccggtgtccagcgctccctgccctggccgtggggtgacaggggaccccggccctgcggtcactcagaggtcccctggatccaggaggcacacggttcccaccggcgtccgggctggcgttggggctgggtggggcgcagggcggaccccctgcctcaggcacaccgacagcacctcctgtcctcgacctccttggcgtctggagtgcaccgtcccctccccaacccgacggcagagggcagcttgggctggggcgggggcgggctccaggaggggcccgaggagggcggggtgggcagggccagcctctctcccgccctctgcaaggcccaggcaggcggaatggctctgcccagtcaggcctggcccatgcccaagggcaccacagtccaacagccgcccgtgcccacggagaagtgggggttccacggagaagcgctgctgttcagcacctgcagtggttgccaagcctgagctgcactcaggtgaaaaattgcctgcttatttaagtgttggccagatattttaacatcattaaccctgcaccaggtgccgagcctccggcctctgcagtaaattctgaggacaggcgagtgagggggctctcagcaccccggctttcatgcagtaaaacgagatgctgattgcagggagctcggccgcaggccaggcacccagatgccccatgctgcccgatgaccggcttctgagtcagtcaatgcccaggccatacccaaaggccactgcggggaagtggaggctgcggacgcctggccccagttcagggggatgagcacacggagaaggggcggcgggtgagtccctggctggggacctcccaccctctccctggacagcgccaagcccccgcatgctgaagcaaactctgcccgctcaggtaggtccccagatcggggcaggactgggggagcaaatcccagcaaaacccagcagcacggtacagggtcctgaggcaggaggatggggtggtggccatctgcagtctctctctcctcccacatcccctccgggtcctgagtggggtggggtgggggccatctgcagtctctcactcctcccacctcccctctgggtcctgaggcacgggggtggggtgaggccatctgcagtctctcactcctcctgccggcctcccccagcagccccttccgcacctgggtggccttcagggagcctcacgcccctttcccacatctcacacgcatccatgcccccacttcatgcgtgtggctgaatgcatccctccaataggcgtgaccagtgtccagccaatgacaagcccctcgcacctgcctgccctggagtcacagatgggcttctcagaaacctcacgtctggggactggtgtgtgcattgtggggtggcagtgacacccgtggcctggctctcagggcaccccagcagccaagctgtgtccgggctgatagcctggagccagcaggggccctgggagactggacatcgccaggctcagggcaggctctgcaccagagaggtgccctgctgggggtggtggggggtgttgagaaatgtggagaattgtaaatactacattgggggtggccttcgaggggccccagcgccttctcctcccgcgcttccccccgccgccctctcctcccgcccccgccgccctctcctccccccacccgctgcccgtctcctcccgcccccgacgccgtctcctccccacaacccacccccgccgtctcctcccctccactccccccgccgccgtctcctccccacacccaccgccgtctcctcacgtgcaggtgaggcttttgcccaccatttcttttctttactttttttttggaaacagggtctcactctgtcgcccaggctggagtgcagtggcagcctcgatctcctgggctcaagccgtcctcctgccggactacaggtgtgcgccaccatgcccagataaattttttattatt

SEQ ID NO: 1562151 - DNA, 4001 bp, Homo sapiens
agattttctacaataagcctgtattctgtacgaacaggtggtccgtatttgtctctgccagatgttctccgactgctgtatccacctccaccacctttatcacatgaagggaacaattagatgccttgtaatgataaaaacgcataatgtctttgaaagttagtacaaacatatcaacttttatttactggagtaggactttgctattatattgctaaaccttcgacacatttgtgatttgccataaaattaaattaagggcaagtcaaatagactaaatccaactaaacctctcctacaatctgttagagagtgactgctcctttattcgatttacctcgctaagttttattttacagaacattgtaaaatataaaacttaactgattacatgcatttctacattttacaaaaatgtttactagttttacactaagtacttacatcacagtgtgaggtttttggtggtggtttggccacaaaacacgcaaggtaacagtcacctagttcagattaaccagttttgtctaacccttggaatcctcaccatcaccctgcgtctaatggcaaaaggctgctgtcgtcatggcttccggtaaggtcagccaaagggtcatagggcaagggtcacacaatgtatggaaaagccaaggccaatcaggaaaggcagtcatcttagcctcagtggacacagcctcagccccattggtcactttcaaattgaaacatcaaggacttgttaaaaagtttgaattcaacatgcaacaatttaaacatcaaacatttaacataaccaaaaatccccccaacctcctcccaataacatgccccaattagttcaaatacagcataaagcttatttagatctactttgtggtacaataccacattacttaaaaatagtacattctttggcccccatcaagttccatagctttaagacctatactttatgctcctccccttccccgtcccccgcgccccctaccccacctccacccgagcctgcccccgaacctctaactaatgcactgataggtaagtaaggagaatacaacaaatacagccaccccttacttcctctgtgggaagaacccgtgacagtgctgacaaggggccagaagaagccacccacctcccaacttggcaaataaacaaaaccaaacacccaaacccaatccccgcgctccggcgtcccatggctgccccgggcagacgtgaaggcagcggggctcggggacacccaagtcaaacgacccccggccctcgcgcctgcccgggctgggaggccccaccccacccacccccgcccccagggtccccaagggcgcggagcgcgcgggggtgggactcactgcggcttccgtagctgtagccgtcgcgatcgcgacgcgggccccgggcgtgctctacgatcacgcgctcgccgcagagctccttgccgttcagctcgtaaacggcgtcgtcggcgtcgcgggagtcctcgaactccacgaagccgtacctaggggcggtgcgagggccggacaaccgcgggggagtcgttagccaggacgcgcacgtgcgcgcgcccgtaccccaccgcgcgcccccgcgacgccgcgccgtcgccatctttgaggccctgccacgcggcgccgcggccttggccgcttctttccttggagagttcccgccgccaccaggcctgggacgctgggcgcgggcgcccaggcccgactcacccatttttgaggtctacttcgaggaggcggccatagccactgaaaaagcgctggatgtccttctcccggacgttgtagctcaggcgtcctatgtagacgcgcggcatgtccgtggcgggcggggacccaagggctggttgtcgaacggcggaccgcaagccagtaaccgcggtgcgggtgcggggacggcaagagcccgaacacgcgcctcacaccacaggggcggccgagtccagccacacaatggcgcgcgcgcgcgccaggctttcgctatatgggcggccggtggggcggggcctggagcgtgatgtcagcgcgcagcggcacgtccgtcccgcgtcgtccctgggctagatggtgactggcgagtccgttgcccgcgacgtttcggtgtagtgcggtcttgctagcttctaggatttttctctagccctccccaccgtctttgaaaacacaatgtctctaatccagccgcagaactgctttctaatttgtaccttttataaaactgtgcgcgatctcttcggggttgaagctcgggaggcgggctgagcgaatccccgtttttcattggttctcgaggttatcataataggtcgccgcggtctctgcttggtggcttaaaacgaggctgcggatttctcccagcgattggttgatgctcgttttgatggggaccgcggtctcggacccagtcgcttgtcttgtttcgcagaatctgaggatcgcgcgccgaggtcttgctgaccgggcggaggtcgcgttgcgagcgcgcagacccgccgacatcagcctctccgggtctcactcgcagccttcgcctccccggacgttcccctctccctccatgggtctttcttggagccctggcagcttgactcacttgtggattgggctatccgtggcaatcctacgctcactgtaggtgctcaaaagggagcgtggacgagacccggcagccctcccacagcgacgaacgattttttttctcccgtgtatggaaagtcctttgtcccaatactatcatttcctccactgacttgaaagtgccttattttgtgagtttatcaatggagatgctatttaaagctgtagaaccagattgaaaacctcaaaggagtaagtttaagtggagagcggaagacccaggccaacgcctggggtactctgaaatttaagcgcaggaaaggagactgggaggagtgactagcgaggtagggagaagaccaggagagtaggtgtcaccgccgaagctaaaaaaaaaaaaaaaaaaaaaaagggatatcactgagataacaccagctctttagatatttatgtattcctgctctgttttgagtggtgcaacctcaatatccttaagcttcgggttgaaaaaggggggttttgtcctcctggagctatttggaagtctagagggaaacgttgtttgtcacgactgggggaggtagaggccgtgcttaaagttagataaataaaaaatacgagtctgtaatccccacaccttgggaagctgaggcaagaggatctcttgagcccaggtgttcgaggctgcagtgagctatgatcatgccactgcactccagcctgggtgacaaagcaagactccaacctgcctgaaggaaagaacaaagcttccgcagcgtggaaggggacccgagcgggttgccactgctggctggaccgccagtttttagtcccttatttggccctgcctacatcctgctgattggtccattttacagaatgttgattggtccgtttttacagagtgctgattggtgtgtttacaaacctttagctagacagagagcactgattggtgtgttttcaatcctttagctagacgggaaagttctccaagtccccacccaacccagaagcccagccggcttcacctcttcacctcggtaggcagaataagggttccccctaaagatgtctatgtcctaatcctaatcctaatccctgaaacctgtgaagatgttaccttgtatgtcaaaagggactttgcagatctgattaagttgagcatcttgagatgcagagatgccccgggattgtccaggtgggccccatgtgatcataagggtgattacaagagggggacaggagagccacagtcagagaagcagatgtgacaaaggaggctgggattggggtcagagtgattggctgtaagaaagtcacaaccgaagttaatggctttgaagatggaggaaggaaccataagccaaagggtgccagtagcctctggaagctggaagacacgaggga

SEQ ID NO: 1562152 - DNA, 4001 bp, Homo sapiens
acggttctagcacggaaggcaggtgtctagacaggacgttaaaagccagtgggctgtaatcccagcactttgggaggccgaggtgggcagatcgcttgaggtctggagtttcagaccagcctggccaacagggtgaaaccccatctctactaaaaatacaaaaattagccaggcgtggtggtgggcgcctgtaatcccagctacttgggaggctgaggcaggagaatggcttgaacccgggaggcggaggttgcagtgagccaagatcgtgccactgcactccagccagggtgacagacccagacaacgtcttaaaaaaaaaaaaaaaaagccagtgagatcagagctatgcaggtgggcacacaggtggctgcaggcccacagaagctcctaacccggtagggatggtcagggaagatcctgacactgagacaggaagaccgagaaagagtgagaaacgacaaggcagagatagaagaggttctcaacgggagaaaaagcccagtggtgggacagggcatgcatggcagatcccttcccatctcagccaggcgccgtgctactattgtggcaacagataagatgggacgaggtcctcgcccttgtggagtgcacgtgaggtcaggaagacagaaaataaaatgcaacacaaatagatgtataatataatttctggtggacataagtggtatcctgaaaaacatctcgggctaaggggagagctagagaggccagtgactctgaccaagggtgatcaaggaggcagagagctgaaccaggcaggggagcaggccctgtggttgtctggggaagtggctccaggcagtgaggacactagtgtaaatactaggactgaaagttatcgggggtggctgtagaggtgctgggtggggcttagggatctcatgtgctcaccttccaagggtcgggggaaggggacacaacgttatgtaggcctaacctgacacctgttcttgcggggcccccaagttcctgccagaatcactccggtattcttaacacccttcctcagtggtggagctgacccttgacctctcccacttcccattcagacaagggcctcccagcagatatgacacacctagtcccactgtcactgactgtcacagccatgagagcccacggcttatctccgggtagtgcggtggccatgtgctgggcagtggggcccaggctgcctgggtgtgaattccagccgtgtcactttttaagcgcctgatcttagtcaagccgctgaaatcttccctgcctcagttctcgtctgcaaaagagccactatctacctcctagggttggcataggaaactgagggacttcctgcagttcctggaccactgcaagcactagcgttataagcgttatcatcactactttaattatctcgcccaattccctccttgctcaagtgaggaaacagaggcccagagaggcccagctacttgctcaaggtcacacagcagaggctgagctccggctgggcccggaaccagtccgtctcgcgtccatcgcagcgacctccctcctccggcaacctccctcctccgaagccctccctccggttggctggactccccgaggcctcacccggatcgtgtccacgaggctctgcaccttggcggggtccaacacggacggcagcggccggatgagcacgctcagcggcacgttgtgcaccgcggcgatgcggcccgagtggatgctgccgccctgcgcgccgccgctcggcccgggcccctcgggcgccccccgacccgcgccggccctgcccagcgttcctcctgcacgcagccccatcgtcgccgccgccgcgggactcgccgcctccccccggccttaactccggccgggccataccattccgcgcggccgggggggggggcccgtgccagggcagcgcgcgtttctcccccgaccccgccgcggtccggcctcgaccccgcggtccccagcccgactccggctccgctcgccaggtgccgccagactcgcgcggggctcaggctctccaccggggggcgcctctcgcctcccctgcgccgcgcggcgtccggggagtggaaacgcccgggcgggctgactcagggtgagtttgcaggtcgcggggcgggaggggcgcgggtgacgcaccggccgggccgacttaggccgcgggggcgggggcgggggagagcgcggcggacctgcccagccagggtgagtcggcaaagcccgcggtgcgctgctgccccgctgctggggttcctagccagcgaggttatgatccccaccagcggttccacttccagtctggcgccggctgtgtctggagtcgttccgaacattttgcacgtgtattaacgtatctgaacctcaaaacaaccctgcaaggaaggtatgactgttattcccattttacagaagaggagactgagacacaggtttaagtgatgtacccaagatcacggaactagtaagtggccgaatccgcgttcaaatccagacggtctggctccagagtccgccttctaccccaccgttggctgccttggttcagcaacagtgactgtcacacggagccctcaggagtcgcgctgacaatgggtgggccctgccttcaagttccacactgtctgtttgtgtcattacaacactactggaagtaggtgcagttatagacccgctgttcaaggtcagctgaaatgaaagtcaggtcacacgagtccaaactgtggggccacttaaccaccaactccaagcaggaaggtggacgatcccagactcggtcgaagacaagcatgtctggtttgcttgtcttccttctcaacctgaatggcacgaacatggagaaatgcatacttaccctgccagctggagaaaactggagacgaaggagggagccaggagtttctactttgccttccaccagttgctgacactttctgaaccccgtctgtaaaatgaagtcatgctgcccatcactcaaagttgtgtgaattgagagagtgctcatagtgctctgtgaattgcataacatccattttgctgttgaagatcatttattttgggttcttagtctctcacaaaaccttagaacactgacaccaagactccagcctttccctttcgaaacataattcccgtgcgcacctaaatgatactttatttcaagaagtagaactgacacccacacctcagccccagaattattcagaattagagaatttcatcaagagggaagttatcccttctaaaacatcttcctcattacaggaagtaagaatggcaggataacagtttctagagtggaaaagtggagctctggcctgattctatcatcatggtgtacccagggaggcctcatttcctggtatcaaattctctgtgttaagatatctatggcccaattcaaaatggcttaagcaataagaaggtttgttttctcacataataaaatgtttggaggtaggtatgtccaaggttggtaaagaggcagttgaacaatgtgaccaaagactccagttctggctgggcccggtggctcacacctgtaatcccagcactttggaaggctgaggcaggcgaatcacttgaggccaggagttcgagaccagcctagccaacatagtgaaaccctgtctctaccaaaagtacaaaaattaggcaggcatggtggcgcgcgcctgtagtcccagttactccagaggctgagacaggagaattgcttgaaaccgagaggcagaggttgcagtgagctgagatcatgccgttgcactacagcctgggtgagagagtgagactctctcagaaaaaaaagaccctggttctgtctatccttttgtgccatcatccttggtgttctgttatcctgcggtgtgcccctcatggtcccaagatggctactgtagctcaaaacatcacatcattacatgcgaatgtccacaagtggaagttaggacatcccttcgagcctctttttaagagtgaagaaaccttccctggct

SEQ ID NO: 1562153 - DNA, 4001 bp, Homo sapiens
actgaaggcctatttccaatggtcagcaggctgagtttctgcccagggacccacggtccacaggtgcatttcttcctttctgatctgatgttcggggcagcacctcaatacacacttttacctggagaatttggggagcttcaatggaactgtgtgcgaagtgcaaataatgggataaacgttgcagccaaaggtagcttcaggaacaatgactgttaagctccaaaaaaccagagtgccaggagatgctctgggttccaacatttgcctctgagcctagagcttgacctccgcctggccaaatgttcccagatcaaggggcaccaacagagcagaccctggagccaccgtatgggatcgacacctggctgtgccacttaccagcaaggcatttagcccccctaggcctcagtgtccacttaccagcaaggcacggcctccctaggccgcagcctctttagctattaaacgggatgccagtagcttctatgaagaattggatgaatcaagatttataaaacccctagaacagtgtctgggatacggtaagcgccacataagtgtttactaagtaaattaaaatgccacacttgtaaatctgtatttctgctattctcaatctctcctgttcagagttggccaaggttctcatttgttaagaccatcaaatttctaaaactagcaacagcaaaggtagtctcaaaataggcgatagatttaggacaacttccacaggagactggcacgtcatcaaggaataacagcctcagtcaaggtcaaggtgaacccccttagggagacaagcggctcctgggaacctaggaataccactgtttatccctgcaatcccaccagggtgaagacggagtcagagtttaggaaaaaaaaccaatgtcattccaacagatgttgtgacaactgaaacgggtatggctaatgctgattttcttccgaatctgtcttctacagaaaaaacagcagaaaatacaaagtctcaatttcaaaacttagggctttggataacggtgtcccaaacccacataaacgctgtctcttgaaaaccacaaggccgaacttacggagctagaagaaaggttgtggagcaaatccgtcaagtttgttaggcgaggcggctggcgagggtgtcacgctgaaacccggcgtagccgcgaggatacggagggggcggtgcgctccctacggggccgggctgcgtaacgatgccccgcaaatggggatcgggacgcgtccttccgtgcctccatcgttcgcgcctcgctccaggagcaagaggggcagccccggccacagtccccgcggtcgcaagtgcgcccggaggccgacccgggcccctcaccactaaccaaaatgagcgcagaaaacgagtaccgcccgccgtcgccaccgaagctggctgcggagcgcgacaagccctcgccgcggctccggccccgaggggtccccgtgcgcccggcatagcccaggacagttcccagcgcgcgccgcggactcgggggacagcgcgctcgggggccggcagcctccagcgtccgcccggcccccaccgcccagtgccccggcccgagggacccgcgcgccccaacaaagttggcgcaggctctccggggaccgccccccacacggccgggtgcccgccggcgcgcaggcgtgggacgcggggaagggcacggggccgccgtcggggctcgcggccgcccggctgcgccccggctttgttcgcgccccgcgcccgccagctgcccgcgccccgtccccgcgcgcgcccgcccgcagacccgccgcccagcgccgccgctccggcccggcccaccttctggatggtttgctgcgtaacctcccctttgcctcttggccgggcagacgcgaaggccacggacatggtggcggcgcggggctcagcccgtggtcatcgaggtggatactccggctgcgctgggcggcccgaggcgctcattatccgcagtcgcggagggggggaagggggcgggagcgcggggggcgccgcgtcgtgggctcgtccgccccgtcgccgtcgccgcgcctccgggcccgcggcgccgccgctccgccctgcagaacggtctgcggcccagtgccgaacggtggcccccggcgaccccctcgcacccagcgcccggccctcgccggagcaccgcctcccacccccggccaccggtggttcggcctgaccccgccccggcgcgcgccatcacgtccgcccgacgccgcctgacgctgcccgtcgccgcctgacgccgcccgtcgccggcagcgcaggacacggcgccgagggtggggcgcgggcgtagtggcgccgggagtcgcgggtgcgcgcgggccgtgagtgtgcgcttttgagagtcgcggcggaaggagcccggccgccgcccgccggcatgagctacgaccgcgccatcaccgtcttctcgcccgacggccacctcttccaagtggagtacgcgcaggaggccgtcaagaagggctcgaccgcggtgaggcggcggggcctgcgcggggccggggacgcgggcggaagtggggctggggagcccagagagggccggggccgggcgcggcgctgtgggcgcccgcgggcgtgcgcggggcagcggcgcgggcggtcagggctgtagctgagcgcgggccccgctgccggtctccacgagtgcctgcagaggcggcgtttggcgtgagccgcgagcgctcgttctccccactcagcgcctcgcttggggcccggcctcgcgtggggccccgggcacgggggccgtgacgacgccatcttgagcacccctggccccggccgggcgcgtgggtcgcgccgccgccccggcgagcagaggccgggcgagggccgctctgggccgcggagcgcggggggtaggccgtgcgctcgctggggggctgttcacgcagccgggtggctggggagcgaactactcaaaccccccttatggggacccccacccgctccggggcaacacttattctctaggcccaggtgggcttcgagaacaaagcggctcgctggcctggccggtggcgggcgcctcccaggtctccgcactctgccgggaggagccttcccggggccgggctgcagccgcccgggtcaggactggtttggacgcggccgtttcgttttgacgagggctcgtgtacattgaccttagtgacattgtttgaaacttaaattcgtaccatcaagacgtgtcagtttaattggtcagtctgtgagatcgttattcttttatcatctggtattcagaggtttgagcaggcagagaaagcagcacacacggttctgtaaattttgatttgttttcattttctgaatctttgttttgaaatgaaggcccagtattcatcaggtgatctaactcagcttaaagaggactaggagtcggctgacccctgtacccaccccaatactgccacccccgccagctggccgccgctggctttaacgaacccatatagcttctctgggcctcgagtcagtcgaaggtcaagtgagtcagtacctgagaaagctcccagaaaacccaaacacttcagatcaatacttctcagccagggatggttttgggcccacacggagccactggcagtgtgtggagacttttccagtggtaagaccttgcagaggtgctcttggcatttggagggtagaggccagggacgctgctcaatatcccacccgtgctcagggcggcaggcacagggagatccccctgcccaggtgctcacagtgctgagctggagaagccctgctctaaaccaggaggcgctgtttatcccaatgatggttccctttgtttctggcttgactcgggttgactgtcagtgattgttcatgcttttaataacagccatatccttctccagcatcagccataaacagtttgggataacacttgacaccttgtccactgacggcaaatcaggccccttctcatggctgtcacatgagtatgtca

SEQ ID NO: 1562154 - DNA, 4001 bp, Homo sapiens
gagttctcatgttcccacatcaaaggatcagggaaaaaaaattacatcataggagctagatgaagtttttatcatctgctttgttattactgacctggttttatgccttgcaataaaccccatgtcatgtctctccaaaccttttctactcacaggaagactgctcccagctcagggcaactcagggagacacctgtgacagcaagcagatgttattcccaggccgggggtgagtggggagggaagtaagtgccccaggctgttaacataagtctcacttaacaagagctcaggaagagacataaagggcaggtgcctgggggcatcttccttcctcctctctcctgtacaagctgtgctcccaccacaaggcagagcgtctgcagagaggaagggtgctacctccctccaccttcttgagtcctctcccaagcagtggctgtaaggagtcacacacagggaccattcatttctcaccacctcctgcttcccagcccttgaagaacagccagaggttcaggaatgattaatatcctagcccagtttccagaggagtcctacccatatggaagcatccttttgaaagccagagtgcaggggagaggagagcagcagaagagttctgacactctccggcaggtacatgggctgctggaaggaacaggtggtggagcttaggtgagcattcaggagatgcagtcttcggggctgtaggaatggtgcccaccccttgggaggtggccacgcagggtgggtaggggaagggctcctcagaaggtggtggtcctggtgagggggatgcgcttgcggccgggttctggttgcagggcttcctgctggcaggggagtggggggcacatgcaccctgccccacctttgctcttgagagcagtggcatagtagtccaggggctcctcctcagcacctccagcaccttccaggaggcagcagcgcaggcagagaacccgctggaagaatcggcggaagttgtcggagaggaagccatagagaatggggttggcgcagctgttggcatagctaaggataagggacacgtggttgacggtggcatcaaggctggtcacgaagaggttcagcagctgcaccacgtagaaaggcatccagcagagcacaaagacgaccacgaccatcagcaccagcctggtgattttcttctccgagcgcctgcgctgctgccagccagcgcgcagggccacggcgcgcatcttgcccacgatgagcaggtagcacaggccaatggccagcacgggcagcaggaagcccagcaggaaagtgtagaccacgaagactgccgaccaggccgggtgtggccactgcaggttgcaggccacggcctggccgccgcgagccggtctggtgtctgcgaagatggcgatggggagagtgaccaacagggatgccagccacacgcccaggttgatgagcttggccacgctgggccgccggtaggtcgccgcgcgcagagggtgcaccacggccacgtagcggtccacgctgagcacggtgagacagaagacgctggtgaacatgttgaggccgtcgacgctgagcaccgcgcggcacagcacggagccgaagggccagtggcgcagggcggccgacgaggccacgaagggcacgctcagcatgaagagctcgtcggctacggccaggttgagcaggtagatgttggtagccgtcttcatcttggcgtagcgaaggatcacgaagatgaccagggcgttgcccaccagccccaccaggcacaccagcgcgtagatgcactggatagcgaccatgcccgccgcccgcgcgtccccgggccccgccaccgcctcctccgcctccgccggagcgctactggcattggctgcagagggccaggccgtccccagcccttcctcgcccccggggggcagcgtcgagggggcgctcatgaccaggggtgccggcgcagggcagctgagcgcggcggagctagcgctgcgccagagagctcgggcggcgggcccagggcgggggctggcgcgcagacgcgcggctcttcccggctacgctgaagagctgcgggcaccggggagcgcccgccaatccccgcgccgcgcgccccaccgcgcgggcgcccgactggctcgcaccgctgtggcccgcgcccctcggcaccccagctcctgggggtcagcgcctcacccagccctggagtcgtctccggccccgccccgttttcccacctcggtcgccccctccccgctgccgactctgccccaggttcccaggtctccagtccggctccagtgtcaacagcacccccagccccgtccggccctcccggggtcccccgcctggcttctttccttcagacctctattcagatcccgtcttccccagcagccctttgaggtccagttccctgctttgctacagggggtctgcggcggcggggctgggggtcccggagtcctccctttgggtaaagatgtgcccggaactggtcagggaccacctggaagcttggaccacttgccttgcacttgacatcccctcaccctgccctttaatcctcgcgacgacccatccttgcacatggctgagtcccttttatagaggcggaacctgaggcttccactggcggcttggtgaatttcaggtctgtcaggatgtccagttttccccacagctcaccactcctttctctgctccccaacccactctggacaagtgcagatgccggaccttttaacttctgtgtccgagcagctgaggtgctatgggcacaaggaatggagacggacaggtggaggcagagatgccaccaaagaaggccaagcctgtgctagctccctcgggaactggcagaagctacgggagccggacatctcagaaccttcaccctgtgacctggttcagtcattatccgcgggtctccatccctggccactaaaatgtgcctggggaggactgtggtcgagaggtcgggaaagaaaggggttccggcctggaattacccttcttctgctaaactccagagatagtgagttcactggctcctggactggacacccaggagcagccgccggctccagccctagtccctctagctggcacagggcacaggaacgttcctgaactggggattggcctgggaaagttattcttaaagtagctctgacttttaggatcctggctgtctttggccccttctctgtgggatggtggccccctttagcccccagtacagcccagaaaggcctttagtgggtctaaaattggccacctggggggtggggtctcagctttccgctgggtggctgggacagcgatggggaggagggagtcctgttgcaactggaggaggcctttctaagactggggggtgggggaagctgcccactgctgtttatccaggtgtgggatgggagcacgggcatgatcagcaccagtgcagccccatagttgacctcaaccactgtctccagtctctgctactcaaatagatgtattgggaggatttggtctagcactcctccactctgtaggttggtctgtcctttcctttttgtccctaagagagagacctttcacatctttgtccttaagagagagacccttccctgagaaagaggaaggagatggcacctttgtcattctacttggtgccatcctttggtggaagggaacaagagcaacctcagatttgggagggaagaggagtttaggggcttttccctttaaccctggtcttgggaagacccttaggtggctcctctgcagatagcctttccagggcttagtgtggaagtgctgggggctatcttgtcttcctggtctcctctcttctgctgtcctctctgcccattgaacactcggccccttccctttcctgagaaagtatttcttcttgtcctgcctcatgtgtgagcccctggaatctttcctgtgcctactttaggtttttctcctaatgctccccgattctgccctcctctccccatacacatgtg

SEQ ID NO: 1562155 - DNA, 4001 bp, Homo sapiens
acattttaaattacaaacaatggtaagactgtcagaaaattctaggaaaatgtcaaaaacaaggaggccactttgccgcatgtgtgttaagagatgggtataaatcaaaatagtttcagttcactaaggaaatttaatgcctaaaacaatcctaagatacaggaggatcactcaggtaaacacacactccttactcatataaaattgaacacccataagttgcatttccttagagtacacctataaaactaagtacagaatttttaaaaacccagtatgttttagtaaagttgctgttctaaaaatcccacctgtcaccaggataaccgaaactgctccctctacactccaactgtatttttagtttttacctcaacaagtagcaatgcaatttacacttggtaagcacggattcctgaaacgccaaaatcaaccgggaacctgatttaactccaccacgctcttaacaatgaaagctacaagcagaagagaagtgtgaccttaaaaacttccacacagccgaagaacagtggcagaacagactgaagcacgtatcttcgcggaacagaagaaaacttccacacaagcaatactgcaacacggaggcggggcaagggcttaaaaggaaagtcagccaacagggaggggtgaatataagcaaagcttccgtgaaaaaaaacttatcgaggtgtagagcaagacaagacagacaaatttttccatctccgtacaccccccttcagagcccaacacacagcaagtgctctagataggtttgctcaactcaagggaagcttctgccagcaactttcccagaaatggaatgacaagaagaagctggatgatggcggggcggggagaaatggacaggttgctcatcctgcgggagatggtgaatatcctgcagttgcctaagcggagatggaaagaaacagcatccatcgtttacagactgtcaactacagtgtcccaattaagcgtacgcccctttcagatgttaacaactgaaaacaatgccctggctctggacatgggcacgcggaacactgcagcctctaagaaacccaaacggataggtaggtcaacttctatccactctgcccattaaattataccttcatatcacgctaataaattatgcagacggtttactgggacacgctgtgggtctggcactctgataagcgctttacacgccccatttcactgaaccttaagaggcagggacggtattagcagccccttttccaaccaagacacaaagactttttaagtgtcttgcctaacggggcagagccgggttcggcacccgttttggacacctgggccgtgctcttaaccactaagctacagacctgggccggcgacactgagaggctccagccctcggggacctgaagcagggacccccccccccccccgcctgcgccccagccccgggaataacttcggcatccccgcgcgcgccatgcgggacgaggaaaggcggccgcagcacctgtttgtggcaccggtgagggctggaggggatgggggcgcccggggccaggcctcagggcgccccgaggcgagggaacgcaagaggacccgcctcctccgggaaggccccgcgggctagagagaggcccgggagaaggcggaggggtgcgcgggcccgccgaggcctaggccccacccgccgcccacctccccaccgcggcggcgcccgcgagggccccaccaggcccggcccggcccggccgcctcacctggctgctgctccgagctcgtcccccggccggcggtcctgggcggtggcggcgaggaggggaaggaagaaggaaaaaagggagaggaagaagggacgaagggagggaagaggcggagtggccgtggaggaggcgggcgccgccgggccgggggggggaggcggtcaaaggaagcgggagccgagagagacgcggcagccgccggcgcaaacgctgaagagccgctcaggcgcccgcagcccggcaggaagtgacgggggaggggcaggcgcccgcccccggcccccgcccgcctccaggcccggccccggccccacccccacccacggtccgaaccacaagttccggctggcactgcggcggagcctgcgctcgcaaggcacgccgggggcccagcgggaggagcgccctgtcccgcctggaccgcagcggcccgtcctgagtcccggggcctgccgggagttgtagttctggtgggagtttcgcgctgcctgctggactcgaagcgggtctgggagaacccagcctaccttctttcctcctccacttcctttttccttccttgctgtcgcttcttcctcttgtcctgcctctggccttcctttctctccttcctgcagttgtttcttcctccatctgtaaatgttcattaaatgcttgccatatgcaaggcattgctccaagagctaagaatgtagtggtgaactgacaaaaatccctgccctcgtggagcttacattcttgtgtaagtaaaatacacaataaataaaattgaaaaatgtgtagtgagataaaagacaatggcccgggcgcgttggctcaggcctctaatcccggcactttgggaggccgaggcgggcggatcactaggtcaagagatcgagaccatcctggctaccacggtgaaacccccgtctctactgaaaatacaaaaaattagccgggcgtggtggcgggcgcctgtaggtaaacagctactcgggaggctgaggcaggagaatcgcttgaacccgggaggcggagattgcagtgagctgagatcgcgccgctgcactccagccttggcgacaaagagacactggtctcaaaaaaaaaaaaaaaaaaaaaaaaaaaaaaaaaaaaaaagacgagaagtgccagattactatttatttcacccagacctagataaactaagtggtttttagcagctgtattgtatgggaggttggagagagggtggccagtaaagaatcttggccaggcgcagtggctcacgcctgtaatcccggcactttgggaggccgaggtgggcggatcacctgaggtcaggagttcgagaccagcctgactaacatggtgaaaccccgtctctactagccggatgcagtggtgggcgcctgtaatcacagctacttgggaggctgaggcaggagaatctcttgaacccgggagacggaggttgcagtgagccgagatcacgccattgcactccaacctgggcaacagagtgagactctgtctcaaaaaaaaaaaaaaaaaaaaaaagaatcttgaacttctgcacactcagcgaaaattatgctcgcgttgtgagaggtccaagaaactgagaatgaatgaaggaactgcaggtgcacagagcttctctctcccgctcactctgggactgccgccccactatttaaaaataattctctctttcttaaatgtctctcaatctaataattgctcaatctctcttgccaacggaatataaattcaaaatacgagctgctgtgtctgaagaggcccctccaaacaaggctttggagccttagcgaagcctgggaggacacttgcctccttacattgcttcttgtgaagtgcaatgacactgaatttcagaacaccaaaaatagtcaaaggactttcaccgtccctttagtgcccatccaagacagtagtaagcaacattcagatattgtccagccctctgctaaaagtgatcttttctttctaacttccaagcagtgtggatcccatacctccttgggtaaaggagcagatgcagagaggtctccctaaacccaaagctgcgcacaatcagacaatctcgtcaaaggtgattttgctatcacccatagggacaaaagtggtgggtctatgacttccagtctcaattttcttccctctttcctccttccgcatcttttttgtttttttcttgagacagggtctcgctctgtcacctaactagagtgcagtggcatgagcacagctaactgcagcctc

SEQ ID NO: 1562156 - DNA, 4001 bp, Homo sapiens
aaaggcagacgaggaagccacaggagtttgggggttggagctggagggtgtcaggaaacttggaaccagacagggagagggtgtgggtgggtccagtcaagttttttctttttgtttgttttgggagggaaagagagaggccctcgggggtgaggaggctccgcagttctgctactaactgaacccgacccctcctccactcccccaaccgatcttaaaaatagaagacgtttaataaccatagctcgcaattcttgagcacttattaagttaatggttagcacttaaacgagctcttgttatggaaacaccagccaactttaggcccagggactgatcttaggacctgagaagagagggccgaatgcctgggcccaggaaaggagggtgtgtcagggcacagggtgacagggaccaggtctgaggcctaggaaggccaggaacagtgtgggccaagccgtccggagagcagggggtccaggccctgcgtgggtggaaaggcccgcggtgctcctacctttcagcgaggtctccaccaggcgcaggtaaagctgcgagctcttgttgccgtgactcatgcgctgggctaacccattgcgctgcaggacgcactcctcaaactgcacgacgttctggtggcgccgcttgaggctggtgagggcccagaattcagccagcgccagctccacgttctcgggggcgtcgcagcggatcttcttgaccgccacccgggccccgctgcgcccggccactgcctcataaaccacgccgtagctgccgcgcccgatctccgccaacaggctgtaacgcggccgcgcggacccgccaccgccctcaggccgtcgccgcgccaggaaggcctcgcccggggcctcggccgccaccggatccatggcccgggccgccgccgccggcctcagcttcgtgctgggcgcccgcggcactgggcttcgccttttccgctccgggctttgtgtacctctgcgggcgccgtccttccccgtttccatggctgcgggcggcggggggagcagcaacggcgctgcccgggccccccctgcctcatccctccgtccggccctgggacgcggaggagccggaccttggattgtgacctgcgggcgaaagaatcggttaaacggccaggccaaggcggggaggccaggagcgtaggccgcggggcgtcccacctcctcctcccccggccgccgcggcccctttaagacggaagccaccgccgctgattgaacgggggaggggaggggaaagcgggaaagaccgaaccactgggcagcagctcagagggggaaccggaaagaaaagcacaaactctccgctctctctgttagcttgtcatgtagcgataggaaaaagaagagccagcaagcttcacgccttctgaaaaccgcttagagacgcgatttggccggcggaaatatttttctttgcttggccccctctgtgacgctcctccccgcgccccgccttgtgttcgcccgggtgtaaacagtccattgaattaagccctagcggagcccagcggaccgacccaagtccccgagggcgacgggtagaagggattggctgaaaagttcggcttctcggagtgcgactggccgaggacccgatttcccttcccaagcgcggaggcagtggcagtaactccagcctcggcgctggccttcagtcctccaacggcgcccttacctggcccgcgcacctccacttccgggcggcccgtttcccccctggagcccctgcctggggatggtccgctccgggcccgggctgcctccgggaccgagcagcgcgggaggtggcggcccgagcccggcgtgtagcggatccttctgctgccgcggcgctcgctggggaagcctgggctcctaggctcccgtggctttccacgtgttcgcgccagctgagccctttacataacctctttacataagctgcacctcccgccggcgcccgggccagcggagactcctggtggcccatcccccgggacgccagccgagtgagccctgcaccgcccggtcctgcaaaggtcgacggagcagccgcagccgagcgcaccggcacgccttgccgggacccaatcactggcgagaacacccagccaacaaaaaataggcgcgaaattcccgtgatccgcggcgggctccgggtctccgcagcggcccgcgcatcactatcccttctcgcctgatctgcgtgaagaccaaccgtccgcagtaggcgcctaataaatactgactgggtgattgtcttggtcgtttgattcatagctctgtcctgggaacctcagggactgggttggaatcccgaccttcccttctaccagcccagtgatcttgtgcaaatcattgacccaccctgagcatccgtttatctaatgatcctctgcaaaatggatagaatgggctttaattcccaggaatgatagacccaaatgaaatacctagatggaggctaattgggtgtggggctgttagtacccaaagctcccatttaggcacagatttttgaatattttgttctgtattttgtattccagtgtaggcctagtgggtgcccagtgtttgttaactgaatctacagatgtttattgaacacccgtaatgtgctaggcaccattccaagtcgctggggaaagagcaatagacaaggcagtttctgccttggttgaggttctgtgccactgcaggagacaaaccacatgggtggccttgggcaagttagtcaaccttcttgtgtatttgttccttacctgtaagaagatccacagaggttatacaggtaaagcacttaggacagccttgcacacaatgttaagtattattaaataaatgcacaggataatttttgccagtggtaagtgtgatggagaaaaagaatgagctaaagagtgctcactggatacaggccatttcttataatgtatttggtcgctgaaaacctcttaacttttttgtgattaaatttcaaatttacacataaatttcaagaatcgtaaagatcatatacttttccactagaataacaaattgttatattttgctgcatatccatatcctctcgtgtatgtgtatatatacacacaaatacatattgtgtgtggatatctatatggtatataccccaaaagaaaggaaatcagtatacggtatatagatattcacacacacacatatataatgtatatattcttttttactacatcattttagagtttccaacatcaaactcctttatcctaaatatatgtgtgtgtttccttaaaaaaaagacattatctggcataatctcagtacagtggtcaaaaatcaggaattttaacaatgatacaattgttttatttaatacactccatccatatttaaattttgctaatggtcccaataatgtcctttatagctattccccaggatccaattcaggatcagacgttgcactgagttgtcatgcctctttagtttcttttaatctggaagggcagttagttatccagcctttctttgtctttcatgaccttgacatttttgaagaatactggcgagttatattgtagaatgtccctaaatttttattcatctgtgttttcttattagtttcagagtatccatttttctctcctcccccaccccccaccaacccatcccttgctattctgagagggtatgcattttttggcaggactactgctgaaaaaagttgcctcctcagggcctttcatcaggaggcacatggcattgtgtttgtcccagtattcgtggtgttaacttccatcatttggttgaggtggtgtaggagtagttacactctaccataaagttacgatttttccttctgtaactattaagtattctgtgggaagatattttgagactatttaaatatcctcttctttagactcttacccactggtttcagaattcatggtgattcttgcttgaaacaattattacagttgcaaaatggtgatcagaaggtctttt

SEQ ID NO: 1562157 - DNA, 4001 bp, Homo sapiens
gggtacttttagagaggcatcagagtgaggcagttaagagcatggccgggcccggtggctcacgcctgtaatcccaccactttgagaagccaaggtgggcggatcacgaggtcaggagatagagaccatcctggctaacacggtgaaaccccgtctctactaaaactacaaaaaattagccaggcgtggtggcacgcacctgtggtcccagttacacaggaggctgaggcaggagaatcgcttgaacccagaaggcggaagtagcagtgagccgagattgcgccactgcacttcagactgggcgacagagtgagactccgtctcaaaaaaaaaaaaagaacatggactttggaccagaccccatagacattaaaatcctagctctgtctcttacttgctatgacttctcccagcaaatcactaccctctgtatctcagttttatcatctgtaaaacagacatatagggatatctaccacacaggattgttgtgaggttcaaatgagttcaaatgaggtttttatggttcaaaaatggtcaaatatcagcaatttcatatgcttcagcaggacacatggaaagcacttagaacagtgcctggcacccggtaagtgcaatatgagtgtaataatcattactattacagtctcagcacactacgctagggtgaatccaaagcccatcccaaccacctatttgccttctgcaatgtttgtgcacctcaaacatccccaagctcaaacaacccctaagagtgctgcccaggcagtcaatcccttctcttcacctcttggttgccctgcacttccacaccctgaacacttccttctttagagctcattctgctgcaggaagtcagacgtctctgtgaaatagaagtaaccacactgaacctcagagaagcatgactccttcggtctctagtccctacttttctccagatgtggtagagtggcaaaagacccgggatgtccacaagggaaatccaggagttgagattttctaggatcagccaccatcctgatcttgaactaaagcaattccaggtaccactaggatttggtgctgatattcacaaaacaactgaggcctgaaaagggcacagactggcagggttcagtgacccggagtaaagaaggaaacacttcccaactactctggacctcagtctccccatctcgaaaatatcctcttatttccttacctacctcccaatgtcaggttctgaagagctgaggaggatgtgaagaccattaggaagacactgaacatcagtaataaaagatgccatcctacagtggggacaccaccaacagcatcctctgaaatgctaccctccaccatcccctcccttgctagaccctcaacctttcctcgcatgctttcagccttaggcgcaaagcttttcccctccacagatccccccaccgcacccctcaagtgggacttcagacccttagaaagtccacccggccttcctcttggccagttctcgatccacccccttaaagagatccctcacagattctcaccctgcttcagcattcgcccccacctccgtgagtccctgcttggatagcgttcccccgagtggcccggcctcagcaggtactctccctaacttgtccccacgttcctcagcacagtctcaccacagcgagtgctccctctaaccggtcccaagtctaacctccttagcagatgctcccctcagccggaccctcacccaccagacgtcccccccctcactcagcaggtgccccatcggctgggtcgcttagctccggggactcccacacaggtgtatcccctcaaccagttcccgccttttcttcccctgaccccatgcccgtcctcttagccagtggcccctcaccggcgcggcgggttcctcagctgtaccgtctccatggcgctgccagcagccgcccagacccgctcactgctccatcctcccgcggacctcctgagcccgccccgcagaccctcccacacttccgctttccgcccctaccggaagcggcgcgcggcgcgggagcggggcggagccacggccctgatcacgtggttcgggcgtgagtcttgtggcgcggtggggcgcggacccggaaccgccaagtggtgaaggcgcctccaggcggtgcccgctggtctctagagtgtcagtggcgctgtcttcctgcgttaccggagcgcacaaaatactcggtccccaggccgagaacgcacctctacctgggtcctgggtcccatttcacagactgagatgcgtgaagcgcctcctttagaagagctgacaattcttagcaaaccaagttttgcgtgattttggggaggcggcgctgccccaggaacgcctggaggtatttgtggttttctgccgcttacctggttgaactctggtcccaacgggccccctgcacattttctcctacaatgcatcaacgcgcaaattgccccactgtctttcttaaaggcctcccctttaagtcagtttgcagacataaaaataagcaacattaattaagcatttgccgtgtacttgtcttcatatattatctcatttaatcccctgtgtcaagccgataaggtcatccccgtttttatttatttaatgatttaacacagtccctaaacgttttcagtgctttacctcatttaatactcctaacaacctagacggtattattattattcctacttcataaggccagagaggtgaagtatctagcccaaggtcacatagcttagagtataggtttggggatttaaatccagtttggtctgatttcagggcctgcaccaccaaactggacagccatgggtgtgtaacctctttttgggcctgagaaacagacctttctctccactcagagctccggcttcagctattgtgcttccgaatgccactaccatcagtaagtattaggaaaatggcagattctacccaattgacccatggggaaagttataggagaaaacttaaccagagcaacctctcactgtttttaattgccttgcttttcccaaggatatgccatctacagaacttaacacctgagcacccacccttcagggccacccatgggcccaaaacgggataaaggagccattccctgacataggaggaaaacatttgctgagaagctactgtgtgccagacacaatcttggactttcacttaatcctcaaaacagccctaggaagaagtacctaccgttaacagataagaaagctgagacccacggtttacacagctaaggagagcaaaggttttaacccaggactgtcctgactccacaacatcaaagttgttgttttgtttttggtgttttgtagaaacaggatctccctattattacccaggctggtctcaaactcctgggctgcagcagtcctcccacctcggcctcccagagtgctgggattacaggcaagagccaccacacctggctgatgaataggaattgggtaaacatttttgaaaattaaataccaaattaccattacacaatgccaaacagacctcctttgtccccttcccaggatttttccagaagatggactcacattatgatggccccctttttccgcagagtgttcccaatgaaaatttctgaaatgatgggaatgttctaaatatgtgctgtccgaaatagtaaccattagccacatatggctattgagcactttaaatgtggctagcataactgaaaggccacatttttatttaaatttaaatttaaatagcaaaccgtggctaatcataataatagcttaagagagaaatggtgagcagggttactgggagaggtattttcctataagctctggatatacagttgacctgggaacaacaagggtttgagctgcatgggtccaccaatacaacccttgttttgttttgttttgttttcaataaatacagtcagccctctctatcagagggttccacatccacaatgaaacatggttggaaaatacagtatgggatgtgaaac

SEQ ID NO: 1562158 - DNA, 4001 bp, Homo sapiens
tcccgccgtccaggtggatggtgcccactcccagggtcacacctcacgcccacccctcccgccgcccaggtggatggtgcccactcccagggtcacacctcacacccacccctcccgcccacccgggtggatgcccttatcagctctccttctccttctctttcgtcttcttcgtcttcctcctcttctttcttctttttttttttttttagaaagagtttctactcttgctgcccaggctggagtgcaatggcacaatctcagctcactgcaacctccctctccccgggtcaagcaattatcctgcctcagtctcccagattgctgggatcacaggagtgtgtcaccacacctggctaattttgtacttttagcagagaggggggatttcaccatgttggccaggctagtctcgaactcttgacctcagtttatccaccggcctcagcctctcaaagtgctgggattacaggcatgagccaccctatctgcctcacttctacagaggaggaatgaaggctcagagagggcaagcattccacccagcatcacacagagtgccgggtgagagcccagtcatgagcctgggcctgactgcaggctcctgttgggagctcgcggaggtgggggatctgtccagaactgagaggccaggggaccacagtggcctctgacccctggagggccctggaggctgctgccggctccccccgggggcagatggaggtcactgtcacccaggctgcttctcatggtgccaggagcacagcatggcaggagccaccagccgatttgcctttccctgggcaggaaactcagaaatgtggctaccacagtcaggctgcttgacgtgcggtgagcactcatctcttagcaggcaagcggccaagcacctttcctgaaatattgaggcctcagaacaagccccaggagaggtgccagcaccgtcatctctacccagataaggagacccaggtcctgagaggttaggcagctcggacaacaccacacagctggaggaggtcagactctgggttgcagaaggagaatgtgagcagaggccacaaaagagcgaggagccagtgcccagatgccgagatgccctcgccctcccagctcagccccaggaaccgagcccatggggagggaccgtcagggaaaggctgtcaggaagggcaggaggcggccctggagaggacggcgctgccctcaggggcaggaggggagtcccctccgctgagagcccccccacccccagtatccccgggggtgtccaggaggaggcggagggaggaagcgcagatggacaggactcccagatagggtggggaggtgtggccggtgacacacacggtcccctcctggcaggtgctgaagtcacctggagcctccaagcccgtggggcctgaggggcggggtcaggtcgggcacgcgtgggtgggcggagttctgcgccccgggccaaggcgcccgagttgaaccagtcagctcgggagagggaccgcggcgacctgtcccgggggcgtaagaaaaggtgggagggagtgcggctcgtgaacgggggcggcgatgggaaggaggtgcggcccttcgtcctgtcctcccaaacgtcgagtgaaaaacgaagcgggttctgcggcctcgcggcggagcagagcgtttcgggaagggcgggcccagcgtcctcgcgcccgaggtcgcccggcagctcccctgcgtccagaatccgccccccgcccgggcctgcgcccgcccctccgcctgagctccgcgcgggacgggccgggaggccggggtgggcgctaccttcgaaggcggtgggtccgccccgcgggaggtggaggggcgggaggggcggagccctctggtctccggagggtttggggatcgcagtcgcccctcccccatccagaccccgcggcgcaaagggcagtggcttttctggccagagcaggtggcgcgggcgtcgcaaagggtggtccccgaggccgcagcggtgtggggggagggcgcggtccccctcactccgggctccgccgtgtctggcccgcccccctccttcagcgccccctccagcccctgtgctgcactggcgcggggagcgccgggttcccggctggggctttggcagagggtcccaccctctccccgcctccccacgaaggctctggcggacccagatctcgggtcgccggacgccccagggaccccgcccgcacatcgcgagcgcgcccacccggtcgcgagcccacgcccgggtctgggagccaccctgcggcagtcgcgccctgcgtggcacgctgctcccccaggggcgaggcgcccccgcccgacgtcccggtcccgagcgctccccggcgcggcgcctcgcagcccagcgccccaccagccccgccggcgccgcagaccccagcctcgggcgggtcgggcccaggcttgcaacgcgcagggtaggagaagggaaattggcgtccgctgccggccgctgccccaggcgaggccagacgaggcctctgctcagatcccgccgccccacaaagcccgtggccccggagcctaccggaaatggtgctggccatggtgctggcggcggttgggcctgcggaggctggagaggcgcaagtggcggccggagctgcagacggctggtgctgcagtgccggggaggggaggggagaggagtggagggagcgagggcgggcgggaggcgggcgcggcgggagagagagagggagggagacagagggagagagagagagggttgggggaaggagcggggggaggagggagggagggttgggggaaggagagagagagagagagagactgcgggggcgggggaaggagggagggaggaagggagggaggaagagagagaggagcaagcgcctggctgcggaaggggccgcggctctcagggggagagggcggaggaggggggctacccgaactgcaacaagaccccccaccctccaaccgctcacagcgggacagctgcttctccaacttggctttgtgaggcctgagagtggggtgggggtggagatgagcccccattccccagggcaggcggggcaggggcaatgccggaggagcaggtcccacccatggggtggggccgcagagctcttcgccgccaaggccgctgtaggctgggctggcgccaacagggtccaggtctgtgcctgccatcggagaggatgccacagccacaggggtgggcgctggcctggaggcctccaaggggcatctcctgtgagcccaggggatgggcaggatctgagcggagaagagtgaaagtggaggagtgaggccagaacaaaggctttgccgtgaaagaggtggtttcccgcctgggctcagaccttcactcactgtgtggcccaggccaagggcaagcgtctgacctcgctgggcctttgtttctcaggggtaagatgaaacaatgatgcccccagacgatggagaggaggggtgccagggttgtgcgcacttagtgagtggggggcaacctatcctgcctccccctctcctcataactcccaaagggaaagcctggtaggcaaacggagcgtctttgccattgcagggatgaagccaccgaggcagggagaaaagtgctttgccctacaagcaactaagtcatagggccaggagcaaaaccctgaaaacctcaggagacttgcagagccatgaggctggctcagcaacacaaaagccaggggcaagcctcagctctagcagtgcggtgggagcacccaaggccagtcacatcctagggtggcctggagagtcctgacccctgacgtgcaagccggcatcatccccgggactgtgagtctggtgggggtgatgcccaggaatgtgacattgtgtggcccagaggtacccttaagactggaggatcaccaggcgggccctgacctcatcacaggagccctttaaaagcagtttcctttgcctggttgaagaaatcggagggatcaaaccaaagaaggttt

SEQ ID NO: 1562159 - DNA, 4001 bp, Homo sapiens
cttgacgtgcggtgagcactcatctcttagcaggcaagcggccaagcacctttcctgaaatattgaggcctcagaacaagccccaggagaggtgccagcaccgtcatctctacccagataaggagacccaggtcctgagaggttaggcagctcggacaacaccacacagctggaggaggtcagactctgggttgcagaaggagaatgtgagcagaggccacaaaagagcgaggagccagtgcccagatgccgagatgccctcgccctcccagctcagccccaggaaccgagcccatggggagggaccgtcagggaaaggctgtcaggaagggcaggaggcggccctggagaggacggcgctgccctcaggggcaggaggggagtcccctccgctgagagcccccccacccccagtatccccgggggtgtccaggaggaggcggagggaggaagcgcagatggacaggactcccagatagggtggggaggtgtggccggtgacacacacggtcccctcctggcaggtgctgaagtcacctggagcctccaagcccgtggggcctgaggggcggggtcaggtcgggcacgcgtgggtgggcggagttctgcgccccgggccaaggcgcccgagttgaaccagtcagctcgggagagggaccgcggcgacctgtcccgggggcgtaagaaaaggtgggagggagtgcggctcgtgaacgggggcggcgatgggaaggaggtgcggcccttcgtcctgtcctcccaaacgtcgagtgaaaaacgaagcgggttctgcggcctcgcggcggagcagagcgtttcgggaagggcgggcccagcgtcctcgcgcccgaggtcgcccggcagctcccctgcgtccagaatccgccccccgcccgggcctgcgcccgcccctccgcctgagctccgcgcgggacgggccgggaggccggggtgggcgctaccttcgaaggcggtgggtccgccccgcgggaggtggaggggcgggaggggcggagccctctggtctccggagggtttggggatcgcagtcgcccctcccccatccagaccccgcggcgcaaagggcagtggcttttctggccagagcaggtggcgcgggcgtcgcaaagggtggtccccgaggccgcagcggtgtggggggagggcgcggtccccctcactccgggctccgccgtgtctggcccgcccccctccttcagcgccccctccagcccctgtgctgcactggcgcggggagcgccgggttcccggctggggctttggcagagggtcccaccctctccccgcctccccacgaaggctctggcggacccagatctcgggtcgccggacgccccagggaccccgcccgcacatcgcgagcgcgcccacccggtcgcgagcccacgcccgggtctgggagccaccctgcggcagtcgcgccctgcgtggcacgctgctcccccaggggcgaggcgcccccgcccgacgtcccggtcccgagcgctccccggcgcggcgcctcgcagcccagcgccccaccagccccgccggcgccgcagaccccagcctcgggcgggtcgggcccaggcttgcaacgcgcagggtaggagaagggaaattggcgtccgctgccggccgctgccccaggcgaggccagacgaggcctctgctcagatcccgccgccccacaaagcccgtggccccggagcctaccggaaatggtgctggccatggtgctggcggcggttgggcctgcggaggctggagaggcgcaagtggcggccggagctgcagacggctggtgctgcagtgccggggaggggaggggagaggagtggagggagcgagggcgggcgggaggcgggcgcggcgggagagagagagggagggagacagagggagagagagagagggttgggggaaggagcggggggaggagggagggagggttgggggaaggagagagagagagagagagactgcgggggcgggggaaggagggagggaggaagggagggaggaagagagagaggagcaagcgcctggctgcggaaggggccgcggctctcagggggagagggcggaggaggggggctacccgaactgcaacaagaccccccaccctccaaccgctcacagcgggacagctgcttctccaacttggctttgtgaggcctgagagtggggtgggggtggagatgagcccccattccccagggcaggcggggcaggggcaatgccggaggagcaggtcccacccatggggtggggccgcagagctcttcgccgccaaggccgctgtaggctgggctggcgccaacagggtccaggtctgtgcctgccatcggagaggatgccacagccacaggggtgggcgctggcctggaggcctccaaggggcatctcctgtgagcccaggggatgggcaggatctgagcggagaagagtgaaagtggaggagtgaggccagaacaaaggctttgccgtgaaagaggtggtttcccgcctgggctcagaccttcactcactgtgtggcccaggccaagggcaagcgtctgacctcgctgggcctttgtttctcaggggtaagatgaaacaatgatgcccccagacgatggagaggaggggtgccagggttgtgcgcacttagtgagtggggggcaacctatcctgcctccccctctcctcataactcccaaagggaaagcctggtaggcaaacggagcgtctttgccattgcagggatgaagccaccgaggcagggagaaaagtgctttgccctacaagcaactaagtcatagggccaggagcaaaaccctgaaaacctcaggagacttgcagagccatgaggctggctcagcaacacaaaagccaggggcaagcctcagctctagcagtgcggtgggagcacccaaggccagtcacatcctagggtggcctggagagtcctgacccctgacgtgcaagccggcatcatccccgggactgtgagtctggtgggggtgatgcccaggaatgtgacattgtgtggcccagaggtacccttaagactggaggatcaccaggcgggccctgacctcatcacaggagccctttaaaagcagtttcctttgcctggttgaagaaatcggagggatcaaaccaaagaaggttttctgttgttgagatgagggggccacgtggcaaggatctgagaactgctcccagccaacagccagcaagacaacaagaccttaactgcaaggaagtgagttctgccaacaagaagagaatgggcttggaggcaggtttgaccccagggcctccacacaagaactgagcccaactgcccacttggtttcagccttgggttactaagaattaggaggtaatgaatgagagttgttttaagctgttggttttgtggtgatttgctatgaagccatatcaaactaatatacacacagaggtgttggcccctgggccattcctaggaagccagctctgcgaaggaggaagaagggcagagaggcacacagagctgcccaccacagcagctgtgtcctccctgttggccaccacagtagcagttggggatggtcagcatccttcaggcagactccagccccgggtgctggagctcaggtgctagggatcaagagaagtagccctctctgggacctccagagtcttctcatgtgggtggggtaggacccacccagtcaggctcagagcaccgcaatgcctcacactcattgtgactctggccaggccctctctgagcctctgtgtcctcatctggagcacagggaccaggtgtgtggaagcccgtggcatagtgccaggaacacagtagatgtgcacagtgtgcactagcaggaacacacaacaggggtactgactgtcagcacctaggcaggcacacgcaatggggtactgactgtcagccatactgactgtcagcgtgctagcaggcatacacaacagctgtactgacagcacactagcaggcacatgcc

SEQ ID NO: 1562160 - DNA, 4001 bp, Homo sapiens
tggcaatacagtccctaagaggtgaaatgaatgttccaaaattgcctaatatcaagtataacccccaagaatgtggtcctgggatggctatttcccgcctgttccaacgctgcttctattccaacctagtctgcctacagcaggtagcctgaactacagccagtttcataacttcacttttcaattgaagacattacagagctaacgatcactgtctggtatagatcatccagactcgccccttatttaacagagcagtaaactgaggctcagaaagggaaaagtagcccccattaaaaacaaaccccaaacagtaatttttccaggaccacccttaaaaaacgctactgctaggctaactaaaggttgtggttaattaaaaaaaaaaagtgctattttacggggttaattttcacatatacctcctcaggctttttttaaaaagttcgaatggagaggaaagcttaatttcctgtctgggaaatggaaagtgaagaggctagcaccttgagtctcacaaacgcaagcccccaggaagaacagtgaggcaattattcacagggaacaaggccacacagagggctgcggggccgttaaaagaaaacgggcggaaaaacaaaacaaaacaaaacaacaacacaactccctcctctttgaggggagggagtcgttcattttgcaaggatttgggtctacgatccggcgacccagcccttaggaccaaactgaggctcattactggggggaggggagcttcaaacaaaacgaaacaaaaaggcttcagaaaggcccaatgcttcccaatgttagcgttaaaacatatgtaaattacaggcggcctgtagcgcagtgacgccaaggcggggggtgcgggggggggggtgctgcggaagtgaggagaagaccgggcagaggtggagctgcggcctcacagcaccgcttcttcctcatccagggctacagatgccccctgactctagccaagagatcttattattcttagtcttattattcttatcttctctttttaaacagagagacagacagagacagacaaacaggcagagccgcagtgcacacggtccgtgtgtcggagaggccgccaggagactcaccgcagcaatgctacgtgaatgcagagggctggaggtgatgtgactactcacttgctcggctaacagctgccggttttggatggaattattccgcaacaacaagaaagcgtcggttaaacgcctggtggccatgtctcaccctttgcgacccccctctcaggggccccccgcccacttatattcctgatttattcactttctttctcgtggcccggctggcccaccctttcacggaagcttctcgacaaggcctcaggcctcaagccaaaaagatgcagctgtgcgcttcgccaaggcgtagagacccctccccaaataactacctaggctttccaattgtctgactccccctacccagggcagacttcgatctctaagcacttgaatccccccaatccttgcgtagcgatccaacgtcccagagaccccaccccaatccaaccttggatctacaagcgtctaactcgccaatccggctctagactgggaggccctgaagccccctactccctgagaccccccggaggtctctgctctctacccctaactttggctcgtaagcgtctaggccgtgccctgaggtctggctgtgactcagtttccgcaccagaggcctggcctaggccctctttggacaaccggagccaggcttggggcctggactcgagggcgcctgcagctcccttctggggacttgtctgaacctgctgaggccctgcccgacctcctgaccccttcctttcctggacggcctggtcctccactgccagcaggctgccggcctgcaggaagacagcagggcctgcctccccggccttctcactcctcttctccggctccctccatccccggatctgactgcagctcagccccggaccgtttccgtgctgtggtcccgggttctggcgttcccccctggccctcttcctgtccgtccctcgcgagtgcccccctgcgacgctcgcaagccttgctcgcaacgttccgggcgcgggagctccctgcactcctgccccggggcacgggagtgctccgccctctcccggggtgctcctcgggcgccctgtttcgcctcccccaactgggtccaggcactaggagcaggccaacgagcaggcctgagcctggggagcgtggcccccaggctgcaaaccgctgccagggcccttggtcgctgaattagagtggaagttgcgcggcaggcaaatttgggctccccaagaactgaagttttgggcgcggggagttggagcgggagaggaaaagttggagacgactgcctctgcaggccgagcacgctctactgcaggcggcggcgctcgcttttttttttttttttcccactctggaaaaagatgtatccgacaaacaaccacgaggaaataaaaggaaaaaaaaaaaaaaaaaaggaacaagaactccaggcagcctggccgcgccgccgctggcagtcgggggtcgtcgggggcgcccgccctccccagctgccgctttctgtagggggcactgcagggtcgtggaatctcaagtggaaaagttccccgaaaactttgacacctcccacccccctccccgcgaaaaaaatctctgttccctgcctgggccctggccctgcgacccccgcgcccccccgtgccccgggccgggttttccacggttggccgggcccagggcgccctaagcacctcgacttgccgccccgggccaggtcggcggggttcgtgcaggggctccgtggggccgcgtcgggcaggggccgcccgggcccgagcacggcacccacaaacaggctggcgtcccgcgacggagacccgggtccggcccggagccgcccgggaggcttgaggccaagggcctggcccagcgcgcggccggagcgggtcgggggcgcagagctgtgcggcggcgccttccgggccccgggcctgtgcagggccggcttccccttgcggggcgaggctgcgggccgggctgcggtgcggggttccaacaaaggaccgaggccccagaagcggcccccacgcgtcctttgtttctgcgtggaacaaactttacacacgtgtgtgttttccgagggtttcccgtgtgctgagcgcttgcaaagcggagtcgcgcccggggagacgcgaagccggtgcccgcggctcacccagggaccccagccagacagcggcacccgcggggcgcgtgcgggacccccaggcgaccgggggaagcaccggtaaccgccccccacccgtgctttttctctcacggagaatgttcccgcgcgttcgttgtgcaactaaaaattaatgtgaaacatccattgaggcaaataacaaaatgcatccaacgaaacccacataaaatcgagagagccgcgagcagggctgggcgagttcactgtgaggaccggctctggcttccgcgcagcgcggagagcagggcgctcgcccggggacgcttcgcagcggtggaagattcgggcgacaggggactgggtcgccgcgcgggccgggctggaggctgcagggacttgctgacaggccatccaaagacagagaggccctggggagggaaattcggggagcccgtgtgcttagcgtagcgccccgggaaatatttgcccaataagggagagtttgtccccacactgcggcagaacccccctgcgagctctgaccccagcagcacggccaagcccccccaaccccgctcccccctttaggggacaggtatttgtaaataacaactgagctggtcgtcggtaggagaatcagattagaaacatggtccccactctcttcctatctccccagcactcatcacctcacaaagcagggggggacctgtttacttttcctggcgctctcccccaggctagaacgtgatcttcttcctacg

SEQ ID NO: 1562161 - DNA, 4001 bp, Homo sapiens
gttcagccgcgtttccctggaacagaacgcggtgcccggcacgagggggtgctccagaaatgcttgtagaacgaatgaacgaactactataaggaatgtttggaaaagtgcactcctagaattcaccgctagacttctgaaaccccgaggagccggggaggggagcatccctccgccaggcgatggaaactcgttctgccctggcctgggaggaagtctgccttttcgatcctgtttgtcctttcggtgtctgcgagtttccaaccactctgaagatccggcccactgcttccccgagtcctgcccggacaagccccacgtgggctggcatctaccggtcccttgggtctaaaccctaagggtcaacaaggccatgcccctgcggatggccggcccaggcgcgctcccctacccggggccgcctgtgctcggtgtgccgtgtccgcgggtcaggggcgcggcgggaagtcctcgcccgcccgccagccagcggggtcaaacaggtcatccctctgcggacggccggcgccggagcctccctcccgcccgcccggacccacctccgcaagcagcgctggggctggagccgggcggtccggaccagccccggctcacctgggcggcgctcgcggccgggctcacgccggggaaggctccggccgccgcgagcccccgcccgagccccgcgtcccccagccacccacctgccccccacgccccactcaccagcgcgcacggccccggcaacctcacccggagcggggcgccgccgccgcctctgccgcagcccggccgggccgctgggcgcaggggactccgcgccgccgctgccgctgccgccgccgccgccgccgctgccgctgctgcatcccccggcgagcgctgctgctcctcctcctgcctcctccccgccccccaacgccgccgccaccgcccccggccccctccccgcgcgccgccccagccaaagtccggctccgcaccccgcccggaccgctcttaaatcgccccagcccggccggccacgctgccccagccagccccttggcacggcgctaccgccccccgctcgcctgcccgccggcctccacgcaggggaggcgggcgcgctccggggcggggagcgtcgggccgggagccgcggacggctggggcccggggcgcggggggcccagccgcggtgccctcctcgagccctccgcgcgctagcgcttttacctccggcctgggggacgcgcggcccgcgacccggccctgcctgtccccggcgcacggccccggccccggccccgaagtccagctccggacggggcagtgaacgcagagctggggtcccggcggctctcgacctcccgatgcctccggactcggctggccgcgctcccggcgccgagcgcgcaccctcgccgggacacacagacgcacactcactcgacacactctcgctcctgctcgccctcggcggagagttgaaacagatgtgggattcgcccaggagctggaaacgagggagggaagcgagccagagccttgtgtgcacgtgtgtgtgcgtaacacacaaaccagggggcatcgctaataaatcaaatatcgtgataaattcaggagggccatcgatcaggtccacttggctggaaacgacgtgaatctgcctcttttccgctttcttcttctcctctctcggagctggagggagccaaatgttccgcggggagtgcgacagccccggccgggcgctcccctcgtaatgacacgttaataaatgttttcttttatctgctttcacaggactcgccccggtctgcaaacactcgactgcctttgccgaaagcctcgcgctcgcctccagccacacacatttgccattggagaggccggcgccggccgcgacccgcagctcaatcgcagggcaaaccgagctgcctgtgcgcgcccgagaactccccgagaaattaacttcggctcaagtgaaaatagcagctgttgtccagaaatggcccgggagtagcatagaaaggagaaaccggcttcctccgaaaggggaggaattggactcaagggggtgctgtctaccgtggtttccgctgtccctcgcgccacagaagaggccggagggggaccggcctgacgcgggtgggcaaagagcgggcagagaactcaccagcagctgcagaaaacacagccgagttgctagctaaggggaaacagacgccgctgtgggaaagcacttgtaaacagcagtaacttattaaatcttgtgacaatctcacacagtaagttactatgcccgttttaccatggaaaccaagagaggtttagtaactgtccgaagatcacacagttataagtggtggatcctgtgaagccaagaagccttagctcccggctcatgctcttaaatcctaggatgtttttacttttcaacctagcatctcctttctctgatatgatcctccatggtagagttgtcagacttaacaaataaatatagacatccacggggaggaagttagtactaaaaaatcattcatttttaaatctgaaattcaaatcggatctcctgactgggtttggagctctaggctcctccccataacctctgttagccacgccaatcaagttagagcctaaataaatcagaaaaaccttgcacttgcttttccaagtcaggtgctggccctacctttggcatcactgataaggctgaacagctcccaccttctttgccctgggacagaatgtcaggcttcaccatcatagaccgaaaaataatggagacccctctccttccgcctcatctctgcagaaggacatatatatcatttagaattttctagtagtggcattagaaagtaaaaagaaacaggtgagggccgggcacagtggctcacgcctgtaatcccagcagtatggaaggccgaggtgggcggatcacttgagttcaggagttccagaccagcatgggcaacatggtgaaactccatctttacaagaaatacaaaaattaggctgggcatagtggcatgtgcctgtggtcccagctactcgggaggctcatgtgggaggatcactttgagcctgggaggtgaaggctgcagtgagccatgattgttccactgtactccagcctgggtgacagtcagaccctgtctgaaaaaagcaggtgaaattaattttaatattaataatatagtttacttaacctagtatatccaaaatcgatctcttcaacatgtaatcaatataaaattaatgagatatttttacattattttttcttactaagttttgtaatctggtgtacattctaaacttacagcacatctcaattgggaccagccacatgtggctcaggggtcccatgctggacagtgcaactctggcaggttctgcggtcaatggctgtttccaccgggtcatttcatgtaatcctcctgacaatctttcaagcaaactgatgctcagagagataaagggtcttgcctatagtcaaaaacttggccagtgggatttcaacccttttgatgctgtccctggtttggggacatgtaccccactgcagaagcaattttcttactgaatcctcagggccccttggtggtgcttctggggcctggggtggtggagggaggcccaggaatgggatctgcctccctcctactttttatgttgggttctggagaatatttcaggggtggggaaatttccacggcaaaaaaagtctaaaaaaaaccccactgcattaccacactgtgcccttaggtcctcgagttcctgaacatggctctcccatacccataaggatcctgcccacaatgtttcactccatccttctctgctcgtcaggtaaccccagtcagagaggggatgcttacaatcccttcttctggggctgtgggcctggcggacacgtggcatttgcttatctttttggatatgttgtttccattgttgctggacattaccaaacatggtaacgtctatgttggccccttatcctt

SEQ ID NO: 1562162 - DNA, 4001 bp, Homo sapiens
tttggagagcgcgcagatccgggggtgtcctccagagaaagcccgtctctcctgctccctgtctccccctgagaacctgctccagcgcagcctccccttctctgccccaaaagtgggggtggacccggtgggaaacaggcaggggacagatggaggggcgagagggcgggtgtcccaacacgcacagatgagcaaatacccagattgaaacgtaagctgaatgtaattacttggttaattaaatattgacttttaactcaaaaagtgattaaaacaagctgcaggaagactttccagaaaggggggcagggaatgaatcaaagctttcaagggggaggaggaggaggagagggtcgtcacaggcaggtctggcttgctcttcctactgtgtgctgggcctactgcgtgcaggtgggggagttgcggaccgaggccagtgtgcaaactaggattgcaggcttccctttccatcttccaccccgagacggcatctctctaccctgctgccctcccagtgaaccggcagcttctggcgcgcaggagccagatcctgttcagccgcgtttccctggaacagaacgcggtgcccggcacgagggggtgctccagaaatgcttgtagaacgaatgaacgaactactataaggaatgtttggaaaagtgcactcctagaattcaccgctagacttctgaaaccccgaggagccggggaggggagcatccctccgccaggcgatggaaactcgttctgccctggcctgggaggaagtctgccttttcgatcctgtttgtcctttcggtgtctgcgagtttccaaccactctgaagatccggcccactgcttccccgagtcctgcccggacaagccccacgtgggctggcatctaccggtcccttgggtctaaaccctaagggtcaacaaggccatgcccctgcggatggccggcccaggcgcgctcccctacccggggccgcctgtgctcggtgtgccgtgtccgcgggtcaggggcgcggcgggaagtcctcgcccgcccgccagccagcggggtcaaacaggtcatccctctgcggacggccggcgccggagcctccctcccgcccgcccggacccacctccgcaagcagcgctggggctggagccgggcggtccggaccagccccggctcacctgggcggcgctcgcggccgggctcacgccggggaaggctccggccgccgcgagcccccgcccgagccccgcgtcccccagccacccacctgccccccacgccccactcaccagcgcgcacggccccggcaacctcacccggagcggggcgccgccgccgcctctgccgcagcccggccgggccgctgggcgcaggggactccgcgccgccgctgccgctgccgccgccgccgccgccgctgccgctgctgcatcccccggcgagcgctgctgctcctcctcctgcctcctccccgccccccaacgccgccgccaccgcccccggccccctccccgcgcgccgccccagccaaagtccggctccgcaccccgcccggaccgctcttaaatcgccccagcccggccggccacgctgccccagccagccccttggcacggcgctaccgccccccgctcgcctgcccgccggcctccacgcaggggaggcgggcgcgctccggggcggggagcgtcgggccgggagccgcggacggctggggcccggggcgcggggggcccagccgcggtgccctcctcgagccctccgcgcgctagcgcttttacctccggcctgggggacgcgcggcccgcgacccggccctgcctgtccccggcgcacggccccggccccggccccgaagtccagctccggacggggcagtgaacgcagagctggggtcccggcggctctcgacctcccgatgcctccggactcggctggccgcgctcccggcgccgagcgcgcaccctcgccgggacacacagacgcacactcactcgacacactctcgctcctgctcgccctcggcggagagttgaaacagatgtgggattcgcccaggagctggaaacgagggagggaagcgagccagagccttgtgtgcacgtgtgtgtgcgtaacacacaaaccagggggcatcgctaataaatcaaatatcgtgataaattcaggagggccatcgatcaggtccacttggctggaaacgacgtgaatctgcctcttttccgctttcttcttctcctctctcggagctggagggagccaaatgttccgcggggagtgcgacagccccggccgggcgctcccctcgtaatgacacgttaataaatgttttcttttatctgctttcacaggactcgccccggtctgcaaacactcgactgcctttgccgaaagcctcgcgctcgcctccagccacacacatttgccattggagaggccggcgccggccgcgacccgcagctcaatcgcagggcaaaccgagctgcctgtgcgcgcccgagaactccccgagaaattaacttcggctcaagtgaaaatagcagctgttgtccagaaatggcccgggagtagcatagaaaggagaaaccggcttcctccgaaaggggaggaattggactcaagggggtgctgtctaccgtggtttccgctgtccctcgcgccacagaagaggccggagggggaccggcctgacgcgggtgggcaaagagcgggcagagaactcaccagcagctgcagaaaacacagccgagttgctagctaaggggaaacagacgccgctgtgggaaagcacttgtaaacagcagtaacttattaaatcttgtgacaatctcacacagtaagttactatgcccgttttaccatggaaaccaagagaggtttagtaactgtccgaagatcacacagttataagtggtggatcctgtgaagccaagaagccttagctcccggctcatgctcttaaatcctaggatgtttttacttttcaacctagcatctcctttctctgatatgatcctccatggtagagttgtcagacttaacaaataaatatagacatccacggggaggaagttagtactaaaaaatcattcatttttaaatctgaaattcaaatcggatctcctgactgggtttggagctctaggctcctccccataacctctgttagccacgccaatcaagttagagcctaaataaatcagaaaaaccttgcacttgcttttccaagtcaggtgctggccctacctttggcatcactgataaggctgaacagctcccaccttctttgccctgggacagaatgtcaggcttcaccatcatagaccgaaaaataatggagacccctctccttccgcctcatctctgcagaaggacatatatatcatttagaattttctagtagtggcattagaaagtaaaaagaaacaggtgagggccgggcacagtggctcacgcctgtaatcccagcagtatggaaggccgaggtgggcggatcacttgagttcaggagttccagaccagcatgggcaacatggtgaaactccatctttacaagaaatacaaaaattaggctgggcatagtggcatgtgcctgtggtcccagctactcgggaggctcatgtgggaggatcactttgagcctgggaggtgaaggctgcagtgagccatgattgttccactgtactccagcctgggtgacagtcagaccctgtctgaaaaaagcaggtgaaattaattttaatattaataatatagtttacttaacctagtatatccaaaatcgatctcttcaacatgtaatcaatataaaattaatgagatatttttacattattttttcttactaagttttgtaatctggtgtacattctaaacttacagcacatctcaattgggaccagccacatgtggctcaggggtcccatgctggacagtgcaactctggcaggttctgcggtcaatggctgtttccaccgggtcatttcatgtaatcctcctgacaatctttcaa

SEQ ID NO: 1562163 - DNA, 4001 bp, Homo sapiens
cgatgggtagaactccagagttcaacctgcagctccccaccacccctgcagtccagggcaggcattgccacccccaggtcagcctgggccgaggctggaccctctccccagacccatattgatgacgaaggtgattattcagtatatacgtacacacacatcccagcatgcactgagtcaggcctagggcttggtcattgttgcggacaggcaacaggatgttgtcatctgcagagagcacaggactgtcatgtcactgccagcctcttgatttggtgcttgcagagacctagggagcacccagagcttggtgcgaacatccctgcccctgccccttgctgggtagccccaggttgcccgtttgacatccctgagcctcagcccctcagctgcccatgaaaataccagggcacctgtccttgctcactcatgtttggggaggtgtcctctgccatcctgctggtgttccggcctcgctgggcaatcctggggatgataagattcatagtcgcattttacaattatgaggaacatagtgtccttggaatgtgcataccacgttccagattgggaaactgaggtacagagaaggtttcccaacaccaccagcctgtgattcagggacagacccaggtctggctgaccccaaatccaggtatccatcaaggaaaagacccaggttgctgtggcagtcacaggcggttgtcgccatgtccccgaggttggcagaagcttggttttgttcctttgtctgctcctacccaatgtgattttaggccattttgattggtcgaagcctgctgtcgtgctcccattccctgtgctgtgattggttcaagggtgaggaagtctgcaggggtgaggtagggtgaggtaggggggtggttacgaggtaagggacttgggggaaaagttaggtttaggattagctaaatgagacccacagaaaacgatgcttattctccttcccctagacgccacatttctgcgtgacacctgaaactgtggtggccatcttgtgaccatgagagggggctaaaagagcagaatgatgacaggaacctgggtcttgggtggcagaactgaggaattaacacactccggagccccctgcaccttgggacctcttgatatgtgagatttaaaattttcccttatttcttaagtcaaaggtctttaaacatttttgtttataccacctcagagtatttatattggtttattaataaattatatatacacccaattgtactaatacattgtttacccttcccaaatgtacagatttatggtaacattcctgaataatataaattaaaagaggatgaaagacatacattctagcctggttatttcttttctcacccttggggattgtttggtatactctcttgggatatacacccagatttgggtgcccagagataggcatcattttaagttggaatttctgtcacctgcattcagaggctttctgacagataaagatggcgaaatacttgtttccttctttcataccagtctcctgcactagaccgtgagctccatgagggaacggagcacatcagactggtgccacaccgtgttccccgtcctctgtgcatttcccggcacacagtagatgctcaataaatgcgtgctggaaggatggctgcttcaccacttcctggctgggagactttgggaataccactgccaaacctctctggtcttggtggctgtctctgtacagtacagttgacaatgccactcatctccaaggacagggtggaggggcagcattttgtaaactgtaaagggctgggcaaagggaggggctgccatcctcacctccggggtctgggattgtgggccacatcttcgagtagggcgcctgggtccccagggctccttgaggaccgtggcatcgatttccttctttaggattggggatggagatgggaactctgggagctggtgaggaggaaggggctgatgcctctgaatgtcccctgaaaagtgccaagtggaatctgccaggatcagtggagcagttggcattgtgacctcacagagcaggtgggtggaggggcaggggatggggctagtctccagcttggccctagaacctcccccagaggaagccattgtgacccactttcctttcttaagatggggaaattgaggcatcaagacaggaagggccatgctggggtctcagaagctggacaggggcgagagctgaagctccagtaacccaaccatgcttttccttgtttcctagatcccttcctgccccaagcttcccaggcttttcaccttcttaggttgcacctgaatgcattttgtaatgctgagcttctcactggtggacattgtgcataacacaaaataacattgcatgtgttgttgctttaataaagttctactttttgttgggcccggtggttgatgcctgtaatcctagtactttgagaggcagaagcgggtggattgcctgagctcaggagtttgagacctgtctgggcaacatggcaaaaccccttctctactaaaaatacaaaaaattggctgggtgtggtggtgtgtgcctgtaatcccagctactcgggaggccgaggcttgagaattgcttgactcgggaggcggcagaggttgccgtgagcagaaatcgcgccattgcacccagcctgggcaacagagtgagactctatgtccaaaaataaagttctacttttttactggggaaaataaaagcataaccgagtggaaatgtcgggctaagttttttctgttcaccctgcctgtagggagcttgactatttggatagcaaagctaaaatgaattcacttttgccccctggtggcagttgcttaaaattgcaggctaattaccaatgggaagtggtacgatggtccctcaaagaggcccacacactaaaacctgaacatgtaaatatgttaagtcacaaggcaaaagggagttaaaactagaagagcaatttaagttgctaatcagtcgatcttgagatgggaagaataccctagattacccatgtgggtgcaatgtaatgacaagggtccttaaaaatggaagagggaggcagggagatggcagcacaagaagcactcagcccaacatgctggctttgaagatggaggaagggaccaggagccaaggaataagggcagcttctagaagctggaaaaggcaggtggacaattcctctcctacagcctccagcaaggaacacagccctgccaatacttccttgattttagcccagggagacccatctgggacttcagacctccagaatggtaacatgataaattgtgtcttaagtcactaagtttgtgataatacattattgcagcaacaggacaccaatgcaaaacccctgagaatattcagtgaaggggaaactctgaaatgccaccactacaattgttacaagggtctttcaaatgtatactcattcatttattcattcaacaaatatttatgcacctagtatggtccaggtgctggaaacagggctgagcagaaccagctcccatccctgcggatgcaggcaaagtggctggcagaacattctgcatatagcaggtgctcaccaaacggtgcttgccattgctgtcaggagccggttgagatctgggatgggctggtgagaatctccctcttttatgtctactggctgtcacccaaatggctcttgtgctggaaatatttaagaaaaggaagtgtccaggccaacagcaaacaccaagagtgggtttggtcaatatttgcgcctctgtccactgagtctgctgtttgcatcagctatggtgagggcgcaggaggggccggtcttgggcattggtggacagaccaaggccaggagcagggtgtcagggagctcacagcaggctcttctcattcctctttgcgtctagaataggggcaagggagcactggttgggaggcagggctggttcaagtgagctccagctgctcaggggagggcttgatggtg

SEQ ID NO: 1562164 - DNA, 4001 bp, Homo sapiens
tctatctttcaggcccctgaacttcctttgcctatgcctatgaaagaagaggactgcaattaattacactattctgcttactttacgtatgtccgaattttccataataataaaaaaaaaatgcttaaagaagtcggggagtgtgaagccacaattgaatacagagaaggtttcagattgtgctaatgctaacattttagtctctgcttcagaacaaagatagcatgtgagcaagtgcttaggtaagagaaaagagatattgtcaaatccttcccctgcaaagcaagaacacagatgattcttgcatgacaagatactacttcttaacagtgccaaatgcccatcttcttccttctctttttactccaatttgtgactctagaaatactagcaaattagtgcacagtatttgcaacagtagcacatggtggctgaggaacattctgtagtagtaagcaatctatattaatatatatgtagatctagacatgaactacgtgaacatgatatggactctttagacagtaagcaaacactaaaatagtgaataaatgtattgttataatatttaataatatgcaattattcaaaaataagcaattccggtgttattaaaattttttaaggaaacaattacaattctacaataattttaatatttaagaattttttaaagaaaaatactttttacacctattttatgtttgtgatataaacccaaatttgatacattttgagtataacacattttgagtaattacagttttaacccttagatcatggctgtcaatagtaaataagtaaaagtcttcattataacatgatttttaaaataaaaatgaactatatatagtaacttatgaattatgtaagtattttatcacttattcaaagattaccagtccatcatcagatatccataataaatgcattcagttatctttggtacttttcaggattcagtcataaaaataatagccttggctggtggcttatgtctgtaatgctggtggctagcactgtgggaggcccaggcaagaggactgcttgagcccaggagctccagaccagcatgggcaacatggtgagatcctatttctacaaaaataaaagttagcctggcctggtggatcgcagctgtggtctagctaatcaggaggctgaagtgaggtccaggtttcagtgagccatgttcacgctactgcactcccacctcggcggcagagcaagaccctgtctcaataataatcatcatagccatacatgtagttttctgttttgatgcagtgaaggtgtatttgtgaaatttgagactattttattttacaatgtgaaaacttgatttaaaactttaaatacttaaaatatgttgtgggggctccatttatactcttaccctagggccagcaactgttgaggcaggcttgcccattagctatgctttatctgttttcagaactaaagcaatttgaaacagtgtattttacaaaatgccctgagacattaattacagcacagaaaaaagtacagccaaagaggcacataaagctaacaagatggttttagtttctaatctacttttgcacgaagtcagttggggaaaaacaaaccaaggaaagcaaactgaataatcaggttacacacacacacacacgcatgcctcaaagctgaatgcatacaggccacaatagagtcaaaagcacagcactatccacaacatcaaacaagttaacatttgcaagtgaaagagaaggctaactctaaaaagaaacaaaagttatacacttattttttccagcctcataaggaaacaatttaaaagatctttaggaactactactatgtaacagaacgacttcggaaaccgagaacagaataataatgtttcaagagaagcgtggatttacctgacaagtaagcaggctctgggctccagtctactgaactgggggactggttagcgagcaacacagagaactagtaagatgatgattgtgtatctgcaggcagataaaagcgttacggataaaaacaacaacaaagaaaacaatttggcagatgggggaggcaaagattttcccccaaaggaaaaactgctgaatgaatgcaagcagcagtagataattcaaagtcccctctgccctggtaactaacatagctaaggtgtccaaaaagacattaaaggtgaatgaaggggagggaaggcgtcctcctcctcccatcattactaaaaaatgtaggccgggcgaggtggctcacacctgtaatcccagcactttgggaagccgaggcaggtggatcacctgaggtcaggagttcgagaccagccgggccaacatggagaaaacccgtctctactaaaaatacaaaattagctgggcgtggtggcgcgccaagtagtcccagttactccggaggctgaagcaggagaatcgctggaacccggaagatggaggttgcagtgacgcgagatcgcaccactaaactccagcctgggtgacagagcgagactccgtctcgggaaaaaaaacaacaaaaaaaaaccacgctgccgtattcgcagatgctcggccagcctggagcccggtccagaaaaggccgcacgtggagccacgtgtcgcgcattgagccgccgcgggacgcatcaggcccagctgcgcggaggggctggcggcctcaaccgcaaggagaggccgcaggtggggacggcgggagggagagaagggactgaaggcgccgagcaggaggaaggttttgcgcgcactcccttcttccctaagtggaaccggcagtggcaacaacgaggccgaaggcgaagtccctgctcccaccgccggcacggtgacccttttcccagggtcacccccgaaccaacaaagcacacacacacccgagatgcgccccaggccgcagcgccaaccccccttcagatgtcccggagacaggcgagcagcggtccccagggctcccgtcgccaccgcttctcccgcacccctcagcctcctcgggccggcgacgcgcgcagccccaggcctgctccccgctcgccaagcgcaccgccccgcgcctcagccaccttgaccgagtcgcccacgcgcgggggcggctccgagcgcccatttcccatccccgaggccgaggctggccaggcaggtgctgatggggagcctcgcgcctgcgcgagccaccctcgccgcgaactctgcacagcccacgccctggcccagcctcggcgcctcccctccgcccactgccgcagaaccgcaccccctccccctcggcagcttccacaacggctccgcctcaaccgtcggaagcttctcgcctgccggcttgaaaggccaagccgaagccccaccctccctccgcgccccgccgtgggggaagcccacccaggcactctgctcaacctgcctgcggcaggaggcgtccgcgtagtgtcggtggagccgccccctatgccgccgagcgtcgcaactctgcgcctcagggaccgccgcagcgcctccggcgaacggcggaaggcgggaagcgcccgtccaatccgcgccaggtgcggtcgatagtgcgtccaatcggcgtcgccgccagccaggtcccgccccccccatcccccccacccccgccaacgctcgccggggtcgcccgaggcctgagccaagggggacgctgtgggcgcggctcaggccaggccctcaggttagtgggtccccgctgtccccgcgcttcggcccgtcctctcgcgctatgctctcctgatgaacgccccgcgagcggagtcacccccgccagcgaggagactcgctgccttgactggggccctggtcccgggacaggcgagcaggaagggatggaagggacggaagcgcgggcgggaccaggagaagcccatccccgcgctatgcgtccccagagccactgggacccgcggctccagccagccctgcaggggcgagctggaccgggggaccagggcgccgggccgacgactcctgggtgag

SEQ ID NO: 1562165 - DNA, 4001 bp, Homo sapiens
aggtcgcagcctagcacggagaagttggccggctctgggggctatgaggctgctcaccccacaggcgcaggtctacgcagcacacacaccacctccttctttggactcagaccaaacacgctgggctgtaggagggagacggacagatacacggactcgcgcgcgcacgcctcaccaactgattccaaccagaaaacggagccactgtgtaacgcccagcccccctcccctcgacacccccaatcagccaagccttcggccggtgtctgctgcactaaacaccaggacgtggccagggaaggcgcaggcatcggtccgagccaggagcgccgcggcgccagcgcatctgacgtcgcaggaggactgtgcgcacctgaagtctgggtgccaagcgcccaagcctctgcgtgcaacgaaacccccaaaggaaaacaggactaccagaagaccccttcctctcgtctttcagaaacgccaagcggcccctctggccgcctcctcaaagctcggctgccagagccactctagtagggtcttgcaaaaagcgcatagggacaaagccccttccctaagaaaagtgcccaactcatccagtgagccattccttcctcctcactgcccagagagtgcacatgaagaggcagaaatcacgactaggaaaaagcgagattcaaattggaaccaaaaaagcgtatgtgctcgctcccatctcggcgccagggctgtggctcccagggctgcaggctgtcgcggctgccaggggccagacagcttttgaaggcaggtcttgtcctggctagaggaaagaggctccaggagtctctgcttccgccacggtcgcccgtcgggattccccatcccaagcgcgcttgcaccttgcctgccgctccgctcggagaattagtctgtttcccttcctactcccaaacagacctaggtccccagctccgtggccgcccggctcaccagccctggctggtctccttcgggtcactccgaggggcagcccgaacccgcagagccttggcccgccgcgcgccctcatggccctgctgggcagcctggctccgctacgctctcagttctcggtctcaccagctcccatcgaattcgcacagcagccccttcgcgtctcccggggtggcaaggcaccaaggtgcagcccaggccagcatcgaccccttcctgggcattttctctgccggctcagctccccctcccgccctgcgaccccgtgtctcccaagtctcgtcgcggcgaccacccggacttaccgcgggcgccacgccgccgccgggtctgcgcgctccgaggcggagccaggactaggacacccgccagcgcagggcagcctccagctcccgccgccagctcgcggcccctgccgcgaccccgcccactgcgggcccctccgcccgcccccgcggccgggaggtctggacttacctccgggacaaggtgacccggcaagtgcgcccaagcggccgcccgcgactctcccgagcgagcgagcgtgcggggcggtgcggcgcccgcctctgctcctccgctgccaggctctctcctcctctgccctcccctcagcgccgctctgctccccacgcctctccccgccctgcgctctccgcctgcgcccccggctgccccgagcgccgggcgcggggcagcggcggcagcccgagcggcggggagtcgggagctgcggcgccggggcggagcccaaccctctcggcccccgggagaggaaggggtgcggggagactctcgtcgcgctcgcctggccggcaggctgggcgaggggcgccctggggcgagccgctcctcttcgcttgccgagcctgccgacgcgcgtgctggaggcagcgggcgcgggccccgggggaggagggcagggaagagaaggagggcgcagcccgcgcgaaggtggccaccaactttggcccagaccagggaggccctagcgggggatcgcgtccagatggtggcccgcggccagtgtctgacaatgtgagggccacagaggctgggggcgggggatagctgcgggggactaggaggacaggaatttgctgcccgactagaggaagggatggctcccctcggtcctaaaggcctccccaggctgcggttcggttttgaggttaaaaatgacccaatttatggatccggcgaatgttcaagtcctgaccagctaagccctggaggagcaagcgggcgcggagttcagactccagagaccccctcagccctgagccagcctgttgttggcccatggcgggcccgccccagttggaattggaaggaaactagggcggtggtaagacagtctgcgttctaggagcggaggaggtggtgtttgcagtgtagatttcatagagaatcaactctgaaaaaaagatttaccagaaagggggtcaaaagttatttagaaaagcatctgtgcgcccccgtttcaacactaggcagaggccccagtcctgccacccgcaggctggtacactggtggtcagagaaggttaagctccagagttccatggctcccaaccttcctagagccctccctcctgcctggtaacccaccattgcgctgcgtcttgcccaggtgtcctggtgggcaggggcaggagttaaaggtggtgccaggaacaagaggtccttcctatattcctttcaggggacgtggcttctagggagcctccgcagcccaaagagaatgctgaaatgcagagtgccagaaggaggcatttgaaggaggcgcggatgagtggaaccagtactatcacctgaattccatccccgtcttcatgtctgcagccccgcgagacacacctgatgtttcttcctttaggtccccagagctgcaaggctgtggtctggaacactcagaaacgggcactgttcatttctcccatctagcagaacttctcaacttggaagaacatgccaccacactttaataaagcagcttacctttccggagtcctttcctgaataaagcagtttcccatctaagccattaggttgagcagatactattagacccatttgaggtggagagtcattgatcccatttatcaaatgaagaaattgaagtttaaaaagggtaattgagattgtgtagccacccaatgtgcaggagtagcctgaagctcgggttccctgcctctaagtcactgctctttcacttgcccagcctctggattgacttttgaggcagattttgttttgacgagagaacacctgcctgggctgcagccaggactcgcctttgtctcctgggtgctgtttgaatttaatcgcgccactgcattccagcctgggcgacagagtgagactccgtctcaaaaaaaaaaaaaaaaaagaaagaaacagaaggtggactcttcccccatgacacacacacacacacacacacacacacacacacatctttctgtaattcaaaggggccttacacttcatttcaaaagaaactcacagggccaggacgtgtatgtaaagaaacagatgtcacccactcctggcagatgcagcagctcattaagggctcctggtgggaagctcagttgcccagcacacgatgggcagtttctcttacctgtgattcccttgttgtggcttgaaatattatctggtatgctgtgatatagcattgaaataaagactttcaagaaagtcagtgaggagctgtcacatattaggcaatggggcacagtagaaattgccaagtctcttggaaactggggtaaccttctcaacaatgcttatctctcagaggatgttacagaactttcagagctaagagaggtctgtgggccacctcctgtgctgggaagaactgtcactcaggcaccgagcaagctgccacaccttccagccaacatttttttttaactttcaacttttgttttaagttcaggggtacgtgtgcaggatgtgcagttttgttacataggtaaatgtgttttttgagacagagtgttgtcctgtggcccaggctg

SEQ ID NO: 1562166 - DNA, 4001 bp, Homo sapiens
tcttcaacaaagcctggcattcccacagctcttcccaggagcatagagtctcctacgagactacaactaggcatatggtgggtgtgcaacctccactatccaacacaatactatcaaatgccaaacatctgcaccacactttcagctgacaaagaaaggtctttgacatacataatctcatattatccctaaaaaaacctcacaaagccattcttcttcttttaattcttatcactttttggataataacttgcccaagggctaacacagagaacaagcagcaggagcaaggactccatcccaggtctcctggctttaagaactgtgctcggccgggcgcggtggctcacgcctgtaatcccagcactttgggaggccgaggcaggcggatcacgaggtcaggagatcgagaccatcccggctaaaacggtgaaaccccgtctctactaaaaatacaaaaaattagccgggcgtagtggcgggcgcctgtagtcccagctacttgggaggctgaggcaggagaatggcgtgaacccgggaggcggagcttgcagtgagccgagatcctgccactgcactccagcctgggcgacagagggagactccgtctcaaaaaaaaaaaaaaaaaaaaaaaagaactgtgctcatcaccacgccacagctgcctcttagatgtaacaacttataggcctcctttacactttacaaagtaccttcttattcctaaacccctctgggccttgtaacattttgttgagggcaacatggtaggagcatccggcccacttttcagaaaaggctcagaaaggggaagcaacttgcccaaggtcccacagctagttttatatgtttaggcctagactgaacccttgcttttctgaacccaaagcacatgctctttatattgcagtccacgacctctctgcaactagtctcatggttttgaagacaggaaaacaagttcacagaggtgacatttgccccaggtcacacagctagtaagtggatcttaaacggacgcctgtctgaccccaaagtccaggcagtttccactgtacccgcacgaatgctcttttatccacccctctctccgatgtggcacctgagaacctagctcagagaaatcaagtcactttcccagagtatcagaaaggaaatgtatcagagttgcctggaacacagacgtgtttattgtattaacatccaggcccttttctttgtactaatcagcctctgctgtcattccattttatggatgaggcagctgaggctcagaaaggtgaaatccctttcccagggctacaaagaaagaaggtgacccagccacgtctacagcacagtagtgatggaccacaaagcctactcggggaggccgagaccccacccgccccagtccggggaccctacctcggcgtcgaacatctggtccagcgaggggctgcttcgcactagcccgtccaccagcgccagccacaggcccagcgagccgtaatacacggtctgcatgaggacgatctgcgacaggatcagcagcgggtcccacacgtagctgcggaactgacccgccatgccctgcagggacacgagccgggcctcagccagcggcctgtctccatggcaacgtcgccccgcccgggaggagggactggaaccaaggggtgagcccattccaagagtcagggggaaggcggggcagacagacccattctcagagtgaggggaaatccagcccattccgcctgcgcggcccccgcccgtacacgagctcctctggggtctactcaccagtgacagactcgacgatcgaagtgtctgagcgtggcccggcctcaccggcgggctcccaaaacagcgctgacagacaggaccatggaggagaggcgctgccggcctagagaggcaaagctccagcgaccacggcggcaggagcggctgcgtaggaaagaaacgtttccggggaaagcagcggaggggcggggctgaggttgcgcaggcgtagtgggtgcaacctctgcctgaacctcctgaaccaggtacaagcagccggatagcgaactgagcacatgcgcagaaggaagagtgaaggcaaacggaagagaggaacgaaggccgcagagcttgcgcgccctctagaggggaattctttttttaaaggaaggcggctaggggagaggcaagtggggtggcttaggacgcggtaatgatgtttgggaattaacgaggtgataaactgtgtcgttattttcagcctaaattctcaatgttttctcctagttagagtctgataacttgaagtggacctgcaagctcctccacgtaggagtttgccaatgttcccgctgtacagatagttaagctaagggccagagaaggaaagcaacatactgtttcaacgacacagttagtagcaaagtaagtattaaaattcaagtgttggtcgggcgcggtggctcacgcctgtaatcccagcactttgggaggctgaggtgggcggattacctgaggtcggtgtttcgagaccagcctgaccaacatggagaaaccccgtctctgctaaaaatacaaaattagcggggcgtggtggcgcacgcctgtagtcctagctactcgggaggctgagccaggagaattgcttgaacccgggaggcagaggttgcagtgagccgagatcacgccattgcactccagcctgggcaacaagagcaaaactccgtctctaaataaataaataaataaataaataaataaataaaattcaagtgtttcctcaacactacaacattgatttcgcacctactcggtggcaggaaggctagaacatgtatatataagacagcccctgccctgagacacagatgaactatattagaaggcagagtagtgggtgttttaaaatgtgggtgtccagtggaaaaaggcacaggttctgaagtcgcacataggagtaaatcctgaccctctctgctgccatgactgttttatctatcttccaaatccgaatagtggacagtcagtaaatatttgctgaatgagttaagaacagaaaaagcaagagcaaatcgataactcacttattcctactccagcagacgaaaacccatcaacttcattgatcctaggttccccctctctgaagtggaaagacgggaagtaagttgttccaggaaaagaatttgggttttagggccagctatgccacccagtgtgaccagcaagccacttccttctttaaacctcagcttccctgtttatgaaatgaggagttggacatgattaacgttttccaccatttaatctaccttccagtaattattttctcattaaaaaaaaaacttaggctgggcacagtggctcatgcctgtaatcccagcactttgggaggctgaggcgggcagatcacaaggtcaggagttcaagaccatcctggctaacatggtgaaaccccatctctattaaaaatacagaaaattagccgggcctggtggcaggcgcatgtagtcccagctactcgggaggctgagacaggagaatggcgtgaacctgggaggcgaagcttgcagtgagccgagattgcgccactgcagtccagcctgggcgacagagcgagactccgtctcaaaaaaaaaaaaaaaaaaacgtatcaaagagccatgtaactgccaatcagaatttctgaacagcttgtggtagccgtgttatcaccttgagctgatacaattccagacaaaagtaaagaaacttgagactttattgagagtgtgcgattgtccttatcatttggaaataccctgaacagttcccctggactccagttggggagttattaaggcccaaagatttcttaggtgctttccagctcaaccattcttttaggcacctcaattcagtccaacaaatatgtattcaaattcctctagttcactgattatgcacatgatctagtgtttctgagaaaacatctgtttcttaagtgcctacatgatcttgtttaattctcacaa

SEQ ID NO: 1562167 - DNA, 4001 bp, Homo sapiens
agagttgcctggaacacagacgtgtttattgtattaacatccaggcccttttctttgtactaatcagcctctgctgtcattccattttatggatgaggcagctgaggctcagaaaggtgaaatccctttcccagggctacaaagaaagaaggtgacccagccacgtctacagcacagtagtgatggaccacaaagcctactcggggaggccgagaccccacccgccccagtccggggaccctacctcggcgtcgaacatctggtccagcgaggggctgcttcgcactagcccgtccaccagcgccagccacaggcccagcgagccgtaatacacggtctgcatgaggacgatctgcgacaggatcagcagcgggtcccacacgtagctgcggaactgacccgccatgccctgcagggacacgagccgggcctcagccagcggcctgtctccatggcaacgtcgccccgcccgggaggagggactggaaccaaggggtgagcccattccaagagtcagggggaaggcggggcagacagacccattctcagagtgaggggaaatccagcccattccgcctgcgcggcccccgcccgtacacgagctcctctggggtctactcaccagtgacagactcgacgatcgaagtgtctgagcgtggcccggcctcaccggcgggctcccaaaacagcgctgacagacaggaccatggaggagaggcgctgccggcctagagaggcaaagctccagcgaccacggcggcaggagcggctgcgtaggaaagaaacgtttccggggaaagcagcggaggggcggggctgaggttgcgcaggcgtagtgggtgcaacctctgcctgaacctcctgaaccaggtacaagcagccggatagcgaactgagcacatgcgcagaaggaagagtgaaggcaaacggaagagaggaacgaaggccgcagagcttgcgcgccctctagaggggaattctttttttaaaggaaggcggctaggggagaggcaagtggggtggcttaggacgcggtaatgatgtttgggaattaacgaggtgataaactgtgtcgttattttcagcctaaattctcaatgttttctcctagttagagtctgataacttgaagtggacctgcaagctcctccacgtaggagtttgccaatgttcccgctgtacagatagttaagctaagggccagagaaggaaagcaacatactgtttcaacgacacagttagtagcaaagtaagtattaaaattcaagtgttggtcgggcgcggtggctcacgcctgtaatcccagcactttgggaggctgaggtgggcggattacctgaggtcggtgtttcgagaccagcctgaccaacatggagaaaccccgtctctgctaaaaatacaaaattagcggggcgtggtggcgcacgcctgtagtcctagctactcgggaggctgagccaggagaattgcttgaacccgggaggcagaggttgcagtgagccgagatcacgccattgcactccagcctgggcaacaagagcaaaactccgtctctaaataaataaataaataaataaataaataaataaaattcaagtgtttcctcaacactacaacattgatttcgcacctactcggtggcaggaaggctagaacatgtatatataagacagcccctgccctgagacacagatgaactatattagaaggcagagtagtgggtgttttaaaatgtgggtgtccagtggaaaaaggcacaggttctgaagtcgcacataggagtaaatcctgaccctctctgctgccatgactgttttatctatcttccaaatccgaatagtggacagtcagtaaatatttgctgaatgagttaagaacagaaaaagcaagagcaaatcgataactcacttattcctactccagcagacgaaaacccatcaacttcattgatcctaggttccccctctctgaagtggaaagacgggaagtaagttgttccaggaaaagaatttgggttttagggccagctatgccacccagtgtgaccagcaagccacttccttctttaaacctcagcttccctgtttatgaaatgaggagttggacatgattaacgttttccaccatttaatctaccttccagtaattattttctcattaaaaaaaaaacttaggctgggcacagtggctcatgcctgtaatcccagcactttgggaggctgaggcgggcagatcacaaggtcaggagttcaagaccatcctggctaacatggtgaaaccccatctctattaaaaatacagaaaattagccgggcctggtggcaggcgcatgtagtcccagctactcgggaggctgagacaggagaatggcgtgaacctgggaggcgaagcttgcagtgagccgagattgcgccactgcagtccagcctgggcgacagagcgagactccgtctcaaaaaaaaaaaaaaaaaaacgtatcaaagagccatgtaactgccaatcagaatttctgaacagcttgtggtagccgtgttatcaccttgagctgatacaattccagacaaaagtaaagaaacttgagactttattgagagtgtgcgattgtccttatcatttggaaataccctgaacagttcccctggactccagttggggagttattaaggcccaaagatttcttaggtgctttccagctcaaccattcttttaggcacctcaattcagtccaacaaatatgtattcaaattcctctagttcactgattatgcacatgatctagtgtttctgagaaaacatctgtttcttaagtgcctacatgatcttgtttaattctcacaatctgaaaatatagctattgtcccctttttataggggaggaaactaggcttggggggaggtggtgtgactctctaggtcagagagctcacagggagcagagctgagattcaaattcaggacaactgactccaaacatcaagatgacttttagtttagttttggtttggtttagtttggttctttgaaacagggtctcaatctgtcacccatgctggtttgcagtggcgcaatcatggctcactgcaccctcaaactcccaggcccaagcctcggcctcccgaatagctgagaccacaggcatgtgccaccacacctggctttttttgaaacggagtcttgctctgtcgctcaggctggggtgcagtggcatgatcttggctcactgcaacctccgcctcccgggttcgagcgattctcatgcctcagcctcctgagtagctgggattacaggtgtgtgccaccatgcccagctaatttttgtatttttagtagagatgggatttcaccattgtggccaggctggtctggactcctgacctcaagtgatctgcccgcctcagcctcccaaagtgctgggattataggcatgagtcaccatgcctggcccgcacttggcttttttgatttttcatttaattttatttttttgtagagacagggtatccctatgttgtccaggctggtcctgaaccctgggctcaagcaatcctcccaccttggcctcccaaagtgttaggattacaggcataagccgctgtgtccagccaagatgccattttagaataaaagaacaggaaagaagggaggaagggagggagggagagggaaataaaggaagggagatagtaaaataggtggtggagtagcaggaagtggaaaaggggcagtgaatctctctgctcagttagccctggggtgagggattagggagaaatgggaggaaaggcttagaaaagggctgcagaggttgacaatacccagggcagctgtcttccttgcagatgctggaatgcgtggctcttcctgggctctgctcccttcacgtcacagctgggcccactccaccccatctcctcccaataggaaaggccctgcctacccattctgctgaactagaaaacacaggtagcttttgatattagggctggctggaatgtctgatg

SEQ ID NO: 1562168 - DNA, 4001 bp, Homo sapiens
aggactctcgcaggatgcgcctgacatctctccctgcctggtggcagcagaggagcccaagccttccatccagagttcccgagcctcaaggagggggcgtcgcgcccccgtcctcgcctggagactgaagaggctcgagcccagggtcaccaaggggcagaaaggctaagtggggacacaggccacacgcctaactgcagaactgagcaggggacagctgctgccactcacagccccaggtactgccctcagctctgcagaccccatcgcctggcccagggagcccctgcgctgagcctaccaacccgggcagggacgcatagggcgggagcaggtaaggaccactccactaagagtcctggctgagccactccgaaacagaccagccccaggcacaggcagccagcgcggacgtcagggacagcgacagggacgcaggctatgccgactccctctggctcactcgcagacagccacccgggctggccccgcacctgggtagagactgcccctcggcctgctccagccacgggcctacgggacagatgaccttagcattccaccagcggagaacttcctggaactggcagctggcgctgctgggagccgcccttccctcccgccccgtgcggccactcacctgggggcagctggaagttctggatgttggtcgggttctgaggcggctgcggcaagcggggggccagcacggtgggcgtcagggtggcccgaatcccgctggtggtggccgtgggcgtccgggacaggctctgggtcactgcgccggccgcgcctttgggcagcccggtgggggtcccgggggcgggcggcgggacggcggccgggctgggcagcgccccttgcatagttggcccgatgaccatgctggccgccgtgctggccgggccgctggccgccagggtctgcgccgccgggggcgccgcctgcaccaccctcttgggcgactcggccttgacccccggcgccggcgccgcagccgccgcgccgggcccgggttggccgctgacccccgcggggcccccggcggccggggcgggggcgggggctgccccggcgctgcccccgttctgggcggcggcggggggcggcacggcgggcgcggcggtcgggggtccggcggggtggccgggcggccgggccagagtggcgggcgcggggggtggcgggggcggggcggcggcgggggcggcgggcgcgggggcggcggggggcgagggcgcggcgggcgcggggggcgcggcggcgcccacgaaggggggcgtctggatgacagtgccgggggcggcgggcttgggcagcggcagcagcgcggcgggcccgttgttgaccaggctgacagcaggtgcggcggcgtggtgcgagttcagcagcgcggcgctcccattcaaagtttgcgcggcgccggggccggcgggcttgccagggccagggccggggccggggccggggccgggcccggggccggggccggcgcgggcggccagcgcggcggggccggcgggcttggcggggccggcgggggcgggctcgggccccgcggcgacggcggcggcggcgggcaccggggcgcaggaccccgcgctgccctcgggcggcggcctcagcttcgcggcgggcggcgcgggccctgcggggacaagggggcggcgcggtgagggggggcccgggcgctgcggccccccgccccccggccgcgctctacctgcggggggcggctccggcgccgctccgggcgcgccctcggcgggggcggccggccctgcgcccgcggctccggccgggctgccgctcacaacatggttcccgagcgcgccggcggccgcggcccgcacctcgggcgtgcgcggcgcgaggtggtggtggtgggccgcgctggccgccagctgcgactccagcgagcccaccaggtcgctcaccactttctcgtccacctcgctgttgaagaagacctcgtccagcagatccgagcccgccgccatcttttttcctcggccgccgccgccgccgccgctcgggccgagcgcgcctgggcgaggaggaggttccgactggggcgggcgctgggcgggcggggggcggcgcgcggccggcggggggcgggggcgcgcggccggggggcgggggagcgggggtggcggccctgcgcaggcgcggagaccgcgggcgcccggcgattggctgcggcgcgcgcttaaaaggcgcggccaatggctgcgagcgctagaggccggggcgcgggcggtcggccggggtgcggcagcagcggcgggaagcgcgggggctggagctcaggggcgcgggcgccggggcggtggcggacggggagggggccgccgggcggggcgcgggatgcgggaacggtgcgctgggccgggccgaggcgggcgcggggcggcgacggggcctcgctctttgtctcggctcgctccaaaatggctgcggcggcgctgacgggagcgccgggcgggcgccgtgcgcggtggcagcggcggcgcagggcccgtccgaggcccggggaacagcgcgcggggatgccggggcgccgccgggcggcgcgcaggccctggagtggatgggcctgggaggcgggcgggaacggggaggggactgtcgcagcgcgccctggggacggggaccggcgcccggcccctccaagccgccgcggggaagctgggtccgcctctggctcagccggtcccgggcggtggggaggggtcctgcgcgcacggctcttctcgccctccaatcgtgaccacccctggcccttccctccatttttaatcaataaacccagccgccccgggctgactgtccccgcacccagctgccttggagacaggagtgtcgtataagcccgtaggtaagagcacggtgcttgccaggcgccaaacgaagttcccgagcctgaagccggcacgtctggaagtagctttttttaccttctgctgggggaggggagtaagttacctaaagtgttcccaagcaccttctctctagaaatacttcagtaaaagttccagtcccctctttctgcgtgttttattttccaaccaaaagatggtgttattggacatttctagtggttttcctttctctcatttcttcctaagagcccagaataggtttcagagagacgcttccttgcctcggacctcactggggccaagaggccacagggtcagtcttcgcagctgaagacagcgccgcaataagcagagacctcgggacgatgaatgacgttgctgacaaagaaaatgatttttttaattgctttaacaaaggagactgctagtctcgaaagcagacccgaactggacccttgtgcctgttcgaactgtagccttgcaaaggaatggacttactgataactggaatacgggacttcaccccaggcttgtttctcgacagcagcagcagccaatgagcattgaggacggagcctaggagaggtgcctcccctataggggaacagtgtttgggggaaatcactgcaaacgtacagctggagttttgtacctgaactttggctcccagaaggcaggaaaggaaatgaatgaagcaagctgagtatggcggggagggcccctgtgggtacacctacggagcaccttgagctcagtagggggacagtctgagttttccagaaagaacagaaatataaagtgatgattaaatctcgggatttttaatttttgagtgttgacaactaattagaacatttttaaagcaggtcaaagcacaggcaggctaactggccccacgcacaacttgcaaggtggggcgcaccaggctcactgcacagcccatacccacagacccctcagattggagtcggggcagaagcagaacgcaggactcgcaggaaacagaccaggttccaaggcccccagggtcccaaaggctggggtaactgaaggttcccacgctcaggcctccactcttcaagtccgctgctactccactgagatctgtaatgagtc

SEQ ID NO: 1562169 - DNA, 4001 bp, Homo sapiens
cattcaagaaagtaaaaggacaacccataaaatgggagaaaacgcaagaaaatattgcaaatcatgtatctggaaagggacttacatttagaatatagaaagaactcatacaactttaatataagacaattcaatttaaaaatgggcaaaggaattaaatggacatttctccaaagatatacaaagggtcaataagcacattaaaagatgctcaacattattagccatcagggaaatgcaaatcaacactacaatgagctaccactttataagcactaagactgctataaccaaaaagaaagataagtgctcccaaggatatgaaaaaatcagaacccttataacctgctggtgggaatgtaaaatggtgcaaccagtttggaaaacatttggcactcactcaaaaagttaaacatagagttaccatatgcccaccaattccacttctaggtatatactcaagagaactgaaaacgtatgtccatacaaaaacttgtacacagatgtttatagcagaattattcaaaatagccaaaaagtagaaacaacctaaatgtccatcgaccgatgatggttaagcaaaatgtggcatattcacacaatggaacattacccatccataaaacagaatgaaatactgatacacagacattgatgaaccttgaaaacatactaactgaaagacaccagacaagtgaggccatatattctatgattccatttatatgaaatgccagtataggaaaatccatagatacagaaagtagattagtggttacaaggcctgggagagaaagcagagaatctaatggggagtgactgtcatgagtataggatttcttttgggggtgatgaaaatgttctgaaagtagatagtggtgatgggtgcacaactttgcgatatgagaaaaagcactgaaatttacaattttaaagaataaattttatggtgcatgaataccttaataagactttctcaagaggaaaaaagacaatctatccgtgcaatgaacacaatgtatgtaactatgcctcttagttataaccgtattttacacgcatacattatgatcacaaataggttaatatgaataaaatattagaaaaaagatcaaaatgctgggttggcagaactataggtgatctcttcataactatttctgcattttccagatgttccttagtaagcactgctttttgtaagtggtggggaaaagttttatttacaacaaaaaagataaattattaaactcctaagaatataagtaaaaattccttcgctaataaagaataataataattcagcaatctaatggcccctaacacacctttccttcccctcccctacagaagccaggaaagttgaactctctccttccggaaacacgataccctcgatttccaggacatctctagctcctgctttccccccctcctctccagctgctccatcttctcggtcctttcctcctcctcttcttcctcctcctcctccccctgagtagtaagtgctaacgacccgcaggactctcatcaggcctctattactaagtaaggggctgccttacccccaacccgccacccaggacaaggcgcacattctcggctgtctgcgaacctcggactctgagacatctccagcctgagactgcaaagtgggtgaagaactgcgagaactccccacatacagacagtacttccccggtggccacgaggacgccaagccggagatgaggctgggaagggggacgacggggccgcctagagcgaccaagactagggaactagggacatcctggccccctcctctagccccgcccggggcaaggggtgtcctgcgcgccgccccctctcggacccggagaggacgtcccagctagcgtacggggcccacacacagaggcagcagcgcggaggcggcagcggcgcggacagcgtgggaaagagggacactcacccgcttcagccccgagccttcactgcaccggaagtagtcacccgcccgttgccagggtgaggaagcggggctgacatcaagtctccccattggtcattcggggtaccacgtggtcggaagcagcctcccacaagcggctctgactccgccctccgcttcggagcggctcacctggcctcagaggtgcagcgctaactccacctggggcttcgttctgagctgcgcatgcgctattgcttatctctacccaccccgcccctgaataagcccgcaggatgtgattatatctgagtggttgattgactaatactgtgatgagaaatgaaattaaactgaccatcattttatctaggtgtcgcttaagagttactttctttcaatccttagagcactgttagacggtagggaaaactaaggttcagcctgcattgcttgtaggagttggggcacgagccttgcccagggggaaggagtgtaggcggtcttttatcggctaggatgtaagaccgaaacccagtcatgggttttgatgacccatgactgatggattttccttatacttccaccaaaacatcacgtcgaactgaatgtaaaggcagaaatgagaatctaactggcttctttaagccagctatagaggaatttacactaatgcaaaagataacacttttcttaccacatttttttgtttttggaaaatatttattcttcattaaaatgtcttaattatattaacacataatggtttattattgttattttaaataactttttaacatttcagttttttgttggtttttttcttttttttttggagatggagtttcactctgtcaaccaggctggagtgcaatggcacgatctcggctcactgcaacctctgcctcccgggctcaagcgattctcctgcctcagactcctgagtagctgggattacaggcgctcgatacacacccgactaattttttgtatttttagtagagacgggttttcaccatgtttgccatgctggtctcgaactcctgacctcaggtgatcctactgccttggcctcccaaagttctgggattactggcgtgagccaccgcacccagccacatttcagctttgtattcaatttttaatatagtaaatattaatagatgtaacccacagaaacaaaagctttggagtgttctctactattttggggagtataaaggtatgctgaaaccaaaaagttcgagaaccactgataccattattataaatataacctatgtggttttattatgtaacttggggctttttttctttctcttctaccactgacttcttagggaggggcaaggggaagaagtttattacatagtaagaataacagtttattacatagcaatagtaactgaaaccgattttgttacctagaagtaggatggatattataacaaaacataacataataacatcataaaagtaaaacgtgtggcactggctttggaactaggtgaagcagcaagagcaggaagggatccaaagtattaacaagagtctaaaaggacttgaggaagctgccaatgagggcttaaagggagctaaggaagatgttattggaagctggagaaaatggggcccttgttatatagtgccagaaagtttggcccaggcattaggaagcagacataaaccatccccattgtgacctttctgaattcctcacccgcagaatccatcagcataataaaatagttgttcttttgcacctttaaagtggatttttacacagcaatattaactggaaccagcaggaataaaagaaagatgttaaagttttaaaaagacatagacatgctcccttccatttcttaggcaacattcttcctggaatttaactacattgtaataatcatctcccagtgctgctctgtatacttttgtcttgggtatcacacccagatgccacacaggccatcctctggtaggtgaatactgctcaagtaaaagtaacaaaattcttcggacccttttttttattattattattgaggcagagtctcactctgtt

SEQ ID NO: 1562170 - DNA, 4001 bp, Homo sapiens
cctctgtttctggaggtcttcattagtagtttctacaaaacagtatccaaattagcaaagattctgttaactacctggaaaaagcaggtaccaagaaagaatgtttcactacaatggaaaaaaacagtctagtaagtaaaccaatctgactataaacgctacaaaagagggattctagcattagtaactttgccaacaatactctgatatgattaaaaaacaaaacaataacaaaaacaaaaaacctcatctttaaatttgtcccattcatccagagaagcaaaatcaaggaaactagagggggtaaagtcttgcaacagatacacagctgcactgccaacaggtcacaagacccatgctgcctagggcattgactgttatgccatgaggacagacatcacacaaacaccagtaattaaagggttacggtgccaaagggttcagagctccacttccattcagtatcagaacataagaaaaagggaaaaacagaaaatgagcccaaataaaatataaaataaaatatagataccaggagcttcctcaaaatatgtgggttgtattaataacgtgtttggctctgttacgggcaccatccatcagaggactggaaatagggaaagtcaccttagtcttcctcaaggaaaaaagattatttaacttggttcacggtgtacattcataattttaactgtcatgtatttattgaatgaaaaacatttgagaacatcatgtgcaacaaaaacatgatttcacagaaattgtccaaactaaaagagtataaaaatagaagcgctttttatacaattatttacttattattattattgagatagggtctccatctgtcacccaggccggagtgcagtggcgcaatcatagagtagcctctaagtcctgggctcaagcgatcctcctgcctcagcctccagagtcgttgggatcacaggctcgagcctccacacccgactaacttttaaaaactttttgtagagatgaggcctcgctgtgtttcccagcctgatctcgaaatcctggcctcaatcgatcctccaaccatggcctcccaaagcgctgggattacaggcgcgagccatggtgcccggccgcttttacacaattgaataacattaaaataggtggcagaagacagacagaaagtcgattcgtggttgccaggcgtcgtgaataccggggaacgcggagtgcctattaatgggtaagggtttcgttttggaatcagacagcggcgatggctgcacaactttgtgaattttctaagaatcactgaactgtgcaccttaaaggaagaactgtgtggtaattacatcggcggtacgcgggcagcgcgtcaatcaagccggcgacggtgaatgcagttcgggagagctgatacccctcggggaggcggctccgggagcctgcggacgtggcggacgcctgggacggggtgggcctggcctccgcgctcgaggagtcccagtcctctccagatggaagaaagccggggcgcgaagccgccgcccgctcttctgcctggggacgcgactctgccgccaggctccctcgggtcagctcggcacccgcccgagcccccccagttccaggccctctcctcatcagacgtgccctgggccctcagcctgttcctctcgccgcccggaaccccgcagcagccccgggtccccagcccgcgcccctccggcgccgcctccgccagctgcccctgccccccgggccgccctcgcaggccgctcccggcgccccggtcggcttccgtacctgccttctccgcgccgccgtcccagtggccggaggtggggccgtcgccctgcgcactccggagggccatgccccggggccccgggcccccacccgagccccggctggtggcggagccgggagaagacgcggctccgaccgcgggacgtagcacccgctcggcatcggcaggctcccctccgtcggccagcggcgcgcaggcgcgcaggcgccccgctggccccgccccgcgccggcacgtgaccctgcgctacgcccggccggcggcgggggaggctgcggaaagagcgcggtgagcgctctgaggagttggcttcgtctgcgctgtagactctacggtgtagagtgtggcgctcttgagcgagtgtgctcgagaccagctgtcgtttcctttgcttctttcatctgtaaaatagtattgatgataataaaaatattgaactcacaaggttattgagagtgtttagaacatcaccaagcatatagtaaatactccacaattatgaccaatttttgcttaccaaggattatttttttacctcctgtctcgtctccccacacgaactcctgtcatcagttcttgggtacttggggatctagcaggttcatgtcatacgggtccgcaggttatgcactgcacaaggcctgggagcgccatttacgtagacgttcacgtgaaccgtgcccccttaagttgtgcgaaatagtggccactcatctaaagcagcgctctggcttatcaggtctgatttccttctcgtcttcagtgatattcctttctttccaattagacatccattcccttggttatatccctgatattgtgattgtggcctcccgaatttctagtgctaggtcttcatgctgaagttcccataattccagttgcttgatgactctcttccacctcccacccccaaccacaacagttctttattatcctgagacctccagcccatgaaactcctgacctcgtgatccgcccgcctcagcctctcaaagtgctgggattacaggcgtgagccaccgcgcacagccaagttttacagttctattcataaatctagtaaattatatcagttatttggtcccattaataaactaagctaattaaaatcctttgaacatttgaaactgcatttataaattcaattcgtttttctaagtatcacaggtttctaacaaagcctttcaagtccttgtgtaattcttgtaaatgtaatacatttataagaatactgagtcatgagtgctttcaaatgtgtcaatacaaacgagatttcatcttaaaatcaaaagtctaaatctattcaaatacatatttgtaattagtacaagaataatctgttagaattctcaaaattatcttttttttttttttgagacagagtctcactctatcacccagactggagtgcaatagcgatcatagctcactgcagcctcaagctcctgggctcaagctagcctcctgttgcagcctcccgagtagctgagactgtaggtacacactaccatgcctggctagtttttttagtttttatagagggggtggggaatctccctatgttgcccaggccggtctcaaactgccttcgcctcccaaagctctgggattacaggcgtgaatcacagtgccaagctcttgaaattatcttgaacattataggaatttaaagtatcacatttacacagatgccttaatgcaaaattattaatactagaagtttgaaaacatttctagtctttgttctaaatcatctgtgaggctcatgcctgtaatcccagcactttgggaggtgaagggctgcagatcacttgaggtcaggagttcaagaccagcctcaccaacatggtgaaaccccatctctactaaaaatacaaaaattagctgggcatggtggtgcctgcctgtaatcccagctacttgggaggctgaggcaggagaattgcttgaacctgggaggcagaggttgcagtgagccaagattgcgccactgcactccagcctaagagacggagtgagactccatctcaaaaaataaataaataaaatgaaataaatcatcattgaggttaaaagatgcttagtgcccactgaaggaagatttaagtcatcccagtttaagagtaacgtgctcaagcaatttgagatatttattcccttctcagtttactgcgctggtcatccagccagctggattcttgcttttggtagt

SEQ ID NO: 1562171 - DNA, 4001 bp, Homo sapiens
ccccaaacccccactgcagtcacacagccctggggtggctgcacaaatcacccaaagcccatgactcagccaccttcaccgccctgggctggcctggcagacacacagctggccctgccccaggagttcacagtctgggtgggaaagcacaggtcacgtttattgagccagccaggagctccaaatgacctgcggccagacccctccccaccccccaggaggcaggcagcatcctctaaagatgcttctgtgggagggtgcagaggttgccaaggtcatgacgctggaactggacccccactgacctggccccttcaaagtcctcacacacagcctcctccaaagtctcgctgtggccgcaagacaacagaggcccaggccgcagtgaacagagccggccagaggctccagcgcccagacactcccagaggaggcttgcccgacctcctggctcttatataagcacaccggctcttttcggagggtgtccacataactacccacaacccaagttgctgcgggctaagtcctggctaaagaagggagagaatttattagagaaacctggttcttgtggggtggggacagacagggaagaaaatgggcccacaggcaagacaggtatctggctggcctgtgaaggaggatgacaagggctgggaagaggcaggggaggcacggaagctccagaagaaaaggggatccaacctcagactccaaactgttgccggcgacaaatgctatgggagacggagggtgacaaacgctgtaagagacggagcgtgggagagggctgagttggggggcggggctcggcctgtgaggatgcccaggccgggatggaggaaggcaaggggctggcgcggcccgcagaggaggcccgaacaccccgggggctccgagaggcgggacagggccaaggaaggagtcgacgggccaggctgggggtctggagttaagggacagggaagggtgcggagcctgtgactgcgggcgagggaggggtctgagtccagagcgggtggctctcccgggacaaggtccaggcctgatcgcggcctctgccggggttgcgggagtgaacggcagggctggcccggggcaggggtctcggccacgggtgggggtctcccctgcgtcccggttagtctctgccggggaggggtctcgtcctgcccctcaggtcgtcttccggccctaacgggggtcggcgggctcgacggggtctcggcggggcggggttcccggggtcctggcggcccgcgcccctcaccgcgctcttcttggtcaccatcttgtccagcctccgggcgatccgcgcaatctcctcttccttgcccatcatcgcctcaggagcagcgacccccgcgcccgtcgcgcccgcctccgcagccgggcaggaccccggccccggccgtcgccacctcccacacccgccgcagccgacgcagccccgccgcggacgacagacccccggttcaaaccctcggccccgcggccgcgcgcggcatcctaggatgcgtagtccacgcgcccgcctgccgcgcccgccgcgcccgcgctctggaccacaactcccaggcgccacgcggcgcgcacagcctcctgggaagtgtagtcctgacccaccgtcgccagtgactcgtgatcccacaataccccgcgagggaggcgccccgggcacgcccctcccagagctcagacatcccggagcgaccgggccccaggaggcccaggaatctgctcccttctctcctcctgcttcgggccttgctgtcccgcggcgtccttcggtgggtggctcaggacccagtgccctcagcccttctcttgggccccgctgagccctgcgcgcgccccacttggcctagaaggccgtccccagcctcccagagcccagtttgggtcattcgggcttctgagtagagttacttcttcaagaggcccgcgcacactgggaggcctcttgtggggccctgcaggtgtgagcgcgcggtagctggacgtggcgtctggaaggggccattgctggggttcgcgaagtgcgggggcctctgccgaggctgcgtgggcaaggcccctgcctgcaaagtcagctaccagggagcagattctgggctctgcacgttgaccactgtgtctcagtctccccacctgtgaaactggagttaagtgtccgcctcacagggctcccgtcaagatgatgtcagctgattcacatcacatgcctgagaacagagaggggatggagcatgacaattagtgttcattgacattgttgttggaggtccctaggtagggccagactgcaggcagccagagagatggcccaggcctagggagggttgaggacggggacaggtgcagggccagcatccccaccactgcctggcagctccccagtaatgcagatgctgggtggtttcctggagagggcacaatcctgggggagggtgtggatcaaggagcctgtagtcattcaagttcaggccaacgaactatgaggccaggtggcaggtggaatgggctgagcatttcttgggctgtctgtggcactaatcacatataactgagcttccccgcagccaaaatgaaaaggaaaatatggtcagttaagagactcatcttagccgggcaatagtggctcatgcctgtaatcccagcgctttgggaggcccaggcgggtggatcacctgaggtcaggagttcgagaccagcctggccaatatggtgaaaccccgtctctacaaagaatacaaaaactagccaggtgtggtgccgggcacctgtaatctcagctacttgggaggctaaggcaggagaattgctggaacccggaaggcggaggttgcagtgagccaagatagcaccattgcactccagccctggccaacaacagcgagactccgtctcaaaagaaaaaaaaagagagagagagactcatcttggttgggcacagtagctcacccctgtaatcccaccactttgggaggctgaggtgggcggattatctgaggtcaggagttccagaccagcctggccaacatggtgaaaccctgtctctgctagaaatacaaaaattagaccgggcatggtggctcatgcctgtaatcccagcactttgggaggccaaggcagacggatcacgaggtcaggagatcgagaccatactggctaacacggtgaaaccccatctctactaaaaatacaaaaaattagccgggcgtggtggcggacgcctgtagtcccagctactccgcaggctgaggcagaagaatggcatgaacccaggaggcggagcttgcagtgagcggcgatcatgccactgcactccagcctgggcaacagagcaagactccatctcaaaaacaaacaacaacaaaaaaaaaattagccgggcgtggtggcacatgcctgtaatcccagctacttgtgaggctgaggcaggagaatcacttgaacccaggaggcggaggttgcagtgagcccagattgtgccactgcactccagcctgggtgacagagtgagactgtctccaaaaaaaaaaaaaaaaaaaaaaagactcaggctgggcgcggtggctcatgcttgtaatcctagcactttgggaggtggactgcctgagctcaggagtttgagaccagcctgggcaacagggtgaaaccccgtctctactaaaatacaaaaaaacaaaaaaaaattagccgggcatggcggcatgcgcctgtagtcccaactactcaggaggctgaggcaggagaatcgcttgaatccgggaggcggagctggcagtgagccgagatcatgccactgcactccagcctggcaacagagtgagactcgtcgcaaaaaaaaaaagctcaatcatagggaaaaagcatagaattccttgtgaggagcaaagcctttctaagacagaggccccgcgatattatattattattattattaatagatgaacacggtttccatactgactgattctgcccctcacagtgag

SEQ ID NO: 1562172 - DNA, 4001 bp, Homo sapiens
caagtagctgggattacaggcatgcgccaccacacccggctaatatgtttgtatttttagtagagacgaggttacatcatattggtgaggctagtctcaaactcctgacctcaggtgatccacccgcctcggcctcccaaagtgctgggattacaggtgtgagccaccgtgcccggcccatcatctcctttataccgacctctagcagaaaggtgtcgttcgttcagttatgaacgaggccatgaaccaaatctggtcagctgggcccgtggctgacccggcacagatgggaactgcctcgcacccccacactcgctgctgctgggactgcagaggctgttcagtgagtcacatcttgttcagcagattggtaaagaagcacttgggttttgatatcacactttaagaaaatatttgcataactgtgtgttggtagaactggctgcctttatgaccccgtgaattccaccttgtgctctgtgtaggaggggcctcaactaggactccaggaactgggactcggcccttgctgagcctgagtggaggtcccactctgggccctgtttcctcctccatgagatgccaggtggtcttctacgtcctggggccctgggcatggccacacaagacagagctcgtgaggagcctgacatgtctcagtgggtcccagtggaggcccacagaggctgcagacggggaggtcaagatgctgtggcgtcttaaggacaacggctggcaggtcggggatccctcaggaaggggtgtcagccgtgggcccagcctacggggctgcattagggcacgtggggagcctggtcggacaggtgtggatggggtcactggtggcctggttcatggcaggggcaggtgatggagagaaaggagcggacgggacaggcagggaagggggttagcagaagaggtcgggtgcctctgacctgcgggccgcagccactccgctatgacaggagccccgaaccctgacatgctctagtcctgcgtggaagcaactactgcaggcggagaggtgtaggcccatcctggtgatcagggaacctgcaatccggtgggatggtcccgcccccgggcagaggcaggtgactggccccagagcctgtgaggaacagtggcctctaggtggcaggagtgagccacggacgggtgggcctcacttcaccaccaccccacccccaagccccagggaggtccaggtggttcccagcaagagccacagctgccccccaggactgtgaagtggccgaggtgagaaggtggccagtcctagagagtggcctcgtttgtgagggctgtggcggcgaccaaccctgaaactccccagtgcccctggtcccgggtccctcaggagctctggacttctgggaccttgctcagagcattctcgccccccagcagacccctcctggagcttaccgacctccggacttcctcctccacggagcttccccagcaagctgctcagggccgccagacgctcccgggccctcagaatttgcacccagaggctgacagcatcagaaccatcgattctcctgtggggcctcgccgcagggtgctgctccagcccctactcccgccctcggcagctgaagaactttccctcccctgtgcgcaggcacacatgcacacgcacacacgcaggcgggagcctcgcacacacggggagccactgcggactggttggcgagtgtctgtctctcacccggcccagaggcaaggcctggatccctcagccgcgttagggctacggttaatgttcggtttcggttaaaccctgagaacaggcggaaatgcacgtagcctgaagggtggctcacagcggaggcagtgcccacggaggagagggacgttcactcacccgctccaggcgctggtcctgggagccacagccacatgacgtgcaggtggaggggagaggcctcctgactaggagctgccacagggtgaggagtgcctcactccccttcacggacccagcggccgcacgacaccaggctaggtctctgtggtcacctgcagccagcctcaccgggggccgagccccagcaaacaggagggttccatctcctcctccagggtgtcctccacactcgacgtctttatggacagggacatatggataggcctttaggaattctctgtgggcaacggggccctgtcctgagggctctaagggggagatgtgacccaccttggaggtctgagggggcagccctggccccaacaggcgtctggggagaaacccctggtccaccccacagggccagccgcacctttggcccaaaggcctgcccctcccccatcctgagtccaggaaacgtcggaaactcaggccatttatttttctatttgtgtcccctgccccctgcccgcccaaagccggccatgaccccagtggccgctatccatgcttcccctctggctgaggcagcgccgtggtgggaaggctcccgctgccaaactcacacggagccccccttgcttcctgcaaccacagagcgggggctggggatcctgcagccccaggagcccccaccccctgccaccccatgggcagccctcccacagcccaagcacctaggagccgtctctgcgcccctttccatcagaccctccagcccaccttgggggctctgccgagctgtgaccccagtggaccccacccaggcctcccttggatgcccccaccagcagggcagcgacggggcttaggtccagcaagtgctcccctgtcccatgcgccagcagaggagggcaggggatggggactgggcccactgctcctggctatgccactgcagcacccggctctctggacctcagtcgcccagtctgtagaatgggaagagccacctgcccagggcagcgtctctcggaaagtccccagcccagcccatagccttggcccagtcccagctccctcccacagaagcaacgctgggggaggcaagaggcatccccagaggccagtggcggccctggcggcctgctccaggcttgctctaacaatgcacttcccccacacaattcccagaaatgcagccctgccagcccgccagcctggcggccactccaccctccccttccccagaggccccaggcagccgtggggtcggggctatgggtgaagcctagagacctgactcacagggcagcaaaaccagggttccctgaggcggcacctcccaggggcccaggcctcccagagagagaccagggagactcctggggcagccagatggggtctgagagcaaaccttggccaggctcccgccgcggcagaagcagagccccctgccttctggcaggggactgcccgtccctcctgccccgcacagccccgtcttcacgtagcagctgagctgaggcagatcacactccactcagaacctcccaaggtcccacctcactcagaaaatgcaagaccctcccagagccaactcagccccttgttccctctgagcctcatcccctcctctctgcaccccctgctctgctcacaccagcagacttccctgccccagggccttggcacatgctcctccctctgtgaaaagactcctcccatgaacccccaagggcaaaagccacgtgtggccctgacacagcccctccctatacctgatgaacccccaagggcaaaagccatgtgtggccctgacacagcccccctccctacacctggcaccccaagttctggcttgtttgtggatttgtttttggttaggtttgttttgtttcgtttttgttttttgaaacagtcttcctctgtcgcccaggctggagtgcagtggtgcgatctcggctcactgcaacctccacctcccgggctcaagcaattcgtgtgccttagcctccctactacctgggattacaagcatgtgccaccacgcccagctaatttttgttttttgtttttgcttttgtctggaaacagagtctcactctgtcacccaggctggagtgcagtggtgcgatcttgg

SEQ ID NO: 1562173 - DNA, 4001 bp, Homo sapiens
ctggtggaagggtggggacctacaacctgcttctctggggttctcagagccaacagaaggcagctgttgggtagctaagggttgctaactggaatgaatgggtgaaaggcagtcagggagtatccctgagagccccttcaggccctcccatcccaggaagccttaaaggcccactcctggcttctcagcccagcctggggcactgacaggggcccacagctgggagcagcagggaccctggagagggcacaagcctgaggctaagaagaccgacgattcagggcaactgaggcagccaagtgttgagcaaccaggctggatatctgatgagccagacagagggtggtctcaggccaagatgcagaggcctccgcagaacagggtggagcaagggaccaacggcagctgtgagaaccaaacagcagggagtcaggggcctaactccaattccccatgcccttccacttggccaccaaaagtcagtactctctcagcctcagtttccccggatgtaaatggtagctgctggaatacaagttgttagacaggcttctttactgtaggaaaagcccaggccagaaaggcacacggtcgggggatgaagcaggttccttggagcctgggcaaggtttcagccaagaggccacctctgctgccacacagcccccgcccacccctaccagcctgatccactttcttgcccaggacacattgcaggagctgcacaccagctccctccagctgacccaagagtgccctctcccaacaccacgtccttttgggggctggggactctcagagggccccttcttcactcctactgctcatccgctgggtacctcaggctctcggttggcggtttgtggcctcctttcttctcagtctcctgctcttgggttagatcttaggacaggggacaattatttcaaggtgggggcaacacacaccgggcaagcccagggccagcgccccggcttcccagctgagtaaatgtgggcaggtgatcccatctctgatgctcagatcctcatcaggataaaatgggcagaaaaactacctgcctgaagggattcttgtgaaggcaaaaaagtggatgtggagcgcatcggcacagaggaagactccataaaagatgggtctttgttactcagtcctcatgccgtcttcccagcaggaaggaagttccagcacacctttcgttggaggggatatcccacactgagcagttaaatcagacccgaactctgggttttcccgcatccttctgtttgggggcctgggcattaagtcagtggttctgggcttggggtgccgcacccagcacgaattccacgtcgcttccccctggcctcgttggggacccctgcacctctccggttcccgcagaggcgctgccccccgcctaccccgacctggcggccgcagcgagggacgcagcacactcacccccttgcgctggttgctgaggcagaaggtgcagatggagcgcggctggcggccgccgtcggcggcggcggggacggcgcccttggcactgcccgcggcacggaagcacggctgcccgtcgtcggccgagtcgcccagcagcagcacgttggccaggtgcgcgatgtagctggacgccaggcgcacggtctcgatcttggacagcttgcggtccaccggctcggtggggatgagcgtgcgcagcgccgtgaaggccgtgttcacgctctgagtgcggtcccgctcccgcgcgttggccgcctgccgctgtcgcaccaccaccacggggcccgcgccgccgccgccgcccgcccgccgcccgcccccggggcccgggccgcgccgcgccgcctccgggccctcgcagcagccgaacgactggtccgacgcgtcgctctcgctgcggttctcctcgtcctcgctcagcagccgcacgtccgggtacagcacgtgcgcgccgacgggccgcagcagcgcgaacgccatgggcgccggccgcgtccctccgtgcgccgcgtcccagcgtcggccgcgccccgccgtgcgctcccgcgcgctcccacggccccgccggcccccgccttataggcgagggaggggccaatggcaaggccgccccggccgggggcggagggctccgcccggccaatggggaggcgtccgcccggccaatggggaggcgtccgccgcgccctggccaatggcgacgctcccaccgcctccgtcccccaggttgaaagcggcccgggagccggcggcccaccccgaaggcccccgttcccggctggctagcccggcagatgctggaggtctgggagggtcggccggggtgggcccagatccgaactttttgtctccagcctggaccacctgggagacgcgggcagatccctttctcctctctgggcctcagtttcctcgttcggaacgttcagattgcagagaaacagctagtgtctgcctgccctccaattctaatcctgtagttctgcagctttcacgtgcgtaagaactggggaaggggcttttgctattacagagtcccaaattgctcccattctgattgagcagttctggaacgggcccaggaacctacattttgtaacaagccattggtgatagtggtggtgtccgtggagaacacttggagaaaagctataatctttccaaatgaggattcgacagtgtcttgtccctgaagacaaacttaaaaagaagaagaaaaaaaaaagcaaaacaaaaccacaatacacaaacaccagtagttcgttcgttttttcaacaaatattcgttgggtccctactatgtgtcagacatggttttaggtctgaggatacagccattaacaaaataaattcttcaccctcacggaactgacgttttggttaaggaactactgtgtaccagactcggtgctatatactctattgcgcccagctgaggctgcaggatggcagccctgagttacaggtcagagagctccggccttcagtcgtacaggtgggagtggcggcgctagctccagcctgtccggtttcactacctcttggaatcctaccaccaccatcccatcacacacacacgggctatctttcctcaatgcctgcttgccttctagaaaccttagattgttcagcctgacgtgtcctcttcagagaattgctgagccaaaggtggttgccggggtctcgatctcactcgtgcctgctgctcagctctctccaggcactagctaaaccagcatccacttggccttgaaaataagcccgagtggcagccggtgtagcagacagagcgcagggagtggagttgaaaggcttctaggtgcattttggctcctctgggcgtctgttttcctgacgatgcctgcagctctgccatgctgtgctttcctggcttccctgatccaggccagaattaggggaagaagagggagcgagggatttcccatgactgccgggggaggagccccttaggacccagggtctgcgggagagtctgttcccacacctggatccccccaccgccagcatttgaccgtgaccccagccaggctgggctttggggaggagggaaacagccagcatgggccccctccccgcagggctggtcccacacacagccccagaccaggctgctgcttcctgagccgatgaattattaccgggagatttccttccctgtctgcgcctcctcacaggggctcccagctcacttcactttcgctttctcccccttctccccctcctctctgcttctgaccctcaggcagcttgaaattcctctgtccagccccctcccaattccacctccaactggagatgccaaccaaggcgtgaactgggcccggaaggcgaagaggggcttgccttgtaggctcattcatttatttgctccttaggcatattttgacacttgggaccctgggagtagaagaaaaccatgaatgagactgagacaggccttctgcagccgagaggggaaggcgagctgtaaacaaaggatttcaagacaa

SEQ ID NO: 1562174 - DNA, 4001 bp, Homo sapiens
agactggagtgcagggtcgcgatgtcagcccaccacaacctccacctcccaggctcaagcgattctcccgcctcagcctcctgagcagctgggattacaggtgtccgccactaccacctggttaattttcgtacggggtttcaccatgttggccaggctagtcttgaactcctgaactcaaatgacccacccacctcggcctcccaaagtgctgggattacaggtgtcggccttggcgcccggcttaaaaggttattaagctcactgaagggaaaaaaaagtacttgggacctaaccaaaataagttaaaatttacccatttaatacaaaagagcaaagcttcacaaatcatgttccctacctgtgtctgtgaaagattagaatttccactagtagagcaagcatttgtagtaaacagtgggtatgtaaattgcaaagcagtagttgtagccgcagttttatttttcactaatgctgtacatttgttttgttgctgaagaggaacattcattagttcagatggatgtcgaatgagagttaccaaactgccaagacaaaagaaagcccagaagtgtcagcaatacgtggcagacaagcatccaccatcccactcccatggctctggctagtttttccagacagcaacccaactctcatcctggaaatctctacacaacaattagcaactatcgctgctgtggaagtcctcctcttcctatggaggaaaagcaaaactgcgccacctccctgctctcatcacatcctgacaccaatctcacttttgccatcctccagtgtgaccacgatgggcaactacaggctgggatgagcagaaaactgcggacgcagccccttccacagccatccctgagggtcgccaagggggcggctgcaggctggagcctcattttagagctcaaagcctgcaaacccccgtcgggccttcctaggcttccctgacatccaagagtgccacccggagcacatggttcccaggaattctgcgcgctcggccccactccaggcggggccactgagggagggggtgtttagtttctggaagtacctgctccccggggcccgcacagcgcacacagcctttcggggcggccccagacccggtgaggtccgcgccctgtgccgccgggagggcaggctgggggcgtgcacagcgagggccccctttgcctccgccccggccccggccccggcctcggcctccacccgggccccgccagcccccggccgccgggcacgcacttgttgagcgccccgcccggctcggggggctcggggccgcgcggcgcgggcggcggctcggcggggatgctgttgaagcggtcctccaggcggacgcgcacggccggcttggcccgggcctcgggcgcgccgtcgggtccagccgcagccgcagccgcgcccgcgccctccttggcggcgccgtcggcccgggccctcgctccgtccccgccgcccgacgtcttctccgccgcgcccgcctcgcttagcagcatcatgcgcagctcctggaagtcgatgtggcccaggcagggcgcgtcggccgccagcgcggacgggcacagcacggggtacacgggcgccgcgcccccctgaccgcccgccgcgaagccgcccgcgcctgcgcccgggcccgccgccgccagcagcgccgagttgaggcgcgtctcgagctcgccgtcagccgccgcctccatgtgcgagcagaggatgtgctgcagctgcgtgtactccacctccgtcatctccaccaggctcaggtcggtggtcgtgaagctcagccccggctcgcccagcgccgcgtccccgccgcccgcgccctcgacggccgcctcgccgcctgccgcgcctgcctccggcggcggctcccgcggtccggggcccgacatggcggcgcggcgcggcccaacggcggcgagggcgacgcgggcggcgggcggcgggaggcgggaggcgggaggcgggaggcgacccccggcccgagcactactctgcgccggccacagccggcgcgccgttgggggagggaaaaccgctgagtgccgcgcacagcgcctgcgccgccccgccccgcaacggcaaccccacccctgcgccagccccgccccctccgttacccgccgccgccggccccgcccccgcccaaccgcccgcacgcccggccccgccccacgtcggcggatgcttgcgcggagggcccgcccccacggcccagccacgcccccacagctaggccacgcccccagctcaggccacgcccggttcccagccacgcccctgctgcccggccactccccgctgaggcccggcgagggcggctgcgctggaatcagcgtgatacctacgcggtgacaccctggggagaagccacgtccgtgcgtgcacgtgcgccccattacagcggcaggaatgaagacgttgtcaaaacagctccctggacccacagtccacagtgcccaggccatccgcttcatccgcgtaaaatgcgcagcgcatggccgggttctgtggctcatgcctgtaatcccagtactttgggaggccgaggcaggtggatcaggaggtcaggagatcgagaccagcctggccaacatggtgaaaccccgtctctactaaaaatacaaaaattagctggacgtggtagtgcgtgcctgtaatcccagctactcgggaggctgaggcaggagaatcgcttgaacccgggaggcggaggttgcagtgagtcgagatcttgccactgcactccagcctgggcaacagagccagacttcatctcaaaaaaaaaaaaaaaatgcacagcgcgacggtggtggtacattcccagcgctgggcccgcctccaccgctgcattcaccaccggtctcctgtagcagtcagcacactgcccctcccccgcctgcagccactaatcttctgtgtccaggagtttgcctaggctgggccttccctgttaagggaactatgcaatatgtggtctttaagagacttatttttgcaatcttgaaataattcctgtacttaacctctcacccacattcccatctcactcagtggttgtctgttctctgtctaggcattaggacacttaaaggcctgtgacttgcacatcgtcttctaagccgggtctgaatctttcgctcatttcatcacagtttagacacagaccaatatattacaatgattcaacgatgggctatgaaagctcagccatgcaaatctaaactcacacatgtatacatgaaaataatatatcagttttgggcaaaacatcaggtttcagaaaacactaccaaggaggaaagcaaggacttaaaactctcaaggacatggcaacagaagtcgtctaacgtaaaacagagagggaaggctaagagagtgagcagagcatcagtgagctgtggggccgcttcaagcagtgtgatttgaagtcccctgggggtggaaggatggggagaaagacattttaagaagtaatgattgccaggtgaggtggctcacgcctgtaatcccagcactttgggaggccgaggcgggcagatcccttgaggtcaggagttcgagatcagcttggccaacatgatgaaatctcgtgtctactaaaaatataaaaaattagccaggtgtggtggcatgtgcctgtaatcccagctactcaggaagctgaggcagaagaatcgctggaacccgggaggtggaggtttcagtgagtagagattgcaccactgcactccagcctgggagacagagcaagacgctgtctcaaaaaacaaaaacaaaacaacaaaaaaaaataatgattgaaaagtttttttaaaactacaaacctacagacccaagaagtttaacatacctcaaactcaagaaacatgaaggaaactacaccaagatggaaagcaaattgctttatttatttatttttttattttttgagatggagtcttgctctgtctcccaggctggagtgcaatggcacgatcttgact

SEQ ID NO: 1562175 - DNA, 4001 bp, Homo sapiens
gtgtgggagaggggtggcgcggggctgtagaggtgctgcccggcggaggagaggtgggggacccgcggattcccattgctgctcccgtcgtggcgatcctggagggaaaaaaaaaaacaggagaccccgttagtgcgaaaccccgctactgcgaactggccggcatcgccgggctacgcagagggccccgggggaccaaccgcaccccgcccggcggggcttgcccagggtcggaaggtacccgggggcaatgcgccccgaggatttcgttgtaagcaaagagtgcggggagggaggagagtctggtgaaagacctgggggaacgagttctcaaagcccggcggcgaaggtctaggcgctgctcccaagcccgaggcgcttggaggcgccaagtccgaaccctgggtcttgggccagaaaagtccgtggccggagcccggggcgaaggagccagagcccggggcgaaggagccggacgcccggtgcagagctatctcgtggagcccgcccatgacgcagggactgctggaggtggcagcgcggcaggcgcggatagagtgcgcggcgcgggaaatgcgcacctcccccgcccccgggaccctcccttccacgccctcgggacaaagacctccgagcgggcggcgctcggaaagcagggcccgccaccctgcgccgccctgggaagtgaagagggagcgcgcgcacagggcggccctccctgctggccgggcccagccgaggggagtaataagtgggggcgccctgcactgccaagggcagtgttctcgcacgtcggggcgcagagggggcatgaagaaccctggaaattgggcagccttgcccgcgcacgttccctcgcccctgggcggcccgactcagtttctaaaggatgcgtccccatctgcccaggggtctcggggcgccgggaacctggaggaacatggcgctgtcgcctcctggcggaagcgcccgggcctgcgggcaggggcagccctccagggcccggaggcgcagtgaactcccgcgagtccgtagcccgagctccgcgctcccggcgcccctgagctcgcctagcgctgcctgcgtcttcttcctcttcccgctcgccgcctccttcttccctcccactctccgaaactctagctcaacctgtccgacaggctggagcactcgcgagctcttacggccccatctggcctcgggcacccccaccaccactccccagcccccacttcttttgaaagccaaacttcggttgttttcgtgcttccccgaggaggtagcggggcaggtgacaagccggccttggaggagtgtccgccaaggtgtcgctagcaggtagcctcatctgacccctttggacagagacttcgtgcgtaaaagccacgtctgagggttgcagacggggcacttttccgagaaaacgggaagcagggctgtttgccgcttaggaaagcgcccggtaagctgtgtgggtgggatttgccattctctttccaggcctcgttcccgaggggaggctatttaggaaaaggccctatacaggaaaggggccccgcagaaatggactaaggggtgtccggagaagtggatcccgtcccaccgagaggccagggctcctatgccctcgtccccgacctcggtccagtggcccctgcctcccggactgtcctcggcggggcggggctgcaccccggagccccagctcacctcgcagtcctcttcgtacttgacattatcggttattttccacaacatggcgtccggcgtcccccaaaacagtcgccagttaaatccaggatccccccagcccccaagcggtaaatccaaaatcggggtcacggtgaccaggcgtctgccgccgcccccgccgcgcgcgggccttgctgtccgggtcactggacacgcatcggcggctctgcgagcgtagatgctgccgccgcgagtgtcaagaccgctccgcggacggggaaagccgcgcccgaacagtgtgtcctggcgatagccgggggacccgagcgccttaatgagaaggaaattatcataactcctccccgggggccggcgcggaggcccaggcgccgggcggggcggcccccagccagtcccagcctagctccgccccgcacccgggcctggcgcagcgccgagccccacgctgtgagggacgaagcgcggagtcagtgggcggtgcctcgttgacagccgaagacctgcgaggcctgggtcccccgacgcgccttccttctgtcacctccaccgtaaacacacctgagattggcagagctgggggaagggatccaaatactgaaacccacccctctttcgcctaaacggccttcactcgttcctccaaaagacggatgtcacctggagttaagaaactgcgcatttggggagcgactcaacaaccggggtctcctcatctcctaaaaacacatcccatcccacctacaccccactgaggcttaaggtctgagctgggatcatgcagctggagccccagtgcgccagagacgcccagttccctccgtgggcacagcgcggtcccggcccccgggcgggaggagagaggaagggactcctggggagtctgccccaagggccgcagaggcagcagacggtcctacccgcccaggagttgcggacagcggcgtctcgccgctgtcgcccgaagtggcatctcccgcggctggctgaggccagggggaacccgcgcgcactggaccagcccagcggcccggccctgccctgccctgcggaacgccggctctgcagctgcctctggcgggccggtcactcagaagcctctactcgccctgggaaagaagcgccgggcaggaataaaacccgagcgccacgggtaaggtgagggtgaggaggtgcaggaagttgggagagagcctgcagagagctctcgactggagaggtagacacccaggtcccacatgtttagacagaaaacgaaacttccttccacacaaacgctgcttccctctccccttcggtacttgccacccaaacttgaaagcaaagtgcaatactaatttttaaaatttaaactaacgaaattctttggcccagttattatgcagcaattgactttcattgtaaggggaacatcgctaattctcgagggcgtatttgttgggacgccccaactggctccctgggctggatttaaacattctgtggggattagaggacaagactatttctatttgatactgaatacgattttgcaataatcaatgcctatcagtacggtgtccgcacctgcagtagacatgactctcccatccacggaatggcggcatccactgcctcgctgttccttctcgggttcgtttgaactttagcatttatttagacccaggtgggcctaaaagaaaataataataataggcgtcctccaagggaaactttcccccggccttagacagcagccaaatcccaggtgattttccgaccggacgcgggaacaaaatctggaagttgaaaccactgagacttttcggccaagcatatctgcagggctttgcactaaggagaacagtgcataaaaagacacacaggaccctgacacttcggtcccaaaacaggcttctgggggtaaaataagttaccgcagaagcagcgctcctggtattagcggcgggggagggggacacctgccagaagcagaaattagacccaggcccgcaggcactccagagcacaggtccaggaagatgggtcctagactcgccagaggtgcggcgcctctttcgggcgcctgggactccctgacgggtgccgctgggctgtccgacattctgggccttctagccctcggttttattctctgacccggcctgaggtgcagcttgaacaagctgtcttgtctgtgctggcaagtttacctcctgcacgctggggcccggaatgggcaagaaggtgctcatcccccatcccaggccctggctctcctttcccacagcaacactagccaaagctgcccg

SEQ ID NO: 1562176 - DNA, 4001 bp, Homo sapiens
gcagccctggccggctgtgagaagtactcaaggttatctgtacaaattccaccctggctgccagccaagtctgtctgcagggttccccgggtgggccctggggaatgacccctcagtctacacaaacttctccacctcggtgttccgccacacagggccatctgtagtctgggaggcttcccacatatgcaccccacaccgcacccagacacactcacgccaggcaattaaccaacagcgctaggataactggcccggacccatcgctcaagccttacaaaccctagggttttcaccgacgcatacagcacgcacacgcacagcttacagaccccaggcctagcacgaacaactgtgacccacacaactagcccaacttctgtacccgcccacccacgaactccaaccgacccggccacccccgatctctccgacagggaaaactccaggcgtcatcacactaacaatcagttctaccctcagtgacctgtggcagcaacccctcgacacaacatcccgtacaccctcctacagactcccacgacgccacctgcagccactcccgcacgaactttctgacaactcccctagctggtcccgacactcccccgggccgcgcactcacgcccgcattcccagcagttcagacaaagcgcgcaacctcccccgcggcccagaccgagtcggagcacatggctcctgggtcggcgaggaatcgtccggcgctcggggcgcttgcaccccacagtccccacaccccgggccgactccgcgcaccagctcccgcgcgggcccgccatcccggtgggacgggggctctggaagaaagaaaactcacgtgtctgtcccggggcaggaaaaagtttggttcccacccctactccggcagttcggggctggccgactcttcggggcgcggggacggcggagcgtgcgcgctcggctttgtgctccgaactgggcccggagggggaggggaggggaagggaggggagggggctgggctcccacctccgcgccgcccccccccccccagccctgcgcccagactccatgttggccgccccctgccccggagactacgcgcttctcccgcgggaggcttggatcaccttcggcctgcccgagggtcccggcgcgaacaaactttctccggggcgccggccccacgcgccccgcttccttggccagcctgggagtgacagatgcctcggagacagactttcctttgttccaaaggaaaggggaactcgcgcgggctccccagggcccccccgctccgggcccttcccgcggcccccacccccagctgtcactctcggccgccccctgtccggctcggcggcgggggggccctgctggcggttagcaacgtgcacttttgaaaccaaacaaatccgtccccccgcgcgctcactcaggtccggtgcaggatcggccctctcctggggtgggatcctatgaagctgggccccccaccagggccccaagcgggcttcctcccgggggctggaacagtcccccaccggcccccggagcgcagcgccgtcgggactcacaaacaccccccgggggccgtcgggactcacaaacacccccgagctcacacaccccctaccgcacgcgccaggacgacgccccctccccgtccggccgagaaaaagaaactttccaagttgtccgcgcgcccccacccccatctggccctctgctgctccctgcactgacttttcccagcggctttcgggtccacgcggcctccggctcggcgcggggcgtcccggcggggagcggggggcgccgggggcgcgcgccgcgtacctgcccggcctgacactcggcctgacagctcgcggctggaaagcacctcgcggcctgacgtcagatcccctctcctccccccgcgccctctgcgccctcccccacccgcccggagggagaaaacaaactttgtgcggagcgcgacgagctgcgcccaccccccgcggggcgggccgtcggcgccgaggggcttcgccccgcccagcgcgcccggagggggcggggccgcgggcaccttcttcctgcgcccaccccgccctcaggaatgctgcatggcctacccatagcggcggtgggagcctccgccggggagagcccgctcgggggcaggaagtggcccggccctcctcgtggagggcgtttccggagcgcctactgtgctccttgccggggtgggggtcgttaccgagtgggaacttctgcaaatcctgacttttgtcacttcgcgccccgcacaagatgtcctgccggcggtgcgattggtcccgttgcttcgaggggaaactgaggccacttagtccgggcacttacccgcagctagttaaggactaggctctgatggagacgcttgttacgacctcaatggcctgtagaatctgggaggccgcctccgacctaagcccaaaaagcacatgatcgggctcacagggggcggccagaggtgaaaacagccaacgctttacaacgacgctgtgcggggcacttcgtgtgtgtcatcccgtctcatcctcgggtgatagggtatgtgttgtcctatgtaagtctctggcttactcatgagccgcagagaggttcttgatttgcttttgtcacacagtcaaccggtatcattcagcccaggtcggtcgatagtgaagcctgatcccttaccccttgtgcccggccttaaacgatcagtccaggagctcccggagttcctgtctggtttctttttcctcttctgccagttacaccctactccagaaggttttccttggcctcccccaccccagtcagtacattcttccctgctctctgctgtgggtaccacatactgtgatatttctgttaaccagcctcttagggcatccccccacgccccccagccctgtacccggacacggctaggtccagatatctagggcccttgagcttggaaatcgctttgaaaacagcttttggacttaattaccctttagcaatggagaactctaggaacaaaactcttaattttttccaaacaagccttaagccaatcagaatgctgattaaagattgttaaggtttcacctggacaccccatagaagccagacttcctgcaaatgttaaaaacctcctcacggcagcgggtgaaatgtcagtggcactgcctgttgctctccatttcacagacagggaaaataaggcccagagtgtgggtcagaaacaatttttttggccggggaagtggtgctccccccacggccctgtgaaagaaaaagccacgtctgggttgccttaggtaagaaatgtaaaaccaatgggccttggcctctaggaaatgtatgggacagggaccttcagaagaggggagccccagggggaaatgggtgcgaccaggtgagcctggagagggggctctggtagtggctgctgagcttgaactccgcactaggcgtttttctcctgtatgcgtaagagccacattctgccctttctggggaagccactgggggcctgggctagaggaagagaccgcaccgtaaattgtgcctgcagcagccccttagacgagtgtttcccaagtctggtgctagatgtggttgggaaaatggaagcgggggagtgctgcctcctcctccacctgagagctgcataacaaagacctggagcccctcctctctcctggaggacggggtagtggtggagggaggctggtagccggtcagattttgcacgtaagcaagcttcacagataaagcctaagtgcaattagagtttgagaattaccgtgtcaagtttctgaactagtaagtatcagaatttaaaatgtgtagattctctaagacagtaattccacttctaggaatctgtcttttgaagtagctgtacaacaaagataaatgcttatagaagattgttctttgcagaactgttcattcgggaaaattgcaaacaactaaatacccctcaccaggagctggcccattatagcaactct

SEQ ID NO: 1562177 - DNA, 4001 bp, Homo sapiens
atttggaccaggcctctccccaccccctcttgtgagctgtatactgtcttgcctcctaggtctcccaagggccagtgagaactctggaaactacagatcaccatgatcctgcagcagtccaagtaatatttaaggagcacctactgtgtaccttgcagtgagagaggtgagtcatctctctactggttgcttcttggacattctcctttgtcaggcccctttagcctggtcctagactcaaccactcaaaatccaggtgaatgagcaaggcccaccctccacttggcactgtaacttggacaaggatcctcccctttctgggcttgagtcccctcttcacctgtcaaatgaaggaaggattttccctagataacccaactcagctgctcagtccctggacaaagttctgtttcacacgtgcaacaaagattttctttctttctttctttctttttttttttttgagatggagtctcgctctgtagcctaggctggagtgcagtggcgcaatcttggctcactgcaatctccatctcccaggttcaagcaattctcctgcctcagcctcccgaacagctgggattacaggtgtgtgccaccacatctagctatttttttttttttagtagagacagggttttgccatgttggccaggctagtcttgaactcctgacctcaggtgatctgcccgcctcggcctcccaaagatctgggattacaggtgtgagccaccccgcccagccagattttcattttaaaagcaaaagttctaggccaggctgatgccaggatctcaaggctcctcccttctcagccttttaacagctccccagcaggccggccaacagactctggcatctcccaggttttgtttcctcttcttggacccgagcccagatctctgggctggctaggccaggctttcgagggaagggtctaccctttcagtcaggccacctggaggtgagacaggcactggttagacgtgccactcctcagagagcaccactgcaggctgctttctgaggtcagacagccatttctaggtggccagggcagctgggatctgggctcagtgatgcagccctggccggctgtgagaagtactcaaggttatctgtacaaattccaccctggctgccagccaagtctgtctgcagggttccccgggtgggccctggggaatgacccctcagtctacacaaacttctccacctcggtgttccgccacacagggccatctgtagtctgggaggcttcccacatatgcaccccacaccgcacccagacacactcacgccaggcaattaaccaacagcgctaggataactggcccggacccatcgctcaagccttacaaaccctagggttttcaccgacgcatacagcacgcacacgcacagcttacagaccccaggcctagcacgaacaactgtgacccacacaactagcccaacttctgtacccgcccacccacgaactccaaccgacccggccacccccgatctctccgacagggaaaactccaggcgtcatcacactaacaatcagttctaccctcagtgacctgtggcagcaacccctcgacacaacatcccgtacaccctcctacagactcccacgacgccacctgcagccactcccgcacgaactttctgacaactcccctagctggtcccgacactcccccgggccgcgcactcacgcccgcattcccagcagttcagacaaagcgcgcaacctcccccgcggcccagaccgagtcggagcacatggctcctgggtcggcgaggaatcgtccggcgctcggggcgcttgcaccccacagtccccacaccccgggccgactccgcgcaccagctcccgcgcgggcccgccatcccggtgggacgggggctctggaagaaagaaaactcacgtgtctgtcccggggcaggaaaaagtttggttcccacccctactccggcagttcggggctggccgactcttcggggcgcggggacggcggagcgtgcgcgctcggctttgtgctccgaactgggcccggagggggaggggaggggaagggaggggagggggctgggctcccacctccgcgccgcccccccccccccagccctgcgcccagactccatgttggccgccccctgccccggagactacgcgcttctcccgcgggaggcttggatcaccttcggcctgcccgagggtcccggcgcgaacaaactttctccggggcgccggccccacgcgccccgcttccttggccagcctgggagtgacagatgcctcggagacagactttcctttgttccaaaggaaaggggaactcgcgcgggctccccagggcccccccgctccgggcccttcccgcggcccccacccccagctgtcactctcggccgccccctgtccggctcggcggcgggggggccctgctggcggttagcaacgtgcacttttgaaaccaaacaaatccgtccccccgcgcgctcactcaggtccggtgcaggatcggccctctcctggggtgggatcctatgaagctgggccccccaccagggccccaagcgggcttcctcccgggggctggaacagtcccccaccggcccccggagcgcagcgccgtcgggactcacaaacaccccccgggggccgtcgggactcacaaacacccccgagctcacacaccccctaccgcacgcgccaggacgacgccccctccccgtccggccgagaaaaagaaactttccaagttgtccgcgcgcccccacccccatctggccctctgctgctccctgcactgacttttcccagcggctttcgggtccacgcggcctccggctcggcgcggggcgtcccggcggggagcggggggcgccgggggcgcgcgccgcgtacctgcccggcctgacactcggcctgacagctcgcggctggaaagcacctcgcggcctgacgtcagatcccctctcctccccccgcgccctctgcgccctcccccacccgcccggagggagaaaacaaactttgtgcggagcgcgacgagctgcgcccaccccccgcggggcgggccgtcggcgccgaggggcttcgccccgcccagcgcgcccggagggggcggggccgcgggcaccttcttcctgcgcccaccccgccctcaggaatgctgcatggcctacccatagcggcggtgggagcctccgccggggagagcccgctcgggggcaggaagtggcccggccctcctcgtggagggcgtttccggagcgcctactgtgctccttgccggggtgggggtcgttaccgagtgggaacttctgcaaatcctgacttttgtcacttcgcgccccgcacaagatgtcctgccggcggtgcgattggtcccgttgcttcgaggggaaactgaggccacttagtccgggcacttacccgcagctagttaaggactaggctctgatggagacgcttgttacgacctcaatggcctgtagaatctgggaggccgcctccgacctaagcccaaaaagcacatgatcgggctcacagggggcggccagaggtgaaaacagccaacgctttacaacgacgctgtgcggggcacttcgtgtgtgtcatcccgtctcatcctcgggtgatagggtatgtgttgtcctatgtaagtctctggcttactcatgagccgcagagaggttcttgatttgcttttgtcacacagtcaaccggtatcattcagcccaggtcggtcgatagtgaagcctgatcccttaccccttgtgcccggccttaaacgatcagtccaggagctcccggagttcctgtctggtttctttttcctcttctgccagttacaccctactccagaaggttttccttggcctcccccaccccagtcagtacattcttccctgctctctgctgtgggtaccacatactgtgatatttctgttaaccagcctcttagggcatccccccacgccccccagccctgtacccggac

SEQ ID NO: 1562178 - DNA, 4001 bp, Homo sapiens
agtcaggccacctggaggtgagacaggcactggttagacgtgccactcctcagagagcaccactgcaggctgctttctgaggtcagacagccatttctaggtggccagggcagctgggatctgggctcagtgatgcagccctggccggctgtgagaagtactcaaggttatctgtacaaattccaccctggctgccagccaagtctgtctgcagggttccccgggtgggccctggggaatgacccctcagtctacacaaacttctccacctcggtgttccgccacacagggccatctgtagtctgggaggcttcccacatatgcaccccacaccgcacccagacacactcacgccaggcaattaaccaacagcgctaggataactggcccggacccatcgctcaagccttacaaaccctagggttttcaccgacgcatacagcacgcacacgcacagcttacagaccccaggcctagcacgaacaactgtgacccacacaactagcccaacttctgtacccgcccacccacgaactccaaccgacccggccacccccgatctctccgacagggaaaactccaggcgtcatcacactaacaatcagttctaccctcagtgacctgtggcagcaacccctcgacacaacatcccgtacaccctcctacagactcccacgacgccacctgcagccactcccgcacgaactttctgacaactcccctagctggtcccgacactcccccgggccgcgcactcacgcccgcattcccagcagttcagacaaagcgcgcaacctcccccgcggcccagaccgagtcggagcacatggctcctgggtcggcgaggaatcgtccggcgctcggggcgcttgcaccccacagtccccacaccccgggccgactccgcgcaccagctcccgcgcgggcccgccatcccggtgggacgggggctctggaagaaagaaaactcacgtgtctgtcccggggcaggaaaaagtttggttcccacccctactccggcagttcggggctggccgactcttcggggcgcggggacggcggagcgtgcgcgctcggctttgtgctccgaactgggcccggagggggaggggaggggaagggaggggagggggctgggctcccacctccgcgccgcccccccccccccagccctgcgcccagactccatgttggccgccccctgccccggagactacgcgcttctcccgcgggaggcttggatcaccttcggcctgcccgagggtcccggcgcgaacaaactttctccggggcgccggccccacgcgccccgcttccttggccagcctgggagtgacagatgcctcggagacagactttcctttgttccaaaggaaaggggaactcgcgcgggctccccagggcccccccgctccgggcccttcccgcggcccccacccccagctgtcactctcggccgccccctgtccggctcggcggcgggggggccctgctggcggttagcaacgtgcacttttgaaaccaaacaaatccgtccccccgcgcgctcactcaggtccggtgcaggatcggccctctcctggggtgggatcctatgaagctgggccccccaccagggccccaagcgggcttcctcccgggggctggaacagtcccccaccggcccccggagcgcagcgccgtcgggactcacaaacaccccccgggggccgtcgggactcacaaacacccccgagctcacacaccccctaccgcacgcgccaggacgacgccccctccccgtccggccgagaaaaagaaactttccaagttgtccgcgcgcccccacccccatctggccctctgctgctccctgcactgacttttcccagcggctttcgggtccacgcggcctccggctcggcgcggggcgtcccggcggggagcggggggcgccgggggcgcgcgccgcgtacctgcccggcctgacactcggcctgacagctcgcggctggaaagcacctcgcggcctgacgtcagatcccctctcctccccccgcgccctctgcgccctcccccacccgcccggagggagaaaacaaactttgtgcggagcgcgacgagctgcgcccaccccccgcggggcgggccgtcggcgccgaggggcttcgccccgcccagcgcgcccggagggggcggggccgcgggcaccttcttcctgcgcccaccccgccctcaggaatgctgcatggcctacccatagcggcggtgggagcctccgccggggagagcccgctcgggggcaggaagtggcccggccctcctcgtggagggcgtttccggagcgcctactgtgctccttgccggggtgggggtcgttaccgagtgggaacttctgcaaatcctgacttttgtcacttcgcgccccgcacaagatgtcctgccggcggtgcgattggtcccgttgcttcgaggggaaactgaggccacttagtccgggcacttacccgcagctagttaaggactaggctctgatggagacgcttgttacgacctcaatggcctgtagaatctgggaggccgcctccgacctaagcccaaaaagcacatgatcgggctcacagggggcggccagaggtgaaaacagccaacgctttacaacgacgctgtgcggggcacttcgtgtgtgtcatcccgtctcatcctcgggtgatagggtatgtgttgtcctatgtaagtctctggcttactcatgagccgcagagaggttcttgatttgcttttgtcacacagtcaaccggtatcattcagcccaggtcggtcgatagtgaagcctgatcccttaccccttgtgcccggccttaaacgatcagtccaggagctcccggagttcctgtctggtttctttttcctcttctgccagttacaccctactccagaaggttttccttggcctcccccaccccagtcagtacattcttccctgctctctgctgtgggtaccacatactgtgatatttctgttaaccagcctcttagggcatccccccacgccccccagccctgtacccggacacggctaggtccagatatctagggcccttgagcttggaaatcgctttgaaaacagcttttggacttaattaccctttagcaatggagaactctaggaacaaaactcttaattttttccaaacaagccttaagccaatcagaatgctgattaaagattgttaaggtttcacctggacaccccatagaagccagacttcctgcaaatgttaaaaacctcctcacggcagcgggtgaaatgtcagtggcactgcctgttgctctccatttcacagacagggaaaataaggcccagagtgtgggtcagaaacaatttttttggccggggaagtggtgctccccccacggccctgtgaaagaaaaagccacgtctgggttgccttaggtaagaaatgtaaaaccaatgggccttggcctctaggaaatgtatgggacagggaccttcagaagaggggagccccagggggaaatgggtgcgaccaggtgagcctggagagggggctctggtagtggctgctgagcttgaactccgcactaggcgtttttctcctgtatgcgtaagagccacattctgccctttctggggaagccactgggggcctgggctagaggaagagaccgcaccgtaaattgtgcctgcagcagccccttagacgagtgtttcccaagtctggtgctagatgtggttgggaaaatggaagcgggggagtgctgcctcctcctccacctgagagctgcataacaaagacctggagcccctcctctctcctggaggacggggtagtggtggagggaggctggtagccggtcagattttgcacgtaagcaagcttcacagataaagcctaagtgcaattagagtttgagaattaccgtgtcaagtttctgaactagtaagtatcagaatttaaaatgtgtagattctctaagacagtaattccacttctagg

SEQ ID NO: 1562179 - DNA, 4001 bp, Homo sapiens; identical to SEQ ID NO: 1562177

SEQ ID NO: 1562180 - DNA, 4001 bp, Homo sapiens
ccaggggcaggaatttgttcaaagtcacgccgcaagttggtccttgcagtgggagagcccaggtctcctgctcaccatcgactattccaaaaatgagatgcaaagtgccttgtatgtgaattatctcgacttaaatcccaaaacaactccgcttacatagatgctatcatgattcccattttgtagacaaagacaccaggtggctccaggtcccagagcaagtggctgctttgggattggaatccagagctgtaggattctgtaggattctgccctgggaaccacctcactacagctcagttttttctccagcccctcttatgaccaccccttcgccaccatgtcctgtgttgttctcaaacctgggggcagatagttctgcgccactgaagtatcagggatgtcggtccccgtgtaatcacaacagaagagacctcagtggccagaaggaaaaacttcctgctggcctattgcggcgaggaaatgtttttggaaacttcagacccagggagcttgagcaggaaagaggccattgttgttcccatggaagaccctggagatacggccagtccctgggctgtgggagctggggcattttctccatctgttgtccgaagaagggtttccagaaatcacgcccagctccaaagatgcaggtctagaattgtaggatttataggatttctgcacttagaaagggcctaggccttctaggccagtgagacctctgtcagaagtggccactgtgacatggggctggaggctcatcataactggcatctccaggatctcccagccccactgagccctgcttttgagcatgggggtgagaagatgcattgaggacaagcggccaccgaggcgacacatcacagtgtgttgggagctgggcccgagggaggcaggtggctgagatcacacagcagggtcaggtgggtccacagttcctgccacccattcctgctccacctgccccatgtccctgtcccacaccccttcctgggggttgcaatgggtgcagaagccatccccagatgaacttgacccaagagccagctgggattctgggtccagcagtgacatcctccattgtagaaatccctccagctgggacctacgagagtgctgcttgtgtgtggggagggagtcaggggcaccagtatgaaattagttaagcctctgttccactcctctcgttcctcacagatgcaccaaaggctggagcagaggaccagggcacggtcagggtgacagatgggtgggggtcttgggggaaaacaaatctcataaaccttgtcctataaaataaggacactgttgtccttattttataggtgagactcaacaattggccaaggtctagggttgcagaacgtgagggcgggaagaacaagcctgatttccgaaggctcctggataggatgccgaaagctcctctctggccgctggagccaaggactcagccaggcttggcttgcacaccaccggcgtggcatgcacaccacctggtcctggctggcaagaaccacccaaacctaagtgttctgaggccaggccagcaccccctgcacagctccaggcacacatcagagagccagcccccactgactgactgaggacacgtgccagtggtccgccaggacagtactttacagtttacaacaccccgtcgcgttccattgcctcacctgatccagggaggcaagggttaatggttatgcagtgtggatggggaaactgaggctccaagcagcattgagacgcctcctcacccagcccggtctgcctgttgctctccaaatcaggacttagggattcagctcccaccgggtcctgacccccaatgccccggggcccctgagtggcggctgcggtgactctgatactcaccctcggccatggtcgggcgggggcggtggctccttccactggcggcgagaccctccaagtgcgaccactggcggctggcactgccgaggcggagagcggcgctaacttatagcccgctttggggcgggccgggggcggggccccgcgggaaggcggcgacctgggaggccacccattgcccagtcccgggcccacgccgccagcgctggggctcacccaggggaccggagcccgagggagggacggcggccggacgagggcgccccctgggggagcggacagggacacacaactagcccaggatacagacacacctggacccacagactcagaccttggagaacagacacctggacacacacactcagatacagacacacgcagcaccctcatagaaacacacaacggaaccggggtgcacctggacacacagatgtggactcttaggtcagatctgggatcaagaacacctccccacccccaacacacacacacacacacacacacacacacgcacacactcacacacatactcagatatacatacacagagagcagacgcagacacaccaagacagggctgtggagatacacacacaaacacagatacactcccacagatacaccaaacacggctggccacgcagacacagtgacatggatacaaattcagattcgaatggcagacacacaccaggacatagatacagcctgacacagccaggtagccttgaccgcgagccacacacagctgtggacacagatgagcaggtgtccagaggcacctggcacacacacagacctcctagacaccaatgccactgtcagatgtggacgcaaaatcagagagggcacccacagacacacaaagatgtggctactcagaggtagacacacatgcaggcatggactcaggtacagacatgcagacacacctgcaaaaacagacacacccatgtcccttcctgtagcaaaacccagataatcctccgatctcacccatccttgtatctgtctaatcagccatccatctaatcagccatccatctacccatccatccactcacccatgcatcacctacccccccacctatccatccactcatcccttcatccatccctccctcggccttctcttccctccctccctcaatccatccatccactgagctttcttgaggccccactgtgtgccagaaaggagcaagactaactttccagggactcagcctaggacttctcgaacctggcaaccaggggtcctatctctcatcctggtatctctggtctcttggtctcctgtgcttccggatccactgtgagccctgagcgggaagggttcccggagagacagaggcccacggggcttccctggcactttttccaaaacaagctctacattccggagcaagctctacattccagaacaagctgtacattccggaacaagctctacatctattgatgaatttggaagatagaagtagcccccgtctccattcctaggtgacatatggctcagggaaaacaacccgtgttgcttcagtggatatttctccctgggtcaaacgggctctggctggagtctcagtgaacaaacccacaaagagtgttgggcccagctgacccgtaattgccccattttatagagattgttgcagaaactgctccctgcagctggtgaaagcttggaggaaagagcagcgtgaggagaatcacccgaccgagagggaagtcggtcaagaggccggggttcaagttcccactctgcccctgaccagctgtgtggccatgggcaggattttgcctcagtttcctcctctgcaaaatgggggaaagaatccctccctcacaggcctgagtaagactcaatctaaatgaccaagtttgggtgccttatacgtggtgagcatgcaataactggggccctgagatttggcatggaaatatcaagtatcccagcacctggctatttcgggacctcaaggagagacgggaggcatggggacagtcagttctgcagaacaaaggctgtgtttccacaggcgttagccctgccccagatgaaaggatgggtttggccttttctaccaggtattttttcctttaaa

SEQ ID NO: 1562181 - DNA, 4001 bp, Homo sapiens
ccgtagcacttgttttgtatttgtcatgcagcttaataacagtctgccttgcatgctgctcacctaaaaaaccggtggtaccaaaaaatatcagactaaaagctaccgaggacagaaccacatctcattcacctccatatttcccactgcacctggcacagctcttctcccttaggtgttcagtgaataaattcattcatccaagaaacactgattgggaacttcctggctgagtgactcggagctgagctgggaactgcaagtgggacaaatttaagggactgaatgtattcgcctgtctctccaccaccttttcaaaattgattttctccccaccagcctcattctgttgtgactttagaacatctctggttgttaacagagacatttaatcatgcctcacagcgggcaggccattcctgagagtccacgggaggtcctgcacagggatgggaggtgcacattcctgggggctgggcacgtgcctgtccactccctggctctggtttctttttgtggagaaagaaaagtcggtactggaaggaacctcaaaacgcattcatttcaaagctttcatcttgaaaacttgaggctcaggggtggcagagaacacacaagcagttggtcacaaagctcaaatgagaagccaggttcagaattgcttttttatgttccagatgttatgtgcacttatgtaggagctcagctctggcagcaggacatggtggaaagggcactgctgagacctagctggctctgcgatggattcactgtgtgtaaggttccaccccttcctgggcctcagccacctcctggagggagggagatgggctagatgacatctgacctcccctcttgctgcagtgtgtagggtccagagctcctcttcttagcatcccagccatgctgtacattacagcaaggaatgggagacaggggagggggcctaatgtgcaatcacctgtcccagtttttgtggcttctgaagtagccagcatttgcctgttgcatttggctcagtgatgtctttggccaatcttccagcagccctaatcgccattcacaatattttacaagtttgactcatatcttgtttggatttggcgtccctgtcaacctactaggctgagcacacaagacagataataattagcatgctgcttagcaggggtgctgattaacaaaggcccatatcctcgacagtaagcatagagtgggggaacctgcacttcctgttgttctttgtaacccctgttccctggtgctctcctgtggaccaggacatcttgtggcacacctgctcctgctacggggaggcttcagctcatcaagtcacttacacagagcctgtctgatgcttctgatgtgtagcttacttaggagcattcctaatgctcctaagtaagttgatttgaaataaacaatggtttctttcaaatcaacttacatgttaccactctcactccctggtagttctgagatgtgcttctttgctgacactgctgacagctggatacagctacactgagaaacacgagacccgagtcctgtctgctttggctttacgggtggcgacggatgtgtaaaagaaacgcaaacacaaacaaggcaaagcttgtcctctgcctaaggagatgcgatgtccagctgcactgaacaccctgcccattattcagagctacattccaatgatgttctaccccaagaatatgctagagggacccaaccaccactgagaaagagccgcctctggctagcaccctaaaataggaagtctggccttcagagcccccaaggcaggcagctgtcctggccggacactctggcttggcaggctggcccaggggaagcacaggcttctggcaaggacctgatggagaagatgccatgcactcaccagccatgtttcgccttcctctgcctcttctcaggctcctctgggaatggcacggacagtgctgacagacaggctgccaaggattgccttaccatttatagaatcctctcctacacaccccaattagaattctaatgaagtgggcgaggcaccaggtcattcctgtagtgcctgtaaacgtttcacttacgacagacttgtcacccaatggacgtgcatcatgtttgtacaagaccagcttggggagaagggggcagataataaagaaactcaaatagttcgcttttataattttataaaatgatggactatttcctggattgtagggtttaggaaatgatgacatgcttttcttgctgatcctgggaagttctctctgaatcaaagaaacgtctcagcagaacccagaagaagaaaattgtgaggtcctttctcatgatacacatgtattagcatcttccacttgcacagggaagtgagacacatcacagttcatttgtttagggttgtagtgtggcataaaccatcatttgatttggaattagaagccgttggttctgatgctggccgagccctgggtggtctccaacccttgaagcccggaagccttgcttgtggttggggataatcactcccacccctctcaactcacaaagctgtggacacgatcacatgagatggtgcgcatgggaagtgtatgcatatctaccagggcaggttaaactgagatcacacttggcgttgaatgtcagtttcagtccagatttgggggaaaattgttgtttttaatgaggcagcaggaacagcctctaaccttatgcttctgccatgtctttctcagactgcaggttccgtcactgaccctcactgggcccaccttgacatcagtttaaagaaagggtgtggagtggggagaagctctgacattctacgtgtttttgtttgcttgcttgtttctaagggcgtatgttttttcaaagttcctattatcgatatttacaaatatcaaggtttacgatggacaaaggagtgagtatatattttttaaagtgaggcttcaaggattcacgagagaacagaaatgccccaaggctttccccagcatcacagtgtggaaggaagattgagcaccatgatgacaaggttgggtctttagagagaagtgagaatgtttgatctcgagaaagagaagacggaataggcaggtggcttggaaaattgaaaaagagaaatcagtgtcctttctccgtcctttaggcccctacagccttttgtacatcttagaacctctattaccgtatgtatccactgcactggaactatctgtttatatatgtccccatctccagactgagctccttgaaggtacaggttgcatatcattcaaatcttcttctcagaatctagcacagggcttgacacgtggctggaacatgcacattcttgaataagtgaatcaatatcactgtaaagatgggaatcataactaccgatttagtgcttactaataataactaattgatttagtgtttactgtgggcaggcactggctaaacactttacatatattagcttttctcatcttcatagcaaccctatgcaaaggggctattattatttccatcttatgggggacagagagattaacctgagtctccaaccacgagattcatacccatatgtaaatggctccagagcctgtgtttgcttaaccttggaggtcagcgcctaaatgaggcagcctttcccaggcctctggggctctaagacagctggctgtgcacccatgccaggcagaatgggatgcactgttggctctggcagatgactaagaaaagagcagagggtagagagggacatggaaagagcctggacccaagaggagactcatgtgtggtcttggctcctaccacgggcactagctgtgactctgggcgaggcctcatgacgccaagttcatcctgccagaaagctggaggacagctccatgaatggcatgggatgaatgggtgtgaaagtgctctgtatgcttctgtgtgtggtctaaaggaaaggaggggttttgcttattattgtggttgttgctgttggcctgggagccaag

SEQ ID NO: 1562182 - DNA, 4001 bp, Homo sapiens
cctcctttgccaacactgatcaactggtacttaaagagctgggttgagcattctggggccacatccaggctccagagggaagagctctggggtcaactagggatgtccaccatggatggagtgagggaggggggatagaaggagctccaggaagatgaatacactttccatctaggatctgatgtctcagtcattcaggcacagagtgtgtggtaggcaggacctactgctctgaggaacagatcctcccaagaagccaagaggacccagaagacccaggaattgaatccaatccaacacatagtccatttacataggcatgacaactccaatgctgacatttcacagacggagaaacagagcttcagagagaggaacccagcaagttagttacagacctgacaatgggcatcatcatcaacttttttccttcctcagaaactaaccttcgcactgtcaagtttaagtctgataggttatcaaaggcccagggaagagggatcatctaggtgaactttgagaagcagatcttggaggaacaaaggcaatcccctctgcaccagggccatcagggaggcaaccccagctctggaaacaggcagtctgggctgtgagctggtgttggcaaggcctggtcttcagaacagacctatcctaggagcctgaagggcccaacacgtccagcaatgctgttaactgccaggaggaaatatgaagaggaagctagactatgatgaggaaattcaaatatctgcctttgaaagttaaaaaaatatttgattcataaaactgtcacataatgctgaacaattaaaactggcagacacagactcagaaacaccccttgaatacctgtgagtgtaggacccctggttctgctgacttgctcattaccgggccccagcatctaagacaagttcttgcagagggagtttgctgctcactatattgaggtcgtgggggacacattatcttactttcttttttttttgagacagggtctcactctgttgcccagcctgcagtgcagtggcaccatcttggctcactgtagcctctacctcctaagctcaagcgatcctctcacctcagcctcccaagtagctgggactttgggtgttccccaccatgcctagctaattgttgtatttttttgtagagacggggttttgccacattgcccaggctggtctcaaactcctgagctcaagaattccacccccttcagcctcccaaaatgctgggattagaggcgtgagccactgtgcccgacccacattttctgagtctactgtttacaagtccccacttgagatgtgtggtgggagaacagcacacgtggtctcaccaactcctcacagcaaggctgtgagataatttgcattataatccccattacacagatcagaaaacagaggtaccaagggcaaattttcttgctcaaggtcatatagctgttttcacttgagccagagctgctcttgccctcaagtgcttggggtgggaatcaggcgaggatgcagccggtgggggcctctcactccttcccacgcaggccacaattcccaactatgcccagaaacgtctctggatccatggaatgtgcatggggtgcaaggagattttcttttttctgcccctgccttcctgtgcctgcctccttcagtcctccgaggcacaggggtgagacctggccccagcccaggagacagcgcctgagccagcctgggccatggccttgctgggtggcttaaagctggctttttcatcctgggcctcatgaatccacacgaagagttcatgtgttcatggtggactatccagctgtaaaatcctaacaatcgatgatcaaacgtcatcccacagacccgtgtttcttgaagcccccctcatgagccctggtgtcccaaggccccaggctctgcccacttacctgccatgtgaaggccagctggactcctctgttcctccacacagcagtgtgtgcaccgtcaggacagtgtggcgcgtcacagcagccagccagaccaattttaacaaggaaaaccttgggacactcctaggcaggaaagtcagaattcaaaagaggaggcgtggccctccaccctagcagcgacacccacgagacacaaaatcatcctgtaattgcacctagaggggttcactgtgggagtggctcctgccaagagaccttggaaacacggagttgcgaatgggactgtggagaaactgaggctcagaaaggtcacaagcctggcaagaaaaagaacggggaaagagagaagactgagggaactcggatttatggttggccattcttagccctcacaacaaccctcaaatgagaaaaaacaggctcagcgccaggaccccgaagtacatggttgcacgctgcagtgccgggtcagtctgtggctccctctcccctcctgggtgagagcagaagactcctgggcccacagctccactctgttctgcaggcatctaaagaggcagaggtccatgatcctccttcagggccactagacttccttggtggacactagactcttgagaggaggtagataagaaaaaggggagagctggttctgactcagaagctaggcccatctgccctgactttgtgagtggcctccagccaggagcttagaggcctggtggccatgggtgtcccgtgaccttggacaagacctctcccctcctggaaccctggtgtttctacctacaaactaaagggattggactcaattattcttcagggccattccagctcaaagtctaagattctgggcttgaaggtgctggaattcaaggcatctgaggtcttttgttaatgaaatagaggggattttattttcatggaagccggtggggtaggtttctttttgccggagaaatgctttgatggatgacttggggctatcgaaggctggatgtggcctgggccagtgaggaaggggaagtgggagggggtagaatcgagggaaagagacaaggaagggtaaggagacaaccgtgtgctgagcacagtaggatgaggccgctccctgggatcaccccaacattcaggaaactgcataaaaaccccaaagtgtttgatgtggttggatttcttacagaaagtggcaaagaggctgagttctgcttcctggtttcacgcagatcaagcgtctttaatgagctgtctgcagacccacatagccttataattactgacatctggcagcagcccagggcagctccttcctcaacaccctgcaggctgctgccctgtagaccctgggccctgctgaagctgcttttctgcctatgcagggtcaggctcctccccactaatgatggtcttattcagggcccttttatctttcatcctgggcttgcttggacgggagctcccagaagacagggcatcaaaatcactgcctgccccactgctcgagaccccaaataataattcatactcctcgttttttttttttgagacagggtctcgctctgtcacctagggtgaagtgcagcggcacgatctcagctcggtgcaacctctacttcccgggttcaagcaattctcctgcctcagcctcctgagtagctgggactacaggcgtgtgccaccatgcccggctaattttttgtgtattttaagtagagacagtttcgccatgttggccaggctggtctcaaactcctgacctcaggtgatctgcccacctcagcctcccaaagtgcgagattacaagtgagagccactgcacccggcccatactcagtttagaagtgagcatcatagcctggcagtagagtcctgggttctgttatctctgggccaaactggctgtgtgaccttcagcaggtcacttaccttctctgggccttattgccttcatctgtaaaatacgggtgtgaactaagtgttaccagttccaacattctctgattctgatgatcaggctagagatgacagacgggagccaaagccttgggcggctcagggtacccca

SEQ ID NO: 1562183 - DNA, 4001 bp, Homo sapiens
tgcggggagggtcttctccagctgtaatgccagctaaggtgctttggtagcaaagctgggggtgaggaggcacaggctcctggacggagccaggctcctggacggaggccgctcagagtctctgcggcgtccgctcggtccgcacgtgctgcagcactacctccttggaaggggccgcgcacttgtactccatcttggccctggcggcgccctgcttcttgcgcaggtggcagaggagcgccaaaagcgccaccaccaggcacaggctcgcgatggagatgcctatgagcaagcccgaatgcacgagccccacggccggaggagtcaaggtggagccgggcgtcgggctgggcgggggctcgccagagccgctgtcgccaccgtccaccttgccggagtcacagtcggtgccaatgtggcgggcaagggccgagtcgggcccgcagatgcactcgaaggtaccggggaggttgtggcacaccccggagcagaagccgccgttttcgcactcgtcgatgtccgtgcagatgaaaccgtcgtccaggatgtagccttcagggcactcacagctagcctgggtgttggggtcgcagtcggctggacaggcagtctggttgcaaaacatctggcacctgtgcggctcgtggggaatgggcgcgaagccctcggcgcagacgcagaggtagctagtttggttcaggggctggcactggtactcgcagttggctctgaagcacgggtccacgggctccacacactcgccgtccaccaggtcgtagttagggtagcagtggcactcgaagccaccctgtgtgttgacacagcgctgcggacacggactgggctccagtatgcagtcatccacgtcctcgcaccggtgttggtcggccgccagccggtagccggtctcgcacatgcacgagtaggagcccggctggtcggggttgggaacgcagaagtgctcgcagaggtcgttgcaggactgcgtcgcggatgcggtgcaggagcgcccgtctgcctgcagggcggcgccggctgggcactggcagcggggagccccagggatcgcattgcacgcgtgctcgcagccgccgttctccacgctgcagtcccaagcgcccggcgcctccctggcccagtgcccctggaccgctccgggcggcgcggtgcacattagctgtaagccgaggggagccaccgcggcggagctgcccaccggcagcgcctggaagtccgctccgcgggccgcgaacggggtgccgtaggtgatcgagacggcggcagccgcggcgccgggctccacagccagtggcctgcaggtggctgggaagtggaactcgcagaggaagccatcggccttcacttcgcactgctgctcctcccagatcggctcgctgggcacagtggcctcagcagcggagacagcgacgcacaacgggccgcagaggggagccccattgaggtcgagccgtgcccacctgctatagctggtgttgttgtctcccgtaacccactggaagccgcgcaggggcccgaggcgcttggggtcgccgcagccgggtggcagctgcaggccgatccagaggcgccggcggccaacgccgccgtcgccgttcagtagcaaggaaatgacatcggcagccaccgaggagcgcactgtcattaggtggccccgcagtccgtcgcagatctgactggcattgaggaaggtcgcggggcccgggtagagcgcgaagcagtcgtgctcgacgcactggctgccacccggctgcggctctgcgggtgcggggaaccccaggccggccagggccagcgcgccaaggaccaggaccccaagcatgttacccaggcgcgccgcgtgcaggcgccggggaaagcgcgggcactgcgacagggccgtgccggagcagaggggcacaggacgccgatggcgacagcctctcctgtccgtcccagcccagacacttcttgccgctgcgcgcagcccctgcgaggcagcctctgacatgcggatcggccagggctcgagtttataagtgcccggccctccctccctggacgttcgggaaaaggaaggaagtgcctggtgggaagggctgatgccgcatactcggattgctgggttctctggccgcccttgcgcccgccctcgcgcatgggatcacctcgccgggatgagtaaaccctgccctggcgcagggaggttctcgggcggggccgacaggggcaggcgccagggaaggccagcacccctgtaacaagacgactgtccccgcccaccactcgggcccccacgcgtgcagccctctttcatctcttggtcctcctttctttcttttcatacatgttacagccacttccaaggaaagcctggattgcaagagctctgggaaccggagacttcagagaagagggctttgaatggggagtgggggaggtggtgcacaggacctgcaagacgctgggaggggtgatcggcaccaagggcactttgggaggacctgcctaggacgtggacttccccgaagacaggatcgcaaggagagacagctggatcctgtccgcggccaaggtgcctggctcaggaaaccagcggagcgcgcttggcctcacaggacagtgggtgtggctggggtgacggggcagggtggggaagactggcctaacaccagcgccctctgccccatggctggccagggacccgcgagtccctggacacgcactggccaacgccagaccccatctcatcgggtggggaagtcgcggggacactgtcagggcgccgaagtccggacccggctcagaggcggtggcaggtgaattgctgcggcgccgggtaggggcgggcgcgtgggagcgagtcagcctggccagtttcggcccagcttccgaaggatggtgcttcttgcaccccaacagagtggctggcaaccccccaggggagcgcgcaggatcccagctgatcccacccgggtcggctaaggaggtttccatttcgtccagagtccgaattgatacccacgtgcatagaaacgccacttgctcggcaaagggcactgaagagccaccgtcctgtggatgggcagggtggggggggggctggaggaggacatgggaatccgtcactttcgacctcttccggtggttcacttaccgggaatgcggaagagtgggtctccccctcgggtcgcccccataatggtgagaggcaaactgtttaaaaacacccttgcctctctcctctactgtcctcacaacgagcgccagggggcggcgctgtcgagctctaaacaaagccaaggaagttggagaagtttcgggctaaaaagggttaaggtgtaggagcacagagtcctccttctggggttggaagctccgttcccgggcagctcagcgtggattccgctgcgttcacctcttgcctccagggcccagtagatcctgggctttaaacaagaacagagagtatggcgtctgccacgtgcgacagacacgcaccggtggggtgggccgggctggactggactgacctgcagtgaccaaacgggtggggcgtggacactctgaaagtgaaaaaggcaagcacgactgtcccgccgcacactccccagcgccttggggcagagagcctccaaacgtcccgctgagttgagctcttcgctgggaaggccgccccagcacccaggaaacgaaggagctgctggacacgggggtctgaagctcccggaatgcacacagctgcgcctcccctgacgcggaccccctgggaagaggaagggaagagcggcagatagcacagtagggcttgtccggcgggagcagtcaagctgtggctgcctaggctgaatcagggggtcgtgactccggtgcacagcctgcctacgcgggacgcaaaagcagggctgcctgcggtgccgccatgggggtgagggtggagcttcagataagggcaggaacctcgttggggcactgctgaaaggtctcagaatgtggggacaatt

SEQ ID NO: 1562184 - DNA, 4001 bp, Homo sapiens
gagaacagagcaagagtgactctaggtgcccctgggcgtggctggtgtagggcaggagggtgagactcttaggtttagggctgaaattcttgtgccatgggcaatgcccagacctgccgaatctctgaggcactcaaaacctggctggcttctgtcagctggggcaccgtgggatcctcaggagcagcagctgggtctggagctgcctcctcctcctcttcctcttcgttaccctcctccccagacagggtgtcctccacctggctgggctgcaaaaacacaaagtggcctggtgtgtccagggacaggaggtcccagcttctaccatctcctgagcccaagagcctcctcgggccacctcatcactccctgcccatgtgcctgtaacccccagcccagcccagggtagttgggggtttccacgacagacaggacgctgcccctgccgccagcctgcttcctccctggcccctgccagctgagggctggagcacagtccccccacccccgccagcaccccacaaggctcagatggggccgtgggccgtgcgacttgtcggtctgtttgccatggtcctgggtgggtggcagggatcaagttctaagcttgggagcagaggggaaggcaggtggtggcatagccctgggagcttcaattgtgtgtgtttgtacattaaataataacaacaaaaaacccatccttgcccaggcctgtgttcagtgtgcactgtctgtgatctctgtgtgtttcttcttcttttttctttttccttttttttttttttttgagacagggtcttgctctgtcacccaggctggagttcagaggtgcaatgtcagctcactgcgacctctggctcccaggttaaagcaattctcttgtctcagcctcccaaatagctgggatgacaggtgcccaccaccatgcctggctaatttttgtatttttagtagagacacgggttcctcctgttggccaggctggtctcgaactcctgacctcagatgatccacctggcctcccaaagtgctgggattacaggcgtgagccaccgcgcctggccttctgtgtatttcttcttatcagcattttccaaaggaagaaaatgaagcccaaaggtttccccatgaagcccgtgaaatgatgcatgcagtcatatgtgggatcatacatgtaggttcatgtaaaatgtgtttgtctgtgcgaattgtgtgttggcttggaatagagttgtgtaggcacatcaatgtgtggaggtattgagtgtaaatttgtgtttatatatcaatgtgtttgtgtgagttgtgatggtgtaaatatctacatccataaggggcatcattattcactcattcattcatccgagcttccactctgtaccagagtgtgtgtgtgagtgtgtgtgtttgaatgtgtgtgtgtctgtatgtgtgtttgagtgtgtgagtgcatttgagtgtgtatgagtgcatttgagtgtgtttgagtgtgtgagtgtgtgtgtttgcatgtgtatgcgtgtgagtgtgtatatgttatatgtatgtgtatgtgtgtgcctccacacaatgaccttgcaggcttttcccaggaagaagagacctctcaagggctgagagatggacaggaccccctctcctgccccgctctgttctccaggctcaggcctgaggcaggtctagctgtgtgtggctctgaacagagctccatccagcacccactccagggaggaagggacagagacatcggtctgtcccccttgagaaccttggagcaggggtgttaagaccccatgttcctgagtcagtccttgctccaaaccacaggcctgccagggagggacttgagaggggaacaagtcactgcccgcatccaaccctagcccaggccccaccctgccagagacctcacctcctttcacctcccaacctgcaccacagacggagttggaacccttaccagccgagtgtaacgccagcggaggcctctcattctcctgtccctgctcagccggccgtgggcagtgagtgaatcctcagccctgcccaggaaggaagcgctgataggtgaggcctagagatgagagggagaggcctggggcacacccagccagctccatgcccacgccagctgccctttgctccctctcacctgtcactccaggccgagctgctgctgggtgagtctgtgagcaactcggcattcaagacctcattgcagttagcatgtaacacgtattaaccatacaccatagattctggttgcaattcctttctacctccttgtccttctggcagcctggccttgggactgtgggccattggccagatgcctaaggcccaggctggaggtctggggcctctagttccccgtatgaccttggataagcccatttgcactcctgagcctcagtttcaccacacacaacatgtaacatgttgaaccagataatctcagaagacttcgcgggactgacagtctgccattcacttccctctccaagccgatgagtgtgttagaacagaagctagaagggggcatgcctagactgaaagaacaatctggcccagtgcagtggctcatgccggtaagcccagcactttgggaggctgagggagccgtatcacttgagtccaggaatttgagaccagcctaggcaacatggtgaaaccctgtctctacaaaaaatataaaaattagctgggcatggtgtcgtgcgccttaatcccagctactcggaagactgaggtgggaggatcacctgagcctgagaggaggaagctgcagtgagccgagatcatgccactgcactccagcctgggcaagagtgaggccttgtctcaaaaaaaaaaaaaaaaaaagctatttttactttgcatcctaaacacagatgtattttaggctttcatcattgctttgcttgtcatttaacagaaagtttctttattaagtctttgtttctttttccatatttagtttcagatgggggtggggggaacagatgaatttctttttttttttttttttttgagtcagagtctcactctgtcgcccaggctggactgcagtggcatgatcttggctcactgcaagctctgcctcccgagttcacgccattcccctgcctcagcctcccaagtagctgggactacaggcacccaccaccacgcctggctaatttcttgtatttttagtagagacggggtttcactatggaacatatgaatttctaaattgaaacataaataaacttttgttaatgttcagtaaaaaaaaaaagaatagattttaaaaggtgttttgttttgttttgttttttgagatggagtttcactcttattgcccaggctggggtgcagtggcgtgatctgggctcaccgcaacctctgcctcccgggttccagtgattcttttgcctcagcctccacccagctaattttgtatttttggtagagatggagtttctctatgttggtcaggctggtctcgaactcctgaccgcaggtgatccgcccgcctcagcctcccaaagtgctgggattacaggcgtgagccactgggcccggcccaagcttttttttttctaattaaaaagtgatatttagatattgtagaaaatttgagaaaccggaaaagaataagaatataaaaatattcacaattccatctctcacaaataaactctcaacccccaaaggtatatttgcaaagggctcacattatgtgttcataccatattgaccacacagtgtttttgttgtttttgtttttgagacagaatcttgctctgttgcctaggctggagtgcagtggtgtgatcttggctcactgcaacctctgcctcccaggttcaagtgattctcctgtctcagcctcccaaatagctgggatcagaggtgcgtgccaaaacacccagctaatttttgtatttttagtagagacgaggtttctccatgttggtcaggctggtcttgaactcctgacctcaggtgatctgccc

SEQ ID NO: 1562185 - DNA, 4001 bp, Homo sapiens
tcacaactacatccctagttcctggaacagaattggtactcaaatatttgttgactaaatagatgtgtaccacatatatgtattgctagcttataacctcttaaaaatctctgaacaaggcagggatttcccagtgcagtgccgtaaataccactttactcaatgttttccttatagcaagagagggtgtgatttccttttaagttcttacactatctctgttctgaatgtggtaccagaatatatatacatatatgtaggtttcaacatactactttgaggatttgccccactcgtggttcagcctgaagtctgaaaccacagaaaccaggtaaggccatgaaatctttttacctgacctctgaagttctaaataaggaatccctcattaaacaaaggtaagttctcagtcagctaagagaaggagggaaaattgctaccagtcaataatatatccctgtttggagaaaaccaacaccaaattatttaagccagaatcttcctttgctaaagtcaaatgtcatttccttttctctgagtcttccttgtcattcactccccggacgaaattatctgctgaggaggcagtatgcaggaagacccaggaaatcattctggactaagtgacttcaattttagttctggtctcttgacaagcagaatttgaactaaacttttagaaaaagggccagtccttcaaagatttacttccaaggttctgcaccaggagcccgcaagctctgacccaacttccaagcatggctattttacctccaccctcatccacacacagacttcatcccaacatatagcttcataataaagagccttcatccctaacgagctgtgtggccatgttggggaatgggaaggagagcagtgaggtggggctattagtgtttttcaaaacgtagttcacagaccacctccactatataatcactagagtgcttataaaagggcagattcctgggcatcacctagccctatggaattagaatctctgggagtggggctgctcaggaaactgcatttttagcatgcctccccctacacacctcgagattcttatgcacagtaaagtttgagaaccaacagggtaaaaggtccctaagagaggggcagggagttgactgagagaagacaggaagggcagggaagcctctagggatgaaagatgggggtggggtaggtgaaggcaagctctggggtagcggcagtcaagggggtgcgcgatggggacagctatgagtgtaagtgaggacagggctctgaaaaggatctgaggcagcgcttgggctgggagggtggtcagaggagaggtcacatctgcggactggttatgatggtggggaggcggggagagcagggtctggacgtgacggggaggagcaaggatgagaataacgggagggggtcttcagaggggtcaggacagggaggtgagaaatggaaaatggggctcacagtgggcggagaccaaaagtagaatgggaaccggcgaaggcagcagccgaggtcttcctccgaaacggcgcctcccccaaaactcggggccttcacaagcctgagtgcaggggcagggccagggaggtggatttcggggaagacaagcccagtcagaggtagccctcaggcctgagtcaggggtcccggaggtggctcagggccaggcatggggtgctggaagatcctgggataccccggagggccccgctccagctcccgctcccggagtctccttcactcaccatcgccgtcgccatcttggatccacgtgtcgccgtaatgacgtcagcggaagtggtgctccctggttacggagtttaactccacaaggtggtcgtctggcttcaaccgctcctgtagtggcggtcagcagaggggaaaaggagtcttagctcctgctcgacagtctggtctgggaaagtaaggtcgctgattaggtgaagagagagaacggtgtaactaaggaagccatattagctcctggcagaaactgagcctcccttattcccgctgcattgtgggtaatgggggtgtgcgaaagtgcgctcgtgctctcagcgccatctttactactggcaggaagacccattgccagggttacctgagaccttgatttgagggaaagggtgggcactggggctccaagagcagtacgactccaagaataatttgtaattatatatttaagtatttgtttgattttaagtatttgtttgactatcctatatcctctttagtagactgtaatccccatgagggtggaccctgtttttttgtttgttcgttttttaccttgctcttcctcattcccatctgtgaaatgggaagggggttggttcatcataggcttgtgatgaggattcagtgacacagtattacataggatgtattcaataaataattgtcagtatatgtttatgtatactcctttgggcttgtggtagatgcccaatacattattttttaaatgaacgagtgaaaaccagcatattcagtggagggagatatctctgaatgtggacgtcatgcactagcttagtgtgtgactccagacaagtcacgcaatcttcctaagcctcagtttccaaatctgtgaaaaagagactcaaagaatcatggtattaaggttgggaaagaactcaaagttcatttgacccatgtatatcactttaaactgaatacagtaccagtgctatcttagactgttttaaaaaagctattaaaagaataataatgattaataataatcatcagcacttgccgagcattttgtgtgctgcagcacttagcattatgctaacagttcattagactctttttatctaattctagggggcaagggacagttgaactctgatccccacctatgggcaccactgtggtggattttctgcaaagatggctgccacgtagttctgtccgtccttgcatgatgagcatacggtttctctcctcaagagatagactctgttttacctcctgttgaatctggctggtcatgttggttgctttgaccaataggatgtgctacaagtgattctgccagtactgagcctaggccttaagaggattgaaaacgtctgattctaccttcttggttataaagaagtgtagctactctgctggaaaggcacctggagagagagggaggcccagccaactcctcaagacattctagaaactacagctaagcactataatatgtaactgaagtcatcttggacattccaacccccactgagctactagctgaatgcagctacatgaataacctcatgaacaccatgtggaccaaaagaactgcccagctaagcccagctttagagtggggtggtttattatagatcatttcagtaatagatcattgaaacacacacccattaactcttgtgacctgcacaaccatcctgaagattggcagattggctattaaccccaaggaggaggaagcttgagagactagggggaatttgctgcagtctcatagtttccagacttggaaccagttttcctagagcttcgatcctgagtgtttcccaccatttctagctgcctgaagaaagataactgataaggagcaaagctccataaatggcctattattttttagtatttccattttttttctcatgctttgtatttttccctaaaggcctttcatatcccaatctcttttggtgacatatgccagaatcctagaactagactgcctgggttcagaacgcatttccaccactcattagctccataacatgggcaagtttctcttttttttctgaaaaaaattttttttgagatggagtctcactctgttgccgaggctggagtgcagtggcgcaatctcagttcactgtaacctctgactcccggattcgaacaattatcttgcctcagcctcctgagtagctgggattacaggtgcatgccaccaagcccggctgagtttttgtatttttagtagagatggggtttcgccatgttggccaggttgg

SEQ ID NO: 1562186 - DNA, 4001 bp, Homo sapiens
cacagcacagccctgcagcagaggcagagggaggccaggctgggtgcggaagggacggcatctggatgactacgaggggagtggggtgtggagaaccagcctgagcatcctacaggcagtggtcactacgggagcaccgtggcccgacccccgggaggaaggtttctcgtctggccaccctggggcatagaactttctcacatttgctccttcatctttggattgagataaagagtggatgaggcaggcaggtggggtaggaagaagggacagtggctgaggcaagttccgggataggggccaggaagggctgttgagatgccatggctgcaccccctgccagcctctgcccagctcttccttgcctcctgctcctgggtctctccccttgtaacacagcggcctcactgaagctcaggctcccgacaaccagacagcagcgggtcacaggagcggaaagggcagatgaagtggctcctggggccagctccctactggccagagtggggccaggacagggccctcccacaggagggagtggaaagggccctccctcccagaatgggggaggaaggagatctcttccaaccccccagaaccccatcactccccaagattctggtttcttgcctactagtgtggggcgcaggacccagccctgcctgggacgtgaagggggagaaaacagcatcgcatccataatattttgtgacatgaagatgcccagcctgtgagtgtggcttctgcccctctcccctgaaccctcagtctcaaccaagggttttctctcccgcctatggcttccttgggctctcccacttctcctggagcaagttggctccctcaccggctcacgggagagctgtggtcacattcccagtgggaaggtgatggagcacccattatgcctactactttttggaggttaagagtgttcctcctagagtccgggggcctggatgtgaatctggccacaccacccgccagaagcctgcaccgagcttccctgccctctgtctggtgaatgttcactgcttcccaaggctcagctcagagtgtcactaaccctgggagtctcccctgacaccgagggctgagcagcaccttctctgagtggtactctgccccctcccatgttaaacaccttgcctcccaggaaggctccatgcagggtgttgaatgagagggaaggagatgaaggagaatgttggatgggtggctggactgttgggctaagcagagggcacccaggcactgcaggctccccagagaccccaccaccccatctcacctgtgtgtggagagccgctcttcacccgccctttcactccgcctcgtgctgtaagagacaggattgctgacaaatggctggcctctggtgagtccccctccctgcagacccccggtcactgtgggacccctcagctgatttgtggctgcctcaaactgggacccagctccaatgattttactcagcaaattatagagtcccctgcctgtcacatttgtctgatactgtcagtcatgaggtcagaacatcccccaccccctgccctgcacagagacagagacagatagaaatctgctgaggggcttgctcggaacaggcaaccctaaccgagacaataggtggctgagacgccccagcaggctctgaggagcatgcatcggccgtgacagtctccagtgctggcctgaacacaggtgctgtgcacaggttgtcttgaatccttccagtagccctgcaaggaggtgatgactacccccatctcatgcgtgaggatcagagaggttgaataaccagccgaggtcgctcagcgcacaggggacaggccctggactcaaacccagctcctccctatgcctctgaacaccatatgtgcttcccccatcccctgctgctgcccaggaaccctgtgggcgggccccgcaggatcaggacgtggactcaccttcctctttcaggccctttacctggtggctcatggtcagcagcactgctggggtcctgcacaggctcacgcagcgtgctcctgtatgcacgccttcagcctgggctgctttcctgccctcatggtggctggcctcccttcctagacctgacagcaggcggggcttcttggtttgagattgaatgtggaggtgggtgaagtttgggggagagagacgggtgaaggaaggcgacgagttcccggcccatcaatccggccacacactcctcttctcaggtttccctgcaaagaggcagcatggcctcatgtttcaggcatcagttatacatgaggggccctggaggggccaggagctgcaggcttatctcctggcaatgatgccgctggcactctagccagaggaggtgtgaggagcatcccaggccctctcccactatcttgagtccctgattgggacaaagcaccagggaaattctagaatgtttgtttaagttattacttgggcttctgtttaaaatgcagattctggcatgtggtggttcacacctgtaatctcagcacttaggaaggcagaggcaggaggattgcttgagcccaagagctcaagaccagcctgtgcaacgtagtgagaccccatctccacaaaaagaaaaataataataataaatttttaaaaataaaatgcatactcccaggagtggcactgggcgttggaatcagtcagtctgtgccaggccctgggagcctgcactgtggatcctgctgcaggcgtcctgagcccacacagatgaatgttcccgctcagcccccgccccctccctcagcagcttttcctccctggcttcagggaggcacagatttggctgctttgaaaaccatcactaaagtgtcagagggaccctctggaaggcagtcataaggtctcagagtgtggagttcttaatctggagtccctggaacccccagagctgtggatggaattctgtgggtttgtgaatagtgatggagaaaatactacactttcacttttcctagccttaactgcgatttagcatttccctcaatcatgaatgtaagcaaagatgtgatttttgtctcagcaaaagtcacagttattttttttcccaattaaaccactggggatgtctcaaaatatcttacatgttatcacaacttcaaaattatgatagttagagacctgccatgaaatcttgttatttaattaggaagcatatattgtcattatatgaaagatatttaaagtgattttgatgcctatttcaggatcattggtctcctttgtaatcctagtgttttattttatggatttaatgtctatgttctgaaaagcggtctgtggctgggcgtggtggttcacgcctgtaatcccagaattttgggaggccaaggcagacggatcacctagggttgggagttccggaccagtctggccaacatggtgaaaccccatctctactaaaaatgcaaaaattagccgggcgtggtgggatgtgtctgtagtcccagctactcaggaggctgaggcagaattgcttgacccaggaggtggaggttgcagtgagctgagattgcaccactgcactccctgggtgatagagtgagactctgtctcaaaaataaaaaaaaatataaaaaggggtctacggaccttaccaggatgccaaaggattctatgacacaacagaataaaaagccttccccagggcaagtctcctgtgggtgtcaaggacagacctagcctctgatcatgcccatgtactttctcaggggtcaggagtaggagtgcctgtcctcatgcaagcttggcgagggaaggggcaaaggagctacctctaaaatgcacgtgcaacggttcatctcaagctttgaagcttttctctttgtcccacaccttgatctccgacccaactggttcctgcagggccgccccagtccccggggcatgagggcagtgggaggatctcagttgcattctctggcatccatactgcaggactgcagccgcaaatccctctccccaccagggcc

SEQ ID NO: 1562187 - DNA, 4001 bp, Homo sapiens
cagtgagccgagatcacgccactgcactccagcctgggcaacagagtgagactccatctcaaaacaaataaaacaaaacaaaacaaaaaacaacaaaaaaacccacacaacaacagggagtgcctactgaatgccagtggacgatctcatttccacttcctaacacgaaggggcagataaactttaacttgcaaggaaaccaaggggaaacagagacggaaagtggcttggaccaggtcatacagctgaataacagagtcaggatgttaaccctggcctacccccaggagagcaggaggttttaagtccataggctgggtgtcttgggtataggcctgaagaaaccatagcggcatggaccaggtgcccaagtcaggtgtgaaaaatcacatacagagaatggagtggtctaggacccagtgaggaaatgcaaatggtccgtggccatgccgccttttaaggaagagacggcatggaacccaggccagtgagggcagaaagctaaggtgctagtgaccccaggcccactccaggcaagggctgcatgtggtgcttggtggctgccccacagaaaaaggaaggatgtcaggatatttgacaaacaaagcttcattccatggtgacacccaggtagaggtgcctcccagtcacctgaaccaggagttctcaaaggcacttccttaactcctggggatatagggccctcctgaggccaaacagtaaaattcctagggctcacgtaggagtcacaaaagtgggtgtagggggggtgcttgctggagcatatacagtgagcaaagcaggaagaagctagggagaaaccgtggcctgagggaaagggacagagagggagaggtgaactccaacttatgatctggtctggggaatatgggggttccagtcccaagtcctaaggaaggggccaatacatggatgtgagggaggggcaagagctagagttggggcttatgtacaggggagcttacagtggggtacattcagtcccctcactgcctgggatccaggaatatggggcaaggactgatgctcaccactggagggttggggagaggatatcggtctgtagccactgaagctatcactaggatggggttttgggggaagggtgtggggggtaccgtgcagctggaagcccctgagttagggttccctgggcagaggggctgacattcccaggttagggaggtgaggtcattgtttgcagcccagggcctgggctagggcacagaggaggtactaggatgtagattccagatctggggaacccaggatgaggtgtgacttttaggggcctgagggcagtgcttacagctgaagggcagctttgggcttggaccgggtcctggggggatgagggggtggggttctaagtctaggagcactcttcacaaccgagaatgccccggggctaggattccgtatctgcgggtccgatgggagctccgtttgtcgcccagggagctcatggtaatttcttgatctggggagtgtctctgcagccaggaaaccccggggccaaggttctggcttgggttcggaagggacactggggtggggtccccgaacttgctatttgcaagttagacacccgggctggagttccgcatctgggcccgaggttgggactccagtctggggtcgctgtccgcagccggggctggtgaccgcaggcctggaggggggcccagaggtcttacctggcgagtagagcgcagccagctcgcgggccccggcgtgctgcgcgccccagcggcaacaagacgcctcgtcctcgtccagctccagctgctggcccggccagttctcggcgcccgccatggccactcgcccgatcggcccggtgcgctctgctggcggcggcggcggcagggccgcggaaccgcggcgagatcacgccgcccaatgaccgcccagcgccgggcgcggcggcggcgcgggcggggtcctcgcccggccgcgcgtcacagccaatcggggctcgcgccggagccgcgcaggccaatcggacgtcgctgagccgcagccaaccgccgcgagccggaggctgggacgcagctggacgcagctgggcgcggaagcttggggcggaggcgcgtgcccgccttcccagctcagccccggcagggctcccggctccagcccactgggagctcgcggcgcgtcgccgcccagctaggcttcggttcacgggcccatgcaatgggccgaggcagggcccagaaatgggcatttcttgagccggcagcgttaagcgcccactgtgtgcaaggaacgcgagggcagggcgccgggctggggccgaggccaggaagcatttggcgggtgctctgtacgatgctccctagcgaggccgatggagagtgggctggtttatcaagccctactgtgtgcagaggtttcgggtgccatgtgttcatcagctgtgtgccagctctgtgctgtgcgcccaaagaggagaaacgtcgagcctgccccgcatcctccccagctcatgttctcccggtggcgaggacagtaaactaatgaaaatgacaactagggtcactatgagatttgctgagcgcttaatatctgtcaggtgctggaccaagagctagacgagcaacatttatttgactcttaaacaccaatggtattgcctcctcagagagccccaccaccaccaccctgctcaaaggtgccccctcctccagtcactgtgacatcaccctgttttgtcttcacagcgcttctggtggggattgagcttgcagtccctgtctctcctatcagagagcaagctcctgagggcagagaacagctttgtttacagcagggcccccgtgccaggatcggggctggaacatggtagaagctcaataaatgcttgatgaatgaattaaggctcagccagatgcgtctaatacttcggcagataaatgacagcagcagggatttaccccaggtctaaccgacaacaaagtatgcaataatttctcatagaaattccatacaggcagccgggcgcggtggctcacgccggtaatcccagcactttgggaggccaaggcgggcggatcatgaggtcaggagatcgagaccatcctggctaacacggtgaaaccccgtctctactaaaaatacaaaaaattagctgggcgcggtggcgggcgcctgtagtcccagctactcgggaggctgagacaggagaatggcgtgaacccgggaggcggagcttgcagtgagccgagatcgcgccactgcactccagcctgggcgacagagggagactccgtctcaaaaaaaaaaaaaaaaaattccatacaggctggacgcggtggctcaggcctgtaatcccagcactttgggaggccgaggccagtggatcacctaaggccaggagtttgagaccagcctggacaacatggtaaaaccttgtctctactaaaaatacaaaaattaggcaagctacttatcccagatacttggaaggctgaggcaggagaatcacttgaacctgggaggtggaggttgcagtgagccgagatggcgccactgcactccaacctgggtgacaagagtgagacttggtctcaaaaaaaaaaaaaatccatacagtgagatcacataggagcctccctagaggctgtggaaggtcctgaaaggtgctgggggagcagagagggaaggtaagatccccttccagaatccaggttctctgagggtttaagtcctggattcctgcactaccagtcaccccagggctgtttcctgagtgttcctaccatagacagccactgtccccacccaggcctatgctccctccgtttctttcccacacctgctcccaggaaggaaaagccaccttccagtggcagggatgggttgcaacccaagtcctggtgaattccggtgaagctggctggttttgcatcagtattaacagcacagttaatccaacagttggattttttaacccaggagcttaaggcttgggtggg

SEQ ID NO: 1562188 - DNA, 4001 bp, Homo sapiens; identical to SEQ ID NO: 1562187

SEQ ID NO: 1562189 - DNA, 4001 bp, Homo sapiens
acgagaatagcttgagcctgggagacggaggttacagtgagccgagactgcaccactgcactccagcctgggcgacagaatgagaccctgagtcaaaaaaaaaaaaagaaaattttttttttaatttgtccacttttcctccataaagtaacaaagctatatgatcaaaatgggtaaatatattttagtcagggtttttaaattctaaattcaaaaacatatctttaaaaaagacaaaactgaccaggcgcagtggctcacacctgtaatcctagcactttgggaggccaaggcagatggatcacaaggtcaggagttcgagaccagcctggccaatatggggaaaccctgtctctactagaaatacaaaaattagccgggcatggtggtgggtgcctgtagtcccacctactcgggaggctgaagcagaagaatcgcttgaagccaggaggtggagattgcagtgagctgagatcacaccactgggctccagcctgggcgacagaactagactccatctaaaaaaaaaaaaaaaaaaaaaaaaaaaaaaaaaaaaaaaattcagtatttcaataagggcataagggcaacataaaaaaaggactagtttttctctgggatggcatttttaaaattcatcattatcatcatcacaataatggtggttagtacttacctagtctttgttagatgccagctgttctaagtactttgtacatacctaattccaaaaaataacaaattgtttttctttttttttggtgttttcttttttttgagacggagtctcgctctgtcacccaggctagagtttagggacccgatctcagctcactgcaacctccgcctccagggttcaaacgattctcctgcatctgcctcccaagtggctgggactacaggagcctgctaccacgcccggctaatttttctatttttagtagagacgggcttcaccatattggccaggctggtctcaaactcctgaccttttgatccgtccgcctcggcctcccaaagtgctgggattacaggcgtgagccagcgcgcccggcctaactgttttacgtggcttgcagtcaatgtaaaataactagcataattaaataattggtgctaaatattaatatccgtttttattgattacatcctggtctagaaatcaagtatttaaaaattagcataatgttaatctctatacttttcaaaaaagattggatcaaactgtgtcaaatagtaggtttttagtgttgtgatcccggctgcatttaattctataaaacaaagttcaaactaccagtatgtgtggtttttgagggcatttaaccacatctaacttgcaattagacttttttttaaagtacgtcccctgacattaactgttcatacatccgcatcaaaacaatacatcgcaggggcgtgagggagaggggagacgaatgtttactcttggcaaagaggattctaaaagacgggaaaaataaaaacgagcattttcaaagtatcagtcttcgttgccaacaggctttttaccagctcaccgctacccccaaactccctcagcacctgaatgttacgagagttctaaaagcatcataaaacgtttggcacacagtgcctggcattacgcgcctctacatacgttattctcctacccgtcttcagaccttgccagggagagaaataagaaccgacgcgaatttagacgtaaaacaaacaaaacgggcttctggaaagaggccaactgtgccaggggggacgaatgccccacacggatgactcggagcttgatttcggcggggagcgcggtctcggacacgcccagagcccgagaggacggttctgtccccgccctgccgcacacacgccttaccggagcgccgcgccaggccgcccgcacacccagagctcgcccacggttggcagcgcccaaggttgcatggcatggcccgcttaagtgccactcagccggccccaggcgggatcagtgcgccggaagtggcgtgccggaaacaggcgcgtcggaagttgcgtctccggaagcgtttgtctctttacccagcttcccgggctaacccttaccgagtgtcacctgcaggaggcaccgggactccggggctgcacggcccgaatgcttcttcgtgggttttgtttaagcagccgcgacctgtgcctgccgccggctacctccgctgtggcgggcgagcacctagggtcctcacctacctgggtcacagtcaggtccagggcaagccggctacgtggtttctcccctcctcagtacaggggccaggctagagaccgccgtggcttcccagggaggcagaagccgagtccgtcgagcctcaggaccagcagtcagagcggccagatatccgctgcaaggcgccagccttccatgggcgcgcgccgtcaacaccccactaccacacttcccttgaatagcacacttgtctgtgctgtcagcaccccactatacttcccttgaatagccccacaaacttgtgcttatctttagggcttgtccaggtaaaaggcctgcccacaagggacattttgcggcaaatgaagctttttaaaaagttaggtttattgaagtatttatacacaagtacaaatagatgagctctgaaaatacatacggtcctagaaccatcaccaatctagatggaaatatatccatcaccccaaagttccatcgggctcttttgcagcctatttccttctccactcacaggcacactgtaggaaaatgaacttactactggacatggttaattctcatgtccagtaactagaactcagtccaagtaatttaagaaagaaatcagtcatttaatctaccaaacacaaaaatgcactggaaaaaaggattatgataaagcagtttttaaaaatgttttttctaaagccaaattgagcagcaggggttgtatacctactttagtgatactaatgttagtaagttctgataacctactactattaaaccagccaataattttttttgagatggagtctcactctgttgaccaggctggagtgcagtggcatgatcttggctcactgcaacctccacctcctgggtttaagtgattcttctgcctcagcctcccaagtagctgggactacaggcatgtgccaccatgcctggctaattttttttttgcatttttagtagaaatggggtttcaccatgttgaccaggctggtctcgaactcctgactttagttgatccgcctacctcccaaagtgctgggattacaggtgtgaggcaccgtgcctggcaaaaaattcttaatacacagcacacagtgaacttgtagctattagtgggaatgtttttaagtctttcttcacaacttcagggctttttcactttcttggttggatccaacatccgtggaatttaagacatcttcatcctttgagtgaagttgcaaagtgtacttatactagagaaattttgtacaaccatactccttgggccccattacagctctactgaaacatccaagactcttgtaagattccccaggctaaaaagaaacactccattaacatcttataaagcccacacgactttcggtacattaagcttctgaagagtattaatttttgccaagtaaaatgaaatacacaggatttgtactactctctcacttgttccttgagctcaaattggaataacaagtttgacaagtgaatcccctaaaatatctagtaacctactgtatttgaaatccttttgatctccatcaggctgctctaaactgaaaaaccatttaaacgaaagggtagctgtagctgggaattcagtaggatacttccaacagtcctggtcaaaatgaagacactgccctgtgatgtttgaaattcaagtaactttatttaaattcaaaaacaattcttaaaactgcatttagagtcaagacccttttgtattataaaaatcacaagtatttctaagagacaaaaatacttctaggttaactagacc

SEQ ID NO: 1562190 - DNA, 4001 bp, Homo sapiens
gtggataaagttgtctatcatgtaccttacttggtaattaccgatcactcaatgttttgttggaggggccagcaagtgaacgaacggccagcattcagggcatcaaaggattgccctttccaaagcccttctggtgcctgagcggcttgctgggtcagttttggaaaccctggggctgtgctgtccccactcacacagctgtgcaagcatctggcacccagccccaggcccaagcatttcataatcaaaatagttcaacatctgcacattttgagatttcatggcacatgaccttttacatcttgtacacacttaaccgacctcttgtttaccattttagggccaaaattctatccaggacagagagttgatctgaaagcccagagaagcttcctgttccttcaacagtctttggggtcaaaagatcttatgcgcctacagaaagttcttagagctcaaaacaacatcttacaggtttttggcttctacaaaatgcttcacaaatagatattgtctttgactcacaacaaccccatgacagaagtggcccacgtaacattgaggctcaaatgaattaattggccaaggccacacattgtgtaagtgggtgaaatgggatttcttgatcatttttccataacagaccttgggattcttagagagtgagtaggtgctgtctgaccccagttggcccatttctcagacttggggatgcagactgaggcaggaagtaggaagtctagggaggaggatgcgtgggctgcaaggtttggagagcgagtgagttgaggtctcctggggcttctggccagccttctccctgatagatttttgtcactgggaccctctctagagtctgtggttctcctggaagtggaaagaggggattggtgggaggaatggcaaggccagtggtacccaggtagaagttctcagtgagtctgaagctgagacagctgagtggctatgagaaaaagatgctgtcagttgccaagggggccccacgggtatcatcacatccatatgggcgctatcagtggcttggtcaagctctgcccctggctaagcaattttcaccaatggctaagccatctgtcttgccccctcttctcaaagcccccagcccctcacaccaggaacctgcagcattgacttgaggaaggagtccggggtcaggccagtctacctgttagggactaggggtctgggccctgccaaggcagggagccctgatcccattgccctccctctccccgtggggtctcaggccctaggccagggctcaacagacacaggcagtgggatggggttgcccttctattgatccaaatcctgagtgtcgcctgggtgagtcatggaggtgaggaggcccacaaggctcagcagtgtggagaagagcagcaggaaggaggccgtgaagaggagggcaggcagagcactgagcaccagcagcaggagagccggtagcaggtggcgccacaccgcggccacgacaggccacaaggagctcagcaggtgggagccagtggtgaagagtgcatggcacaacatcagtgccagcagcaggtagagtatcccctccagaccccacagcaggcgctgcagcggttgccgccagttcgaggtgctccaccactggatccagctcgggggcatgtggctcacccaccagcgcacccagccatgcctcgtgacccaggctgaccagggcactgcctgctgtggcccctcgccagccccgatggtatctgtctccactcgcggctgctgcatcatgtctggtgcacctggggagagggccagggtcttgaagatgcctgggaccttggggggggggggcagagagggggtgcaggggtcaggagggcaccagtgtgcgtggggtggggctacagaattagggactgggacttacctctgggcagttacctaagtcatgttgcttcctgcagcgcccaggacggcctggcaggcagatccaagtccccactctcatctacccccaccctccccagaggagcccctttgtgacccgggctggggtggggtccagccaagagaggagtcactgtagggtgtgaggcccacccaagtccctctgcacggaccctccaggctggcaggggagcctcggagccccgcagatgtagtttctcatgctttctcatgggaagccctccctggatccctgtccctttcctgctttccctgctggctgatatccacccctttccaaactgctctctcgcaagtctttctgtctggaccttcattctctagagccacagaggaggccagagtggctgcccccaatccacaggctctgaggtggctgccacattcttccttgggctccctggctagtatcctaccttctcttgctgcccaaagactcagatccaggtatctgatacctatattataggactgtgaggttcaggctgggaagaaaggggtatcatcccacctgcccagccaggaaggagaaaagggggcctgatgaagaagggtggtcattgtatatttgaaggacactgagttgtggggaggggctctcaggcccaaggatggaggcagaaagccaggccaagcagggtcaagggcatgccacaggctctcaggagcgggcccagccccatgagcagcagcagcagtgcgtcctggaggctaagttgtcctgagactgtacccatttgcaggagtagagcctcctgctgtccaggaccttcaccggccccctgactctggcccctggtgagaagtttgcgctgtggcagagtgtgacctgcgggcctgtggagagagagggtggtgactgggcttagggaagttgtccactggcccgcccgcctacaatgcccacctgccaggctgctgcccacttacctatggagcaggtcaaaggtgaggaagctgaccagaagcagcagcagggctgggccagtggtggaaaagactgcctggattgtcagtcctagtgcccccagccataggacactgtccaggagctgggcccagctagggccccaggtggatacaggtggacgcactggactacctgacccctccccagcacccaggccccttggaggaactgggatcggatcctcacgtgcttcgggtctgggtaagcagagccgggtcatggagagaggtggaggtgacgggaagacctagtgctgaaaaggattataagggtgagagtaggggaaggggtagggcccgggcagacagaagggtgagctcagagtggggaattaggctcctgcagagtctccccctcccccatacccacccagcaaaccctcctcacctcctcccactttggtcagcattctgggagtgggcacccggggcattgtgacctgttaccacgtggggccgtggggtagggagggggctgctgctgctgctgctctgacctcataagcagctggtggcctaggtggggcttagctgggaagtcagggatttctgagaactaagactcatcctcttgcctttgctgattctctgccctagggccctcccttggggatctgagttgtcaggaaggcattctaaccccattactacttgggcatctgtccaagggagcgaggtctgctttcttcttcctgtgagtttgcagagctgcaggtccagggcgaagtcattcaatatctctgtccccagctgtcttccctgtgggtccttctaggggatttttcaggcctgaagttccagattgcagagatgggctctgccaggggactgcctgaggcttctggggctgggcttccgcataacctgctaaatgggggtgagagaggagggggctgttcaggtattctaagcactacagtttatagggggtgttatgcatactggggttccagtaatgaggtagaggacatgaacttaagaggactatgacctagtaacccccttattagaggttaaggttacagtctgagaatggagttaaggaaaatgaacatataatgaagggcttagtcact

SEQ ID NO: 1562191 - DNA, 4001 bp, Homo sapiens
atgggagggggcaaagtggaggatgggggtccagcaaggaagccagcaggttggggatggcatggctaaaagggccaagaggaaggggcagactggagagccatgactaggtcaaagccaaatgcctttatgtaaacagaagtgtggggacctggactagaaccacaggaggggaaccgggagggagaggcgagaagagggacactctctgtgctgcaagaggagttaccccacccaagaacctgaacacaaacccacccagacacagacagcacatgtgcattcccgctgaaggatactgacttacagcccggggaccatatttggctgatagaagttttgctttgttttgttcctggcctgttcatttgtttttggtgaattagttgcaaatgtataaaaagcaaaagattttagattttacattttaaatgttggattcctggcttctcctgcaaaatgaaagaatctggccaccttaggcccccgttcccttgtaacactcgcctggagttggcaatcggggctcttaggcagatctagcctctccccgacaggtcccacctcagcccccttccctgcctggcatgtgtcattcctaatccacagcagaactgcatcattccttgtatacactgatggcctgagggcacatacactcagagccctaggcgcacaagccatgggctacagagaccaccaggtgcagagtggctcacatgctccggtgtgtctacgcacacatacatgcacacacacacgattctctgcattctcatgccggagtttattctccagtgcactgtggttcgttctctgtgtgtgtgtgtgtgtgtgtgtgtttgtgtgtgtgtgtgtgtgtaaatatgagcaaatgaagtgaggatgaatggaatgaatgaatgaatgaaactcaaagagcctcagtgcaggaagacatgtttttcaatctttctgaccttcttgtcaatatggactagcatcagacacctcctcttagcacatatagggcctttcatgtgagtacaaagctcttttccctttacagcccatttctatcactacgtctctctttccagagtctcaatttagtaaatgtttaccaagcacctactagctgttgagccatgtacccgacacttcatgcaggagtatctcatatcaccctcaccagccccacgatccggaattactgtctctatttcataaaacatggccaagatcccatggcatgtatgggagggtggaggacaggagttgaatgcagattccctaagaattattatcatgtacaaacctgcaaactcatacccctgtgctggtggcatcactccaccagccttccctggctctgcatccctcactcatagactcttcattttatccagctgtttatcagcaaccgtgagcaccttgagagcaggcataagtttgaattccatctgggtccccagcctgcgcccagactgcttttactttccagtgaatagacagaaaaaagagatgtgtttgttggttggctttttactcttagcaccaaaaacattttcctgagtgcccagccacaaacagggaccagcagtgggtgccacatgggtgctcagaagtggcccccacccacaccctcagcaccttccacccaactcagctcctggagtggcccaggaacccctttcccagactgatatattgatgcctccacaccctggaagaaatctggagctcccaaattctgggagcagagctctccttcatgctgcaggaacccaaaacttttttcttaggatgccacagtgagagggcagagaaaaatgaggattcctctcacccagagttaggacatctctctgtttcatgcccaggttcagagatattcaccagttacacaaaggccgtgcccaattaccctaacataagcagaaacacaccaactgacatagctgctcccgcccaccattcacaccccacgaccccaccagttactaatttcatctgcagtcagacaggtcctgaaaggaacactccagttccacacacactcccccagcagctgttcccacagcagtacccacagacacccagaagtcacgtagtgtgaccctcggatcttcgggccacgcgagtaccccgtcacacgcacacgcgcgtacacacacacacacacacacacacacacacacacaaagtgcccctgggagtgagacccaagccagatccaccaagacccgcaggggcccaataccccacccgccgcgcgcactgacacccggagagagggacgcacagcggctgtgggtgaagcttcacaaaacccagtcgatagacacacgcacgagttgtacacaaagccttggggcgcgcagatacgcacacgcaggtccacgctgttgtacccaaagttgcgcgcagaaagccccagcacgccggctgcccaccgcgcccgctcccgccggcccagtccacaccccctgctcctgcccttgcccacagacgcgggacccggaaggccgaaccggaccaggcggaggcccggggaggccgggtcccctggtcgcatgtccttcggcgggccgcgaggtcaggctcgccgtccttcgccgccactccccgcccccggccctcggcctcctgccgcccccagcggtcccctctccgcgtgcgtacctgtgccgggcctccctccccgcctcaccacgctggggcgaagggcgcccggccgccggcgggcgagggtgcgtcctctccggtgcccgtccgccttcctgcagccggcgtacgcctgcgggggtctcgcctgcgggggtctctctcctgcggcgcagcccggagggcgcgggcccggccgccaccgcctcgccctcccggtctcccgcccccttcccggcccggcccggagccactgccgaggcgcacgtacctactcgcgccgcgcggagctgtacggcggcggtggcggccgctggggaggcgggggggggatccggggacggagggacgggagaaggggcgggggccggggctcgccgagcgccgcggagggagctccgcccgcggccggcgagggcgcccggagagttagcaaggagagggacaggaaggcgggtgatgggctggggcgagggtgcgggggctccgatccaccgtcctcccctcccctccaggcagatctggatcgccggcgcctgggcttagggaactggggcttggagcccgcggtccacgggcgcaggggcggggcgggcgggggctgctgaagaagatccctccccaccaccggagagcccctattgcgccaagcgcaggtgcctccccactcctcacccccactctgccacttccccttccccccacccccaccccgcacgcagcccccaggtaggaccccgggtcctctccgaggtccttaggtcgggacggtctcctcgggcgcttgcggctccgtggctcaagggcgccacctgaaggctgcaagaaagaatccgacgatccccctcccccttttctctgcaatttttttctccgtgggacagtggagtgctccgcccaagaggggtgttctcctgggggcattgccaatggccaaacacaccctcaccctccaaggcccagctgtggggcctcttctcctggaacccctccctgggcacacacccacttaccccacgggcccctccatctgggctctccttttgcccgcactgtttgctcttgtctctgacggtcgtgattttgtttaagggtcagcctcctccatcggattggcagctcctggagagcaggacccatgtctgatcacctagaagacctaggtgggtgtgggtgaacaggctgtgaaaaggggtgactttcacttctttcctttacagggccggagttaagatgagtccagcgaagtgcctagagtaccaaattcatggagacgtttcctctttggggaacacacgccaaccccagagacagctttggtctgaatcgtgcaggttccgggaagacacggtgac

SEQ ID NO: 1562192 - DNA, 4001 bp, Homo sapiens
atgaccccctcaccttcttccaaaaatagttaagtggaatattttaataattcatgtctacagttccctttaataatttcattgatttattatgataccaagggtatttcatttggaggtctaaaatatccccttctttgtgactaagaggtaaatgcacatttgaaggggtgatatgccttatgttcttcgagcaatgtaatctgctgtgtgacataaattttggctctgatctcacactgaggttttcactccataggcacctgcttgcaatttaaattgaaagaatcaaaacttggtcttggataaaggaaagatccaattttctgtctgtgtcctcaacgtaaaacaaagattcaatagtagtatacagattgccagaaaccacaggctaaagagatgtggcaatttcctgaaagattttatgtttggggggtgggggcgggaggggggcaggtagggtggaaaggagttgtgggaggggagagagagacagagagagagagagagagagaggagggagagagagagagagagaggagagagaggagagagagagagagggagggagggagggagagagagagagagagaagagagagaggagagagagagagagggggagggagggagggagggagggagggagggggagagagagagagagagagagagagagagagagagagagagagagagtctgcaagcccaccatgatggtctctcaagcccgctcagacatctgcccaccatccactgcaagcctctttcaaatggtcacttcctattataaggttaaactataatcaacaaatccctttctttctcctaactcaaaactgtagtttcccatctccttaaagaaaaggcactatccaccatttgctttctattgttaaaaggggcaatgcgtatcttcttttctttatggcacaattattaatattactcagaaagtcctacctttacaagttataataagtatcaacatttatttgaaatcatactgtaaaatttaaaaggcatccatatttatgttttattctcacaatgacatctccaggtcttcaaacggaagactacgacacaaatggcctgccttcaccgtgctgcaatttcttcaacaggtaacttgcttagcctgtgctacgtattcatactgcacgtggatgtcactgaatgtcctttctcttccaatacatatctgtatctaaaagcacacggtttgcttgcagattttcttccttcccttctcctccctatgggaagctgcccactccaccccgaaaacactgtcccccaaagcaaggggacgcgctgcaccctcggctgtcaccgcgagggctcggcgcgcatgcgcggcgcgagcggccgggccccacagccgcaggtcgttggtaaggcgggtccgcggaccccaggtcgagcccagcggcagtgcaggatcgcaagcggcccggcaccggcgccgcaggttgttggcaagcctggtccggggttttaggttgagcccaagcggcaatgcgggatcgccaccgggccgcgcgggcttgggagggtgacgcccgcgaggacactgcggcgtccggggcgggcgggcacactcacaatttcagcatccactcgccctccatcaccagcgtccagttggaggcggtcatgggctggacccggctctgctccggcggcagcgcggcctcctcggggcctgccgtcgccgccacagccgcgatccaggcggccaggagcgccgttagctgcgggccgcagcgcccacccgccatgttgggcgccgagcgaggcttctcggcggggagtgtggggaagggcagcggccggcccgcagcctcgctcgcccgccgggtttttcaaggaagcgggagacgcaagggccaccccgcctacgcctagcggcgcagactggcggtgctcgcaatgccgcggaggacgccacctcttatcgccgcttgcccgtcgaggccacgccccctcccgcctccacttgccgttgcccggggtgtcggttacctcagcaaccaccgccctttcttcctgaccgccaagctgacaataaacagatgacccaacgttgcctaagttagaacatgcaccgctgctgcccaggctccaataagggcagggttggcgcgtgtgggcttctctaaagggaaacatggccagtaattttaaaatccatcccctcttcaatgatagcaaatataaaagcaacgggctgcaaggtacacgtatgtttaatgaaaaatggagggacgtggtgagtatctcctgctgaagagagaggaaaatttaagtactctgcatgtgtatattgaagcatcactaatttaggatattgatgaaactagcctatgcaattgcattttttttacaaaaaatgttaatttcatagaaactcttaaaaacatgggtactagccgataaaatgagtcaattaagactattgccacctgcagtaaaatggacctcacatttctcttgactacagttttgtcagatctaaaatgagggtagccttaagtgatttccaaatttctttccaggtcacattagatgaatctgtaccttgggaccaccacaccgttaatatataagactggattacaattaaaggatgaggaagctttctcaaagggtgctttgtatgtgtttactagttgtgcaaaccatgaacctcggtaatgtggttaatagaccatgaaaaggatgtggtttctgccctcggcttaaaacaaagacagcaataagactaaaagtacttcagggcacatgagagcaaatttcaatcaatacttataggagagggaagttaattttgcctgaagagaagatctggcctgcattatgcattaattagtattagctaaaaactatgtggacctagcccttatcattaaaataaaacactcaagggtttacaaactattgaaatttaagaaaatgtctttgcaatgaatgctactaagactcactgttattaagtacatacatatcaattccataaactcaatggaaaacattttactgtgcttgtaaaaagaagtgactcataaacaggaattctgtcattttatcactttcatgatagaatgatgtgtagaatttgttttacaatgctccagaaataaaatgtagggaatggaaagaagataggtgaaagaaaagtggtgcaacatcagtcagtgttgaagctaagttcattttgctactttacctactcatgcatatgttggaaaatttacaaaatgaaaagctaaaaggagagagagcatcttcagcatgaaagacagccattaccaaagcatttcctatctttaacaaaaactgaagtcttagccttcagactaaggatggtaggaagaaagtagcaaggaagtatgggactgaccttgccgtaaggagtcacagaccagggtaagggacctgttgctgtcagaccatgattggcatcttagccctgacacttcctagccatgtgatttggggctaaaactagtccacaccaaagttctcttaaaatgcgggtagtaatagaacctgctccaaaaggtggctgtgaagattatatgagataagaataatgcctagcacatattctaactcaaaaagcttacatattaggttggtgcaaacataattgtggtttttgccacaatattgccaacactaatattattatttggaggcaacaatacgctgtaatgtctatttttcttatactaaagttaacttcacttagcatgatacacaatgcctctcacagcccagcttcagttttgcccactttacattccactattcccagagttccctgtgtcctagtaacacaaagctactccccattcccaaagcacattgtgtacttcagtgtctccttgctccttcattctgattagaacactcttctccagttgtccagtgaatcattcagtctctgtcatgtagtccacactgtacctctgatagctcatgcagaatgagct

SEQ ID NO: 1562193 - DNA, 4001 bp, Homo sapiens
agaaacctcatttcttctatttaaaaaaaagcctctttcagtgcaagtggggtgccaaggatgtagaataaataagagggggccaggatcagtgcacagggaggaagcgctcacggacgctccgctccagcccgggcatcctggccacgcgcagcgcctgcagcagccgcaccagcagcgccccgtcctgcgcccccaggagctccgtgagccgccgacgcagcttcagctgcaaggccgcgcggcccgcccttggtgtcggaccccagccctccggggcctcgagggcctgcagcagccgctgcagcctcttgatggagatgtcctggaaagccacaaagtcgatgacggcacgctcacactcctcagctcctgcagtggggtggggaggcagcggtccgatcatttcacccacacacactggcgggggctgccaggtaccctgctttctgggccccactcggggggtttgcaggagagagaaatccctgtgcagtgagccgtgctggagagggcagtgcaacgatggggactggagaaggggcaggagccttcggtcagagagctggagcaaaggcctagggggcaggagcggccactcggaccttggctgcaagaggcaagggggcccaggcaagggcttggggctcctgggccatcggaaggggcgagttgggacctgcagatggaccggacctgacttgatgttaagggggtcacttccccctgtgacttctcaacagtggttaacattgggcctcggtttccccatgtcagaggaggcagccaccttcctctcaggcagttaggagagttaccatcaggcctcggtttccccgtgtcagaggagccagccaccttcccctcgggcagttaggagattgctgcccactttcccagagctccccaggggaggctgtgccctggctcagatccaaattctcagccacccctgagagggcagacttggtggggatctagtggagggacccctgacccctcaaatccactgtggccccttcccagagccagctggcatgcctcaggctagatgcacgtgcaggggcaggagtgagggcacaagtgggcctggcctgcagtgtgctgccccctcaggcctctggctcacctggtaccctggtgctgagggggaagccagtgcagctggtgcacagggtgtcatgggaggaagagcctggcacattgagggccaggcccagggccgtgcagttgcggtggggctggcactgctctgagctggagctgctggctgagaaggtgcctggggggcacggctggcactgcgtgttctggctgggggtgcctgcagccaggagggaagaacagggtcaggggaactggtgtcctagctcagggtgcaaggctgggaccagcaacctgacccctgccacacctccggccaccactcctgggggcccctcccctcgcccagctctcacccggggcaatcacgccggcaccaggtggacacgatgcgtgctccaagcagaaaccagcgtgcgcgaagaagccggtgcggcagcggcaggcacggttgtgggtggcgtggcaagcccgtgcctcctcctcacgctccccgcagaggacgttgcagtagcggcagcgctctaggtagttccagaactgcgtgtagtggcgcggtggacacgggccacacgtcgtggggctgtctcggcggcacggccgctgcacaaaggtgcctggggggcactgggcgcacaccagccgctcccctgtctctgcgtcccgccaggggtaggtgggtgtttctgccactccgcgtacagccggcaccggcagcagggcaggcagcgccaacaccaggcacagcagcgacaggcctggcccctccagcgccctcatggtccttgctggagcagggagagcgcggctcagcgcggacacaggaccctgctgtgcctgaccgacatgccacctcctttgcccccggtccgcctgcggaggggccgcccaagtccagaagcccatcctgctgctgccctacatatatgggcggggagagggctgggccagcctcgccacgccccataggaacccctccctccccaggcagcccccctcacccacctggtaccatccctccccagagctcagtccaagggtggttctgggaggggcctcaccagccagggagctgccctcctcagcacctggggcagctcccaacccagagaccagcccaggcagcctggtgtgtcggtggatcccctaccaactgcagcttggctgcggctgtgaggatgagggcagggctgagcccaccgtggaggaagtacagtgtcacatggcaggctgggaggggcctctgccaactccctgtccctcaactcccaccaccaagcccaggccacgaagacaccgtcctgggcactgccagcagctttattagagagccctgtcccctgattaaaagtggacacgtgcccacgggggtctcctccttcccggtgaggggctcagctggggtgcccctgtggcaccactcacaggccaggagccagggaagttctggggaagcactttcccagaaacccaccccagaccccaaggtagctcagggcttctcagaggcaggcccagatccggtcccaccgcagggaccaaccatgggccccgcctgcctgaggcctgcagcgggccaagccggctggcatgggctggcctattctgttgggtgggttcttggcccaccagagctggacaggcaggtgatcaagccacgttgggtgtgctgggggcctccgtgggcactcactggggctctggccagaagacctgcatgacgctctgcttcctggaggcggtgtggcaggctgggcacatcctagaggcctgtgagacaaccggcccactgcacacgtctgccaggcgttgccaccaggacaagggcctgccctttccccctcagcccatcacctggggctacacccagcaggaactgtagtggccaggcaccaacctgaaggtgccgttgccagcaggcttggcagcgctggaagtcacaggcagggcactggaagggcaccacgtcctctgccccacagccctggcacacacagcctgctgagaggggcccgcccggagctcccgtggcctgctgcccagcgatgtctctcccatgaggctcaccccactcagatgctgcaggcccgtggggaggtcctgaggactggctgggacctgcatcctcaccgcccgcccccacagtccctgctggcctctgtctaaggaaggacgagatcttgctctgggtcttcccggtcttctcggaccgtgaggggcctggagacagagacttgagtctgaggggggcctggggctttgctgctcactcccagggctgcgtgcggttggggcgctgccaggagcagccaggcaggtgccctacctggttggggagccctgtgggtaagcacaggaggcacggcaagcctctcctcctggggtcccggtggctccatgcccgggtagggccggccggtcaggtctgtgcacgtctgtgagaagcgctgcttgtggtgtggacgcacaaacatgctgaaccctgcggggagcttcaatcagacccggcacagcccccattttgtcccctgccccccaccccaccggctgttccccacgccagggccacttgctgtgcagcagggggaagtcctctggctttgcagtggtcagggcggccaacacagccagcaccttgtcgaggtcgtcgtcttgcttataggctgtcagcgctgccaagagttggctacagcccgcggaccccagggccctgcgggcatcagccaggtaggcgctcacggcgtgctggccctgcttccctgctctgggcactccagacccccactgtggttggctgccagggtctcctggtgtgggagtagcatggctcagagtggcgctggggtggaggactgagagtcccaccgccctgcccgcccttcctccaggaactcctg

SEQ ID NO: 1562194 - DNA, 4001 bp, Homo sapiens
acagtctcgccctgtcgcccaggctggagtgcaatggcgtgatctcggctcactgcaacctccacctcctgggttcaagcgattctcctccctcagcctctcgagtagctgggattacaggcatgcgccaacacgcccagctaatttttgtatttttagtagagacgaggttttaccatgttggccaggctggtcttgaactcctcacatcaggtgatccgcccacctcggcttcccaaagtgctgggattacaggcgtgagccaccatgcccggcctgaccccagttttttttgtttgtttgttttgttttgttttgagacggagttttgctcttgttgcctaggctgcagtgtaatggcacgatctcagctcgccacaaccgcaacccccacctccggggttcaagcgattcttctccctcagcctcccgagtagctgggattacaggcatgcaccacaacgcccggctaattttgtatttttagtagagatgaggtttctccatgttggtcaggctggtctcgaaccccctaccttaggcgatctgcctgcctcagcttcccaaagtgatgggattacaggcgtgagccaccgcgcgcagcctgtgaccccagttttgagcaaaagagaggagacaacaagttaagcccaaggccttctcacttgtcaattgaaggccaagtcgggaaccccccccaccccccagtgaccttaggcacgtcaattagcgtgccttcatcttttctctgtagcttttcagggatgagatatcaggggtgtgaaagggctttgtaaagggctagcaccattccagcactattttccagttttctgcagctcctaatggtgcccggtactttaatagttgctcaataaaatgtttgttctcaaataaataataatgcaacacaaagttattgagtacttgctgcatgtcaggccacagatcaggcactggaaccacaaagaagagataaaagacacatcatcccgcccctcagagaactggcagagtcggaggctgtcagcttccttcttaggattcagtcattggagaaaaggcccctcatggggggccgaatgtgatggaggccttgacatgaaagtgagatttctgcaggggtttccacgtcatatccaagccaggccatctgggtcagaggctttggattgaggctggcagtgaggacagggtgaggcttccaaggagctcttcagccagctggccaccagtgctcctccttctccccctccttcctctcctcctctttccctatgccaggagggcaggctatttttagtcaggcatgggcaacagcagctggcctctgggatctagttactccttgaagtgaagtggggagggggatctcagaccaaaacaacagctccaaatcagaagccctctctaggagagcggagtctctctaactctggtctgtcatcttctgccccttcccatcatcctcagggctcccagagccctgcatctgagcaggccccacgccctgccggcctcccgtcttctggaggaggctttcttctctccatgatgataggagggtttggccaggcttctggctcacccctgccactggcctgctgggtgactcactctgacccctcagagtccccactgtgtgaaggaaacaagctaagagctcttcacaggtctatgaatgacactgctggaagtttccagaagtgagtaggcagtcagcaagccttaaggatcaatctctggaatatcccagccctcccctttcaagaaaagtcaaaggccttcctccaagacacctgggttccaggaacctccatgctccaacctcaaacatccaagttactgccccacagagcacccaggcctggcctgaaaggggtccagagtgctcccgtgagtaaaggcacaaagtcccctcttgtccttaccatggttgctggtgaccgggactcctctgttgcaggtcgcctcctttgcactccaccacccaaagatgacctggcctgctctagcccccgggatttgtaggggcaccctcccctcccacctccctgctccccagcactggagaccctgcccaatcagatcctggggtcagcgagtcccacccctcccacagtctgaacccattacctaatttagccaagggcccttgcagagaaatttaagcctccaagcaggtggcaggccttgacgtcctagattcttgtgaggaaggcctgccctgttccactgccttggagtccccccgaccgaggaagcacactggctccaagatggtaaggatgatcagagtagtaaagggtgaggcagcatggtaaaatggggagagtacaagccttgaagtccaaaacccaagatccaaggccagcctctgcgagttgtgtgaccttgggccggtagcagtgcctctctgagccatttcttcatctgtgggattggacctgtctgtggggtctccctcacagagagaccatggtaaatgggaacccgggtataagtcacctagcttgtgctgggtacacagcgttggtgcttggcaagaggaatgtcccgtctttgaaccatggtaaggggcaggggataggaggagaaagtgacaggtaggccactgtttactgaaccccatgacgtgccacacactgtgctaagcattttaacatgatctcatctagtgctcctcctatgaggtagcaacgattatccccacttgactgcagagctttgtaaattataaaggtctatactcactctgtcaccaaggctgatgtgcagtggtgctattatagctcactgcagcctctatctcctgggctcaagtgatcctcccacttcagcctcccgagtagctgggactagaggtgcaccaccacccctggctttttttttttttgtatttttatagagatggggtttcaccatgttgcccaggctggtctcgaactcctaggctcaggggatccttccaccttggtttcccaaagtgctagaattacagtcatgaggcaccatgcccacccatgttgatgattcttattattaatcctgactggagggaagttgggacagacagtccttggggcacctgtccagatggaaaaatgtatggagggatggaggagaggaggatgtgcatttggaggagaaataatcattgaaagcaaagatccttctctgaaagttaccttctccagggaaagggtgtttggattcactttttttgaagtaaggagtaggcaggggaaggttctttaagtggtaaaaggacagctggccccttcctagagctcagtgaagaaatctggtcatctggggagtaaaggggtgggcagaccaagtccagagggagcccaacctgagaatccacaaggtgcaggctgggcactggggagtaggcaaggcttgtagacagtggctacgtggacagaaagagcaccaagacaaccgatagcaggctctggggccaggaaaggggggctggacaccaaggaatgcagatggacagtggcaactgggctgcccccttcccctatatatagacattcccaaggaaagctcagcagggctgggccaagctaaataaggcctcccccaggcaggcagggtgccaaagggtgagggagacccatgggattccaatttagtttttattgttttttggttttttggggttttgtttttgagacagactctcactctgtcacccaggctggaatgcagtggcacaatctcggctcactgcaccctccgcctcctaggttcaagtgattctcatgcctcagccttctgagtagctaggattacaggcacataccactacgcccagctaatttttgtttttggtttttttttttttttttttttgagacagagttttgctcttgttgcccaggctggagtacaatggtgcaatctcggctcaccacaacctccgcctcttgggttcaagcaattctcctgcctcagcctcccgagtagccggaattacaggcatgagc

SEQ ID NO: 1562195 - DNA, 4001 bp, Homo sapiens
caaccctgcgatccggacaagtcactccatccctctgatcatgcgtgcccacctaccacatgaggatatcacttcatagacttgctggaagggttcattgtgttagcctgttccctgagctctcttcgtgatcaagaagactgatcagataaatcaagagacttgcccaaaattacctaggaaatctgtagcagcagcagaaccaaactccggtccttgctaaatctagataccaggctagcttttctatggacccagaattaacccatacaaatgtacaagcttttccagaccagctggggtgagatgaatgaaaatggcagcaacatcaatacctcagcttcttcagcaacttcatcaagtaaggctgccatgaggaagtgggcctaaaggagagttttctagaacaaagaagggggcaaaggagtggcttgaaactgcaaaaagtgcagacaaaaaaaaaaaaaaaaagaatgaaatctggagaggatgtgaggagaggtctagcaaaatgattaaaaatttggacttagcatcaaagtcaaacagatccatattcaaatcgtggctcttccatgtcttcactatgtaaccccgagggagccaatttaactctcttggactcctcctttctaagcattttatccacagggccataataaagatcaaaggagatcgtgtctaaaatgtctagcacatggtaaatcactcaagagatgctagccaagaaaaggaaaaaaaggaaggcggcaaagggaaataggtactgaacggtgactcacagaaaccaggatccaaggctcctttcaaaagtcaaggctttaaccaatgagggtttctgattaagtcaccctggagaaggggctttgggcaaaggtctgcggtatgctgacgaaagctggacgctgggagaactggtaagaatatgctattcttctgtttcaaactctccagtagcttcccatccagcagctttcatgccaagcttccagtttggcatgaaatccgaactccttagcagagtttacaacacctccacaataaataagggtctgccttcctaactgacctcatgtcttcctattccctgccctggctcactatgctttgacccctgaaacacaccatgtttatatcgtcttggagggggggcctttctcattgcagttcacttcaggaccgaaaaccttgtgcgcttggcttctcatcatttagacatcacctcaaatatcacttctttacagatgttgcccttgatctcccactccagtcaactctatcacatcaccctatttgtcttcttcctaaccctgattatcccacaggtctcgtttacttactgactcgcttaagactcacgtcctccccaccgcccccacaagaatgcgctgtccttgagagaagggactttttgtgtcttgttacacaggcggtatataacagctactcaacaaatactaactgaaaaatgaattgctgcgggggaggagggtttagctttcttctcagggctcagaacgaggcctaaataacttaggatgggggccaacagggcagttaacaagcaggtggaaagaaagggccgaggaagtttctggtaggatgccggagtcggaaggggctggaagggtgggagggccgggcaggactgctggccgccgcgcgaggcccgggcggtggttgcgggagttggaggagcaggcccggaggtgagatgggggccggggtcgtaccttgcgcctgcagcacccgcagcgcgcggccgtagagcgcggaggcctcggcgtactggccgttgcggaaactctcattgccggcggcgcggagctcctccacagagtctgggaatttgggggccatcccgtggccaggccggcgagttgggagctccttccttcctcccccgtgtggtgcggcacaccttccgggcgcaagcgccggcggcgaatatctccgcccaacagcgaacccgcggcgagggggcggggcctgcgagacctggaggcccggagcgtcccgccctctgcgcgtgctcggtttggaacttaggctcccttgcacgcggggcggcagcatgctctgggctccctgagttgctagaacgccgtggatgacgcagggaaggaggctggccccgctatcagggagattatgtcctagtggggtccccacaggcaattaactgataagcaaacgaagactctcatttcatgtgattagtgctgtaaggaaaacaaaacaggataatgcaatggaaagtgaccacgtgtgggctattttaaataaggggatgaaggaaggcctttctcagggggtaatagttgagctgagaccagacaagatttagggaatgctgttccagccagagggatggtaagtgcaaaggttccaaggctagaaagtacctggtacctagtgctctatagatatttatttaataaattaatgcacaggtggattgatggtgtcaaagtcaacatatagagatgaatctctaaagtttaaatattttatttggcaatcaagaattgcaattcagggcttacacacagaccaggttgtctttggtatgtcagaagaacaaagagaaggtttggagatttttataaaacagaaatgttacatattgctcttcaaggaagtttacaggcactagtaaagtgggggtttatcagcttcttggggagctggcaagctttgattggtaagtgatagtggtggataaaactcagaattgtagcaggctgtttcagtagctattagataaaactggttttaggttacagcaggcagttttagcagccaggcttgcaaaaaattacttttttggagcaatgttatatgccctgagtatttgttcccctggcttttcaattctgtcttagttggatatgacaagaatgacccaattcgtatgatcagctttcagaatggatgaagatctttcacagagtgtgacttcaatttatctccagcctcatctgacgactctatgtcccacgcattgctatctacacacactaaattcttgcttcctagcctttgcttgttatctccttctcctggatttttttttctaaatactttttctcctgcctaatcctgaattaacttataacattccattcaaacatcatcttctctgaaagcctttcctgcttccagccccctccccaccccccactatgctccctttgctccctattggtctctagctttatccctaactttgcattagtcaccctttgattgccagtttgtagttttccttaaacactgcgaggtctttaatggcaggaagtgggtcctttttatctttgtttatccaagaccctaatagggtctggcatccaataaaagtcattgattgataaagatctagtctctaccttcaggaattcagttataatgatctgcatacacttaactccaccagactataagctttctgagggctggatggctgttccatctgaaatgcttccccttgccctctgccccgaccaaggatgaacactgactgtggtgggaaaaccagatgaggcccatgctgctggctggctactcagtgacttccatctttgcttccaggagcctgaattttgcctgagactctcccagcctggggaagtgaatcaggattgctctaagccaattagaaaaatgtcattttctcttgccagtgattcatcaagggatgcacatgtgatgctgatctgggcaatgagataaaagggagtctgaggctggtcgcagtggctcacatctgtagtcctagcactttgggaggccgaggcgggtggatcacaaggcaggaaatcgagaccatcctggctaacacagtgaaaccccatctctactaataatacaaaaaattagctggggtggtggcacgcacctgtagtcccagctactcaggaggctgaggcaggagaatagcttgaacccgggaggtggaggttgcagtgagctgagattgcactgctgcactccagcctggg

SEQ ID NO: 1562196 - DNA, 4001 bp, Homo sapiens
cccacttcaaactctgaacataaggttgctctcagtagagcaggctaacatgatggactgctgattacaacattagaaaacctactcatcaacttctcccattggagaggttcccggaacccaaactcaattgagcaggattatgtaccatcaaaatcagtgggaattcccagcacactacagaaggtaacttctccttcaacagggttgttcgaaagcctgcaaggatgagctttttattggaggactcttccctgggtaactgaagtggaaatacagtaagaataaatgccttgatttggctgaaaagggttcaaaaacataaagaattgggaaaaaaaaaaaaagccagttcttgattcctgaaaaacagtggctcgtgaaaaagaatgaacaggaagcaggggtgggtactggacactctttgcttcaataaataaaatctttttttcctccttacaacccaaacgaaaaggccaacacaccaggtccacaagagatgctcaacaatctttccttccaacaagtacactaaactgcgtttccagaaaaacactgcattgggaacctcgaccacaatgaaaagttccagtgactaacataattttttaaaaatccaacatttacattgggtgacccacagagaacttgcaaactttctttagggaggtactgctacctttgcaaagaacgtaacttgggaaaaacaacctggaaatataaagaactccacaaagcgtggctttagttttagagccataattcctatcataaacagcctatcaaaaaaaaaattaacagttgcttaaggaaatctttcattctggaagcagaaaaggaaacaaacatgaagcataaagggaataacccccaaaataaagtttaaaaaataataattcagtcccccagccttccctctctggtgaagtatgtgatttatacggctttgctctgcagaaagctcattctgggcagctcaaggaaagagccgagggagggagagaaagagacacaggcacagaaaggagaggagagagaaaaagaaaatggcgcagagactaagtcccgaccgtcgacaaggcgactttcccgggaggaatcccggcccggaaagaccgcccgaggcccggtggcggacgacacggggtctccgttgtcccctcttgggagggccgggatctggaggagctggggtccccggaaagggggtcaagaggcggcccgatgggaacaatggggccggtgagcgaggagccgggacttagtctctgggacgccatgtctgtcctctgcccggcaccggcagggcgcgggggaggcggccggcggctggggggccccggagtcggcgcagggggcacactcaccattcaatcggaaatccgcttcgatctggaaaaagaaaaggagagaatatcaaacaacagccactttaacccctccggcggcgagcgcgcgcggccggggtctggctcaccctgcgcccccggggaggacggggacccgggggtggccacagagggcagccatccctgcctcgaactgtaacttcgcggccctcgctcgcggcctagcgagccgatctactccggcaggcggcccctcaccgggggctccggcctgtcaaagctgccgggccggggctggggtcggggcctgcgccgggggtcgcgggacggccaggccggggtccggggccgccagggtcaggccgggccgtacctgggaatcgttgtggaggtggtccccactcatgtcggcccggagggacgagcgcggcggcaggcgaggcggcgtgggggagacgcagacggcgaaccggcctgtgcgggcggacggggactccggaggctcgaggaggcgcaggtaagcggcggtgactgtgggcccgagactccagaaacggctgaggctgctaccacggcggcgacgctgcctgactgccgggcgggcggcgagaacagaccccagcagttgtgtaacagcctaagttcgcatttgggctcactgcgcctgcgcggccgcttttaaacaacacgtcggcgacgtcagcgctcgcggaaagaggcagagggttgcggcccgccccctcgctgttcgccagacggacctgtctttgcatcgcaagccccgcctccggaccgtgcgcgctccgctgtgatttgcataaggagccgactcctcccacggcgtcccaccccaagcagcctccccttcctctccagacgctttttctcggaaccccagcccctctgctaggcagtgcgcaggcgccacccgggcaccgcctccggaccagggctggccgcgcagccacgtggtgggcctttaaaggccgcggcgggacccagcaatcttgggcagagctggtatccggcgtccgcatctccttggagcggcgagtaccttggcagctgggaccccagaggtctccccagcgcctcctttcttgctaagccgaccctgaggccgcctggtgggaggagtcccctccccagcctttgtccaggccctccaacttctggattatttcacgcccactttttaaaaattattttaatttttcaaccaaccaagggtccggtttaaccccagttttccgccgagtacatgtagccctgggtcaccaagggtctgatttctttggttcattctacaaatacttattgagcatccgctatgagcccaggaattgtgctgagggaagggggaatgcaagagaccaaagggaactgaacctgtctctatccgcccctgtatccctggcatgctgggaggacggggcaaatggggaatagaactaccgtttatagagcatctattctgtgcccagctctgaattctcacaatagctctgtgaggtcgcctgtattacaaaagtcaaactgtcctaaagacaagggaccaacagccagctaccttgcatctatagttggatacctctcaagcttctctgggaatgaactgaactccactcagctagaaaaagccccatcctgacaccttcctttccctcatttcccactagtcccgctgattgcatctctttgcttcatctacttctctctgctgcccataagcctttgaagtctgcgttctcctgcttggattaatacaatgtgctggctgggggtggtgtctcacacttgtaatcttagcactttgggaggccgaggctggcagatcacttgaacccaggagttcaagaccagcctgggcaacatggcagaaccctgactctacaaaaaaatacaaaaactggcggggtgtggtggcatgtgcctgtagtcccggctactcgggaggctgaggtgggaggatcacctgagcccgaggaggaggtcgaggctgcactgcactccagcctgggcaacagagtgagacctggtttaaaaaaaacaaaaaacaaaccaacaaaaaacaccgcactccaaaacactacacttctaacagggattgctgcttccattcttggccctctcgtaaactgcattccaacaattgccaaagtgatcttctcaatatgctaatctaaccattactcctttgtggatattgccacatctattaccactttcactattattatttcatattttaattgatctcctttttatttaccttcatcctaagtgttatctgtgaaataatatctatgaaatcatttggaagtaaatatgaaaactgttcatccagtggaccatcagtatctttatcacatctaatgtttaccatcacatgtttaccattagatgtgtttaccacatcttgtgaatgcttcaagatcaacctaaatatcactttttcaaagtgactctccggcgcactactgaccctgcttccactggctgaccaagggtgccttataggccaggcgcggtggctaacgcctgtaatcacagcactttgggaggtcaatgtggatcaatcacttgaggtcaggagttcaacaacagcctggccaacatggtgaaaccctgtctctactaaaaatacaaaaa

SEQ ID NO: 1562197 - DNA, 4001 bp, Homo sapiens
tcatagttaccctaagaaagatgttacaggctctaaacccctgaaccatgacagagacttgcaaaaaagccaaacaagtgtcctgctgggagtcaaacctgggctcaggcctcatctttgttccttacttgctgtgtaatctgtgagttacactcctctgtgactcagtttccccttctgtaatgcaaagaaggaggagaccaatggttcccagcatggagccacagatcctgggagccatggggccacaaatccctatgctcaaaaagcacctttattacattaaatagtaatgagtcttcttcatacctgttaagctatttttctaatgcatgctaatattgtgtttaataaaatacacatctatttcaaagcaaaaataaaaccataacagcttttcattagtgtgcattttctcaaacaaaagataccaaaagaacaaccaatgttcgtgactttggtttaaagaggctgggaatctctgtgtagaggatcgctaaggggacagtcgccaaggggatggtcgccaaggggacggtcgccaagagcccttccaggtcaactgccccataggtgtcgggcatcacttgggcaaatgcttgcccttatgtatataaagcctggctccctgtgcaacgagcctcttgtctgcggacagagccccccatgtgtgggtgtgtccaccccacaatgtctggattcagccaggcctacaggccccaagtgtggtcactactgcaccctgagcctgtttcccctccagctttgatagtgactagtgtaaaggtggagcttgggcatttccctccccaacccctccccatccacttcttgagccagaaaaggggagttcctgatcacagcctggccctaccccccaaccaccaccactaaggccatgcccacttgggaatcccttaccaaaagacctctagcccctaaatgaatacagtgacctctcccctcccgcctcaccctgctctagcctgaaggactgagtagcagatttcacatccaagtgcaaagtcagaccttcctttcacctatcaagtggctcagctgcatccccacccccatccctgccccgccccactctggacacatcctcagctatgggccaggggtcctacatcccacacagaaagaaaccagaatcgccggcttctcattccctccctgacgggcccttcccggcgagattcgcacaggttctggtgctgagtcagaggtttacagagcatcagaataaagcaggggcctcggctgagtcctgcctccaaaggcccctatttgggacagccccaccctggcgagatttatagaaacaccaccctcaaacggagcgctccaggctaaacccccacccactcagactttgaggcacaaatgcccagcccacccacacccgcaaaccagaggctggtacctacctcgccaacttcacattttgaaaaataacaaagccaagggcagaagacagaccagctgcccccacacccaaccttctcctccctgaaaactccacttgctacttttaatctattttcctccatcagactggaggcagctcccggccttctcctgaggctaccatcccccctcatcggcttctaactttgcaggtcactggacaaaagagaaccaccgccactcttcgcgagacctcacttgtcgcccaccaccgccccacatcgcgcaggccctagtggcctggatgcttgctgcccctggcgaactgcagggaggctttgccagaagccgctcccctggggcctgagggcgcactcagggaggcccagcccgggaggccccgggatccgcgccgggacgcctctctcctgcctcatccccactaccaggggcctgacgaaaagcctgcgaggttggggagagaccctggggggcgccgatccagccactggacgcgcactcaccccgcatcgccacggagcccacgcgtctgcgccagggctgcgggaaacccacgcgcgctgttcaatccgggctccgagtgacgaaaacccgcgcttggctccagccggcccgggaccgacgcaccgactggcggacgcgcggacagtctggcttcctaactaagtttgaaagttccctctccggcgaccgaaggggacgcggactgcttagaggcacccaacccatccaggctgggccagacccggcagtgggacctgacgcctcgggttcggggttccaggcacgcaagcctccatcactgggaatgcgcccggcgcagcgcagctgggacctggctggggtggggggatagatcctggaaacatggaggagggagggtgtccggcactacagccccagcctggagggacgccggctcaccgctcccgggaggacacaggcctcgattggccgcagcctactcggaatccgaggccccgccaggcagtgacggccaattagtaaactgcccaattagtgtgctgcggcgctgagaagttaaacctcgacgcgcgagtgtggatgaccgaggtgtggccgtccctgggtgtgaccgcgtgtgactgtgtggccgtcaggacgatctgtgtctgaggctcaccgtccaggggggtggctgtgtgtgacagcgtgcgcctgggtgaggcgttgtggctgcgagagtgtgactgtcgggcgacttctttgtgtgactgtcccccgttgtgcctgggtgtgacagcgggtgggggcatgtcacggtgtgtggggcatcggagcgtctgtgggtgactcgtctgtggcggtgaggctgtttgcgggtgagtggttgcgtgtcgttgtgtataagtgactgtcagggtgacttgcgtgggacggcgggaccgtgtaagcagtgcctggccgcctgcgtgtggctgtgggtcactgtgacggcttgtgaatgactgcgaggctgtcagggggacgcgagtgaggggccactgtgtcgtcgcacgggtggctgtcgggatgacttctgcccgcgatcccaacaactcagggcgtgagcgtggccgcgaggggatcgatgtgagccgcccgtgcccgtcggcggggctgatgtgcgcggccccgtgtgaccccgggagcgcctgagtcccgagctgccaggtgactccggccccgcccgccggggacccccgcccgcccccgcctaccttgccgccgtggtaatagtccaggtgcgccaggccggccggctcggccccgggccgcgcgcccaccgcgggcgccgaggggtacaggcggacgtccatggcgggcgcggcggcggcggcggcggctcccgcgggcagtgcctgggcgggcggcgggtgggagccagtgtgcgagcgggactgcgagcgcggggggcgggccgggggcggtgcccagaggagcgccccgcccccgcccccgccccgcccgcgcgcgctattgttccggcctcgggcgctgcctagggccgggggcccgggggcccgggccggggcgtggaggtccttcctccgggctgggccgccgccgggtcccccgcccggccctgcatccctgaggggggcgcgcctgtccagacggcgcttttccgtcccgcctttcgccacccacggtgaggagagaagcccgaacggcacccctccccagaagtgggacactcccttgccctaaatatttgaggcggcgctagtccccgccccgcggcgtgggtgcggggggaagaggaaggtggtgacaggaccactttggagatgggtgctgccttacctggggggacgcaggccagcgccggaggatgctcttagcatgcccgccccctcctcgtctcactgatctgagtcagcttgacagccccccctggagattgccgcgcttaaactctcactcacatatggggaaactgagtcaaaaacttgcagcatcagtaatggagctccaggcgggtgggctccgttgcccccaaaggatccagagctgaaaccacttggagaaggcagcaggaccccaccccttttaatgatagggagggg

SEQ ID NO: 1562198 - DNA, 4001 bp, Homo sapiens
ttgggacagccccaccctggcgagatttatagaaacaccaccctcaaacggagcgctccaggctaaacccccacccactcagactttgaggcacaaatgcccagcccacccacacccgcaaaccagaggctggtacctacctcgccaacttcacattttgaaaaataacaaagccaagggcagaagacagaccagctgcccccacacccaaccttctcctccctgaaaactccacttgctacttttaatctattttcctccatcagactggaggcagctcccggccttctcctgaggctaccatcccccctcatcggcttctaactttgcaggtcactggacaaaagagaaccaccgccactcttcgcgagacctcacttgtcgcccaccaccgccccacatcgcgcaggccctagtggcctggatgcttgctgcccctggcgaactgcagggaggctttgccagaagccgctcccctggggcctgagggcgcactcagggaggcccagcccgggaggccccgggatccgcgccgggacgcctctctcctgcctcatccccactaccaggggcctgacgaaaagcctgcgaggttggggagagaccctggggggcgccgatccagccactggacgcgcactcaccccgcatcgccacggagcccacgcgtctgcgccagggctgcgggaaacccacgcgcgctgttcaatccgggctccgagtgacgaaaacccgcgcttggctccagccggcccgggaccgacgcaccgactggcggacgcgcggacagtctggcttcctaactaagtttgaaagttccctctccggcgaccgaaggggacgcggactgcttagaggcacccaacccatccaggctgggccagacccggcagtgggacctgacgcctcgggttcggggttccaggcacgcaagcctccatcactgggaatgcgcccggcgcagcgcagctgggacctggctggggtggggggatagatcctggaaacatggaggagggagggtgtccggcactacagccccagcctggagggacgccggctcaccgctcccgggaggacacaggcctcgattggccgcagcctactcggaatccgaggccccgccaggcagtgacggccaattagtaaactgcccaattagtgtgctgcggcgctgagaagttaaacctcgacgcgcgagtgtggatgaccgaggtgtggccgtccctgggtgtgaccgcgtgtgactgtgtggccgtcaggacgatctgtgtctgaggctcaccgtccaggggggtggctgtgtgtgacagcgtgcgcctgggtgaggcgttgtggctgcgagagtgtgactgtcgggcgacttctttgtgtgactgtcccccgttgtgcctgggtgtgacagcgggtgggggcatgtcacggtgtgtggggcatcggagcgtctgtgggtgactcgtctgtggcggtgaggctgtttgcgggtgagtggttgcgtgtcgttgtgtataagtgactgtcagggtgacttgcgtgggacggcgggaccgtgtaagcagtgcctggccgcctgcgtgtggctgtgggtcactgtgacggcttgtgaatgactgcgaggctgtcagggggacgcgagtgaggggccactgtgtcgtcgcacgggtggctgtcgggatgacttctgcccgcgatcccaacaactcagggcgtgagcgtggccgcgaggggatcgatgtgagccgcccgtgcccgtcggcggggctgatgtgcgcggccccgtgtgaccccgggagcgcctgagtcccgagctgccaggtgactccggccccgcccgccggggacccccgcccgcccccgcctaccttgccgccgtggtaatagtccaggtgcgccaggccggccggctcggccccgggccgcgcgcccaccgcgggcgccgaggggtacaggcggacgtccatggcgggcgcggcggcggcggcggcggctcccgcgggcagtgcctgggcgggcggcgggtgggagccagtgtgcgagcgggactgcgagcgcggggggcgggccgggggcggtgcccagaggagcgccccgcccccgcccccgccccgcccgcgcgcgctattgttccggcctcgggcgctgcctagggccgggggcccgggggcccgggccggggcgtggaggtccttcctccgggctgggccgccgccgggtcccccgcccggccctgcatccctgaggggggcgcgcctgtccagacggcgcttttccgtcccgcctttcgccacccacggtgaggagagaagcccgaacggcacccctccccagaagtgggacactcccttgccctaaatatttgaggcggcgctagtccccgccccgcggcgtgggtgcggggggaagaggaaggtggtgacaggaccactttggagatgggtgctgccttacctggggggacgcaggccagcgccggaggatgctcttagcatgcccgccccctcctcgtctcactgatctgagtcagcttgacagccccccctggagattgccgcgcttaaactctcactcacatatggggaaactgagtcaaaaacttgcagcatcagtaatggagctccaggcgggtgggctccgttgcccccaaaggatccagagctgaaaccacttggagaaggcagcaggaccccaccccttttaatgatagggaggggagggccgcaggaatgcctagagcccgaagctctgaagaggggtctaggatctgcccacagtcacggtctcttggagtgaggaaaggaagaaaatgagattggaatgggatggctctgatggtgggtcagaaaggtgactgtgaaatggggttcctccccaaccaaaaaaaaaaaaaaaaccctctagttcttgatatcacttgctggttgctagactgttgcacccccatcccccttttcatgcaagaattgtctacactagcaatctcccctagcaatctcactgctcactgactgctccaggtatgtctgactgggagaggccaggaggcgaagtcagccagaatggcattcttgtgtggcaccaggatataggatgccattgggagaaaaggacttgagcttcctgcccactcaggagctagcttagaacttagttctcaactgctgcttgggctttgctggtcctggcctagaactaggaccataagaaagatgcattaacaaaagataggtgtgggaaacaggcattcactgaaggcttgggaacaacagagggaaattatagctcagaaaggaaagaacttccaaataaatttcagcagtcattgtttctagaaatacaatgccacacctcatcagaaaaaaatttccattgtcctgtgtccatttttttcatctggatatccaactgaccagcactctttattgaaaagatcaccaccaccaccaccacccccctacacacacacacatactcttctgcaatgctaacattgtcgtaaatcaagtagtcgatatgtgcataagactgttcctgaattctctattctgttctgttagcctatttttctctccctgtgccattatcacaatgtctggattactgtgggcttataagtctaaatgtcccatgaaataagcctacccattttgttcttttaagactgcattggctattcttgatgtttacactttcacagaaattttggaatcagcatacctatttatatatatacacacaaacacactaacacaatcttgctgggatttcaattggtatcactttgaacctttagatcaattggaataaaattaacattttcaatagtaaaacttcttatccatgaacatggtatgtcccttcatttattttgggtttttaaaaaagttatctcagcaatgttttgtagttttctacgtggagaccttgcacatcttttattaaatttagccccgggtgttttttgttgctattatgaatggcttctttattttattttctgtttg

SEQ ID NO: 1562199 - DNA, 4001 bp, Homo sapiens
cccttccaagactcctttccttccagcaccttccttcccagccaggggctctcagcaaacaggtcgtcaggtagcaatctgaatgctggcttactggctggctgttttcccagggccccaccaacacagtgctgatgagtggtattcagtaagttgttcaggaagtgttaacactaaaaggatcggttggttctctttcaaaatggccagtcagtccttgccatgaactcctctcccagtcaagaacccatggaagtgaccagaaacacaaagaattcctattagccagggctgtgaaacagacatggccctcccttcaagctccccaaacagattccagagcctctgactcttaagcacaagaagagagctccctggatcacacacgcagatgcacacaaacacatgccgttgtgagccacgccctcctcatgagctgagccgacatcctaggtcatttgttcattcattcatgcctcattaatgaggtccttccacacaccaggcaaagtgttacacagtgagtgtgtgcacacgtgcatgtgtgcatacatatacacatgaacacacgtaaatgcttatacacacacaccatcatgacaacacaagaaagtaggcatcagtgtccccattttatggatgaagagacagaaagctcaaggaacttgccctatgtcacagattgtatttatggccgagctgagatatgtaagcagtgcctaacccagaccccagtatacagtaggtgctcaatagctacattctgtgtccagctggctcctcaggcttcccttgcagacctgggcccactgcctcctgcaggctttcagacccagagtggagaaggtagaaaccatcccaggaggcacagaagctggtgtttcctggtctctcccagttcacccaggatgttccaaatgacggaaagcggacctgagcgggagccttcttttgctgggacacacatgcacgaagccagatttcaacaatggctgtgataaatcagagcacgagaagaggtcgggtctcctggtctgctgggtgcagcaccatcaacagcaacaagccccgcccccaacccagtcaactcccatcaccaagatagcctcccaggcacagctgggatggccccttcacgttaggtttctgcatttgaaatctctgccacctattaagggcatgtgtgtccccttaagtccccttagttcctttctcatttgttgctgtcctttcttctacgaaagtatgctgcgtagagatcccaactggttattttttaatgtccttacttcacaaacggaaaaggtggcattcaccaaatttggcaagaaatttttattgattccccaaactccaaaatctagtggaagaggcagctcgggtattcctggtgacgtcctcagctgcttctcacccgtcttgccttcttggaaggcccctgtcactcttcagcccaggtatcttctgggctcctcccaagccatgggccatccccattactgctcccattgtttccagtctgaatcagccagaccccccaacccacacctggccaggcctactgcagggtgtgctgaatgaatgaatgaatgaatgaatgatcctgagcagcctgggcaccaaggccacagcctgaccctgctctccagaggacagcccaaaccgcctccagaattcctctccaagaaggagctgccaactgcaggcctcctggcccctctaaagcatcttcattccagaatgtgacaagcaccagtccaggtccctgcctgcccccatccagacatcacctatcttcagcccacagtgacggcctgaccacctccacctcatggggcggtgggcacccgctgcttaccttctgcggaaacacacctgcaatgcaccagtgtcttgcaagtagaaggagcccgagtctcattccacagaagcccaggcagcgagagaacgcgcccgcgacagcctctgtgcgagtctgctgcataatcagcagagaaagaggaaaaaatgccagaaatagcaagctttataagccctcctgacaactcttggtcctctattggctggaggcccagcacccccaccccccatcccattcgtataaggtgaaatggaaaaacctgttatttaacctcttttatcaaaatccatctcctattccaatttgggcctgcgtgttcggagctcctggtggcggtctccacgccaggtctcggggagcagaaggggaggcagcccctaagtacagcgcggctccacgtcatttgtggcttaagagccttccccactcacacacgctgccttgggaggggtgttgcactggaagagccttcggaaggcaaattggcagcacctgtcaacgtgtgaaacttgcatgccctttcattcagcaattagacttctgagcatccatcctgcagaaatacctgtactcagtgcatggatgcatgcccaaggatgttgcttgttacagagagaattagagacagctaaatgtcgaaagccagggtctggttgaatacactgaaatacatctgatggaatgaggaaggtgtgtaggtactgacttggaactgcctgcaagaaaaagtcaaggacatggttccatttttataaaaacaataacggtgtatatgtatgtgtttgaacatgcactataaaagataccaggctgttaatagcagttacactagggaggaggagatattttcagtggctgcttttttctttcttgtttcattttttttttctttaccacaagcgtgtattacatttgtaatttaaaacaaaaaaataagaacctcccctggttcctttccactcttctgaagccatcaggccaaaggccaaggtcacccaccacaagccttgatcgggcttgggataaagctggccccgggcactaaggattaaccagcagtctctcattagctttcgcacaaatgcagttaaactagggctccatgaagaaggcagactttgaaataagacagagctgggttcgaatcctagctctgcctgctggaatggctaacttccctgagcctcagtttcttcacctgtaaaatggggataatagtacctattaagtgtcatgtactatgccaggtgctattaaactaattttaattttttggacatttcagtagcagcaaaggctgctgaggaagcaccacagagctgagaggatccagactaagcaggaagcgctctggggaatcatcctattcctgaacacttgtaacaatactaaagtaagtgacagagagaacggcctgggaatagcaaatgtcatgtgataaagggggctggtgcccagcgtgtctgcaggaggagggagaggctggaagggggattacaaaaggctccagaaaggaaaaaagtcttgcttccctgcctctgtacctttttcatgctgttccctctgcctggaatgctcttcccctgaccttcacacaactgactgcttctcatccttccagctctgctcaaagatctccttcttccccaaagagagctcctctaatctcacctgcacctgagttactttgtccatagcacactcctgcagccaatcgtttctgttcatgtgtttgatggcttttgtttctgtgtttattgttcttctctaggctctgagcttcttgatggtcaggatcgtctgtcttgctcatctctgggtcctggctcccagcatggggcctgacacacagtgcgtgctcaccagatagaaagtgcacacaacccatagatccaaggcacatgacactcgtctcaaggcaaaagagaggtgcattttgcaccgcgatacaaagatggatgaaaatttcagacataccaaagatttagaaacacacacacacacacaaagctgtaagcatgcaagaggaaattgtccatgaatatttatataagcttaggatgataaagaactttctaggctcaaattcgtgtggacaaggatatttattgcatcattatttataagaagatgaaaatga

SEQ ID NO: 1562200 - DNA, 4001 bp, Homo sapiens
tgatgatcagaaagaagacataaatctatccaaaaatacatggctagatagtggcagggcagacctagtcccacgttactgtgcatccagtccagagtgtacacagtcaggaaagactcagcaaacaatccccaagaatacaatgatgcaggggtacagggaggtgaaaaagaccttgacctagccacaccacccctcgcctagctacaaaagggtctggggttactggcaccaagatttagcatgcatttactgaagacccactgtgtaccagagcctgcactgtgcctccccaaatttcagataggtttaggggagggaggctcaggggaaaagctccctgcctgaggtcacacagcaagtcagtgacagccaggagtgaaagcagtcaccagccagccagtgcctgccccctctcctgaccacttggggagcctcccagatttcctttcccagccctgccagcttcctggttctcacattcccagttctgctccagggagaaccattccctttaataactacagcagctctgcccagaatagcatttgtgccctaagccacccctacccccagcccatccttgagcaaactcccagcaggaatggagttcctggttcagcctctaggcccatccacttgttaagtcagaaactctccttatcctatcccttctcctatactctctgtgggcagaggtgacgagggagcagcaaaacacctgcaattgtctgcactaggccaggtcaggcccttcctagctgacgacctaggaagttgggaaggtaaagggccaatagagggaaccctcaccccaccctccaccccaacatcagccctggagacaccccgaggcagccaatgactcacctctctgtgatccaaacagctgggaggcagcgattttattggactctaggacttcaaggtacagtgaggacagaaggggtcaggaccacaaaaggtgaaccaatctccagagattccctggaaaagggtccaggagtaaggacacctaggagcctatcaaaccgtgataaggctgagcccaagatcgggtccccagtggaaggaggatgtgtatcttaccacttgtactgagcccctattatgtctttgcccctggctaataatccatctgtcactcagtgagcatgactctaattggttatgtgacctcgagagagctaatcctcctctctgggcctgttgccccttccatgcactggggtctaagacccttcattttgggtctaggagtgacatcagctaaggcgctgcacacaaatcagggattaggaggatgttattctgttagtccctgggggcggagtctggagccggagggaggggatcccaccaccatctggtgctgtcccaaccacctggagtcccatgcagccctgaactcctgacgaccccctcaacctaggcccagcagcgccgtctgactccttctcaggttgcaaagagaaagtaggggatcagaggcctgaccccagcccctggataagcctaggaaatcgccgatccccctgcagccccctttggattgcagcgtctcacccagggcccagccccgacacagcggctaccgggtcacgggaggacaagcgacccgagcctgtgggggcggtaccggccttggtgacgtctcaatgtcatatgcaaatagaacgacgtcatggtctaccgggcgtgcggcaaccaatcgggagccgggaacgcggccccggcggccgccggcggagacagacaaaggcccgggcgcggggggcgcagggcgtgtccgtggcaggggagcccccaggcccacccgggtcgggactcacctgggggcgggaggggggcggcacggcgttgaggtagttgtgcggcggggcgtcccagggtcgccggccgctcacaggccgggccgcatcgccgggactcgcgggggaggcggcggggccgcggtcgctccgggctgctgagctcgcccgcggggctttgagtctgtgcggccgctgcggcggggctcacggcacaaattggaacgttcaaacagctgattgtgacgtcacaaaggggcccgcccgcctcgcgtcaccggctggcggggcggcggccaatcccgggctgcggatccccccctgcccctcccctcccctcccctcccggtttgcgggccgggcgctcgggccgggaaacgttctcggaaccgggagggtgagtgttcggggaggcagctgcggggagctgggagccctgcgccgcggcgagctctccgcgaggaggatctccactccctcctaccggctccttattttcctgattcttcccggatcgcagcgccctcacctctcccactgctccccaaatcctttcactgcatcctatatccaagtcccccgatgcggaccctgttctcgacccacaccacgtccgtgcacctgcattctccccactgcccttattcctgctctccctcccccctctggctcacctcctcagccttacacactctgctttcccaccccgtttttcctcagctcggcgggcttgagaaaagagggacatccccaacccccggttcccggggagcatctgggaatgtagagaagttagtgaagctgacgtgaaatttcgcagagtaggacttggagaggaattgccctgggctgagtaaacattgacctgagacggctccgcgcttgaacgtttacataccttatttaatctatgttgctaccggggctgtaaagaagtggcaggacagggactgattatgagtcctgatttacacgtgggaaagctgagtctcacaatctcactgttagcgtgtgaactcatgttcaacaatgcattcaacatttattaggcacctactattgcaccaccataccactagctgacatgtattggcacacttactgtgtgccacgacctgtgctatgggtgtgtttttttatcttcacaacaacccaaaaggtagatattgtcccgtttaacagttgaggaaacagactcagagagctcaagtgactttcttaggtcacaaaagtacagtcaatggcagagccaggatttgaacccatagctcccagccctgaccctctccattctctacatgaaccagatggtctaaacctcagggcgctttagcctccccagagtcctggctttcagtcctgactgtgccctagacttgctgtgtgacctcaagtcatgttacctctctgggtctcagtttgtcaaacaaacatatccaggcttccctctagagctgccattgtaagattcttccacactctctgccctcaggattccacccaccccacgctctaggccccagctctcccagtggcctgggagatgcccgagaagagaccacaaatacacatatcagaatctccagggccagaggttctaggtcagcagagcagggctggtgggggagggtccgagaactgcccacctagcccaaaaggaggccggaggtgacctaggccagaggttaatgatctagtgataaaactttttttttttttttgagacggagtctcgctcttgttgcccaggctgcagtgcagtggcacgatctcggctcactgcaagctccgccttccgggttcacgccattctcctgcctcagcctcccgagtagctgggactacaggcgcccgctaccacgcccggctaattttttgtattttttgtatttttgtatgtttagtgttagccaggatggtctcggtctcctgaccttgtgatctgcctgcctcggcctcccaaagtgctgggattacaggcgtgagccaccgtgcccggcactctagtgataaaactctatcccagcctcatctgaaacccccaagggactccttaaccctagcgacaggggaagaagccagaaaaaaataacccaaggctgaggggtggagaggggagtggcattgtggcccttggagtgttatacccaaagtgtcctcattccatgcaactctgagcctctgcccatc

SEQ ID NO: 1562201 - DNA, 4001 bp, Homo sapiens
atacaaaaattagccaggtgtggtggctcacgcctgtagtcccagctactcgggaggctgaggcaggagaatagcttgaactcagggagcgtaagttgcagtgagctgagattgtgccactgcaccactccagcctgggtgacaaagtgagacactgtctcaaaaaacaaaaacaaagagcaaggcacagcccagtcagagcagtttctactgatgaggacacaaacaggaggccaagcagtgtgctagcttcgaggttcatcttcgtagtcagagaggacagggttcaaatcccagctgcttttcttattagttgtctaatctaatcttaaaattacattaacttctctaagcctcagtttctgctactatacaaggaacaatagctccaataaactcaatgaatctttactgaaagtcaaccaggctcagtatacttttctagaaactgagagatgttatcaatggggatacagcaataaacaagccagctataatacaatctctgcttaacgaaacagatcatgaggctgaaaacagaaatatgaatacacaaataacttcatgaaatcttaagtctctgaaagggcagcaatgtgtccgcttgttggctactgaatatcccccacccagatctcccagcacttaacaatgtcctggtacccactggtacctaaaaaatactgataaaagaaaggcaagaagcgtaaaagtaaaaagccagggcttctgagtcagaggcataaggagctgagggcctggaccggccacttagtaaccgtgtaaccttgggcaagttacttctctctgagtgtcactttctcatctgaggacaaagtttatggtgctggcgcacaatgatgtttaatgaaaaaataggcaatttaatgaaatccaacatttattgggcactatgtgccaggcacacatttgaacataatacgtgacacacatacctcctctaatggtcacaacatccctatgacatggatactgctactatgtctcccattttacaggtgagaaaaccgaggctgagaggctaaataacttgttgaaaggctacacaagcagcagagttagtatttcaacccagggagcctggctccagtggggcaagtacttgtcattacatgtttcttaaaactaataaatggaaagataatgatcgaaaattgaaacgagtcaaatggggaaaccaaggctcagggaagttaaacatgttcaacattgagcaataatgacagatcccagatttgaaccaggcagaacggcctcaggacaaaagcttgacgctgcatggccacgtggtttcttaagacttaacgaatgaaaaaagggatgaaagaataacatttccgaaaggccggacaccgcagaaggcacagaaggagaaactgagggaaatccagcttcggagcgcaggggagtccctcacccgcccaggccccagagcctcggggccgcccacgccgggatcccggcccaccttaccagcgcggcgacagcggaggagcgcccgggcctcctgcaccgtccgccgtctgccaagccgcgcctccagcgccgggtgccggtagcccttggggaagcggtgcttgatcaccgccgcgcggccctggaagcggccacggaacacgcgcgcctcggcaccctgcttcaccagctccaggccgctcaagaagcggctgctccgctcccgggctgcggccagagcctcagcctccggggcgggctcctcgccatcggccggcgtagtagctctggccgccgccatgactgctcggcgcaacagctccaaccgatcagctgtctctgaaaactgtcgcgatgcttcggctcgcttcggaaatcctgggacttcttcggcaatcctgggacttcttcggctacccgaatgcgtccaccccggacacttccggcctgtaagtggttacgcctcccaacttttcggctctctgaagcctgaggttccctgcaggaagggctcttgtggccccgccttccgcctcttcggctatctccgtacacgttcggcaacgctcagtaagtggctcttcccgactccttggctctccggaaatcttcggtgactctcgcagccggctttgggggcccacctctcagttggtcgtctctttccggaaaacttcggcgcctctcgagaaaaacgtcggacgcgctttgctctcttcagaagtctcttccgggacagctgtaccctctagtagtctctttttggaactcctcttcccctgactcctacattccccccaaaatgtgctcatacaagtcagagtcggaagggtcagacaatgaaccatgtttccgacatcctcttaagtgctaggataactaccatttagtgcattcagaagaaataaggttaaatgatgaaaatccttacagaaaagaaaattgagactcagagctggcagagggggtggtaagatggggtggggagtgggggctggggaatccgggaaagtcttccggagacagaacctaaactgaattgggaataattaaactttttcagtttctacctgtttcattacaaagcttataataacacaggctgtagcaaattcttacaatacggaactttgcacacgcacacataaataaataaactacctatcccccttgtgacactgctggccgttagtttctttccagaattttctttcattcagtgtgcacactcacacatcgttgtggcgttttttccaacataaatgacatcatactgtgggttctttggcaacttgcttttcattttcctaaacaatttatctcagactatattccatatcaatacatacagagctaccacgtccttctacctggtcaggcagtttcttgttgctaaacagttgtttccagtttgttgtttctcaggaaaacactttacttactattgccagtttattataaaagatagtataaaagataaaaatgaacagccagatgaagacgtacataaggaaaagtaaaaattgtacgtgtttatcgtaagtaacatgttttgaaatatgtatacattgtggaatggctaaatccagctagttaacgttacctaacatactgatcatttcgggggtgaggacacttaaaatctattatcttagcatttttcaagaatacaacccattgttattatctatagtcaccatgtcgtgcaatagatttcatgaatgtttcctcctatctaactgaaattttgtatcctttgaccaacttctcaaaatcctccctatctccctccccctaccccaccgcctggtaaccaccattctactctgcttgcatgagttcaacttttcttaccttcctcatataagtgagatcatgggatatttgtctttctgtgcctagcttatttcatttaacacaatatcctcctgttccatccatgttgctgtaaatgacagcattccattctttttaaaggctgaatagtatcccattgtgtatataaatgtaccatatttttatccattcatttagtgatggacactcagattgagaattgtgaatgatgctgcaattaacatgggactgcagacatctcttcaatatactgattttgtttcctttggatatgtacccagtagtagggttgctggatcataaggtagttctatttttattttttttgaagaacctccatactgttgtccataatgtctgtactaatttacattcctatcaacagggtgcaacggttcccttttctccacatccttgccaacacttattatctttcttatgttttaaaatagcgattctaacaggtcagaggtgatatctcattgtgggtttaatttgcatttcgctgatgattagtgatgttgagcatttttttttaatatacccgttgtccatttttatgtcttcttttgagaaagatttctttggatcttttgcctacttttaattcaggttttgtcctttcttactattggattgtattccttatatatttggatattaacccc

SEQ ID NO: 1562202 - DNA, 4001 bp, Homo sapiens
gaggccttgggctgcagataatggcaatactgtgatgataataatggctcccgctgattgagtcctcgctctatgccagactcgggacccttacaacttgggatccttactatttctgtgaagtagaaggcagtgaaacagagtggcttacagagcacaggtgttggattcagacaaacgggctcagattctgcttctgcctcttaccacctgtgtgatttgggcaagatatttaacctctcagagccttagcttccttatctgtaaaactaggataattctgtctacctaacaggattgttgtgaagaataaactaaatgggaaaattcttaagtgcttaacactgtaggatggtacttagcaggcaccaatcaatgttagctttcttaatactgtcatgtgacttatgaggaaacggtttgaacttgtctcggaggcatggtaaaaaaaaataaaaataaaaataaattaataaagaaaccaagcctcagcaagattaatcttcagatttcaggggtcagtctgcaggtgactctctgggttatattgacttgcaggggaggaggaggaggagtaacctgtctgtctcagtgccccagggtgaagtgagcaccacaactggatgattacaaccattgttatggccacagctctaatatcagacaggaatggcttcacatcctagctctgccacttatcagttgagttaactgaatgagacaagtcacttcacctcttcagcctcagctctccagcagtaaaatagagttaataaatacctctctcacagaggctttgtgaaaattagacttgttctctaaatgccttagcacaatgcctgttcccagaaagacggcatttgggtccattatgggggccaggccccagcttacccagaggagatgcggagaatctttggaacactgagcagtgaatgccaacaccttttggccagcttatgcagttcttggatccggcggtttgagctcttgagtagcttcaagagcgacaagttttttaacacctgccagggtcaagaaaccaggtaaatagaagcttcagctttcctggacagcctccctctcccctgcctgcctctggctccgctcagccaagggccggcctgctggctcccctgggccactcagcctggcaaccaggggcagtactgcatgagtatatgagcttccccaagctggggccaaaacagggcgtctcaccgttctcagacggttccgctcaattactttgctcacaggctgctctgtctcgtcccgcagtttctcatcttgcatctgagggacagaggataagagagacataaacccagaggaatcagccaggtgtggtgcctcatgtctgtaatcccagcactttgggaggccgaggtgggtggctcatttgaggtcaggagtttgagatgcctggccaacatggtgaaaccctgactctaccaaaaaaaaaaatacaaaaattagcgaggtgtggtggcatgcgcctgtagtcccagctactcaagagggtgaggcaggagaatcacttgaacccaggaggtgaaggctgcagtcagctgagatctcgccactgcactccagcctgggcgacagagtgaggcactggaggaatcctcctgaactcctccatgtgcctcttcatttggctgagcatggtttgaccaatcctaggctgggagttttgtcatcttggtctggggacagaactgggagaccattttaactctcctgacctcccttcacccttcaccttttccttttctcccatgctggaaagcccctttccttggcatggtggattctttgttaaggtcccctctagggactcacccccagggtctagtcccaagtctgaccttggaaaccctgctgttcttgggcctcttctttgctgatggactcatgctggggctgtgagacctcagagatgaatggagcaacaccagtgccaggcaccaaccctgttcctctcagttcagccagcactcaggctgggcatcagatggtggtgctggctctgtaccacctgcagctgtgacatcactgaaatgtgacagtagcagggctgggtctccaaggagtgtatgtggcagaggtgaggggtagagggtgagaaagaaatatagacaataggcgacagacagctgtgtgcattgtcacaacctccctgtggggtaagaggattatcccctctttttaaatgaggaagccagggttcaaagaggttgaataatctactcaaggccacactagatctagcccagctagatcatagtgggctggaaacctaaccaaggtctgatagtcaacccatgaaaccagggattcccaaaccatgctcatccattcagtcatgtcgcctgttttgactgggcgcctgctacatgccaggtgctttttcttttctttctctttttttgttttttgttttttgagacagagtctcactctgtcgccaggctggagtgcagtggtgagatcttggctccctgcaacctccgcctcctgggttcaagcgattttcctgcctcagcctcccaagtagctgagactacaggcacccgccaccacgtccggctaatttttgtatttttagtagagatggggtttcaccatgttagcaaggatggtctcgatctcttgactttgtgatccgcccacctccacctcccacagtgctgggattacaggcatgagtcagcgcgcctggccttgccaggtgctttttctaagtgctagaataacagaaaattcttgccctcaagcttacattctagtggaggggaaacagtgtgtgtacttgtaaatgtttaataattggctctctgaagcaaaatgtatatgtgtttgtattataaattttactgatagaaatcaacaaataatagaatcctataatactctttattgtaacttctattagtgagttgcttcttatagtatgcttttcttggattttgcctaacccctccatttatagccaacctatggttgtaatggataaacaagtataataccaacattaatgtttgtattttcatttacactaaacagtaagaagaaggtgaaaaagtgaaacaacagagatattgaaatttaactcatttatcaatgatttcattgacctatttgctgaattagaccatagtttttgaatactggagatatatttctcagattctttttgttatttacaatcgaatagctatgggcaggacacttgcttatgttttctctttttttgttgtttttggggggtcttttttcagatctacatatgattcatatatgatatatttctactctacagatatacagatataaagaatcctaagaacatagataatagtaaaaggtagtaaaaaatagaaagtgacaagtttaagcatttttcaccctatgtttttaatatcacttatttaattggaagttgctatcaattacattttaatgatggccgtgcctaacaaccagcctgcagaattcctagaagtgtaacagtagacttgtgagcccttatgagttagccccagcacgccaatgctacatcagatggaaataagtgcctggagaacagcaaccagggtaaagggaacagggagggcagaggtagagggtttggtatattaaaaaggtggtctaggaaagattcaccaataagatgagatttgagcagacacctgagagagagagggaagaggagaatgaatggtggtgggagaagatgaggcagagagggagtcgtggtgggttaggcagatcacaacaggctgtaaagggcgctggctgccctgaatccctggtgcccagctggctgcatcagaatagtatgaagagcttgtgaaaaacatttttgtgggcaccaccccattcagcaggccagtcagataaccaatcaaatgtgggacccactccacaccattccacttctagtggggagagatgtacatgcacggggggtgggtgcttagctctgaacggagggg

SEQ ID NO: 1562203 - DNA, 4001 bp, Homo sapiens
taatcccagcacttttggaggccaaggcgggcagatcacctgaggtcagaagttcgagaccagcttgaccaacatggagaaacctccatctctactaaaaatacaaaattagccgggcatggtggcgcacgcctgtaatgccagctacacgggaggctgaggcaggagaatcgcttgaacccagaaggcagaggttgcgggaagccatgatcgcgccattgtactgcagcgtgggcaacaagagcgaaaatccgtctcaaaaaaaaaaaaaaaagtagaaagaccaattaacctggcatggtgcgcctgtagtcttatagtcccagctacctgggaggctgacgcaggaagatcgcttgagcccaggagttgaagattgcagtaagctatgattgcaccactgcactccagcctgggagacagagggagacgctgtccccaaaaaaaaaattaaaaaaaaaaaaaaaaaaggccaggcgcggtggctcacgcctgtaatcccagcactttgggaggccgaggtaagcagatcacgaggtcagggtatcaagaccgtcatggctaacagtgaaaccccgtctctactaaagatacaaaaaattagccgggcatgatggcgggcgcctgtagtcccagctagttgggaggctgaagcaggagaatggcagtgaacccgggaggcggagcttgcagtgagccgagatctagccactgcgctccagcctgggcgacagagtgagactccatctcaaaaaaacaaaaacaaacaaacaaaaaacaccctccagaataatgcagcacctaggaattataaagcttaatatgtagccgggcacagtggctcacgcctgtaatcccagcactttgggaggctgaggcgggcggatcacaaggtcaagagatcgagaccatcctgggcaacatggtgaaaccctgcctctactaaaaatacaaaaattagctgggcctggtggcgcgtgcctgtagtcccagctactcaggaggctgaggcagcagaatcgcttgaacccgggaggtcgaggttgcaatgagctgagatcgcgccactgcactccagcctggcgtcagagcaagactccgtctcaaaaaaataaagaaagaaagaaagaaagaaagaaatttagcatccctctctagagccccaaaatgcaaggcagacttttatcatcttctcaagattttaatctcctgggctcgctccacgcccctcagtggccatctcatactgctctggggagactgttctggaaacaggcctggtatgctgggtgtgcccctgactcactccaccccctctccatgaggcaacccctaagcaggctgagctccgagcagagttgctgcccaaggggagctctgctgaacgcgaagaccccttctctgctcgggagccgccctcaacacctcggactgggtccagggccagacagcgtgaacccgagggccccgcgcagggaccggggggtggcagagcaagcaagagcagggcacggggtgggcggcataagcgagacctgctgggagcgacagaacccaaactacgggagcaacggcgggcgccagggaaccacacctcggaacggtcccaggggagaccaggagggcggctggagagagcccaggaagcggtctgggccgcgggcaaaaaacacaccacgaccatcataagcttcgaggtcagtggccccgggagctgaagaggggccgcggggtgggtgaaccgagaccgagaggacagagagtcgcagacgcgaccccgggagacggagaacaacgggcagcctgggcccatctgcggcgaaggggccgggcccggcaggtaccttggccggcggagtccatgttcgggcggcgtccggaccgctgtcgcgggcgctatgggagccgagcgggcggcgccgggagaagctcgccgcgtacacactagccagcggaactgcctcagctccgcggcgtttcgtaatccgcgatgcgacggctacttccgcccgggcacgtgctccgccttcttcccgcccccaccagtgatatccaatgagagtgccgcttggcccgtcctggtttacccgactcaacctgataggccgaaactgcgggcgaaccaggaaagggaggcgtggttcggcgggaatccattccaggttgactccaccagcgagaatcacaggtagaacggtcagagtagcgggaggactgggaaggtgggaagtgggaggaccgtccaacatggcgctgtggaaagccagcgcagggccccaggggatcttccggggcggatgcagctgcctaggagtgctggggctcgcgcgcctcggcggctcaaactctgaccccttgagatcctttccagcccgaccccttactttaggggtcagcctgcccccgtaagtcctgttatttattgtatttatattctttttttagttggtccttttttgtttgtttttgagacggagtttcactcttgttgcccaggctggagtgccatggcgcgatctcagctcactccaatctctgccctccgggttcaagcgattctccagcctcagcctcccgagtagctggaattacaggcgcgcgccaacacgtccggctaattttcgtatttgtagtagagacgggggtttcgccaccttggccaggctggtctagaactcctgaccttaggtgatccacccgcctcggcctcctaaagtgctgggattacaggcgtgagccaccgcccctcacgcctggctagtttgtccttttcatggggactttttattgtacgcgggttactctgaaaaagatcgcgattcgtcccctcgccctgcaggcgccgctgccgcctcgcctcgggcgtggaccctgcggctcgggcctgcgcgtgtgcaccccgaggttgtctcacttcctgttcagggcgaccagcgctgcgccctccccactccacagatgaggaagctgaggttaaagtcacttgccccaggtcactccgcaagttgaagcgcaaccaggatactctggaacaggatgcctgacttcagaggagaggcgcgtaaccaccaggcaactggccccacgaaaacaagtcccgcaacttcccttctttggctcctacttgctcccggaagaaaagccttaaacggtattcaagccctttaggatctgatgtcctaggactccactctgggcttccagcctggggtggtactggtccctaggcatggaagctcctcccactgccccttccttcacccggccacctcctcccacaggtgtcttcctggtactcttgcacaggcccgagtcccttaccaccacggccttagcctgctctcgtgctctcagtaatgttttctccatttgctgcctttcattctttccagagattcttgctcaacccaaccaggccagcccggggactagggacatgtagggacaatagtccctgcttcaggcagttcagggcagaccacagagatgtgacattacagaccattgtgagcagaggccttgtcccattctgtgttgcatccctaagccaggaacaaagtccagcccaggcctggctccaggggacacgcagtagtatcctctggcctgtgcaagtgtatctgtagcctcacatgccaccatgtgagtctgcaatctgtctgtgaatgccctggtgtagaagccaggagtttggaggtgggagggagccctacagaatgatagccagtgctaactcctgggaatgtccagccactaagacctgcccacagccctgccatgccaatgtcctccttttcacgggagcagcttgcacagactttcagcgcacagctggcattgtcttcccaggagccatcctgtaacccaggccaggtgaagggctcctccctgggaccccacagccccgttcccatcatccttttgtggtgatcaaggcacccatcacacagtattgccataaaccgggtcaggttaacctttcattcccttaggagctgggt

SEQ ID NO: 1562204 - DNA, 4001 bp, Homo sapiens
gaaatgaaggactctctcacataatcctggacaaacttaattgcaataaattaattttatcaaggttggaatacacagatttatgcataaggttggccaaataaaccctattcagataatttgaaagtctaaacaaatttaccaacctagttgaatacaatccagtttttcatacccgcaattttgtagtcaattcagatagtgccttcctgcctactcaattcaacaggtatttagtgggtgattcctatgcactaggattgtttcagtccctgtctaaccaaactctggttatcaagaattagacaagggtggctttgtgaagcacagaaacacaaactggctcttgaactccctcacctctaaattgtccagacacctagaatacaaaacagtagagcacccagatggtgtcctatcttgctctgattctcacttgccaatttcaaaccatgtttttgtccccaaacataccaaaaaacgtttgagtacatcatatatctgtacacccataatatctcatgccaatctgagcacagtaccctcaaaggtcaactaaatggctgagttagctgacagccacataattttgatccaagaatgccagcttaatactgaactgactcacccaaaccaaccagggggactcaagtctgacgtgggggtgatgtaatacactaaggccacaatacaagaatatccttactacagcagcaagtagtcctatttttgacaacatttgatgagtgagagaaattcaaagagaggccacaggatgtcaagaaaaggtaagggtgaagcaggaagtaaaccaagagctggtcttaaagcaaaatccaggagtcaaaaatcctcttctatcctaagtaggcctgatttggggggagtccatgttactgaactactagaaaattatatgtggaaaaccagacgttatatgtcaagaaaatagggggtaaaccaattctacattataacctggtttggttttccttcccccctccaatctataaatgttgagaaaggaaatgagaaagggaataatatctggtgattccatacaaaaagagagctggacaaatatggataacatataatgaattttaaatcccaaatagaagacaactccaagtggacttaaactctccctcaattatgttctcacaccatctaattatcttcctgttttagacaacagttttgaaatgtacttatttgtgactacctctgttttcctccatcaaacgccacacttcctgagggcatggctactgtatcacccatttctcgaaatttatctagattctgggcctcagtttcctcctccttcctccttcctcagtttctgtcaagagggaccaagaatagcaccaactacattggcttggcgaggaaattaaatgagaacgggcatgcagggtgcttagttcagtcaatgtttataacctgttagcatggtaataacaataattatcgttaccgttattagccgacagcctcccgcaactctttttttcctccgtttcccggacggacttcacagcaaaatcctgtcgccaagagaagcgtggcccgaagcccctgctcgcaccctgccccgcctaggcggcgaccgagcaccgcaaccgcctcagaagccaggcctagcggcgcgaacggcgctaggggctggaaggtgaacttcagccgttccaaactccgggaggagggagacccgcgccctagctgctccctcttttcttcccacggctcacctagcctcgcctcagatctgacaacgaagcgcgagccaacccgccgcgggactcattcagtatcgttgaaattttgaacccaggcagcctagtcgaatgcaccaatcagagcgccgggaaagcaattccaggctcccgattggccctacagaccgcagcaataccggaagtcagaaggaggtaccagcgaacaacgcggcccggagttcctgggaagtgtagtctcctgcgcctgcgtgagtccactggaacagctcttaggagtacgttattacaaagaccggagtgctctgctccaaactatttgggaaaggtggtaccaactgaagaggtggagagtcaacctagatcacagaatggcgcgcatcctggacctctccaagttttcagggaagaaaactctatttttaaaaattattctcgttatggttgtgcattatcccttgaaggttcagggagttcacttcgtcttaacatggagtcgcctgcatgcaacatagactcgcccgtagcgtccttcccaatagtgcaggagtctttgaaaccttttacccagtccctgccctgatcttatgaaacccgcggttcgttgggagctttatccggttttattcccaactgcatcccggctttatgatccccatgtcgtaaaaagaaaacaaagtctaggagaagttgaacaaacatgtccaaaatcacataataaatggagaagatgggattcgaattaagaaggtctgttctttttatacaccaccgataattaattagaggccgggcttcgtggcgctcacctataatcccagctccacaggaggctaaagcagaaggatcccttgagaccaagagttccagaacagcgtagacatcataacgagaccacccccaccatcttaattttttttaatcaattagaaaatagcagcaacaagaacaacaaaacaacccccttcataataccagcaaaagctaaagattcaaaaattaagcctaggctgggtgcggtagctcacgcatgtaatcccagcactttgggaggccgagacaggcagatcacttgaggcgatgagttcgagaccagcctggccaaaatgttgaaacccccccccatctctactaaaaatacaaaaattagccgggcgtgctcgcgcgtgcctgtaatcacagctacttgggaggttgaggcaggagaatcacttgaacccaggaggcggaggttgcagtgagccaagattgcaccactgcactccagcctgggcaacagagcgagactctgtctcaaaacaaaaaaaaaaaggtcaaggcaattccaatgaaagtcccagtgggttctgttctggaatttgccaagttaattctaaagttcctatggaagagtacaagtactggcatcttgaattttgaaaaagattgggggatttatgtacagattttgtacatattaacatgaaattatagtaatttttaaagtatggttcagttaattcacacccatgggggtgcaatcggcaaaatccagacaggaaaaccacaggacaatttagttccttcaaaacataaactgccagagtttggttttgttttctttttgttgttgttgttttgtttcattttgttttttgagacggagtttcgttcttgtagcccaggctggagtgcaacggtgtgatctcagctcactgcaacctccgcctcccggtttctcctgcctcagcctcccaagtacccgggattaaaaatgcgccaccacacccggctaatttttatattttttgatagagacggggtttcaccatgttgaccaggctagtctcgaacacctgacctcgggtgatgcccccgcctcaccctcccaagtgctgggactacaggtgtgagccaccacaccttttgttttcttttttaagagtccttgtgttgtagagatacatatagatacggtagggatgaaattactctggcactggcttccaaataattgggagtaggcagtgaagataagtaggtggggatttagatgaaacaagattagctacaaattgataattgttgaacctggtgatgggttcatgatacataaatacatacatatactcttgtatgagtttgaaattttccacaattaaaatggggtggttgcctggtgctacttggaaggctgaggcaggagaatcacttaaacccaggaggcagaggttgcagtgagccaagatggtgccattgcactccagcctgggcgacagagca

SEQ ID NO: 1562205 - DNA, 4001 bp, Homo sapiens
ctgtctataattacagggctggttacataaattatacttcatccacacaacggaacaatgtgcagccatttaaaaggttgaggatgctctttatagggtaattggaaggatctccagagtgaactgttaagtgaaaggaaagccaccattcacgcagctgtgtgactgtgtgtgtggtggctgaaggagagggcagtagggcatggtcagggcagacgggttctctctagaacccatctgcccacccacttaaactccattccaaggaggtgcatgcccaggtatgggcattggtgcgagagacctcagcctggttaaagaccttcccaacagttcaaggcaggattaacaaggcaacatgagtcagttaccagacagaggcccacctctccaagtacgctgctcccaaatggaagagctgccttggaagggaaggcctccccacatgagtgaaaggtcatgactttggcttggtaagaatgcagtaaggagtggctgtagtcagatattcctgggttctaatcctgtctcaaaccctttctagctggggggtacccctggtcaagttcctcaagctttctgagcctcagttcctgtaaagtgggaacaggatgcaaagcttacaggtttttcgtgatgatgaaatgaaaacacaaatgaagcatgtagagcttatggacctgttgccaggtaggtgtcaggaaatggtcattattagcactcatcctgttattcttcacagcaagatgcataagtaccatccttgggagtcttagaaagctccccaggttcgaggctgggatgacactccttacatctcaaggctgttctgagtcacgcaggatgatacctggctgtgcacatgctttgtgccctgtgcagcaggagactgcctggagtccctctggcctgtgccacatcagtagtccaggctgccttggccccggccatccctcagagcctgttggggcctgggataagctccacccagatggggacagatgcggtaactgagtctatacatcttgggcaaggcattttgcagaccacactgcagaatagaatctgtgatgtggaatgaaagcagcccctaatatctacctcttgctgttccctgccacactcgggacccagggaaatgagggcgggttacatcaagcgcaagcgcgcgcgcgcacgcacacacacacacacacacacacacacagccctcccagctgtcacacccatggtctacccgagcaaggccgcacccccaccccgccccgccccccgcagccaggcccctcccgtgggagcccaagcgaaaggcggcgggtgtccgagtcagaagtttcagcggaaattgaagcgcggccctgggacaggaggggggtgaggcagagggaaggaggtggctgtcgtcccccgccctccccggtctgcaggcacagcacacaccgcagacacgcgcgcaccgtccacctgcaaacccggagccgcgcactggggagaaccagcggccctgccgggccagagatcgcgcgctgcgcccccgctcccactccctcggctcccccgctccagggcaccccagccctgtcccggcggtgtcccctgcaccgccaacccctgccaccaagtgcccagccctccagacagctctcaccatctcctgagacacaggtgctcgggacccaccctcacccaggactctcccctgcgggttcacgaggaccccctcggatcccccgccacccccagagtcctccagtgccccccacaagcccctcaccgcaccacacgactcccctatcccgcactcacgcaaaacagacccccgcacgccctcctctaggggtgacggccggacacctccgtccctggcttccccagcccaactcgggcgaccccacgctccgcggggccgcgtcacctgaagcccggggggagcactcagcccaggcccggatcaaaagggatctgacctggccgcgccccgacggcggggtctgtgaaaaggtgtgtaaggggcgtgcgtgcgtgtaacacgcggcaacacgcagacgcccagaggcttccggcgcccccttccccggccgccccctcccgccccccggcctccgggcgagtccgcaggccgcaccccgccgagtacctcgccccgtcgttccgcgtgggcccgggcgccgccggggctcagagcctccagggcaccagcaggtgggccggcccgctgcgctgctgccgagctcgggatcccagcccagctccagccctgcccgggtcctagcagcggacgcgcgcggagccgcctccacttccgctgcgagtctcgtgcgcgcccggcccccggtccgggtgatgcaaaccggagctaatcccccggtccgggtgatgcaaaccggagctaatcccccggtccgggtgatgcaaaccggagctaatcagccgccgtctgatgccctcgggcccgggatcgcaccatcccccgcgccgcgcccgggcctctctcctctgcatccgctgcacctgggacccgccctcgctggccccctaggggcgtctggtcagtgcagacatcagccacggactctccctatcaccttggaaaaaaaatttgctctttttttttttttttttgagacagagtcttgctctgtcgcccaggctggagggcggtggcgcgatctcggctcactgcaagctccgcctcccgggttcacgccattctcctgcctcagcctcccgagtagctgggactacaggcgcccgcaccacgcccggctaattttttgtatttttagtagagacggggtttcaccttgttagccaggatggtctcgatctcctgacctcgtgatccacccgcctcggcctcccaaagtgctgggattacaggcgtgagccaccgcgcccggccaaaaatttgctcttctgagcctcggtttccccacctatgaaatgggaagaacattcctccttctcaggatggtgcttaaaagagcaaacagtgactgttgtcggggtgcttccccttttttataaagcacattcccagcactgccttataaaacctttaggagaagtggacatgcgggaatctccattctccacattctactgagagccagcctgaggcccagctatgggcaagtggttcagaagcttcaggaaggcctatggacttaagagctgactctgggctcaaaggaaccaccgtggcgcccttgggaggcctaaggtctgctgagcttccccgcgtccctttgctagaggcagtgcggcctagtggtgaagagcccctagagccagctggcctaagagtgcactccacctccgctccaacccacagtgctaccccagaaaagctacctaaaaccctgcctcaacttcctgctccataaaatgggctcataattgcgctcacttcataaagttgttgtgaggattaaataatttaatatgtgtaagacgcttagaacagtgtgtggcacattgcggatgctcagtggagtgtaaacaatggagacagagagggaaagaggcctttaatatgcttgcacccaaggcctgggagggcttggtgctacttgatttggggtgaaacacccctctgcgtcctaggcgtccagcacctttctttttttttctttttttgaggcagagtttcactcgttgcccaggattgagtgcgatggcacgatctcggctcactgcaacctccacctcccgggttcaagcgattctcctgcctcagcctcccaagtagctgggattacaggcatgcgctactatgcctggctaattttgtatttttagtagagacagggtttctccatgttggtcaggctggtctcgaactcctgacctcagataatccacctgcctcggcctcccaaagtgctgagattacaggcatgagccaccgcgcccggcctgggtccagcacctttcttagaaatcccttttgatctgaattcaccagtgtcaaaaaataactcctcagctgggtgagctgg

SEQ ID NO: 1562206 - DNA, 4001 bp, Homo sapiens
cagttattcctgcagcccttttgacagaaataattggctgtctataattacagggctggttacataaattatacttcatccacacaacggaacaatgtgcagccatttaaaaggttgaggatgctctttatagggtaattggaaggatctccagagtgaactgttaagtgaaaggaaagccaccattcacgcagctgtgtgactgtgtgtgtggtggctgaaggagagggcagtagggcatggtcagggcagacgggttctctctagaacccatctgcccacccacttaaactccattccaaggaggtgcatgcccaggtatgggcattggtgcgagagacctcagcctggttaaagaccttcccaacagttcaaggcaggattaacaaggcaacatgagtcagttaccagacagaggcccacctctccaagtacgctgctcccaaatggaagagctgccttggaagggaaggcctccccacatgagtgaaaggtcatgactttggcttggtaagaatgcagtaaggagtggctgtagtcagatattcctgggttctaatcctgtctcaaaccctttctagctggggggtacccctggtcaagttcctcaagctttctgagcctcagttcctgtaaagtgggaacaggatgcaaagcttacaggtttttcgtgatgatgaaatgaaaacacaaatgaagcatgtagagcttatggacctgttgccaggtaggtgtcaggaaatggtcattattagcactcatcctgttattcttcacagcaagatgcataagtaccatccttgggagtcttagaaagctccccaggttcgaggctgggatgacactccttacatctcaaggctgttctgagtcacgcaggatgatacctggctgtgcacatgctttgtgccctgtgcagcaggagactgcctggagtccctctggcctgtgccacatcagtagtccaggctgccttggccccggccatccctcagagcctgttggggcctgggataagctccacccagatggggacagatgcggtaactgagtctatacatcttgggcaaggcattttgcagaccacactgcagaatagaatctgtgatgtggaatgaaagcagcccctaatatctacctcttgctgttccctgccacactcgggacccagggaaatgagggcgggttacatcaagcgcaagcgcgcgcgcgcacgcacacacacacacacacacacacacacagccctcccagctgtcacacccatggtctacccgagcaaggccgcacccccaccccgccccgccccccgcagccaggcccctcccgtgggagcccaagcgaaaggcggcgggtgtccgagtcagaagtttcagcggaaattgaagcgcggccctgggacaggaggggggtgaggcagagggaaggaggtggctgtcgtcccccgccctccccggtctgcaggcacagcacacaccgcagacacgcgcgcaccgtccacctgcaaacccggagccgcgcactggggagaaccagcggccctgccgggccagagatcgcgcgctgcgcccccgctcccactccctcggctcccccgctccagggcaccccagccctgtcccggcggtgtcccctgcaccgccaacccctgccaccaagtgcccagccctccagacagctctcaccatctcctgagacacaggtgctcgggacccaccctcacccaggactctcccctgcgggttcacgaggaccccctcggatcccccgccacccccagagtcctccagtgccccccacaagcccctcaccgcaccacacgactcccctatcccgcactcacgcaaaacagacccccgcacgccctcctctaggggtgacggccggacacctccgtccctggcttccccagcccaactcgggcgaccccacgctccgcggggccgcgtcacctgaagcccggggggagcactcagcccaggcccggatcaaaagggatctgacctggccgcgccccgacggcggggtctgtgaaaaggtgtgtaaggggcgtgcgtgcgtgtaacacgcggcaacacgcagacgcccagaggcttccggcgcccccttccccggccgccccctcccgccccccggcctccgggcgagtccgcaggccgcaccccgccgagtacctcgccccgtcgttccgcgtgggcccgggcgccgccggggctcagagcctccagggcaccagcaggtgggccggcccgctgcgctgctgccgagctcgggatcccagcccagctccagccctgcccgggtcctagcagcggacgcgcgcggagccgcctccacttccgctgcgagtctcgtgcgcgcccggcccccggtccgggtgatgcaaaccggagctaatcccccggtccgggtgatgcaaaccggagctaatcccccggtccgggtgatgcaaaccggagctaatcagccgccgtctgatgccctcgggcccgggatcgcaccatcccccgcgccgcgcccgggcctctctcctctgcatccgctgcacctgggacccgccctcgctggccccctaggggcgtctggtcagtgcagacatcagccacggactctccctatcaccttggaaaaaaaatttgctctttttttttttttttttgagacagagtcttgctctgtcgcccaggctggagggcggtggcgcgatctcggctcactgcaagctccgcctcccgggttcacgccattctcctgcctcagcctcccgagtagctgggactacaggcgcccgcaccacgcccggctaattttttgtatttttagtagagacggggtttcaccttgttagccaggatggtctcgatctcctgacctcgtgatccacccgcctcggcctcccaaagtgctgggattacaggcgtgagccaccgcgcccggccaaaaatttgctcttctgagcctcggtttccccacctatgaaatgggaagaacattcctccttctcaggatggtgcttaaaagagcaaacagtgactgttgtcggggtgcttccccttttttataaagcacattcccagcactgccttataaaacctttaggagaagtggacatgcgggaatctccattctccacattctactgagagccagcctgaggcccagctatgggcaagtggttcagaagcttcaggaaggcctatggacttaagagctgactctgggctcaaaggaaccaccgtggcgcccttgggaggcctaaggtctgctgagcttccccgcgtccctttgctagaggcagtgcggcctagtggtgaagagcccctagagccagctggcctaagagtgcactccacctccgctccaacccacagtgctaccccagaaaagctacctaaaaccctgcctcaacttcctgctccataaaatgggctcataattgcgctcacttcataaagttgttgtgaggattaaataatttaatatgtgtaagacgcttagaacagtgtgtggcacattgcggatgctcagtggagtgtaaacaatggagacagagagggaaagaggcctttaatatgcttgcacccaaggcctgggagggcttggtgctacttgatttggggtgaaacacccctctgcgtcctaggcgtccagcacctttctttttttttctttttttgaggcagagtttcactcgttgcccaggattgagtgcgatggcacgatctcggctcactgcaacctccacctcccgggttcaagcgattctcctgcctcagcctcccaagtagctgggattacaggcatgcgctactatgcctggctaattttgtatttttagtagagacagggtttctccatgttggtcaggctggtctcgaactcctgacctcagataatccacctgcctcggcctcccaaagtgctgagattacaggcatgagccaccgcgcccggcctgggtccagcacctttcttagaaatcccttttgatctgaattcac

SEQ ID NO: 1562207 - DNA, 4001 bp, Homo sapiens
tacagggctggttacataaattatacttcatccacacaacggaacaatgtgcagccatttaaaaggttgaggatgctctttatagggtaattggaaggatctccagagtgaactgttaagtgaaaggaaagccaccattcacgcagctgtgtgactgtgtgtgtggtggctgaaggagagggcagtagggcatggtcagggcagacgggttctctctagaacccatctgcccacccacttaaactccattccaaggaggtgcatgcccaggtatgggcattggtgcgagagacctcagcctggttaaagaccttcccaacagttcaaggcaggattaacaaggcaacatgagtcagttaccagacagaggcccacctctccaagtacgctgctcccaaatggaagagctgccttggaagggaaggcctccccacatgagtgaaaggtcatgactttggcttggtaagaatgcagtaaggagtggctgtagtcagatattcctgggttctaatcctgtctcaaaccctttctagctggggggtacccctggtcaagttcctcaagctttctgagcctcagttcctgtaaagtgggaacaggatgcaaagcttacaggtttttcgtgatgatgaaatgaaaacacaaatgaagcatgtagagcttatggacctgttgccaggtaggtgtcaggaaatggtcattattagcactcatcctgttattcttcacagcaagatgcataagtaccatccttgggagtcttagaaagctccccaggttcgaggctgggatgacactccttacatctcaaggctgttctgagtcacgcaggatgatacctggctgtgcacatgctttgtgccctgtgcagcaggagactgcctggagtccctctggcctgtgccacatcagtagtccaggctgccttggccccggccatccctcagagcctgttggggcctgggataagctccacccagatggggacagatgcggtaactgagtctatacatcttgggcaaggcattttgcagaccacactgcagaatagaatctgtgatgtggaatgaaagcagcccctaatatctacctcttgctgttccctgccacactcgggacccagggaaatgagggcgggttacatcaagcgcaagcgcgcgcgcgcacgcacacacacacacacacacacacacacagccctcccagctgtcacacccatggtctacccgagcaaggccgcacccccaccccgccccgccccccgcagccaggcccctcccgtgggagcccaagcgaaaggcggcgggtgtccgagtcagaagtttcagcggaaattgaagcgcggccctgggacaggaggggggtgaggcagagggaaggaggtggctgtcgtcccccgccctccccggtctgcaggcacagcacacaccgcagacacgcgcgcaccgtccacctgcaaacccggagccgcgcactggggagaaccagcggccctgccgggccagagatcgcgcgctgcgcccccgctcccactccctcggctcccccgctccagggcaccccagccctgtcccggcggtgtcccctgcaccgccaacccctgccaccaagtgcccagccctccagacagctctcaccatctcctgagacacaggtgctcgggacccaccctcacccaggactctcccctgcgggttcacgaggaccccctcggatcccccgccacccccagagtcctccagtgccccccacaagcccctcaccgcaccacacgactcccctatcccgcactcacgcaaaacagacccccgcacgccctcctctaggggtgacggccggacacctccgtccctggcttccccagcccaactcgggcgaccccacgctccgcggggccgcgtcacctgaagcccggggggagcactcagcccaggcccggatcaaaagggatctgacctggccgcgccccgacggcggggtctgtgaaaaggtgtgtaaggggcgtgcgtgcgtgtaacacgcggcaacacgcagacgcccagaggcttccggcgcccccttccccggccgccccctcccgccccccggcctccgggcgagtccgcaggccgcaccccgccgagtacctcgccccgtcgttccgcgtgggcccgggcgccgccggggctcagagcctccagggcaccagcaggtgggccggcccgctgcgctgctgccgagctcgggatcccagcccagctccagccctgcccgggtcctagcagcggacgcgcgcggagccgcctccacttccgctgcgagtctcgtgcgcgcccggcccccggtccgggtgatgcaaaccggagctaatcccccggtccgggtgatgcaaaccggagctaatcccccggtccgggtgatgcaaaccggagctaatcagccgccgtctgatgccctcgggcccgggatcgcaccatcccccgcgccgcgcccgggcctctctcctctgcatccgctgcacctgggacccgccctcgctggccccctaggggcgtctggtcagtgcagacatcagccacggactctccctatcaccttggaaaaaaaatttgctctttttttttttttttttgagacagagtcttgctctgtcgcccaggctggagggcggtggcgcgatctcggctcactgcaagctccgcctcccgggttcacgccattctcctgcctcagcctcccgagtagctgggactacaggcgcccgcaccacgcccggctaattttttgtatttttagtagagacggggtttcaccttgttagccaggatggtctcgatctcctgacctcgtgatccacccgcctcggcctcccaaagtgctgggattacaggcgtgagccaccgcgcccggccaaaaatttgctcttctgagcctcggtttccccacctatgaaatgggaagaacattcctccttctcaggatggtgcttaaaagagcaaacagtgactgttgtcggggtgcttccccttttttataaagcacattcccagcactgccttataaaacctttaggagaagtggacatgcgggaatctccattctccacattctactgagagccagcctgaggcccagctatgggcaagtggttcagaagcttcaggaaggcctatggacttaagagctgactctgggctcaaaggaaccaccgtggcgcccttgggaggcctaaggtctgctgagcttccccgcgtccctttgctagaggcagtgcggcctagtggtgaagagcccctagagccagctggcctaagagtgcactccacctccgctccaacccacagtgctaccccagaaaagctacctaaaaccctgcctcaacttcctgctccataaaatgggctcataattgcgctcacttcataaagttgttgtgaggattaaataatttaatatgtgtaagacgcttagaacagtgtgtggcacattgcggatgctcagtggagtgtaaacaatggagacagagagggaaagaggcctttaatatgcttgcacccaaggcctgggagggcttggtgctacttgatttggggtgaaacacccctctgcgtcctaggcgtccagcacctttctttttttttctttttttgaggcagagtttcactcgttgcccaggattgagtgcgatggcacgatctcggctcactgcaacctccacctcccgggttcaagcgattctcctgcctcagcctcccaagtagctgggattacaggcatgcgctactatgcctggctaattttgtatttttagtagagacagggtttctccatgttggtcaggctggtctcgaactcctgacctcagataatccacctgcctcggcctcccaaagtgctgagattacaggcatgagccaccgcgcccggcctgggtccagcacctttcttagaaatcccttttgatctgaattcaccagtgtcaaaaaataactcctcagctgggtgagctggctcatgtctgt

SEQ ID NO: 1562208 - DNA, 4001 bp, Homo sapiens
gacctgttgccaggtaggtgtcaggaaatggtcattattagcactcatcctgttattcttcacagcaagatgcataagtaccatccttgggagtcttagaaagctccccaggttcgaggctgggatgacactccttacatctcaaggctgttctgagtcacgcaggatgatacctggctgtgcacatgctttgtgccctgtgcagcaggagactgcctggagtccctctggcctgtgccacatcagtagtccaggctgccttggccccggccatccctcagagcctgttggggcctgggataagctccacccagatggggacagatgcggtaactgagtctatacatcttgggcaaggcattttgcagaccacactgcagaatagaatctgtgatgtggaatgaaagcagcccctaatatctacctcttgctgttccctgccacactcgggacccagggaaatgagggcgggttacatcaagcgcaagcgcgcgcgcgcacgcacacacacacacacacacacacacacagccctcccagctgtcacacccatggtctacccgagcaaggccgcacccccaccccgccccgccccccgcagccaggcccctcccgtgggagcccaagcgaaaggcggcgggtgtccgagtcagaagtttcagcggaaattgaagcgcggccctgggacaggaggggggtgaggcagagggaaggaggtggctgtcgtcccccgccctccccggtctgcaggcacagcacacaccgcagacacgcgcgcaccgtccacctgcaaacccggagccgcgcactggggagaaccagcggccctgccgggccagagatcgcgcgctgcgcccccgctcccactccctcggctcccccgctccagggcaccccagccctgtcccggcggtgtcccctgcaccgccaacccctgccaccaagtgcccagccctccagacagctctcaccatctcctgagacacaggtgctcgggacccaccctcacccaggactctcccctgcgggttcacgaggaccccctcggatcccccgccacccccagagtcctccagtgccccccacaagcccctcaccgcaccacacgactcccctatcccgcactcacgcaaaacagacccccgcacgccctcctctaggggtgacggccggacacctccgtccctggcttccccagcccaactcgggcgaccccacgctccgcggggccgcgtcacctgaagcccggggggagcactcagcccaggcccggatcaaaagggatctgacctggccgcgccccgacggcggggtctgtgaaaaggtgtgtaaggggcgtgcgtgcgtgtaacacgcggcaacacgcagacgcccagaggcttccggcgcccccttccccggccgccccctcccgccccccggcctccgggcgagtccgcaggccgcaccccgccgagtacctcgccccgtcgttccgcgtgggcccgggcgccgccggggctcagagcctccagggcaccagcaggtgggccggcccgctgcgctgctgccgagctcgggatcccagcccagctccagccctgcccgggtcctagcagcggacgcgcgcggagccgcctccacttccgctgcgagtctcgtgcgcgcccggcccccggtccgggtgatgcaaaccggagctaatcccccggtccgggtgatgcaaaccggagctaatcccccggtccgggtgatgcaaaccggagctaatcagccgccgtctgatgccctcgggcccgggatcgcaccatcccccgcgccgcgcccgggcctctctcctctgcatccgctgcacctgggacccgccctcgctggccccctaggggcgtctggtcagtgcagacatcagccacggactctccctatcaccttggaaaaaaaatttgctctttttttttttttttttgagacagagtcttgctctgtcgcccaggctggagggcggtggcgcgatctcggctcactgcaagctccgcctcccgggttcacgccattctcctgcctcagcctcccgagtagctgggactacaggcgcccgcaccacgcccggctaattttttgtatttttagtagagacggggtttcaccttgttagccaggatggtctcgatctcctgacctcgtgatccacccgcctcggcctcccaaagtgctgggattacaggcgtgagccaccgcgcccggccaaaaatttgctcttctgagcctcggtttccccacctatgaaatgggaagaacattcctccttctcaggatggtgcttaaaagagcaaacagtgactgttgtcggggtgcttccccttttttataaagcacattcccagcactgccttataaaacctttaggagaagtggacatgcgggaatctccattctccacattctactgagagccagcctgaggcccagctatgggcaagtggttcagaagcttcaggaaggcctatggacttaagagctgactctgggctcaaaggaaccaccgtggcgcccttgggaggcctaaggtctgctgagcttccccgcgtccctttgctagaggcagtgcggcctagtggtgaagagcccctagagccagctggcctaagagtgcactccacctccgctccaacccacagtgctaccccagaaaagctacctaaaaccctgcctcaacttcctgctccataaaatgggctcataattgcgctcacttcataaagttgttgtgaggattaaataatttaatatgtgtaagacgcttagaacagtgtgtggcacattgcggatgctcagtggagtgtaaacaatggagacagagagggaaagaggcctttaatatgcttgcacccaaggcctgggagggcttggtgctacttgatttggggtgaaacacccctctgcgtcctaggcgtccagcacctttctttttttttctttttttgaggcagagtttcactcgttgcccaggattgagtgcgatggcacgatctcggctcactgcaacctccacctcccgggttcaagcgattctcctgcctcagcctcccaagtagctgggattacaggcatgcgctactatgcctggctaattttgtatttttagtagagacagggtttctccatgttggtcaggctggtctcgaactcctgacctcagataatccacctgcctcggcctcccaaagtgctgagattacaggcatgagccaccgcgcccggcctgggtccagcacctttcttagaaatcccttttgatctgaattcaccagtgtcaaaaaataactcctcagctgggtgagctggctcatgtctgtaatcctagcactttgggaggccaagacgggaggattgcttgaggccaggagtttgagaacagcctggatgacatagtaagaccctgtctttacaaagagaaaaagatagcgggcatggtggtacgagcttgtggtcccagctacttaggaagctgaggtaggaggatcacttgagcccaggagttcaggttacagtgaaacgtgattgtgccactgcactccaggttgggtgacagagtgagatcctgtgtaataaataaataagtaagtaagtaaaataactcctctagaggctgggcgtggtggcttatgcctgtaatcccagcactttgggaggctgaggcaggtggatcacgaggtcgggagatcaagaccatcctggctaacacggtgaaacccgtttctactaaaagtacaaaaaattactaaaaatacaaaaaacacacctgtagtcccagctactcgggaggctgaggcaggagaatcgcttgaacccaggaggcaggagttgcaatgagctgagattgcgccattgcactccagcctgggcgacagagcaagactccgtctcaaaaaaaaaaaaaaagtaaaataaaataaaataactcctctaggcagaggctggatgggaggcagggtggagtcatatttgttttcctgtttcca

SEQ ID NO: 1562209 - DNA, 4001 bp, Homo sapiens
aaggtcaactactgttcatgcctgtaatcccagcactttgggaggctgaggtggccggaattacttgagcccaggaattggagactagcctagacaacatagtgaaactctgtctctgcaaaaaaaattaattagtttaaaaaagaaaaaaaagaagaatttaaaaatggttaaaggttggtgcaggtattacatttccggactaaaagaaacatacccctcataaaagaaactttttatctttactaaattagtgcttgtgcaaaaagcttggttatcaccagcttagtgctctggagacttgtttcttgactattttatgatgcttgcttcaccttaaataccagtcaacagtttgcttaaaccaggagtaaaagaattcatctgaagtaagtacttatcagaaattccaaatctcatacttcccagtctgcagaaagctgttctcctgacattgcattcaacttatctctgtcaaaagtaatacaataacctagctcaaaagaaactgtggccaggtgcggtggctcacacctgtaatcccagcactttgggaggccgaggcgggtggatcacctgaggtcaggagttcgagatcagcctggccaacatggtgaaaccccgtctctactaaaaatacaaaaaaaaaaaaaaaagattagccgagtgtgatggtgccagagtcccagccactagggaggctgaggcaggagaatcgcttgaacctcggaggcagaggctgcaatgagccgagattgcactactgccctaaagcctgggtgacaaagcaagactccgtctcaaaaacaaaaacactgtggttgtatttctcagataaattaatccaaatatcccaataaattttcaccattaataagctcttaggacttaacaacctcaccagcccttccagaaagttatcaaaatcccacttctttacttctataaaacagagcgatactagccagcaggtgcacaaaccaaacctaatttggagttctgaggccttgagcaaattgctttttagcaattttcccagcgttgaatcctttggtgagtaaaacgagggaaactcaaagtgattccacactctgtggtgaattgtctccttcatctattctgtgtatcctgcttgggtagagaagaggatagaaagccagactaggtaggagacgtttcattttttgtgggatagatcctgactgggggattagggaagaaggaggatctatggtggaaaaaaagggggaacctgaaggagactctggagacaaggatgagatcctaaagtgaagaaaggagggggtgtctctggaaagacagtgaagatcccaaggtcctagggaaagaacttcaggacaggtgattagggtgtggagagggaggcattggcaccctagggccaagaatggaattctggggaaggaactctgtggaaagactgaaaaggatgctgaaggtggacggccagatatgaaatcatggagggggctccgggaaaaacaggagggttaagggagattatgaggttcgaagacgggatcctggtggaaaagccttctgtgacagaaagacccgaggagacaacgagggcggggaatggggaccgagagagccaagaatggcaccctggcggaagaattctgtggagaaacctggagggagggggtatctacaaggtgggggcgggagacccctaaaatcagcgatctgacttactttctccgctggacttgtactgctttaaacacatcttcacgtttcagcaccacgaagtcgccgtcgcggatgcggtggtctccgggatgctgtggttgtgggcccggctgctcccctgagccctccatgacgctcagccggtcgccgtgctccacggcgtcccgcccctcctcctcggttgtcgccaccgccagcctcacttcccacaacctggcgcactaggagccctccgaccggcaccgcccccacgtgttgcacgccgcttccgctttccggcccagacctcaagaccgcttccggaagcctctcggcttccgtctggccaaactccttgattggctgcactccgccccgcccctctcgtcttgccgcttctttgagcggaagttggatcactgaagcgccaaaaaagaatttaggggaagacctgattttcgcttgaggcatttttgcggcgctgtgcgctacagacaccttctggaagctgcggtggggaaactgagtttcccgagccgttgagacagatggggttcagcaccgcgcggggacgacaggaaagctgcggctgaagagaactgcggacttggcaggagtcgcctgaggagctaagatcccggagactcttagccccgtggtgcttctctacgggagggagggagggagaatccggccggacagatctgcgcgtatcctggagccggcccagttgtgaactaggagagctttgggacctctgtcccaagcaagtaagaactttagccttaggagatgtaaataaagtagtatttgaagaagcacaggtacccaactgtttctttttactctttctccagtcctacttcttaacgtttttttgaatttgttactgttctcagcatattgtctcgtttgagaagggtatggcacgcagcgttgttgaaggagcgcctcagcttgggaggctgaaagttttatctctgtactgtcgacaaacaactttgatcttgatcggtttgcttaatttctttgagcatcagtttcataatgtgtaatgcctaattattggagccctgtcatgccgttaaatcgtgaactttctagttactatcttgttttattaactaaaccccttttaagtaaggatttgggtagagtatttgataatgaattgcactgcagcgtacaggtatatctttatttacttgtatacttaggatatgaatcatttttaagtagacgtgtattttataagaacagttttggatttacagaaaaactgcacaaaaaatggatgtgacactgcaggattgactgtatgtaagaagctatgatgatgtatccctagtgtctcacaggccagaattatgttcatcctgtcctgccctataataagaagtctcaaatactgcaaataagttttcatagagttaattacctgtcctattttcatttctgtaatggggacttgtaaacaggtacagtacctgtccttatttttaacctgtgagcgtctagtatacgtaaaccatatttaatagttattaaactattatggtataccttaaaaagcgatagagattagaaacttaactgcagaatatttgggtcttgtatcatagctgtacaactttgcaagcctgtttgctactcttgaacctagaatacattaatttttccctttttattaatacatttttaagagcactattttccttacagttttggtgaagacctttttaatatctatcttttaggagagatgaatggagagtatagaggcagaggatttggacgaggaagatttcaaagctggaaaaggggaagaggtggtgggaacttctcaggaaaatggagagaaagagaacacagacctgatctgagtaaaaccacaggaaaacgtacttctggtaggtgaggtcaatgattgttcaatttttttcacttaaggaagcaattcacgtctatcatacaaggcggtttatctcatacttcagtttgtcttttatttcatgctactccttagtaagtatttgaacattgatgtcccagatttttactaaaacccctaatttggatactctattaatgagagtctcatttggaaagagaagcatattggaaaaatgttcactctgtttctactaacctagtattttatttttttcagaacaaaccccacagtttttgctttcaacaaagaccccacagtcaatgcagtcaacattggatcgattcataccatataaaggctggaagctttatttctctgaaggtagggtttaaaaagtacaaaaaagcaccat

SEQ ID NO: 1562210 - DNA, 4001 bp, Homo sapiens
tgtttaggaacatatcatctaacctctctgagcctcagtttcctcatccatattaagaaatgagtcttgaagcataactcaaaagcttgaggattaaagataacatatgccttgtaccgtactttttctaaaggttatgtgctcactaaaagttagtcctctttctgcctgtctctacacacccagctcggtaaggtatcttagcttaagaaggaaagagcaagtatttctaggatttttttttttttttgagacagggtctcactctgtcaatctccgcctcccaggctcaggtaatcctcccacctcagcctccccacaggcacacaccaccaccatgcccggctaaatttttggagacacaggattttgccgtgttgcctgggctggtctcgaattcctggattcaagcgatctgcctgcctcggcctcccaaagtgctgggattacagggtcttaagtcaggtcttaagaacacaagggggaaaaaggctgctcatctatggttgtgtgatggccaggaaaacatttctcactcacaactgctcctttcgtccacagtcctccatacacacagaccccctagcctttattttattctatccttttcgtcatttgaggaagtgatattcaaattaaatttaaataaagttacactgtgaaaagtctcactcccattttctccccctttagcccaattcccacctcactcccaccaaccactttatcagtttcttgagtatccttcaaactttttatgaaaaagctgtctttaaataaagctaatgttttacaggtgttagcaaggttcggggtgggggagggtggaagaagtagtggactaggtcctattcaacctggtttaccctaaagcagtgtccttcgctcactcaaaaataacaataatcatatgttgggcacctgttataagtcagatgcttaatattaactaccttcagcccttagtatgcaccagaaatgcactaatgctttacacaattgccccctttgatctccacaacaatcttaaaaggtaggttactaattctcatcttcatcttacaagtgaggaaactgaggcacagaaaggtcacctgcccaagcaagagagaggagcagggctttgaacccaggcctgactccagagtccctcttaaccgtgacgctctacactagcaaaccagatatagtctctgcacccgctggaactcagcctaatgtgggagacgggcgagaaaaaggcagacaacaaagaaatacgaaattatagactaagaaagtaatgtaaacgaaacgaattcgcggctgtgacagaataacaatggggacctactttagaaaggggaaggaaagagtgtcaaggaaaggcctgagaaaatgacatttatgaaatgctcgggaaccatttgggggctgcaatgatgaccccctcccccacgcccaatacacgggataaactcgaggcccacagaggctaaaacaaacacgacagggtcccccagacgtgtagacgtggcgcaaagaagggaggatccagaaactgggcccagggttcgtacacgccatcagtgtccacagcagcccagccccgctcggcccctgacaagggacatcaagccagctgcttcccacggccccgctgcagctgagagcgtccgggcagctcacagggaggccttccggccagccaaaagggctttggcccgtccagcggcggcctggaaaggcctcttccccggccccccgccagctcccgcctggtccgccccgccccgcccctcctggtccagcctcgtacctgcaccgcccggaccaggccccggccggtcagctggccctgccgcagctgcagcagaatgttaccaggccgcggccggccgccccatccgccccaagccgccactgtggctgccgaccgtctccctcggccggctccagacccagccgctaccggcgccgccgccatgtctcctcgtcggacaaacaggaagcaagcggcctcggggccgcggagatttctacggggcggcggaggggtcgccgcagcgcccccagtgggccgtcggcggaggcgcaagccgcgtggcagggaccgtgtgcggcgtggaggctactgggaattgtagtcctgcgcggcagcggggtaggtgggaaaagagatgtggcctttcctgcactgccggtttctctggcccccgggcccagcatttcggcgaaatctcccaaggtccacattctcccatttctctcgccgatttgggcaggatgcaggcagctggccaagaaatgatcctgggcttcaggtcaggagtcaggccctcgagtccgcttcctgcctgcttctctctacacgtgactcaccgcggacatcgaccaagtcatcgcgctctgccactgcgcctgtgtcctcgtcaggtcactccatctatagattctgggagcctgatcaatcgtagttcctggggctttctctgcgcccgacaccaaaccatgtctaggggaaagggagggtgtctgggatacagtggtgagcagaacggcctgggatcctttatcacgaaatgcaggttacaggggaagacagcagatccatacacaaagaaacgcagtctcaaactggataagttgtgtaactgggtaggttgttgtgaaattaaataatggaagggaaagggattagtaaattgtgacatcatattctctgtcagatgaaaaccctgtcctaatttctatccaccagatagcatgttgtctctaatactcattttttcagctaacttctgtggcaggatggcactgactccccccacccaacacacacacactttttcccttcctagcagggggcctgtaataaaaatgaaagaggagagctaagtgtgatgtaacagggaatggtgaagattgtgactcataactaagatgactgtaacttactgctcaaaccagaacactttaaagaatgaaaagacacaataaataattacaccgggacggtaggcataaaagtgactctcccaggtgaactggcactatggttaccatcctcacaccccatctaaaaggagtagactcaccatccatcttcatagaactagaaaaaagaatcctaaaaatcatatggaaccaaaaaagagcctgcatgtccaaagcaagactaagcaaaaagaataaatctggaggcatcacattacctgacttcaatctatacaataaggccatagtcacccaaacagcatggtactggtataaaaataggcacatagaccaatggaacagaatagagaacacagtataaaaccaaatacttatagccaactgatcttcgataaagcaaacaaaaacataaagtggggaaaggacaccctattcaacagctggtgataactggcaagccacatgcagaagaatgaaactggatcctcatctctcacattatacaaaaataaactcagccgggtgcagtggctcacacctgtaatcccagtggctcacacctgtaatcccagcactttgggaggccgaggtagtcagatcatgaggtcaggagttcgagaccagcctggccaacatggtgaaaccccatctctactaaaaatgcaaaaattagctgggcgtggtggcatgcacctgtagtcccagctacttgggaggctgaggcaggagaatcacttgaaccctggagacagaggtcacagtgagccgagatcacgccactgcactccagtttgatgacaggatgagactccatctcagaaaaaaaaaaaaaaatagccaaagaagttacagtcaggagatattttgttccctatagaaactgaatataacatcttaaaatttgtccctgagtgttgtttcttagaaactcgaacccccaccaaatggatctgctgataggcaaactcagataagggagagctgagaactaaactttgacttctattttttgttataaatttcttcctagggggcctggaggaggacacgaccataagtcagag

SEQ ID NO: 1562211 - DNA, 4001 bp, Homo sapiens
tcttgaacgtatcgacagaaggaacaggaattctcataatactgcaatgttttcttggtgttgtgttggaaccagaggccaacagtattcatctgggcatgacattttttcaccagcgatgtgtagcccccagacgtgcggcgagtgtcaaatcattatcactgtcctgtatctatgctatattggattctaaaaggcccaggccaaggaaattgattaggttgctccctccacagcttaaaactcattttggctatatacacacaaagaaaggggctcctcgaactaccaggctccatgaaaaatggcagaagtgtaattaaggagattatgccctaggggtttctttcgacctggccccaaaatatatatatatatatattaaaccctagtgtccctgcgcacacactgcccccaagaggagacaagctttcatgtttagattgcaaagaagtaactctcccccaagtgattgatgaggggagattgttaatacggctgctgcctccctcccccgtgtggttgtatttaggtggatgccagacagagaatgacttggaaatgggataaaagactcaaagcaaaggcgggtggcagagaggagaggtggtgtgatgaatgcctgcaggcaggtgaaaagaaaccttcttcaataatgggggtacctcggtttgacatgctgccctgaaaacaatacaggtggtgaggatggcaacctgagaccactcagaaaaagtgagatggatgtgagcacatatagagttttcttcctagagctgactgcttgaccccaaaccctcaaactattacttgcagtattttatcaaagacacagacttgcagagcttcaagcctagggtttctgattcagtacgtttgcagtgggtttttgaaagttgtattgtagaaaagtcttcaggcaattctgagtttcagccaggtttgaacaccgatggcttaaaccactggtgagctggtaaatctttaatacccagctctaaaagaatgtcctaaattgaaacatttgatgattgtaatggtataattattcctgctatggacaattgcaaggagccactgaaggagatggaaagagagatgcacacaaatagcaacagctggacaacacaagctggccccagccttccaccagcttacatcaaagggaaatatgaatcaagttaataagagcgtgtgatagggagaagccaaatcaatgttagtcatagtgagaaaggagagacattggaagcgtttgcagcagggctgattaaagccctctttatgtcagtaagaaatccacccaagtgccagtcccaagatggcaccattcacagtaaccctcgacttggactaatgttcacctgagttctaaaagccatgatgaaagaatcaaagttaagagccaacaaaatgattgtagtctgctgatagatatggaaaaagtatcatttaaaaactcaattaaattactgatacaagcaagggattattaattagtgttcaaaccattaagaaaatggttgaagggcaactgaacatccatttagcaagagaatagagccatagggatgactttctagcagcaagtgggtaaactgttgtacctgtataatggagcaacgcagcagccatcatcttttctttcttttttttctttttttgagatggagtcttgctctgtatccccagctggagtgcagtggcgtgatctcagctcactgcaacctctgcctcctgggtcccagttcaaggaattctcctgcctcagcctcctgaggtttcaccatgttggccaggctggtcttgaactcctgacctcatgatctgatctgcctgcctcggcctcccaaagtgctggaatcacaggcttgaaccacctcgcctggccaccatcatcttaagtcagaggctatcaccaattttggagcaaacagattttgtgttttcagatgtattgcaatagagcctacatgtcgggtgtgttctagaaaaataaatgtccaatttgaacccacgaggttttatgcatcacttctacaggggttggagaaacaggctaaatgacagtaaaaagctcccagacaaattcagaggaaagacattcttcaaaacaattggctcaatctcttctataattctgggtcataaaaagatgaaagattttaaaaaatgtataaacaaaacaactggataaaacacgtgttcctgaatttaggaacagtccgaccaatccagctgaaaaggatatttatggcataactggaagaatatgattatggtctgaatatttaagcctgtaatcccagcactttaggaggccaatgcgggcagatcacttgaggccaggagtttgagagcagccatggccaacatggtgaaatcccatctatactaaaaatataaaaattaacaaggcatggtggtgcacggttgtaatcccagcaactcaggagctgaggcatgagtattgtttgaactcgggaggcagaggatgcagtgagccaagactgtgccactgcactccagcctgggcaacagagtgagattctgtctcaaaaaattataaaattagaaaaattaaaaacaataaaaattattaaaatgaaaaatagagattgttgactgaaaatagcaggttatataacagcatgtctattacagtcttgtgtttaaatatacatatatgcacagagaatgttctggaagtaggcactgatgttagtagtgtgatctttgggtgatggatgtttttattttcttatttatgtttgttcctattttataatgccttaaaattcacattttgcttctgtcattttaaaaaagattatttttaaaaaggagtaaaatgctcagaaaaacaatattgacctccaaaacacagtaactccaagatgcgttaaaattcagaaaaagtcagtcaaatgcatttatctcagtggttttgttcaccactgcattcccagaaacatggtacagaatatgccatatggtagctgcttagcaaatatttgttgattgaatcaaatccaaaaatcatttcaaattccataaaggacaactgaccttggtgattgggaaggggtgaaggaaggagagaatgcatggaaagatgatttatttgatgatgctgtgttgcaaagccacagtcccacaagaggccacaaagagagaaaaatggcaggatgaaggcaaaatacaagttgagatgcattcaggaggtgaagcgactgagagggaactgactgttggccttggcattgcacgtcttctggatagcgttgtgggcaatggtgctgccaggcaggactcccttcatttctctcaggataacactcctgaggccaacggggagactggagccacccacatcccaaaagcatccagagaagtggatgcaatctgcagagcagccttgctctcacacctttgtttccttcgaatggttgacccatcctggctactctaacgatgctgccttgtgaaaataaaaacttaaaaagacaatactttgtgttgcctcaagatacaaggcagtggcagtggctttaatttcaggaaatcaggtccctagtatgtcagtcactgatcagctgaatgtcttatcctgcattccaggaaactcctgagagctgtgtgtgatcagttttccatgagaaatgtgagaggaagctgagtatatgtgtgtgtgtggttgtgtatgaaggatctgctcacacacagctgagccttgaatcctgccaaacagaatcatccccctacaattaaaagaaaacactttttcaagcccctgccacaatccctggctatgccccgctttggcttccacctgctctgcatgtgggttactgtaaataccgcaggcaaagggaatgggccaggctaatatgaatactgacccgagcagcatcttcactcagggacgcagaggatggccacatccaaattcttagactccacacccttgtgctttttcaatcaatcttgacttcaaaggg

SEQ ID NO: 1562212 - DNA, 4001 bp, Homo sapiens
gtctggctctgaatatagagggcaaggtttgcgtcactggcactctgagttaccatggtgagtgatttattgatatatatcaagaatgaatagatcaaaggcagcgagatgacaggtgatcaatcaaatgtcaaatcaaaactagcaatcaagtggaaagctgatttttcagtgggtgggtctggcagaagaaaaatgaactttcatattacatttccgagaaacaaaaccccagcatactattaaaaaagcaattaagcaacccaaaagaaaaaaaaactttagaaggtctattgtactgatccattaacctgttcttatcttttttagggggcagtaaggattcagatgggatagtttttacagtacgaatcatttcacaaagtttgcaactctctaggcaaagaaaatccagagctgtttaaatttctatggggaatttcccccctacaaccctttttggtttttttaaagaatagggaaattgttaattacatttccaaatatggatccttttagaaaatatatgcaaagagtcatccatttcctgggggcattttgtccaccttggtgatcaacgctaaactcctattgctggccccaaagcctgcctgcagcccgagtgttaggtatgcctcacacttcagcgccccaagccccagtgagaggagacgctatccctggaggccaaaagccactggcactgaccacgcagagggatgcaggggtggaggggctgtctccctactccgcaccccaaatcctcaatccgactttggcccgagaggcaagaaacagactggaagaaagttaggggtggggtagagggtggaggaaagaaagtttaaggaggaaaggcttggtgggatagctcaccccaacccaaccggagcttggaaggggaggatttgggagaccagagaaggcgagagaggacggggttattagaagggcacccggcgcaaactcccccgaaagcttaagtgggtggtgcccccgggcacccaggggcaaggagggcgggcgaggagctcggcgcacagggcagccccgaagcggagccgtttctcttacctgccgcccgcttgggtgcctgctgttttctcctcggcatcctctacttcgctccagtcccacttctggcgccccagccccgagccgcgcgctggggcccgctgtctctctggcctctctgggtctcctccgcctcttgcccggtggctcctaggacgtcactcggcctctgtccccctgacgatcccccctgcaactcctccaccacgggccagagacccccctctctgggtggcagacacgggtggcttgtgccggctgctttgaagtagaggttggttctgccttgtttgtttgtttgtttattttgaattttttttcctctctcttttttgtttttgcttttggaatttttttggttttgtttttgcggttttttttttttttggtgactgttgagacacttgatttctttattaaacatccaagcccgggttcggatggaagggacgaggggcgcacacgcgccacaggcacactcgcgcgtaaagataaggaaaaaaaaaaggcaatcctgggaaggtagtgggtttcttctttttcttcttcttccttctcctctttccctcctcctcctcctcctccacctcctcctccacctcctccttcttttcttcctcctcctcctcctcctcctcgccgatctctatggcggattcgtgccggggggagagcgatcactcactgtaggtttgtggctgctgtcagatccccgtctgtgagtgatatgcgagaggacaggagcgggttttggaaagacagaaaatctggaattcactcactcacacacacacacagacacacacacagacactcacacacgcactcacacgcgcacgcacccccgcttcctcgcacacacacactcacaccccccacatatgcacacacacacaaacacacacacacaccctcgcacacacacacaagacagggcgaggcgatgccagcaaacatcgatcccgctgaacaaactgaacattaacaaactcctcctcctcctcctctccccgcgacctgatgacagggagaaatttactccccagccgcagagcgccaggcagcgggagcctattaaagggacagcgtcccgcaggggagaggggctgggggcgggggccccggcgcgccggcccaggcccctctgtgcgccctctccgccggggcgagggcgtgcccaccgggcgcggggacacccctccgggaggcggaaggggcgggggcgggaggaaaggaggtgaggagggaaggggtgcgggagaaaaggaggcagtgtgatgatggctgaactctgaagctgggaggctgtggagggagattcaggggggccaggttggctgaccagcagggaccatgcacaatcttaggagagggagaacttaggtttgctcggggctgggaagggggaggggaccttatccagtgaggatctccatcctgtaagtcttaacctgcccccaccaaaatgtgctccccacgaccccttcaatttagtgcccctgtccctcccactttctcgctaatcaatgggtggtcacaaaaacaaaaatctcccttctgtctactttaaggtctaatcatatactcctctttttgtttcctttgaagaatgtttattgagcatctactatgtgcctattctggagacacagaggccacagagaaagggaaggtggtggccatgttggtatttatattctaatgggggagtgcagacaagtgccccccagctatccaatctttgcttaaatgtccccttttcccaaaggtctacctcacctaaaatacacacacacacacacacacacactccctgccccatttctccattttgttattccccagtgagctgatcagtgagtgtcacacaggttatagacagttttctattctgttgattgtacaagttcccctcttgaatgtaagctccaatggaaggaaggatttttgcctctttgttctcttatatccccaagtgctggcaaagcacaagacatataataagtgcccagtaaaatatttgttgaatgaatgaaaagtaagcaagcaaataaacaggatactttgagtgattcgctccatgaagacgttaagctgagtgctgtaatagtgtctaaaagggggtgggtggctctagattcaatgtaggatatggcatttgagcacagagagattgaaacaaacatgtgattattgagttctgctatcggccaggcaccttttgaggtgttgggggcaagtctgtgaacaaggtgaacctagaccatgccctcaaggagtgctccttccagtgagagggcaaagcaactgagggcatttgatgcaggctgggactagaggtgtttttttttgctttattattttttttatttcaatagctttaggggtaaaagtggttttcggttacatggatgaattgcatagtggtgaagtctgggatttcagtgcacccgtcacccgagtagtgtacatcgtacccaataggtagtttttcagtcctcacccccttcccatactcctcgcttctgagttgccaatgtccatgatatctttccatatgcctttgcatacccatgcattagctcccacttataaccaagaacgtgtggtatttggtttttgatcctgagttacttcacctagaataacggcctccagctctatccaagttgctgtgaaagacattattttgttctttactatggctgagtagtattccacggtgtatatatatgtgtgtatatacacacaaacacacatatatatacacaaatacacatatatagatatatataccacattttctttatacaataatcagttgatgggcacttatgttgatttcatatctttgcaattgtgctgcaatgaatatacgcctgcaggtgtctttttgacataatgactttttttcctttgggtagata

SEQ ID NO: 1562213 - DNA, 4001 bp, Homo sapiens
ggcatatggcttgtctctcaaatgacatcttatcaatgaggccttctctgagaagcataagtaaaagactacccacctacacatatacattccttatcctccttatctccttgatttttattgaagttacttaccactttctgacttattctaaacttgcatgtttgtttttctatctttctcagtagaaagtaagttcctgagaacgtggattttgtctgttagcttagaagagtgctttggacataggtgctgaaaaattattttccgaatgaatgaataaactattggttcaggaggcaagaatttgggatcagacataagataaccctaatttgactcctggctctgctatttcctaactatgtccaagtacatagggtacttaaccatgctttacattttctcgtctatcaaatagtgattgtaataatttcaactcctaagactgatgtaagaattaaatttaaaaagtatgtaatgtgcttaatagacagtgacttggtataaaagtgctcagtatatgacagtgttattaatatggaaagatgatctagatttcgacacaaaagccctcagttatgactagatactcactgtatgattttaggttactcacctcttttacactaactcacttgataaatcaggaactggggccaaaaagatggctaagttgcagccccttccctcaagtcttagtaatgtgatcttgggtaggtcacttaacctctctgagcctgtttcctacgctgtccaaagggggataatataatacctcacagctttgttgtgaggattaaatgagttactgtgtgggaattgtgtctagcacatagtaacctctcactgcgttagctatgattatgattccagtctggaggaagggtaaaagcatgtaagcaaagaactgcaatacagtgcaataagagcaaaagcaggcatcaactagaagaacgtctcctaaactagagtctgcccacaactaggaagttataccacgatcaggaaattttaaaaccctcttatgtctataacttaactccctaccatcacccccgtggcagtaagaaaaacaaaatttctctgctgctttgatacctgggatttaaaacttaaaaaaaaaatagggtcaaggtttagagtctcagatagtgttttgttttgtttcagagaagagtctcgctccatcgcccaggctggagtgcagtggcacgatcatagctcactgtaacctctaactcctgggctcaaggtatcctctcgcgtagctggaactgcaggtgagcgtcaccatgcctggctaattttcgctgttacccaggctggtcttgaactccagtcctcaagctatcctctcgcctcggcctcccaaagggttgggattacaagcaagagacgttgcgccaggcctcaaatagtgtgtctcaacatgaggtcaacagacacattgggaaggctaagttagttccctccaccttttccctaaagttaacacctcacttaagttcgaaaaagtcaactggacccgcagacggcaaaagcagcacgtaataataccctgagtgagaacccacttaagagccgagagcccaaatgtgtgtttcatgacggcgctgttacagactaaaaggtcaaaacaggacattaaagggtgctccggggggctgagtaggagctcaccaggtgagaaaggggatgtcactttcggacagagaacgagcgccagggcgtggaggcgtgaaaagggcacgtgggtggcttggaagaaccaaaactaagtgttttgggggacagccagagagccgaacacatatggaggaaagatgcggcctggggcccgccagattagaaaggaaatccccctcccatatccagatcatgatctctcagactcaatgtcccctcaggatacccctctacagggtcccagctgctgggctccctctggttcccgccactcttcccttacctcgtcttccagcctttctctcactctcccgcctcctctgcctcgccggaagtgacgcgctaagtagcgcgccgtatcgcgccagaaaggttccgagggagcgggaaaaagggttccggcgagatccactgcgccggtgtgcaggctcgagcggtcaaagctctttccgggggcccggggaactactctccttgcctcgctctgtctccttcgaagtgctctgcgcgaggttcagagcggccgccgcctccaaagggacggttttctagagctccgacgcctctcggtgcccctctgctccggcccttgccctttgacctcgctctcgcggcagggtgagaggtcgggtggccatcttgtggcggcggcgcgggcggctgttactgcggagacccatcccctcccccttctcgcacccctggcagtctgtcagtcggtaaaaagtcccgcagcctgtcaggtgaggccccggcctcgtgccgtcgctcttcccgccgcactgggcggcccaggccgctccctgccgggcctcactgccgccaccatgtcctccttctctgagtcggcgctggagaagaagctctcggagctgagcaactctcagcagagcgtgcagaccctgtccctttggctcatccaccaccgcaagcacgcgggacccatcgtctccgtgtggcaccgcgagctccgcaaaggtaaacaccaaatccccaccccctggacggtccccggattgtcctctcgcccacatacaacctaggcccctctaagcctcttcattgagccttgctttccaggcctgatcgagcttctgagatgggagacaaagttagccccatttctcgaagaaggaaactgaggcccgggaaggtttaaggtacttgcctgagggtccacggactgggactcaggtgtccagacttctagttcatcaagccattttcccttcagtttccccctgacatttgtggctgttattatctcggctgcattcactgccgtactggccctagcatgtcgggcccagtgctgggtatttggagtaaaagccagtgggctccggagtcagactctgcagatcgagtcctggctcagctatttgccagctgaataatactgggagagtttcttcatctccctgtgtctccgttttctcatctgtaagagggaggcaaggatagctaccccttacaaagcctttacttcataccagtcactatactaagacctttgtgtgtatcctcgcactcagtccttagaacagccctgtgaagtaggtagtctctcccatcttaggttaaggggccacccagaccttacctctcctctcctctcctctctcatgcagttgtcattgatttcaggccctgctcaggttctgacagacaattcattgaactcattctgttatgtgccaggcactggcttggacacttgcagcatgttgcctctgccaactgcctagaatttaagcctgactttgccgccttactgaccccagcaacttaacctgtctgtgccttaattttcttatctacagaatggataactgaaatttactatgtctttattacatgcgaagtgcagtactgatatctttacatacattgccattaaaaaaaattctcggagccctatgaagtaggaactttgcagaagaggaaaaactgagactcatctcgtggtgaggagtaaacgggataatccaaatgaacatttagcatggggtgaggcacagtgtaggcattcagcagattatggtgagatgagacttttgattactcactgtgaggcatggtctttaccttcaagttgcttacagtctggtggggaaagatggacacctacactcccggatgagtttcataatggaagactgaagaaatgaagctcagagctgctccagacaccctatatgtggtaggcctttatagcgaagtggctttacaagtgttctatactatctgtgagttggggacaccacagatgtcctgctctacaggtgaggaaactgaagtggctaagtggt

SEQ ID NO: 1562214 - DNA, 4001 bp, Homo sapiens
ttttatttttttgagacaaggtctcgctctgtcacccaggcttgagtgcagtggtgcgctcatggctcactgcagcctccaccgcctgggctcaagtgatcctcctccgcctgggctcaagtggtcctcccacttcagcttcctgagtagcttggactacaggtcccggctaattttttttttttttttgtaaaagcagggtctccctatgtttcccaggctggtctcaaactcctgggctcacacagtcctcctgccttggcctcccaaagttctgggattacagacctgagccatcatacccagccaaatttattttagagatggggttttagtatattgcttaagctggtctcaaactcctgggctcaattgatcctcccacctcagcatccccatgtgttgggattacaggcatgagccactgcgcctggctttccactctttaaacagctgggtccttcttatatatcacctctcagctcaaatgccacttattcagagaggttctccctgtctgctttgtttccttcatagaaaactgggaccatttgtaaataatttatttgtttgcctatcttgtttgccttccctcctagatctgagatgtctaatatgtagctactagctgcatatggctagtaagcatttggaatgtgacttgtctgaattgagatgtgctgtaaatgtaaaagacaccagattttgaatagttaatacaatttaaaaaggatataaaatatctcatttatagttttaaaatactgactatatgttgaaatgatattttggatatattgagttaaataaaaatattatcaacaattaacttgtttctactttttaaatgtggctgcacatgtggctggcattatatttcatttggacaatgctggtctataccattagctaatgaaggtaggaacaatctctacccactgctgtgtccctagtctctatcatatactagatgctcagtaagtatttactgaataatttggtatttatgagaactctgggcttttatgagagctgagacgggcagccccatgtatgctatgaacttgagggaggaagaaacagttttatttttctccaatcactgtatttcaaagggctctgtggattctctctgtcctgctctctatccacaatccccagtcacctactactatagattgaggggtgggggtgatggctgaaggaacaaagctggtgcagctgcttctatttcagtcctataggaagtgtcttgattattttacattctccagctttggtcctagaagccaggaagggctcacctcaacatcctcagaaacacagatagggttagctgggggtcacggggactttcccagggtcatctagcaggtcagaggtgaacagggcctcaaaccttggtctccagaccccttccaggaccctgacctctagctattaatacatcctgatgtagtctccttcagactggaaccctccctcaaacccctctcccaacattcacctgtaatttcttggggcacctaatggcagttgtgcctggtcccagcagagcttccctggatggcaccatccctcctaggggccgaaatggatggaaggaaggagtgagaggatggatgaatggatgggaagatggacgagtgaatgagtgaacaggagggtgggagaatggatgggaaaggaggaaggctggttggtagggtgtctctgcacgggtggagaggatgtatcggaaggaattacccacttatcccgttccaagcagactctgaagagcagagagccctcggcgatcaaagtccagccccgtcacgtttctgctagaagccgaggcgggagaagttgggtgctttcccccggggcccgcagggacgtccaggcagagccggaagggggacgggagtttgtgggccggccggggggctctaggcgacatccccccatccgcccgcgcctgccggtgccagggtggggtaaggcccccgcccccacctccggaggtggcggccccacgcggccccaacaaactgccgttgtcccgcgggccgtgggcccggcacactggggctttgtccggccccccgccgcgacccgaggcgggggccccacatgaccgaaggggtaggaggagcctgcggcggcggcggtggcagcggcggctccaccaccatttccctcccgggccgggggtcggcgggcggtggcggtggctgggcagggctgggcagggccgcggacgccaggccccccgttccccgccaggctgcaggcgtcgggcctgggccgtcagggcagctgtgaccggatcgcttcccgggcggcgagctgggggtgcacccggaccgccgcccccgggatcatgggcaatggcatgaccaaggtagggggcgggccccgcgcagcctccccggtccccgccccggccgccgcggcccggcgctgaccagctcggtccgcccgcctctgaccttctgttctcgccggtctccgtgcggcggcatctccgtgtccctgtgactcgagaccgcggctgtcgggtctccccctctctgaccctgcgtctctgtccccgctgtgtccgccctctctccgtgactctgtgtgtctctcgctgtcttgctgtggctgtcactcccaggctgtctcccagtgagtcctgctctccgtctgcatgtgtccctctcccttgtcgctgactcctcggctctctccggggctgtttctccatcctgtcccgcctctgcctgtcattgcctttctgcctccccagccccagaatttccatccctgcaccctgcaagtctacctctctcctctcctctcctcctaagacctgccttcctcctctcccctctcatacccaagctggcctcccttggttccctcggttggttaactggccccctagcctaccctccccagagccccagacccctctcacagaggactcagggcccacaaaagggaagagagtgctccctgagccctgaggtccatacccttcatgggacagagaggggctgtgggccccccagctgccctgggggtggaagggggtgcagcccctgccccactgacccttgcctgtccttcctctaggtacttcctggactctacctcggaaacttcattggtgagcactgcccactctgtcccgaggccatggcactctgcctgtctcaggcctgtgtccaccattcatgccctggcccatgcatctcaggaatggggttgggggcagggaagcggccccaggctgggagggggaaaaggctgatggaggacaaggggtgcacatgcaggcgagtgtccccaggcttgaagggacatggagggagcatgggggcctgacactgacatccctccccgccattcagccttccccagtgttctaccaccagaccaaagggccagagcaaagggctcggggcctgggctgtggacctgagcaagtctacacctgcgctaagcctcagcctcctcctcagcacaaaaggtccaccagctgctgagcactcttctggccctgaggttctgggttgaggtctgtttgcgggtgctgcttctagcggggaagctgggaactcttccccccataacttcctccttgtcagaggagaggtccctggagatgggctgggccttcttgtgagcagggtcatgagcaccaacactgtcgcaccccagagccctggagcagctgggcagcctagagctggaagttgggggggcggtgagccggcaagctttgcattccccactctctcatccattccttccacaatcttcagtcaggaggaggggacacccatgtatagataccttgttcttcaggggcttccaggctggtggcaggcaggcagagctgaacatagaccttgggtagaaaacatgctgggtagaaaccatgctaagggggctgggcgcagtggctcacgcctttaatcccagcactttgggaggcggaggcgggcagaccacctgaggtcaggagt

SEQ ID NO: 1562215 - DNA, 4001 bp, Homo sapiens
ggtcaggagttcgagaccagcctggccaacatggtgaaaccctgtctctactaaaaatacaaaaattagccaggcatggtggtgcgggcctgtagtgccagctacttgggaggttgaagcaggataatcgcttgaaaccaggaagcggaggttgcagtgagccgagatcatgtcactgcactccagcttgggcgacagggcgagacgctatctcagataaataaataaataaataaataaatagatagatagataaataaataaaaatatattttaaaaggaccaatctgctgtcttgagaatggactctaagggagtgaggactgaagcagaccatttagaggctattgcaataatccagctgagagatgctggtggcctggagtaggtagccttcactgacccccagccaggttaggtgcctcccccgcacttctcccaccctgttgcaattgtctgttggcaatttgtgagcaacatccaagtttgtcttgttcatcacctgaaacccagcgcctaacatggtgttagacacataatctgcactccataaatatttgttgaatgactttagtctggttggcacaggtatgctaagtgaggaatggaacaactatggctttgtttctatggaagtaaccaagagatgcctgcaatcccatcaaacatcagtgttcacaaggtacaagcctcacctcaaagcccctctccagcctcattttccatcgcaccccaccttgatgcacattaaatgccagtcaaaacaaactaataacccatcatccttggaataactcgtgcacttctgatacactctgcctggaatttcctcttctaatttgttcctaacttgacagctcaggctcagctgccatgtcaccacctcagtgaatccttcccaaactccctgagggtgattccctccagttttccacagaactgggttcctatttcttttttagaaattacagtccaatgctatgggcatttatctagagtcagtttcaccacgcactcatttatcaaataattaccgatcacctaccatatatgtcaggcactgtgctcacaggcactgggaacacagacgcaaacaatacaattccttgcctaataaagcttacattatagtggaatgaagagaatgcatacttgagcattttaccatgtatcaagcattgctaagccctttacccatttcctcatttaatcttcacgttatttggtgagagcgctattactgttgccattttacaaaggaggacaaaaaggactgtcccctagaatctaagttccacgagggcagagggcttgtctgccatgtccactgccacccccagtgccgggcacatggcagtggtctgtacacatcagcggaggatataggttaagcgattcgcccaagggggcacacccggtgaggcagagcaaggatgcgtctagccccaccctgggcttctaatctgtaccctccacctggagcttcatgttgactctccagggactcagcagtgccgagcgctcagcaggactcagtcacaggctggtgaatgagctgacaggcggacatatgagtgagatgcagacaccattggtaacggtgaagccaaagatctcccccacctggagcccatcctttctggagcatcactttcctttccaccccttcctctcaacaaggagaggtcaggaagccatctctcctagagcccccgagaccccatatcccgtggacaaccttccgaggcccccacttccggctgtcaccccctccccaggtgtccccatttcctggggtctctcgctcctctggtccccacttccggttatccttccctctcaggggtccctctcctcagctcccagggcacacggatgggctcgcgggcactcaccggcccgactacgggcggagcgcgggtcaatcggcggcgggagcctcgtccggcagcgcacgcagaaccgacccgcactccctgcccggcctgcccggcctctcgcgccggaagtgacgatccagggcgtgggaggcggggctccgcctaggagcgcgcatgtgcgacgcctccccgcggcgttggtgttcagtccccacctggctgccggagctccgagctgcggacctggagtggctgggaggagctggggcaccagccgcttgtcaaacccggcttatagatggggaaactgaggctcagagaaggaaggaaagaagctgccattttccaagaacatgctaacatgtacctgttgtttaacatccatgatctcattaactcctcatatttatgcaattcccctatttcaggaaagggaaactggcaatcaaggcagtaaagggcttcaaacccggacctcaggattagcattctagacttccccccactatggctgctatcaggactagctgctccaaaaagggagactccaaaccaggggacatctgtctgtcattaactgagtgacctggagcaagtccccattccttcttgtgcttccgtttccttacctgaaacctgattcttgctctggagcctgattcaataattacttttttcctgctttggggttcattacgttccctccagacaaaggctttactaactcccaccccagtccattaagatccgcccgcaagtattttgtgcaactgcaactttgaggcaaatctcctaggtccctctgaggcagaacctctggtggtccaggagaactctgagcctaaagaaacgaccttaaacagtcttttcattttcctaccccaggggcaagaggagtcccaagaagatgggaagtgacccatgagggccacaagaacgtggcagtttctgccagattgaggggcagggggcagcagtatggaggcgacctgggaatcatgagttttgactcctgctctcagtttcatcacttctaagattgacagacaaaatatataacattcactacagtttgaatttcagataaacatttaagcatgttcctttccaaacacacacacacatacacacagataagtgtgtcctatgcaacatttgggacacatttatactttaaaaattgttgtttataggaaattcaaatatgactactgggcatcctggattttgttttgtttgctaaatctatgtattattttcctgttactgttacaaggaattactgcaaacttcatggattgaaacaacacagatatattctcttgcagttctctaggtcaaaagtctaaaatcaaggtgttggcaaggctgcattcttttggggatttggaggaagcatcagttcctttccttttacagtttgtagaggccacctgcattccttagcttatggccccttcttcaaatcacctcaacctctggcttctgttgtcacctctactactgactgatcctcctgcttccctcttcttataaggactcttgggattacattgggctcagccagataatccaggataatcttaccatctcaagatccttacattaatcacatctgtgagatcttttaaaacgtaaggtaaggccgggtgcagtggctcacgcctggaatcccagcactttgggaggctgaagcaggtggatcacttgagatcaggagtatgatgagaccaccccagccaacatggtgaaaccctgtctctactaaaaatacaaaaattagttgggcgtggtggcacacgcctgtaatccgaggcccccacttccggctgtcacacccaactatgcgggagcctgaggcaggagaatcacttgaacccaggaggcagaggttgcagtgagccgagatcatgccactgccctccagcctgggcgacagagcgagactctgtctcaaaaagaaaaccccccaaaacagccggatgtggtggctcatgcctataatctcagcactttgagaagccaaggcaggtggatcacctgagttcaggagttcgagaccagcctggccaacctggtgaaaccctgtctctactaaaaatacaaaaattagccaggcct

SEQ ID NO: 1562216 - DNA, 4001 bp, Homo sapiens
gagtgagagctaaaaccctatctaaacctaacactttctcttgagggcccctttccgtattatcttccagcttcagagcagcagggctcctgcctcccacttctctgtgtgtgagttatgaatgtcttacccctgaggcatggaggaatggtgacttcttttcaagcagtaatgttccttgcccccggtttaaaacgcctgcatttaaaagccttagttgtttcctggcagcattactcacagtagccaaaaggcagaaacaacccaagtgtcattgatggatgatgaatgtaggtgtttcaaaacctcacttttaatgcatctcatattagtaaaagtaatttcacagcagcaaagagaacacgataaattttgcacggtgcaattggtcatcttaaaatcaagattggagattgtgggttcgggcatctgtgttcttggggttggccaattaagttacgtacttgggggaaatttttaagcaggggggcaagggaaagaaaaactcatttatattccagacagtgtattttaattaattatgttactgtacacaaaaaacttttattttcaattaaatttcttaaattttcaattgcatactaataaaacagtaattgattttttttaagcgttacaataaacatgagaggggaggggaaagacaccatagtgacagggtacagaaagtttctcaaaaaacttcaaaaagctgttttgagacaaattactgtttttagatatgaaaagttcattgttaagataaaagtgggccaggtacagtggctcacgcctataatcccagcacttcgggaggcccaggcgggcacatcacctgaggtcaggagttcgagaccagcctgaccaacatggtgaaaccccatctctactaaaaatacaaaattagccagacgtggtggcgcatgcctgtaatcccagctactggggaggctgaggcaggagaatcacttgaacccaggaggtggaggttgcagtgagccaagattgcgccattgcactccagcgtgggcaacaagagtgacactccatctcaaaaaaataaaagatgataaaagtgccaggcacggtggcctacacctgtcatctcaccactttggaagcctgaggcagaaggatcacttgagcccatgagttcaagaccagcctgagcaacaaagtgagatccctgtctctcaaaaaaaaatttaaaaattagccaggcatagtggtgcatgcctgtaatcccagctactcaggaggctgaggcaggagaatagcttgagcccaggaggttgaggctatagtgagccatgattctgccactctactccagcctgggcaacagagtgggcaaagaaaaagatgataaacgtattatgtaatataatggtcggcatgtattgtacatatgtatctatggataaaattaacattaattaaattaacactctaagcacttaatgtgtgttgtagctctttagttaaagattgtttccttcttttcccatgtgaaatttttttttaagaattaaagcccaaaggcattgtctgatatttagcaagtacattaaatctgctagacttattgtcttccctgctaacttagggtatttttttggttgtccgcctctatggactgtggtaaagctaggattagtaaccagacattacttaccttggctccgatctggttgccacactggccaatctgaatatggacaatttcacgcatccttgctctgagcccaagtctgagatcttcacggaatcctcagactctcagaatccagagcttcggttcactggtgtgagcccaacacaactgtggtcactgcagtggtgggactggccaaccaagctaccctcacaatgtgaccaagggtgtgtccaccccagaggcccagctccccgccctcagccagtcctggcccttctctgctttctgcctgtcatgcttttggaagggagtgtttttcctccctcaacacagaatactgccccatcatttcctagagagtgagtgcaagattaaaggccacctcggggcacagggcctggaggctggcactgtttgcaggcttctaggtgaccatgctggccctagtgaccgtggtatgatgactgtggctcctagctcacccaggtaaccagaccacctccaagggctttccctgtccatcttcccggccccttttccagactttggtccccagaagccccgtgccccgccacagcaggaggctccacaactgggcctcgcaggtcccaggtcccgggatggcctgcatcaggcactgtctgcccgccctcccccacatgccctctctcgccctgtatgcaagttactctgcagtgtcctgcaggtctcttggacccctgccctatccatgccagggctgggctgtgccccagcacccttcccagcccctgctctgtcgtcccatctcagctcatggtgtctggggtcttaatgtttgccatagggtccctttaccagaccctgaattctccaagagcaaaacggactcccaattgtattcccttagagccgggtgtggtggctcactcctgtaatcccagcactttgagaggccaaggtgggcagatcaccagaagtcaggagttcaagactagcctggccaacatggcgaaaccccatctcttactaaaaatacaaatattagtcaggtgtggtggcacacacatgtagtctcagctactcgggagactgcggcaggagaatcgcttgaacctgagaggcggaggttgtagtgagccgagatcatgccactgcactccagcctgggcgacaaaacaagactctgtcagaaaaaaaaaaaaaagcattccctcatgcggtgtacaggagtggcagcaggctgggtactcagcagcttgaaagcagctgttctgtctcctggtcctcagtacctcccctgccaccaagtttctatcatcgtcgaaagccagccctaggctttattacctccaaccaggcaagggcatccaggccaaacaccagctccatatccttgcccaggagggtggcagttccccaccgcctggaggacagaaggtggaagcttccaaggaagatggggaagggactccctgagaaggcgtgagagccctggctcggaaggggagagccagtggacgctgccttgtgcctgttgagctgtcgaggtgcaggtgggcaggtacagggcaaggcctcactcctgaagccccgaggatgtggacaaccaccatccggtgagcaaccacctcttgaggcctctctttaacgtctgccgggcaccctgaggttgcccccattctttgaacagctatggacggggacctgtcataggctgggctcaccttgggcgctgcagacaagggaatgaaggaggtagatgtggccagatcctgcactcttggaactctggcttacttaggaagagagcactcctagctctggagcagctcaaggacaccatctctcaggacagggactcaggacaggcaagactactgaactcagagcgagaagccctggaggtccttccctcccctgcctctcgccagacccgtgaccttggttgaagcattggagcccagcctggtccatgaggggcctgtgcttcctgtgccccaagcccaggcttgactcctaaaccttgtgttccttctacaggcctggtggggcccaggatgtgaggtcaggaacacaatcaggaaagttcctaacgatggagtgtctgggggaaatcgcttctgcttactcccaaaggagctcaaacacacagccaaagggcctgagctataaaccagaagagaaacccagaggtggggaagaagaaagcactgtgtcctaagagtgcctggactgggactgcttctcacctctgtctagtgtgtagatcccaggctgcccttgagtactgacagtgcaccccatgatcctgggctggatccaggaccagggaagagggctgctatagaggatggtatgagga

SEQ ID NO: 1562217 - DNA, 4001 bp, Homo sapiens
caggaggagtgtcttgctccgccaaaggcttgaagcagagctcgcacttggatctcacttcccacctttccccagactcactcacccatcccagccctacacttactgttccagctgctccatggatggtccctacccatttgaaaaggttgtctgattcagggaaggcagaaatccctttatcgccagacatctggggagaaaacacatttgttggaatgtggagtacacttttgggcatagcaaaggtcagtgggtgagctttccccttaattttatatatatatatatatatatatatatatgctcacatacacacacacacatatatatgtatacacacacacatatatatgtgtatatatatgagatatagatggggttatgccatctctactaaaaaatatatatttacatatatatatatatagagagagagagagagagattgagagagagagatagacagagacagacacacacacacactctgtcgcccaggctagagtgcagtggtgcgctcggctcaccgcaacctctgtctccacggttcaaatgattcttgtgcctcagcctcccgagtagctgaaattacaggcatgcaccaccatgcctggataatttttgtatttttagtagagacagggttttgcaatgttggccaggctggtctcgaactcctgacctcaagtgatccgcccaccttagccccccaaagtgttgggattataaggtgtgagctaccgcgcccagcctccccttaatctcatcactctgatccaaaataaagcaaccaaattcataggctagaaataccaagaagggcggggagttgggtgtgggtaaagcttggttggggctaggaagtagggacacactggatagggagggtcttgtatgacttcagggaagtgttcgagataacttcgtgtggggggatggaattgggaggagggactgctggaagaaatggtgtaggtggggtgtatgaacttctttcccaggagggagcaaattacattacccctatgtctagcaaaaaagctgacggaaaaaaggaggctactgaaaattggatggaaggctggggttctgggcacttaatcactcaccatgagggtcatcagctcctgctgtagcctgaaaaaagagtattcggggttacctgggagtctggatgggccaggcctccagacggtgcatcttctcccacctgaatctcagggggagccgtcatggaggctccccacatcaccaaggtcaggctcagctcagggtatactcaccagatccacaggacgatcctagcgagtcctcaccctccctaattccagactccctcgggatgattctggcatgttcttaattccccaggctttagcatctcttccttgcccgactcaacttctcccttcccctgtctcggccaagtcacgagggtccttgagcgtcttcatctaggcccaccagggaaggagtctggcagcgcccctaccctcccattctccttcgggagagtctcaaagagcggtctgagctcctggcctgtcccccatctctcgaatctcacccgcgcaaggaggtgggagtcccggaagtctccgccctcgacacccatgcccaggggaatgccaggccccgagctcctggtgtgttctcctgcacccgcagatctcccgctccaggaggtggcggcggggggtggtcctagaaatctttgctctgggtaccaatgcctagggcatggcaggcccggcgagtggtaggccgcatcactcaccttttgcccaccggaccccgggcggcgcccccgctcggctcagctcctttacgggcggcggcgacgctagtggcggctgggtcgcggttttgggaagccatccgggcggcgttggcagagagacaggaactcggagaacacgactgcaactgcaggactgcgggcccgcccgcccgcgtttgaattgtaaccctctgggggcgtcgaccaatcaatggctcgcttgggtttgatccagccaatgagacgctccggagcgctctattgctgcgccactgctagacctacccactggcgcaccgctattgggcggcagaatcccgcttctgacaaccgattggtagatgatgctgccattaactaacgaatccgtagcgaattggtggccgttggaaaacgctaaccattaaagggccaagaaaacgtccacgtgggatgaacccctccttctggctacacgtcttactccgcgtgggaacactcggcacgcccagccttgatccaatttccctcgggcagggagtgcctccaatcctgcagcactggtaccctcccaccattataatcgcctgggcacctttgctgcgtcctaagtatctgaaaatcccagcgaggggaaaaactaaaggctgatggccagagcagcaggctccctattagaaaacataggtccatacatctccgcagagatgacagaaataaaaaaaggcaacattggttcaggctggtcgcagtggctcacgtccgtaatcccgaacactttggaaggcccaggcaggaggatcacttgaacccaggagttcgagaccagcctgagcaacaggatagggagacctgtctctacttaaaagaaaaaaaaaaaaaaagaaaagaaaaaaaaaaaaggctggtgaggtggcacgagcctgtagtcccagctactggcgaggctgaggcgggagaatcgcttgagccagaggctgcactctagcctgggcaacagagcaagactgtcttcaaacaaacaaaaaccccaacaacacaggttcatatcctgtatatcctacctccccagtgggtagtgtgtaaccttggggcgggtcctttagtatcttaacctgtaaaatgggagcaataaaagccaactctatttttcatatgatctgtcatcaaactccatcgcattctgccatgtccttacattagctgggtaaggaaactacaaatgggcaaagggaagacgggcagggtacatggtgctcccaggttggtcttatcaagcctggctctatactgttatgggtgagggttatctcgtccttttttcctacacccacttctagagcccttgatgttctgtcaattcccacaaggtagagggcacagcaggttcaccatctgtgtttactacaaactgtttaattgtttcttatcccaataactttacaaatatagaaccacatgctagtctgggggtgctgtgcagtgagtcactacaaactcgctcaggcacagcttaatgccgctgagatccatctaggagcagtcccagcggtggcctcagccacgtgaggaagagggctttggaggagggctgccaagtgtggccaggggacccggcctcaggtctgtggaggtgcttcaacagcacgatgctcattctctgtccgtagtgtctccatatactttctcatcttctccaccatccaggagggtaggacaaaggatttcaattcctctagcttcagatccaggcatcctctggaacagacattgaagagagaagttgggggaagtgaggatgtaggccctgcctcattctaggggctatttggaggcagggagaggagaaggggcaggagacccactggttttacctgtaatcatcactggccgcaaggtcccggatgtcctcctcgatgaggaggtaggcctgaggcaggagcaagggagagtggtcattgcctgattcatttcactccaactcagtaacacttcattaaacatctgtttaatgtaaggcctgctactaggtggaagcgggggatgcggtttacaatttagtacggaagagtaagtggggagggatgggaatggttccttgagacaatcttttactacagtagatgcttcatggatgggagagtagggactggtgacttatttatagccttctcttttaaaaaaggacccatttctctcttgaatggtgtggtgaaaattaagaaaaaaaaaaaaaaaa

SEQ ID NO: 1562218 - DNA, 4001 bp, Homo sapiens
aaccccgtctctactaaaaatacaaaaaattagccgggcgtggtggcgggcgcctgtagtcccagctactcggaggctgaggcaggagaatggcgtgaacccgggaagcggagcttgcagtgagccgagattgcgccactgcagtccgcagtctggcctgggcgacagagcgagactccgtctcaaaaaaaaaaaaaaaagaatattagttgctaatacgtaaaaattagatttggcacagatttggacttctgactcatcttaaacctgatctgcagcaatgggaagctgccttcttgagatctggccctattggccaaagtcctcacttcatccatttccttgctgtctgtccccccatgtaaacatctaagataggcagccctgctttaaacccaccctttattgcacagagggaaagaacaaggccacatggctcagagaatgtaaacagtcacaggaggagtgtcttgctccgccaaaggcttgaagcagagctcgcacttggatctcacttcccacctttccccagactcactcacccatcccagccctacacttactgttccagctgctccatggatggtccctacccatttgaaaaggttgtctgattcagggaaggcagaaatccctttatcgccagacatctggggagaaaacacatttgttggaatgtggagtacacttttgggcatagcaaaggtcagtgggtgagctttccccttaattttatatatatatatatatatatatatatatgctcacatacacacacacacatatatatgtatacacacacacatatatatgtgtatatatatgagatatagatggggttatgccatctctactaaaaaatatatatttacatatatatatatatagagagagagagagagagattgagagagagagatagacagagacagacacacacacacactctgtcgcccaggctagagtgcagtggtgcgctcggctcaccgcaacctctgtctccacggttcaaatgattcttgtgcctcagcctcccgagtagctgaaattacaggcatgcaccaccatgcctggataatttttgtatttttagtagagacagggttttgcaatgttggccaggctggtctcgaactcctgacctcaagtgatccgcccaccttagccccccaaagtgttgggattataaggtgtgagctaccgcgcccagcctccccttaatctcatcactctgatccaaaataaagcaaccaaattcataggctagaaataccaagaagggcggggagttgggtgtgggtaaagcttggttggggctaggaagtagggacacactggatagggagggtcttgtatgacttcagggaagtgttcgagataacttcgtgtggggggatggaattgggaggagggactgctggaagaaatggtgtaggtggggtgtatgaacttctttcccaggagggagcaaattacattacccctatgtctagcaaaaaagctgacggaaaaaaggaggctactgaaaattggatggaaggctggggttctgggcacttaatcactcaccatgagggtcatcagctcctgctgtagcctgaaaaaagagtattcggggttacctgggagtctggatgggccaggcctccagacggtgcatcttctcccacctgaatctcagggggagccgtcatggaggctccccacatcaccaaggtcaggctcagctcagggtatactcaccagatccacaggacgatcctagcgagtcctcaccctccctaattccagactccctcgggatgattctggcatgttcttaattccccaggctttagcatctcttccttgcccgactcaacttctcccttcccctgtctcggccaagtcacgagggtccttgagcgtcttcatctaggcccaccagggaaggagtctggcagcgcccctaccctcccattctccttcgggagagtctcaaagagcggtctgagctcctggcctgtcccccatctctcgaatctcacccgcgcaaggaggtgggagtcccggaagtctccgccctcgacacccatgcccaggggaatgccaggccccgagctcctggtgtgttctcctgcacccgcagatctcccgctccaggaggtggcggcggggggtggtcctagaaatctttgctctgggtaccaatgcctagggcatggcaggcccggcgagtggtaggccgcatcactcaccttttgcccaccggaccccgggcggcgcccccgctcggctcagctcctttacgggcggcggcgacgctagtggcggctgggtcgcggttttgggaagccatccgggcggcgttggcagagagacaggaactcggagaacacgactgcaactgcaggactgcgggcccgcccgcccgcgtttgaattgtaaccctctgggggcgtcgaccaatcaatggctcgcttgggtttgatccagccaatgagacgctccggagcgctctattgctgcgccactgctagacctacccactggcgcaccgctattgggcggcagaatcccgcttctgacaaccgattggtagatgatgctgccattaactaacgaatccgtagcgaattggtggccgttggaaaacgctaaccattaaagggccaagaaaacgtccacgtgggatgaacccctccttctggctacacgtcttactccgcgtgggaacactcggcacgcccagccttgatccaatttccctcgggcagggagtgcctccaatcctgcagcactggtaccctcccaccattataatcgcctgggcacctttgctgcgtcctaagtatctgaaaatcccagcgaggggaaaaactaaaggctgatggccagagcagcaggctccctattagaaaacataggtccatacatctccgcagagatgacagaaataaaaaaaggcaacattggttcaggctggtcgcagtggctcacgtccgtaatcccgaacactttggaaggcccaggcaggaggatcacttgaacccaggagttcgagaccagcctgagcaacaggatagggagacctgtctctacttaaaagaaaaaaaaaaaaaaagaaaagaaaaaaaaaaaaggctggtgaggtggcacgagcctgtagtcccagctactggcgaggctgaggcgggagaatcgcttgagccagaggctgcactctagcctgggcaacagagcaagactgtcttcaaacaaacaaaaaccccaacaacacaggttcatatcctgtatatcctacctccccagtgggtagtgtgtaaccttggggcgggtcctttagtatcttaacctgtaaaatgggagcaataaaagccaactctatttttcatatgatctgtcatcaaactccatcgcattctgccatgtccttacattagctgggtaaggaaactacaaatgggcaaagggaagacgggcagggtacatggtgctcccaggttggtcttatcaagcctggctctatactgttatgggtgagggttatctcgtccttttttcctacacccacttctagagcccttgatgttctgtcaattcccacaaggtagagggcacagcaggttcaccatctgtgtttactacaaactgtttaattgtttcttatcccaataactttacaaatatagaaccacatgctagtctgggggtgctgtgcagtgagtcactacaaactcgctcaggcacagcttaatgccgctgagatccatctaggagcagtcccagcggtggcctcagccacgtgaggaagagggctttggaggagggctgccaagtgtggccaggggacccggcctcaggtctgtggaggtgcttcaacagcacgatgctcattctctgtccgtagtgtctccatatactttctcatcttctccaccatccaggagggtaggacaaaggatttcaattcctctagcttcagatccaggcatcctctggaacagacattgaagagagaa

SEQ ID NO: 1562219 - DNA, 4001 bp, Homo sapiens
gttatctaaaccatgccaagtgctcttgtattccactagacagcagctgacattttatctgatcaccatagccatttatgaagcactcactttttaactgtcagggtctggagaagttagaaccgggcagctgttaacccagattgtaggtagccaaccgagtgactgcaagcagggctgagctgcaacagcaccttattgctggctaccaccagcacactgggccccttcgtttattacgacccggtaggagtgttattctggtgagaagttttacccagcagtctggcctgactcagaatctctcttctgggagtgcctggggcagcgtcatggtaaatgaattgactcagcactgttccagctgaaaccaaaatcgagtaaaaggattcatggtctccgctattctgcaagaagaccccactgttttaaactcaaaaggcagcagcttgtggtgggtcacttcagtcagatcccccacattcaatttcttttattcccaccccaaccatcaggcaagtatggctccttgagaccgcagagtagcaacatttataaagaattcccctcaccctatttcccatggatcaccaattccttcccaacactgccgctgctgtggccttaaatatgccaatgattgctgtactcaggctggtgtccctgcagccccacagtggggaacactgtggccctgtttgcttcctccatcagagaggtaacccattttcaccccatctgagagaacctccttggccaacttcactgccaggcacctgagggtgcagcctcacccaagagttcccatttcatctattcacctccctactcccatcagccagtggggaacttctgagctgaacccacatatctgtcccaattattaaaggagtcgatgagagtgagcgtctccacagaagagacacttctaggatatgcttccctcactcaattcaaaaagaggagacttttctcctttacaggaaacatctccggaacccgaccttttccactccctcatttcaggggcttccctcagttgaatccccactcccaaagagacatcctcggggctcccaattcatctgttctccctcatccaatatcagaggcttccaccaactgccccactcggaccttgtcccctgaaacctaacttgaagcaatccatctgtatcctcgaacaggagactggtaatgatggggtcatttcactatcaccgctattaggtccctctggcatctgaatccttttccctcctctcacttatcatgcggagacccccttcattctccccaaaagcagctgctccaaggctcctcctttctagtcaacatagctatttcctcagctaaccccatctctaaaactaacgccggagccgttccctcaaccgataggggatcctctcaagtcaccccctcaggatcccgtttcttccatccagcctgaagggcttctctgatgtcccctccagacatcccaaggcccctctcagccgcacccctggcacccagtatgggacttccatccgctgtggggcgcctcctctaggggacctctagatcgccccttaagagtcgccagccccggtatcctcaggagtgcctcggagctcgctcctcgcccactccggctcccccagacagcacagagggccctcacgcctcccgggggagcctcagggcctcgccgcgccgcccacaggcccctcagccccccgcccgtgcttccggccaccgcctgctcctcctcccccggtcaggccgcgccggtggctgccgcggagcccagcagacagaggcggcgcggggaccctggctccgctgcaggaggctttgagggtccccggcccccggcccaagcccatgccccctcggccggccgggcccggcgcccccgctcacccgagcccgtggtggctgccatcttgcgtcgctcttgcttgaaggccggccccttcttcaccccccccttacccgtcccccggccctgatgcgcaggcgcgcgcgcacgcacatacgccgccgctgacgcccgccccggagacctgcacgacccgtggcctggaaggctcttttccttcccttttagagaaaggaaatatctgcgtgctcgagggcccagcaacctgcaagtccccacacatcgggtgcgagggaggttgtgatgtgcttagtgagaagggcaggggtgactaggcttgggaaggcgcgattgtgaaagaaaaagaaaatatagcttcaaacaaaagcgccgaattcgcttggggctttttcctgtctagttcctatctagatcctcaccacatctccgcaaggtcagaattaatgtgaaaaatgcagccgagagagatcaagcgatttatctaaactcagctgttaagtggcagagacaggcagaattttaacctccaggttcaaattttttgaatcatcaccctccaggtcagatgatctggctcctaggattgatgctccccggccagagaaggcttggagtgggtgcagctaaatgatttaggggcattaaggtggcagggaaagcatttgctaaccatctacccaattcattcattcattcattcattcattcgttcattcattcattcaaccaaacaaacaaacattaagcacctactatgtaccagacactgtgctaggcgctggggatggatagacatctctgaagaagcaaatccctgctttcagggacttacattctagtcgtagacagcaagtaaataaacaggaaactataattctgatagggtagagataaaccaagacaagagcagcagaggatggtcaggaagggcctcctaaggtggtcatatttcagcagagaccgtaacaatgaggaggtagagggaacagcttgtgcaaaggcccttgggaaatatttttgcaaataaataaacccaagaaggtactcctcctttattataaattgtctgagaagcccttatatggatgtagacactgaggctgagagaggtgaagggactggcttaaggtcacagagcaaaatactggcagaaggaccaggactctaaacatagagggacaaggaagctggaagccctcacccagcacatccaattcatcacctttgtctgatagcagtgcctactctgcatctctccactccgttcacttctccactcagggcaagctgcctttatctcccacttggaagaccccagcagcttccattctctcccctatggcccattctccatatagaccaacatctgctcaaaacaccctccagctaaagccttcagtggctccccattccctctggataaaatacaaactttacaagttgagcgaccatagaattatcacctaatgaggacacacatcagattaaaaggggacttattataatctcaccaggacaagtggaaaccagggctctccagggcaaagcaggatgcctggacaccctgtgcaccaggctctgcacccagggcagggacgaggatggggtggtcagatttaacggggctttcactcaggtcctgactccgcacttgcacagcgctgcaggtgagtgactccttaaaatctgcaccctagggcagggcatggtggctcacacctgtaatcccagcactttgggaggccgaggtgggcagatcacctgaggtcaggagttccagaccagcctggtcaacatggtgaaacctcgtctctactaaaaatacaaaaattagcggggcgtggtagcacacacctgtaatcccagctactcgggaggctgaggcaggaaaatcgagcgaacccgggaggcagaggttgcagtgagctgagattgcaccattgcattccagcctgggcaacagagagagattcagtctcaaaaaaaaaaaaaaaatctgcaccctaggtaccccacttgcctcaccatagccttggcacagcctgcgcctctgagactttctgtacctctgcggcgacactggccctttgcaagccccctggaacacatgccc

SEQ ID NO: 1562220 - DNA, 4001 bp, Homo sapiens
attctgatagggtagagataaaccaagacaagagcagcagaggatggtcaggaagggcctcctaaggtggtcatatttcagcagagaccgtaacaatgaggaggtagagggaacagcttgtgcaaaggcccttgggaaatatttttgcaaataaataaacccaagaaggtactcctcctttattataaattgtctgagaagcccttatatggatgtagacactgaggctgagagaggtgaagggactggcttaaggtcacagagcaaaatactggcagaaggaccaggactctaaacatagagggacaaggaagctggaagccctcacccagcacatccaattcatcacctttgtctgatagcagtgcctactctgcatctctccactccgttcacttctccactcagggcaagctgcctttatctcccacttggaagaccccagcagcttccattctctcccctatggcccattctccatatagaccaacatctgctcaaaacaccctccagctaaagccttcagtggctccccattccctctggataaaatacaaactttacaagttgagcgaccatagaattatcacctaatgaggacacacatcagattaaaaggggacttattataatctcaccaggacaagtggaaaccagggctctccagggcaaagcaggatgcctggacaccctgtgcaccaggctctgcacccagggcagggacgaggatggggtggtcagatttaacggggctttcactcaggtcctgactccgcacttgcacagcgctgcaggtgagtgactccttaaaatctgcaccctagggcagggcatggtggctcacacctgtaatcccagcactttgggaggccgaggtgggcagatcacctgaggtcaggagttccagaccagcctggtcaacatggtgaaacctcgtctctactaaaaatacaaaaattagcggggcgtggtagcacacacctgtaatcccagctactcgggaggctgaggcaggaaaatcgagcgaacccgggaggcagaggttgcagtgagctgagattgcaccattgcattccagcctgggcaacagagagagattcagtctcaaaaaaaaaaaaaaaatctgcaccctaggtaccccacttgcctcaccatagccttggcacagcctgcgcctctgagactttctgtacctctgcggcgacactggccctttgcaagccccctggaacacatgccctctcccacttcaggggctttgcctgtgctgttcccactcttcagttctcagatccagcaccatcccctcagggaagccttcctcgattcctccaaccacatcaaattcagctataattagctctcaaagtgccagcactggctacaggtgaagcaacttgacttttcgtgtatcacgtgatacaagtttgctttggggagcacagaaaatacttgccctggacttggggtcactgtaaagcatcagtagcaagtggaagcatttgggttcctaaggtggactcacctttgcagtgaaattttctaggttcaagtcttccttcatcactcagtttgctttgtgacttcaggtaagacgcttgaacctctcctggcatcagtttccccttctatgaggatagtagtatcaacctcataggattgctgtggagataaaatgctttcctaaaaccccttgggcacagggaagaggaagggacactagaagagctcataattaccaagccgttacatccaacttttaatcctcacaactcgatgcagcaactcctgtgaatatccccatttttagagatgagaaaactgagactcagagctaacaggtggagaggatgaggattaaaacacaagccttttatctatggtgcccgtaaatgtttactcgcatggattccttggctcttgtaggaaacttcttgcaagtaaaattgacaataataattcccgtgccgagctcatcgcaggaagaggttaggcgggacagcccgaggcatgctggttgttgtagtctagcgttggcgcagtgcctgatgggagttgtagtacgtcccgcgcacacgctccctcgaagagtttctgccccattcctggacgtcacagccggtccccagagcaggattccttccggcgcctgcgcctgatcaccgctctgcgcttgagctgataaactcagctgatgggataagagtcttgttttatcggattttggggaagattaaaatggttaatagaactagagaatttagaagagggcttggcactaagtgcaatataagtattagctgctattattacctaatcctcaatgaaccttgcaaagtagctgttaccatttccatttgtgagatgagaaaactgagacttagaggagttagatggcttttccaaggtcacacaacaaggaaggagtaaaatcagttttggaatccagttctctttaccctgtgtcacccgctggctctcccgtgatgagggaggtggagcctgggaggttttgagctaaatgtgggcaggtttgcctttttacaaagtgcatcgtgctgccatgaggagacagggcgaggacacccaattgggcagcagcaatattggtagcagggaacccagagagaaggtgtattgggcatgtttaccgccattccagtcgccatggccccacatggcaaggtgggtgtttggaaactttccctcccctcataaaagctgaagagaaggttgggcgccctggttcacacctgtaatcccaacactttgggaggccgaggcgggcggatcacctgaggtcaagatttcgagaccaccctggccacaatggcaaaaccccgtctctactgaaaatacaaaaattagccgagcttggtggctcaggcctgtaataccagctacccgggaggctgaggcacgagaatcgcttgaacctgggaggcagaggttgcagtgagccaagatcgtgccattgcactccagtctgagcgacagagcgagactgtctcaaacaaaaaagctgaagaaaaagcctatttttgtcccctttcctccttcctacaatatgaggttgtaatggttagaattagaatcctgggtgatgtggctgagctgctgaaggaattgcagggctgcccaactgcagacatctgaagacatgagataatgtgcctgttgcttaagttgttcttaaaggtaggtttttgttacctaccaccaaaaagcatacctaatagatacaggaagctgacgcagtggttcggttgagaggcatgtagacctgacagatccacaatgtccattcgtgaactctcttttcaagtgggaaaacactagggctggtttggaatctctgggatgtaaaaggcatgagtagtttgaaaaagtatattcaaaaggtgaaaaaacaaaaattatataatgttatccacaaccttcaatttcctatttatagttaaggaacccccccaacctcgtgctacagtttttgtagcataagctgcagaaagtaaagctgacaaactgtcgacaggaaggactgtggacttgcagaagacagagaggagaagggatgtgtggttaacagagtgtgtgatgaggccgggcatggtggctcacacctgtaatcccagcacttagggaggccaaggccggtggatcacctgaggtcaggaattcgagaccagcctggccaacatggtgaaaccccatctctactgaaaatagaaaaattagccgagcatggtggctcatgcctgtaatcccagctacccgggaggctgaggcaggagaatcacttgaacctgggaggcagaggttgctgcagcattgcactccaggttgggcaacaaagcgaaactccatctaaaaacaaacaaacaaacaaacaaacaaacaaacaggatgtgtgatgcatttgctagtgaaattctatggcatttatgtggagtcatggctccctgaggtgtgtctagccatggcgctgagacatcttattt

SEQ ID NO: 1562221 - DNA, 4001 bp, Homo sapiens
tttcagacagggtctcgctctgttgttcagtctggagggcagtggtgcaatctccgctcactgcatcctcgaccactgccccccacctctcaccccggcaacctcccgggcgaggatcgctcaaggatctcaaacgatcctcccacctcagcctcctaagtagcttggactacaagcccaccaccacgcctggctacattttgtttttttgtgtgttttttttgttttttgtttttttcgtagagacagagtttccctatgttgcccccaggttggtctcgaactcctgggctcaagtaatccttccacttcggcctcccaaagtgctgggattacaggcatgagccaccgcacctgaccttagaattattttatatcaaagttgacttattcacatgatgaatggcaaggccttattagggactaaaaaaataaaccaatggatggggaagaaaatcatactgactaataaacattagacctgcataactgccaaaggcctcactttttaagttatgttatgcagcacagagtcttcagattttatttacttatttatttatttatttattcatttatttgagacggactctcgctctctcgcccaggctggagtgcagtggcgcgatctcggctcactgcacactccgcctcccggggttcacgccacgctcctgcctcagcctccagagtagctgggactacaggcgcccgccaccacgcccagctatttttttgtatttttagtagagacggggtttcaccatattagccaagatggtctcgatctcctgacctcgtgatccgcccgccttgacctcccaaagtgctgggattacaggcgtgagccactgtgtccggcccagattttattttagtctaccaggtagtagcaaactatccaaggacttgcccaggaccattcaggtcagtgagctacagaatctagttctggaaaggcagccattcttactattcacaaagtgtagaaaacgtgaattcagattccagcagcaacaaatgactggagcacaaaacgccagccacagttggtgctaacgcagctggctatcagctccacaggatgaagcactgtccaagggtctgatcagtgaagcatcacccaagactgatgaacacagctgatatgaggggacccaaagttccctgagtcaagacagaagagctgtgtcacggtttgcacagaaagagaaagagcaactattcttacccacggaaagaaaaagggagaaggccatcaatactacccttaggcttgtgcaacgagaaactgctaaaaatggggggaaggtatatatcctatcatactgatgtttaccgaagactccgcatcccaaatgctaagcaacatactgtagggccttgctactcagtgtgtggtctgcgtgccagaggcttcagcctcgtctggaatctagttaggaacacagttatctcagaacccaccccagtcctacagaatcagaatctctaagcgattcgcaggcacatcaaagtgtgatgagaggcgcggcagaatatctgactacattctcttaacagcaccgtgagacaagtactgttacgatctccatttcacagaggaaaaaaaatcaagggtcagataagccccctgccaaagatcacaaactcaggagcggcgagagtcactgaagttctcaccacagccaggcctgcgagaggcactggcaacccaggccaagagctgaacaaggcctcgatgcgctccagctctgggccggccgggaggacaggaggcacaggccaaggcccaggacggtcgtgaacgcggaaagaggccgccgcgacctcctccccggccgccgccactcacctgatcctcccgaaggtgggcgccgcaacaccaaaccggggacgccgcgggcggcggcgacacagatactggctcctccggcgactccgagcctcacagccccacttccggccaactgcccgctacttccgcctgctgcgcgagtgacggatgcggccgaggctcaaaagactctgtcagcgtttcccaaggacattttccactggaggacgttgttgaggaggcagggggagtctaggacctgcagagggaaaacaccttcctggatggatcgctctggaagtcattaagcagcttagtcccggcgcggtggctcacgcctgtaatcccagtactttgggaggccaaggcgggcggatcacctgagttcaggagttcgagaccagcctggctaacgtggtgaaacccccgtctctactaaaaatacaaaaattagccgggcgtggtggcgcacgcctataatccagctattcaggaagcggaagcaggagagtcgcttgaacccgggaggcggaggttgcagtgagccgatatctcgccactgtactccagtctgggcacccctgtactccagctctgggacacagagcgagactccatctaaaaaaaaaaaaaaaaaaaaaaaagtaagtagcttagacacatgttcaaatctgaggaccaccactcagggttttatggccttggagaagtcacataaattcattcttgttatattattattattattttcatagagacggggatggcagtgtcttcctatgttgcccaggctagtctcgaactcctgggctcatgcaatactgccgcctcagcctccgaaagtactgggattacaggtatgagccatcgcacccggcccacataaattctctaagcctgtacagtgagaaaaacaatacattttttttttttttgagacaaagtcttgccccattgcccaggctggggtgcaatggtgcaatcatggctcactgcagcctcaacctcctgggttcaagtgatcctcctgcctcagcctcctgagtagctaagaccacaggcatgcaccaccacacctgtctaattttaacaatgcattggtcgggtgtggtggctcacacctgtaatccccggtgttggagaccggcctggccaacatggtgaaacctcgtctctactaaaaatacaaaaaaaaattagcggggcatggtggcgtgcacctgtaaccccagctacttgggaggctaaggcaggagaatcacttgaacgcaggaggtagaggttgcagtgagccgagattgcaccactgcactccagccggggcaacagtgagactccatctttttttttttttaatgcatttataatagagatgtatctgtaaagtgctctcaggaaaagagctagtgacatgatggatagatgagcctgctgagagaaatggatgtggagctggggcttagcgaggccagagctatggagcatgagccagggtgattctccaccaccctaagaaggagggctgggtcctactgggtacatatattgacacagctgtcagtataggtacctagacaagaaagagactctactaaacctctacctatcagaaagtcctggccccaggctgccattcctgagggcacttgagatctgctgatcagggtcttcatatcttgtcaatgccttggctctaaggggtgtgaaggagagctgagaaatcatgctccctccagggcctatcttgtagggaagacaaaatcaatgtaggaagaacacgtccctgccaggaggggcaagcctgacatcccaactcctgagctctggagacagcgctgtttgaatatctggagccccagaccacagacaccactgcttagggagggttctctccctcaggccagaccagggcaaacactattcattgttatgactctgtccttgccagtagaacccagagaaagcagagagcctgcccccaaggaatgaaccatgtttgttcctaggcagccatgacaatcctgtttctctttgtaatactcaaattcccattctcccttgaagtgggaggagcatgtggctcagttctggccaacaggacttaaagggaagggtcctgggagggctctgggaaagcttttacttttcatgataaagtagggcc

SEQ ID NO: 1562222 - DNA, 4001 bp, Homo sapiens
agcctcactcagcctcacctcggctccggagatcgttctggagctgagtggtgacgtcagcagcagggctgagcacaaacaacaaggccaggcgccaagacgaccaggcgagggcggcccgggggacagcaccactgcacggtgccctgaagggggagcaggtgccacggcacttccccgagaccgcatgcgggggctgcagctggaatgggacctgcaccccactcaggtctgcctgaagggctgtcagtcaagaaggaagacgggacccagcaaacagaagccacgacctcccagcggccctggacacacatgaccaacgcaccagcagtaaacaaaagggcctgcaagggtcacccccggggccacccctcccagcaggtggtgatggatggcccgcagctgtgcacagtggggcagtcctgcttaggttcagcagcaggttcccagcagacagaaacgctctggtggccctggaggccgtggtgggcagagaacaaatccaggcggcccctcccctctatgcctaaccccagcatctgcagggaatcacccactgtcttcaacctcagggaggaagccccgacacaatctgacttgcaaagaggctccccagcgaagctcccagcaccgcccttgcggctgcctgcacttccgccatgcaccctggattccgagggtgagcccgctaatgcacaaagctgggactaacttgagggacagacaccagacggcagaggccgggctggcaccgtgcctgctccccattggtagtctcctggtgctcagtcctctccagcaggagccttccaaccccgcatttgtgactcttcctcatcctactgaagtaacaaccccgtcaccgcagatccctcctgaggcacacgctgctgacagccaggcgctggcccttctgctgggagtggtgcccatgcagcggaacggtcacaagcaggccaggacgatctgccagaagcccgcctcaccgcaggcctgtgacggcgtcaggctgagtctgcaccgagcccagccccactaccttctccaaagctggtctgtctcagagccaaggacaaagcctcaccccacggttcacaagcagcaccccttgacaggaaagttggccgggtgtggtggctcatgccttgaacagtcctttggaggctgcagtgggaggactgcttgaggtcagcagttcgtgaccagcctgggcaacatggtgagacggtctccacacaaaaaactttagaatattaaaaataaataaaaacagaggagaaagttgcacagcaaacctcacttcctgtgcacagatggacaggagtgcttctggccacaacaacaaaaggttaattccaacccggagggttccaagccgtaaccaacacaagagagacgcgcccagaccaacagcctcaagcaaaatggcaccttcgaccctgggctctgcccggtgcccgagagcacctgccagcctgtttgattcctgatatccacagacatgcaccaaacacaggtctgagtggccaggaccacagcacaagtgggtgcccctcacggcagagacctccagtcgagactcacctgccttctgctccaagggcccggcaccctgagatcctgatgccagggtaagctggggggctgctcatggtcgaggacacgggtgggtgctcctgaacagcagagtggccccaggggtggatgcgtgggggctcaggcgcaggcagccgtgggggacatcaccacctcagacccacagcagtcccctagggcagctcaggagctccggccacctgaactggcccttccatgggcaggaccactcctgtgggcagcacagtgggtgcagagccgggtggctggggtgagacccttggctggcagaagctgcctgccaaatgtcagcagaggcacagcagctaggaggcccttgaagcctccaccgtactgagggaacagcactcactgccgtcctcagaggccaaggccacaggcataagaggatcacccagctgggggcttgtgtatgcctgatattaatagcgctggctttgcctggtgtggccctgacaatcctcgggccagccctcggtgtgaactgccccctcctgtgtgtgggctggcacattcggccagcctaggaccgcaggcctgcggaggaccactgtgcgccgtgtgcctgcacccctcctggatcccctggaaaaagctacagtaccccggcctgcctggggctacagagtgaaccccccgcagcaggacaaggatatctgaggcgcctcttggccaggtgtcctgaacgtcagtgctgagctgggcaccccatccctagccccagagtgcttccgacaggcataaacaaatctgaaactccaccctctggcaccatctgaaaataactgccttgccctacccccactcacgggggatcctgcagggacctgcagccacccagggctcaccacccagggctcagcagagcacaggggacacagccacctccccgcccagggctcagcagggcacaggggacacagccacctccccgcccagggctcagcagggcacaggggacacagccacctccccgcccagggctcagcagggcacaggggacacagccacctccccgcccacagaaacagggtttcggccccaccctccgcagagtcagtcaaggatgtgcacagagaagtcctggcagccctaagctctctcccaggggcagacaggtcagccatgggtgtcagcttcctcctaccatgggtttctcttggagcttctagtactgaggcaggggctgccagaagctcagggaaaagggaagactccacatggaggtcatactcctcaatagtaggccactcctgggagctgcctcagaggcaggaccggcccatctgtctgtgtccacaggtgcttcctctcctcattctgctcccaggaggcggctacatccctcacttgggaagtgggcaggagacagcccagggtcggggaggcggaggctgtcctgagcaggggcgcagagtccgggctcctgggggccatgccactggctgggctgtctgaacagcagagtggacgcagactggtcttgcctggcatgggcatgcaccctggctgccctagccggccaagaggcaaggctacaggcctggggaagccagcactgtgctggccaggcgagggacggaggagcccaggcacgcagctgtgaatggaaccaccaggccccaccctggaatcacgtcgcctcgctgcaggccacgtggtccccaacatgcccctccacggggctgctctcggccacagcagcccacggcagggaggggccgctcacggtggggaggggtagcctgccctggtcctattcactggtgttcctcccaggttctaacttcctgagctgggccggtccagagaactcccattcccacgccacccacaggtgctgatgccgcgctggggtaagcgctgcccagagcaccttctgcctaaggcttcctccttgcaggtggggctgtctgaggcccgtggtgctggaggctgcctcagtcacttcagggcaccccttgcccttccctcaccttcagccatcctactctgggccacagcacagtcgaatgtggctcagtcccctccacggagccacagcttgcctcagtttcctcctcaaggactaacagcaggttcattacaggtgggtcagctcataaagtccaaggcagatgcctcatcggtgatcaggccccataactgatgtcatcgtcaagaaataggcacaggtggccgggcgcggtggctcacgcctgtcatcccagcactgtgggaggccgaggcgggcggatcacccaaggtcggagtttgagaccagcctcaacgtggagaaaccttatctctactagaaatacaaaattagctgggcacggtggcacatgcctgtaatcccagcactttgggaggccaaggcaggtggatcacctgaggttgggcgt

SEQ ID NO: 1562223 - DNA, 4001 bp, Homo sapiens
tggtggaggaaccccagccctggggacagacctccacccgtgcacagacctccaagctggagcctgctctggaacactaagggcagcagcagaggttgaagaggggcagacgcaggaacgttggggacacgctcggggaacagtgagaaaagccctaggctggggcagaggaagtcctcgatggcacaagcatcaggacacaaagtgcaagaaatgtgcctaagacaagaggcagttccagggcagaccggggcccctggagaagggtgctgcaatctatcctcactgcctggagcttccctcctgtcccttggtaaccacaccaaagaaagataacaacagtctctgcctcgtgggacacagcgagggccaccgtgcccagcccaccgtctgtgcacagggcaggcccagatggctgctgccaccaacctgtgtcatccaggagtgcctttctcaagagctctcagtgcttatctagcgttggcctgccccacctcgggttaaatcaaaacctctttggtggctgggcgcggtggctcacgcctgtaatcccacggaggccgaggcgggcagatcacctgaggtcaggagttggagaccagcctggacaacctgacaaaatacctctctactaaaaatacaaaaaaaaattagccgggcgtggtggcgcacacctgtaattccagctactcgggaggctgaggcaggagaattgcttgaactgagctcgggaaagggaggttgcagtgagccgagatcgagccactgcactccagcctgggcgacagagtgagactccatctcaaaacaaaaaaacaacgcctctttggaaccagcagaggaacagactcaggccctattagactccagccatgcaaagttcctagtcactgcccactgggagggtgtggacctgaagggacgcagggccaggggaaagctctttctgctcagcagctcctggagaggagcgaccctgtgccgggacacccttccccctgcggcatccagcgcagcccatctctgagggagtcctggctcacagcgtttctgacaggagtcacagcctgaacccaggcaagaggcgcctgagtgggaacaaccccttcctggggaccccgcgggctccccaagggacacttcagacccggaagggaggggcagcgcccagagcgccctcttgcagccccgggcactgcgtggccaccgccccctgacggccacggccccaaaggcgccgcgcagggcccggctcccagaggggccactcggggtgacgaaccggggtgggggcgggttcctcccgctgcacccccacaacttccccacttcatgctcttgcaaagcccccgcagaggctcgaaggtgccacgcgcgtgcgaggcaatccgaaggcaccgtgcgccgcagcacctccaaatcctaagccctggcctcgcgggtcgggcagggccacaccccgagccgacaacatagaccaactcgcacagtcgagcaggcacacagcccgccgggcgctcgaggccgagggccccacccaccgggggcagagaccaaggtcaacgctgggggtgcgcacccggactccttccccgagccccgaggagcctgccggcttgggccaggtccgtcctcccggccgcttcaagcccgcggggttccacccggcacgtgggagaacggggcgccgccgcctggcctccgggagtgggggacttgggctcgcggcggggacggaccacccgcccagctcggccggatctgcagccccttcccgctcgccagtggagtggaggcgaggcccacgcctaccggtcctcgcacgcggtctcgcttttctcagcctgccggcctggtgtgtctcgggccgtaggtggcgacgtgggcgaaggatcagcgtccgcgcgggccgggggcgcagccatggcgctcggaggcctctttgcgggcctggccgggcggcgcgcatgggccgccgggagctggcgggtccctctcttgcccaccgcggactacaagccccacaaggccgcgcgtcgcggactacaagccccacaaggccgcgcgtcgcggactacaagccccacaaggccgcgcgtcgcggactacaagccccacaaggccgcgcgtcgcggactacaagccccacaaggccgcgcggcgggcatgggggacccgtagttcggcagcctccgccacgtgcctggagggccccgccccctgtttttcaccacaaactgagccgcacaaaaaccctggaaaaaaatcaataaacatttatttgatacagtcattttaatacatacagtgatggcccgtccccacgccactcgggaccagggcgcggggcggggacgaggaccggggacagatggtcacaaggcgggcggggcccgaactcaccgttgaaacatctcgcaaataaacactttgtagatagaatatatatgtatatatatatggttacaagtgatagctggaacctctttcaaaatgcacttatgtactgagaactggcattaaaaaacccaaaccaagaaacccaaagcacgggacgcccggccgcgaggcaggggaaagcctggggccccagacccgggcctgggggagccgcctggggccccgccaaacgcggcacacggggacggcccctcccggggtcaggctcactggctccttcccttcagcgccaccaggcaggagggccaacggtcacacaggaggcaccctcacctgcctttgcaccagcaaataaagtgcatcccattttcgtgtgagcgtcggcccggtgagtcagcccttccgggccctttcctgttctcagggcagggggcgtgcgctgagccagaggtagatctgcagaaagggccccgactgggcctcgggcagggccggcgcccaccacactctgggggtcagctatgctggtccctctcactgagggctcctggaggcctatgtgggccagcgtagggagtgggcagaccctgctgagctccacccagggccccaccccttgggaggagggctctgcggaccagcatgtggcagagggagggcagaaaggagggggtcagacccaacagccacttctggcagtagcccccacgcctaccttaaagacaaagggggttaaagtgctaaacatcaaggtatccaggactcctcttcccacaccagggattatctgtgggctttgggagtgtcccggaaactcacccccagcaaaaaccagaccctcttctcttctccccaagggccaagtacctgagaggctggggcaggcaccacaccctgcaggtgttcaggtccaccctcctcccgccattggtggcaaggacaaagtgcacctaggcccccgcccagtgcctgctcccctcccctcccctcccctcccctcatgaggctgccccagcagcagctgccagaccccaccctccacctccggctcctccagctccaccagtgaagctctgggacacaggaaggaatgcctcccccgaccctctgacgctgggtcacgcccatctctgccccagcctccatcctctcatcaggccgaggtgtgcgtgggtggggggagtccgggtctccacacccactccctggcacatctggcaagggctgctgagggttggagccttctggcccaaggatgaagccagagacaggaagtgttctgcaaccccagtccccaaagtgctcctggaacttgtctccctactactgcaggccaagcccagtggggccccttctccctggggaatgggggagggtgggtgctgggggcagaggcagtgcccagtcagtactgcctccctgagcagcaagggaccccaaccccagagacccacgccctggtccagcccagcccccaggcccaccgtctgcaccaggaaacccttagcaccaaatgtcggattgcgagtgtttgtataaaaaacaatttaaaaaaaaggttgttacttgtcacagcaacaagactggcatccactacaccc

SEQ ID NO: 1562224 - DNA, 4001 bp, Homo sapiens
aaatagaggaaataacacgccctcctttccaaagggatgttataaggattaggtaagtattttaaagtgcttagcacgtagtaagtgccctataaaatgatagttgtcaggccaggctcggtggctcatgcctgttatcccagcactttgggaggccgcaggaggcggatcatgaggtcaggagttcgagaccagtctggccaacatggtgaaactccatctctactaaaaatacaaaagttagccaggtgtggtggcaggcgcctgtaatcccagctacttgggaggctgaagcaggagaactgcttgaacccaggaggcagaggttgcagtgagccgagatcacaccgctgaactccaccctgggtgacagagcgagactccatctcaaaaaaaaaaaaaatacaaaaattagtcaggtgtggtgtggtgcatgcctgtcatcccagctactcgggaggctggcacaggagaattgcttgaacccgggagcagaagttgcagtgagcccgagatggcaccactgcactccagcttcggcgacagagcaagactctgcctcaaaaaaaaaaaaaaaaaaaacaaaaccctaaagggtggcaggggaaggattaaaaaaaaaaaaaaaaaaaaaaccactaaattcagaacattctaattgccatttccccagcagtcctcatttctgaatcaatttctggcctgaaatcaaacaatcacttcaccaggtgaatctttctggcagttacaggggctactctacaaataaatatttactgaacagcagtcgagggtacctcactctgctaggctggcaaggaatacaagaagtaaaactgtcgtccttgtaagacatatataaaaagatcaaaaacacaaatgtaaaataacaattcagaagttacctagacacaggaatagaccatgtctactatgaaaaacagtgtctttgacccagtttttgaagactcgctaaaactatacactctcccatccctccatgattaaaaactaagctctgtatcctaacgttttttctgctgccactttcttttctcctttaattgctagagaaaagagtatgctagaagggtcaggactaaatctcaagaggtgcagtagtttcacacacgggtgctaaagagtctggtagtctttccttacttcattcatttattcaacaagtaatcatttaacacctatgatgtgccagacaccatgctaggcaaagtgaaaacgacggagacagacatgactccaattctcacgcagctttcaatctaataatctatattccacttaactgtacagttaagaactgacttattacctatgaaagaaaccctgagaatctcagaatctaaagggactgcaggagataaatgtcctcgtttttcacatagggtcaatgaggcccaaaagtgacttgcttaaagtcactatgcatcagtgacagtcagggactagaacccaggcctcctgaaactccaatcagtgtcctacatgctcctctccctgaggggaagcaggtacatgggggagggaaggaaaagtaaaccccatcaaataaaggccagatgtcagtcttccccttctcgaaagatgggggagctaaggtcaaaacggggtaggaagaggtcggaagctgcctcagtttccccacggaaaagcggccactcagcctagctataacacaggcttccctcctgcgattccttccaattcctcccgccctgccttgtcgaactccaacccgggacccagagagctaccgtagaaaattactccttcactcacaaggactcgcaccagcaacgccatgttcctcaataaccatttccgggtgaagagtgagtttccggtgtccccttttctacgtcctccttttgccggcgaaagactggcaaggggggcgcaggcgcaaagaggtcgctacgcgcacgcgctgttgttttctcggctgtgcaccaggctgtcgtgcccgggcacgctctccctgctgtctcccccactacacgtaacagtggttcaaatccttcccccacgcctgtctccttgaccccagacctcggggcttctcatatccctctctttattccccacctaacccagcctcactcctcagcccctccttcccaaactccaccccaacacttttcaatggaggttgaaaagaacaggactttaggaaatcccaatctttagaaagagccagaagaccgggcgcggtggctcacgcctgtaatcccagcactttgggaggccgaggcgggcggatcacctgagatcaggagttcgagactagcctggccaacatggcaaaaccccgtccctaactaaaaatacaaagaaagtagccgggcatgttggtgtgtgcctgtaatcccagctactctgaaggcagaggttgcagtgagccgagatcgcgccactgcactccagcctgggcgacagagcaggactggactctgtctcaaaaaaaaaaaaaaaaaaaaaaaaaaaaaagccagagaaggaggctaagataaaagaatacgggggataccagactcctgaaagtcaaggcaagaaggcggtcatgtgccgatctgaagcctggtagaggaagaaacttttgggatttgtggttggttggttgtttaagggaaacatctttgcatattgataggaaaagattagtgaagagtatacagggccgtgcccggtggctcatgcctgtaatcccaacactttgggaggccgaggcaggtggattgcctgaggtcaggagttcaagaccagcctgaccaatatggtgaaaccccgtctctactgaaaatacgaaaaaaattagccgggcatggtggcgtgtgcctgtaatcccagctacttgggaggctgaggcagggaatcgcttgaacccgggaggcagaggttgcagtgagctgagactggggcactgaactccagcctgggtgacaaagcgagactccgtctcaaaaaaaaaaaaaaaaaaagagtatacaggagaatcaatcaaagaggcaaggagcttcttgaggaaagtggcagagaacggccttggtagaagactcctcttccattacatcccaagagaagagaagacaaagtactggtgctttgggggttgagggagcagaggggcaggatgttgaaggacttctttcatttcattcagtcaacaaagacctattgagtcttccctatgtgctgaacacaagacatactggcttcatggagttcttagactggtgggggaggcataggaacccagtgaaaaaaattaaaactggggagctactttggttaggttggtaaggcctctccaagaaagtgacatgtaagatgaaatctaaaggaagaagaggagctagtcatgggaaataacttcactcgactatttttttaattaaatttattgatttttattaattgacaaaaaatatatattgtgtacaacaggatgttttcttttttctttttttttttttttttgagacagagtttcactcttgtcgcccaggctggagtgcagtggctcaatctcggctcactgcaacctccacctcccaagtcaagcgattctcctgcctcagactcccaagtagctgggattacagatgcgcaccaccacgcctggctaatttttgtgttttcagtagagacggggttttgccatttcggctaggacggtctcaaactcctaacctcaggtgatccacccacatcggcctccgaaagtgctgggattacaagagtgagccaccgtgcccccggccaggatgttttaaaatatgtatacattgtgaaatggctaagtcaagctaattaatatatgcattacctcatatttttgtgctggaaatgtttaaaatatgttctttaagcaattttcaagaatacaatacatattcatagtgggtatagtcaccatgttatacaatagatcttttctttttttttttgagacggagtttcactcttgttgcccaggctggagc

SEQ ID NO: 1562225 - DNA, 4001 bp, Homo sapiens
acaactcaagtggaaactaaggctcactattttcactttagctacctggacttctttcccaatctggcatccccagaaggccatgagaacatcatgaaagctcaagtactatcctggaattacaatccacggtaggtttggtggggtttttcggttttttcattttaattggaaagcctttggttctctgtaaattcagagttatttcacattgttaacttggaaggcaaagtgacagccaccgttctggagtatttcccagcgatcagacagcaaaacggttaagagcgtgaactctgaagtctgggttcaaatgtaccatttgccaactgggtaactttgggtaagttaccctacactacttcccaataggacatataaactggagagcctctggccattcattcattcataaataccaactgagcatctactgtgagtccggtgctagcgatatagtggagacccggccttccaatctaaagtacgcttccatggagtcagactgttccatttcctacacagcacttagcactatctgcaatgatcttgtgtgttggtttgtctgtcctcgtcggaaggtaagctctgtgagagcagaggccttatctgtcttgtgcatccatcacctccccagagcctcccacatcactggatacacgcaaaaagaaagaatgagcatgtcagacaagaacttttacctcgtggccctggtgaaggtaggaaaaaaaaaaaaaaaacaaaagtaacaacatagaaaacataaaggcacaaattacagaggtaatagtatctgggagaaaccagggtcatggcttcccatcgccgcaggtgttgctccagacagctctgcggagaaaaaggatcccagcaccgtggcagcctccttgcaccgcaaccaggagacagcatgagggacgcagtgaaaggaaaatgggcccaatcccatcagaagtcctgaggaggttcatttgttggttcaacatgttcatctgttggttcaacaggtatttatttactaggcgtataatgtgtgctgggtacacagcagcgaactgacaagagcctgtcctcatgcagtttcccttctagtattgaaacagtgattttgggtatgaaaagtgccgtgctgaccacgaaacagtgacggaatagggaatgacagcaggtgtgcacggtggctgggtggtcacagcaggcctctctgagcagctgacacctcaactaagccctgaggtcaacactgtcacggagcaggggaagaaacttctaggcaaaggcagcggcggaggctcacactagagaggatcacaaactggtaagttacaaagtgacaagtgcctcgaaggcaagtcccaggaggctgggggtcggggaggaggcgcaggccccggctcccgcaccagccctctcgggtcccggccactccgggcagttctggggagcgcggcgagcgccaaggcccggcccggcctcgccgccccccgcgacagcgccgtcggggtggggacgagggccgacgtcacccgccgcgccgggctccgtccttccagcactggggcggaggccgcgggcaggaaggtggcggcctctggggcttacctcggaatttgagctcgtgctgcggctcgaggctcaggacctgctccaccttcgccatgttccttagcggcggagcacctttggcggggagacccctgagaggtcaccggggcgggaagcgttaatgctgcgcccgctttaagttttacaaaaaggcggggaccggtcggggcacgggcgggggtcctctaccgggtgggcgcgctgggggggggtcggtctacgcggtgcaggcgcaggggcggagggcgagggcgaggccgcggtgcccggcgagctgacggcacgcacgcacgcacgcacgcacgcagagtcgtacacacgcacgcacgcagcaggctggcccgctctggcggcgggaagctgcgccctgcgccgccggctccaggggcggggactaaagctgcgcgcgtagagccccttccgggacagtgcgcaggcgcggcacaagccacgggggcgggactgcggggcagtaaggggcggggcttcgggccgctcaggaggcggggtctgtagtccagctacgacagccaccgcggaaactattaagggcccgctgggggccagcttcgtgttaagtgctttattcaataataacaattagaataaacttccacttttctcttgcttatgtagtgccaggcactgttagagactttgaataatagtgaaagtacttagtataagtataatgtttatgggtgagtgatatgggctaggcactgtgacgtcttgtaaataataattataaatataataaactaccaattattgcttatttattttgtatcactctactgaatgcttccaataacaacagcaactacaataaatacaagctactctacgttaaatgtttactatgcaactggcactgtgctgaattctttactagtaaattctatttgtttatgcaacaaatatttagaaatacaatgatcagaaaagcgaacctgattccaatccttttactatagcctagtgaagagacatcttttgaataaataaccacacacgtaagttaaataattaaaaattgctggagaatccagatctgcttgacctcaaaagtggatactctacatcatgattaccgtttaaattgtatttcattatattatgtttactatggaagttaaataggtgttcttaatagtctcctatacatacccatataggtgagacaaatgtggcaaattgctagcaatggctgactctacatcgcaggtatatggttttcttgtactgtttctcccactttgctgtatacttgaaatttttcatgataaaaaggttttttaaaagaatagtctttgtattttaactggagcatttagtccatttacatttattatatttactgatatatctggaattatttctaccattgtattttgttatttctatttgtcctgcctggtttttttcccctttcctttcttctttagggtttatttttattctcattctgattttcttcacctgtatactctatttctaagttttagtggttacttcaaacttttgggcatgcatacttaccttgtgaaagtccaatatctttaaatatttgtaaaaatgtctttaccctgtttccttaaaatataaagactttggagtactttaatcacccatcctctaaattatacaccttaatgtagtgtatgttaagtttaacctttgccactgtaaccccaagagacattactaaattgttttattcagtcaacattagtttagattcagccacacaattaccatttttatccaccttttcttcttgcatctcagctttcaccaacaggatcactctccttttgcctgaggtaaatcctttaaattttatttttttgtagcttcgttggtgcaaatcctctcagtttctgctcatctgcaaatggattcatttttgccttttgttgtttttattttatttatttatttatttggagatgaggtcttgctctgttgcccatgctggagtgcagtggcatgatcgtggctcactgcaacctgtatctcccaggctgaaacaatcctcccacctcagactccggtgtagctgggactaaaagcatgcaccaccacgcccagctaatttttttattttctgtaaaatctcactatgttgcccaggctggtttcaaactcctgggctcaagtgatcctcctgcttcagccgccaaagtgctaggattacaggcatgagccactgcgcctggccttgcccttgttcttgacagatattttggcttgcttgcttgaatgacagctgtcctctctcagcacacttgattgccatccactgtttgcctgttccccctcattgctcctcaggagtccagtgacaatcttaacatcgttccttcataggttgttggtcttttctccctctt

SEQ ID NO: 1562226 - DNA, 4001 bp, Homo sapiens
atctagatgtatctatatatatatagatacatctatatatctatctatatctatctatctatagatagatatagatagatatatctatatatagacggagtctcactctgttgcctggactagaatgcaatgacgctatcttggctcactgcaacctccgcctcccaggttcaagcgattctcctgcctcagcctcccaagtagctgggattacaagcacctgccattatgcctggctaatttttgtagagacagggtttgaccatgttggttaggctggtctcaaactcctggcctcaggtgattcacccaccttggcctcccaaagtgctgggattacaggcatgagccactgcgcctggcctaaaataatatttttaatttttcagagggagtatgctatgttgcccaggctggagtgcagtggttattcacaggttctaacatcggtccctacaccctcaaacttctgggctccagtgatcctcctaactcagcctctccagtacctgggactataggaacatgccacaaagctcggcccagtaaaatatttttaaaaaactttaatgggcaattattacatagcaagcactgttctaaatatgcactggtgataaagagaagcaagaaacatgcttttggccgggctcagtggttcacgcctgtaatcccagtactttgggaggccaaggtggatagattgcttaaggtcagaagttcaagaccagcctggccaccatggtgaaacctcacctctagcaaaaaatacaaaaattagccgggcgtggtgacaggggcctgcagtctcagccactcgggaggctgaggcaggagaatcccttgaacccgggaggcggaggttgcagtgagccgagtgcccctgcactccagcctgggcaacagaggaagactctgtcaaaaaaaaaaaaaatgctttcagccctgaaggagcctggtttagcagaagaaacctatacaaatgtcgcctaaatatacaaatagaccatacctaaaagaccctagcactgggcccagtgaggcccacaggattctattgggggagaatcaggcacagttccagaaagaacccttgaactactaagtcctgaaggatgcgcaaaattcttcagtgagataaagagagaaatggcagtatccacagaaactgcagactggttagggccttgtaattctgcgcagctggaacgcaagatttgggtaggagagcggtagatgaggttggagagacaaacgggctgccttacagatagacgttccacgagaagttcgtagtttttcctattagggaagctatgggaaaatcctaatctgggtaacgatgtaacgggtttacactttagaaaaatccgtggtttaggactctacaactcccatgggcgggctgccctaacccaggggttcccacttccgctgttccgggattcacggacgactcgcccccttttcccagccttggtcagcactgttaccccgcccgccgtgcgatcccgcccccctcggagcgcccctgtggtctgacttcagcagcactttccggcaggagactgggcactcgctgtcacccgcgagctgcctccctcagcgagatctgagcatctttccggaggctaacagacctgggcttcggggtgaccactgtgcttgcctcagtttccttttctggagcaggggaaggcccggctccctgcccaaaggcggctgtgcgctaagtggcagacgctcggggagagccggcgcggggcggaccccagcgccagtagtgacaggggcgaacgccgccgggagactccagccggcgggcgagcagggtaagccaggccgtgggcgggagggcggggcagctcaccggtaaaaggcagagtccccgagtgggttccagttcgccgtgtagcagtccatggctggtgcagacggcagctgggaagcaccgaggggacacccacctagagcgggctccaggccggcacttccgcttccgcccgtccgggtcacgtggcgaggccgccgccgcggccatcaccactgtgggcagcctcacttggctgccgccccgagaccccagcccgtacctgggcttcgcgcccgccaagtgggcccagccctggctcctgcgccctgtggcggccacctccatcgccttgctttcccttcgggcactgggggtcgctcagggcgggacatgggtgaacggaagtggaagctgtgagcgtcgcagcccgaggcgccgaggcctgaggcgccgtcggggccacagcgacgctcgcatggagagcgctgggcgctgggctgtgcaccgacggctaacctggacccacggtctctgcggggcgggagctttgcagaaccgactggccgactggggcgcgggaacatgaggcttggctaggagcccgctgcgggccaggcgcgcggtgcgcaggcatacccgggtcgcgggtgaacaccgcggagccccgggacttggtaattggcgcgagcgggtgcgcgcatgcgcgggacggcggcgggcacgtggcgaggcgcagggcggcgccgcgcgggaagctccccagtgccctggaggcctgctggctggacgaccccctgcctctggtaccaagtgtgaccaaggctggcgccaccatggctctgctgccgtcacctcctccctttagcattgagcagccccggaggggctagccctgaggctgacctgcccagagtccccaccatcgcgctgcttagtggcctctccctgcagcctgtcgttgctggtggcggcatggtcttctgtctgtcgagcgaggagccgcgccgcccgctgcgaagcgacatggtccacttccaggcctcggaagtccagcagctgctacacaacaagttcgtggtcatcttgggggactccagtgagtgcctcttctagggtgacgcttccagtcccacaccttgcagcccgttcagtgtgtctggaccatttgtttccatctcacatctcttgtctgtcttctggtctgttccgtccagtaggttttctctttttatgtcccacacatcttccacaggagtcctgacaggtgtaataacctgtgcactttttagcccatccttgctcagcatttctcgccctgacagctccccataatttccatcacgaaagcgttgcattgtgtagtgtgtctcctgggtgacttggccgacttaatttctgccaggtgatcttgggtcactgtatactgctggccaggaggcacacagaacagaggcaatgccaggactttttaacctcatcttttctcctgcgtctaagtcaaccacagagctggtgtcgggcacctcagccctgggaaaatggggtcctggacttggaaggagctggggcaggctgaggtctgcctcagccttgggatctctgtctcctcccagttcagagggctgtgtacaaggacctggtgctcttgctccagaaagactcactgctcacagctgcccagctgaaagccaaggtgagggaagcttggtggccatgtcagtggtgggtgggcacagaccctggcctggcagggttctcctccctggcatgggtctgaccagtagggtggggggggtgggtagggggagctgagctttgaacaggaccagctggtggctgggggccagctgggcgagctgcacaacgggacacagtatcgtgaggtccgccagttctgctcgggctctggccaccaccttgtgcgcttctacttcctcactcgtgtttactccgagtaccttgaggatgttctggaagagctgacatatggacctgccccggacctggtgatcatcaactcctgcctctgggatctctccaggttggggcgagggaaaggggaatactggttggggctggaagtacggctgaggcagtccacccttgtgctcttgcccaccctgtgtgttatccaacagatatggtcgctgctcaatggagagctaccgggagaacctggagcgggtgt

SEQ ID NO: 1562227 - DNA, 4001 bp, Homo sapiens
tttgcctgacagaccctggggcctgtcctggctcagtcactctcttactgtgtgaccttgggcaacttccttcacctctctgagccttggtttccctatctgtaagttgaggatcaaaagaaccctttccttatttaccaccgctctagccaggtcggtagaaatgaggtgaggggcatgaagggtatgtaaatgatgcacacagcagttactaccaaacatggtgaggcagaagggggcggggagtcatggttcccaaaaagcagagaccctgaggatggcttcgaagcccccctctccactggagcaatcccactcatgtgtcataccccagcaaaaccttccctgattatctaccctgccttacccccactcactcccatcagaataaatcatccaattatctggcctttgtgcaaacctccccacagccctgggcccacagtgcccagcactggggctgcagcctccccaacaaggctgtcagcctgtctagtgaagggctgcatggaagaaaggtctcctttggtttcatctatgctcgagcctccatcccagagccaggctcacaggggtcagggggagcccccacagctgccgggctcatacagtccaactctgctgccaacttgggctccttcggggctagcaggagcttctgacactcagccagccagtgctgggaatgcttgtctgctccccggcttccacagcggctggagttgagatttcccacatttcagtcctctagggccgaggatgaggatgggggtaccctatggaaggatggcacggcttcctgcccatccccagaggcagacaaaagcacccggcattccacttccactcccactcccatgcctctggctgcaagcagcaaccccaactactccggtggctctgaggggcttccaccaggtgccacccgcccaactgggaggctgcagccccaggcgaccagttctcaagaaacaaggtcttctgcccccaaggacctttccagtggtatagggctgggtgtggagaggaagaggacaagggcctctgtgcggttaaacccagaagagtaaaggcagatgggcagagaggagtgggtgagcaaattgtgttcatgtgtgtgtatgtgtgtgcctgtgtgtgtgtgcgcgcgcgcgcaccagtgtgtctgcaggtgggcaggcaagagttgtggcgaagcgtgtgcgccagctggcagagtgagcccaccggcgcagtgcctgatgtgcgtgtgtagtgggcataagtgtaaaggcttgcagtgaggagggggacctgaggtgtgtggagatgtgcagggtaggagttgtgagtgtgagaaagcagcgactgtggctctgagtgtgtccgcggctgtgcatatcggtgtggccatgcaggtgtgcgtatccgcgcgagtgtgtggggaggaggttcgggggtgcgccccgggtgcccccttctctgcagggccagggtgccagggcgggtccaccgcgccggcagggggcgccccgggatgcccgccacgactggcgccggttcgagccccggggcggccaagttggagtggcgcggcccgggttggggtttggtggggaagtccgcgggggcggcgaccgaactcaccgtggccggagacgtggttgtcccagggcgcgtggccggcgggccgcgtggcgccgccgagttgcaggaaaagtgccaggtagtggagggcgcccagcgctacggcgagcggggcccccatcgtgcgctctcgggccgggggcgccgccgcctcacatctgggccccggagaccgcagaaccggcgccagctgtcccctgccctgagcggcctggctgcccggctccggcagctgcccctcgcccgctgtccccggacccggcccagctcccagccctcgcccggctccggcccagccccggcttcggggagcgagcgcacgcccagccggccgcctccgactgcgggactcttcccttccgcggaaggccacgccgcgccgccgccgcaccctcctccctcctcccgcctccctcctcccctccctcctcccctccctcctcccgctcggagcaggcggcggagggatctgccgcttgatttatcatcaaagttttgcccaggctgggatttttaaagcggtacccgcaactttcccccgcccgagtgcggaggcggggccgggatggggcggagagagccaccccagggacgcggttcccgcaaagcacgacccaacgggcttcagccacagaaatgccgtccagcggggagagggagaaaagccagggcacccgccgccaggccagcgcactcagaggctcctaactttaccggcagggcggggccggggtcaggggccagtggggctgggggtgagggcgaggtagggtgggagcctgggctgagacccaggggacctggtgatagctctgccgccgacctcggctcgctgtgtgatcgcgtccgggtgtctacccctctctgaacctcgaagtcttcatctgagaaataggggtaatagctgtctgcgggggtcctggtgaggatttgcgaaatcgtgcatgcaaagcgcttagcataatgctgcctacgtggtaggagctcagtagttattattgtcggtgttcccctttctgggactcagttttcgagtctttgtaatgggagagagacaggccagttagttgttgcggctcctggctcttgaagatactggaccttatgtggtggatgggatcgcccccttctggactgtaggctccttccctagaccaatgagccttgatggtgtgtgtgtgcatgagtgtgtgtgtgcgtgtgcgtgtgcgcgcgcgtatgcgtgggtgtatgtgtgtgtgagtgtggcaggggagggggatagggcaccattcccattcccaagagcaagaatccaacaaagtcctccagttccttcccaagccgtgttactggggctgatgggacagacaggagggcggaactgtggtcccatttaaaagataaggaagcgcctgaaatcaggtaattagcttctctgaggtcccacggcgagtcgggcgaggcccctgactcctgggcggggtccctcctgctctcatcccttgcccttccccaggcctccctgctcacacagcctggtcctcccggtttcagcaccacggaggaggacagcgccagccccccccccgccccccgccccccgccccacccgggcccatcctttgggcaccgtggacagcgtctcaactggccctttgatgctagggttcacaccgtggacagaccctcagactttcttccccgtccccgtcgaacagggtcaacccctccgacagcccactccccactccagaacacaggtggatcccgcgtccagccgtgtgtacagcgcccaagtttgagaacaaggttagagaccaaggaacatagcccctcgccgtcttccctctgtcttagcgccccccttccagtattatggggggggggtagcacaccggatggggcccgtggtagccagcaacaatccagctccttccaaactaaggacacctcctccacgatgtcccgcacttacaagcactgtgttctagcaccgtccacagcccccgcgctcccttcagtaccgaggacaggtcccaagcgtcgaccgcttcccccaccccccgaaccttctggaccacatgccttggaggaaggggccgtgtttgcctgattctctcacttctcactttcttcccacacagaggtggtgtttaggttatcctgggctggccaggcgtcttggactctatgcacgtgttttctcattcattaactaccctgaaccccgctcccagcgaaatgaactactgcttccatcataaagatatggaaactgagaatcctccagatcacatagcagccaccatgttagccagactaaaacccaggactccttcaaccccagcctgaggcctcaccaggagactgtggtgacagaactgggactcaaa

SEQ ID NO: 1562228 - DNA, 4001 bp, Homo sapiens
cataaggttattaagcacatgaaatgtggccagtaagatcaagacatgctgtaaacataaatcacttaatggagttagaagacttagtgctcctaaaaagtaaaatatttttgtattgattatgtgtaaaatgataatatttgctatcattgttgggttaaaatatagtatttagattcatttcacttttaatgtgactgtgagaaatttccgtcaaacatgaaatcacatttcatttttcttggacagctctgctccagactttcagaaatgctggcagagttggatttagctgcctttggttttgtaagaaagaacccatcccatgaaaacagttttgcatttttagtgacactaatagggagtttcattttatcttacgtagagctcatgaaataaagtccttttagagtggagcaaaaacctgcctgcctattgatctgacatgcttccttttagtatcagaagacccagtctactctttttgccttggctgcctggatgctcagctctagattctaccacataccatcctttcttgtgtaattctttcttttctctcccacacccaaaaccactcgtttccttagcccttgtcctttatagaatttcattgcttccttctctttccccgcgacccgtctggatttctttggggaaatgggtaggccaggaacacatctctaggcgtaactacaatgaatccccaaggttgcttctttctcctgcacaggggactgggaggacgctgcgccggcagaggagcgcggtacccgggactcccttttcagcaccccaaggggcggacagttccagggctcgaggccccgtactcttccaggacccgtcaatcattcgatcatttccgcccgcgtttccacctggtaccttgttcggtgctgctggtgaccaccacaggcccgggccttcccgacccacgcagctgccagaggcggagactggcgcctggcgctggggggaaaaatggccctctggagatggttgttgaagaccccagggtctcatcaaaaggttccacccggaaccaggtggtggcggtctcacatcgctgagggaacaggaccccggatgagaggcagggatttaggatgcagcaaggggcaggcggcgcagctccgcgaatgcccctcccgcgacggggcctcgctctgggctccccgcctagatctgggccgctggggccaggggtgcggtggggcgatggtctgtgacccctgcgcggctcagagcctaggggacaggggcaggagcggaaagcgcgggcctgattaccggacgtggagacgctgtcgctgcgcttctggcggccgagcgcaggcggcggacggctgggagccagcggggcagcgggctcggggcccctgggcggcaggaacggcacgtccgctaggagcaggcagggtgctcgagcggccgccggcggctgcgtgccgaagccacagaggaggccgagtcccagcggtagggccccacgcgccaggctggagccgtcaagccccgggcccgggcacggcgcgactgccggaccctcgcagccagatccctgtcctgggccagcgggcgccggcagctcggcctccaagcccagcaggtccgtgatggcgaagccccgggggcgcgagcccctaggggaaccgccaggcaccagcgccctgctgctagtgcgcccgtcggaaagcgagtcccggccggtcatggttccttagcaagcaaggcgcgagcctctctggatcccgtttgcggagggcccagcttagaggaagctttataggattgggctgccggtcgggcgcgggaggcctgaagggctccaatcagctgggcgcgggcgcgtcgccgttccggaccccgcgagatggggacgccaccagttcccctcccctcggttaccgcccacccagctgcagtcccctcagtcacctccttctcctcctctcttctgtccagcccaccccaccccaccccacccccattctaggagggaggggaggaaagaaggtaagggacagtgactccgctgtctgcctgtccctcgaaaagtcgcaagttctacatcctggcgtggccttctccttccttccagactctctgggtggaggccccactcccagctgccctgaagcttctttgatgcgacccaactgcctattaagacctaggaccccattcccaaccacaccccgatggctaccccatatatgtccccagccagccctccacctccgccgccggtgccacgaaggccttcctgtaagaaggccttctctgaaaatccccaaggggaaaggaatgaaaaccgtgtatttaatccatggtcatcctacctccatccctttaatccatggtcattctacctccatccaaatccacccccaggtccatccccaacactccacgggctgaactgtagggggtggcagactcacaagagctggggaaagggagagaagcagagagaggagtggactgcccggggctgagacgggcagggtaccaggtttaaccaacaaaacactgtcggctcagtgaaatgtgatttcagataaaaaaggagggctttttttttttgtaggagtatgtatcagtattttatccagcaaccctaaattggggaggagtggagggaggtaaattgaaataaaatagagtctgtctactggaaagcacaccttttcatcggggcttacaatttattgtccaatttcacgattattcaaagaaagcctgattctttgaataatcagtgaaactctgatattcgctaaagttggccccaagcacgtgggtaagtaactactggttcgcgctttgaacccaaccagccctcatcgctcggagccctgcgtcccccgcttcccaatcccagaaccccggaagcagatctcctcagtcccactccctgagggtcctacagtccgaggtcccgcagcgagggaggagcaaacgcctgagctccgcgggaacccggcgcggctgcctgcgcgcacgcagggaccggagcccgagcctgggccctgcaaagtgggtctcccactcgctgcgcgttcgagtggggcctccgctaaacatgcagattaaacaaggggcttccgataaggataattacaggaggctgcgcattgactttccgttactaaaggaagacccaaatctcccccttgcaagctgttcccgggattaccaaaacaatcactttcttttgagatcattgtcttttgaaccactccagctcggggcagaacgctttagacgctggcgttgttttccgctccgcgaggaattttcccccagatttatctctgggtttagggaaggcgttgggcattcgggactgcgtagtcgtttgtaaatccgaatttggggtagcagttaagtgagatacctacgcttccacacagtttgtagcccgagaccagtcaggcaggcagggtagtcgattctaaggtggcccgaccggggtcgcccgcgaatggaaagcctaaggggcgagggcggacgcgggcgccgtgcctgcagccccgggtgccgaccaagtggcctcacctgggacaggtcttggggtctccctcccctaggtctccctggaaggtaggcgatcacgggagtgacagaccccgagtagatagccagtgatccaaagacaccaaaaggccaggcggtaggagcccagcctcagacactctctatagtgaccgcggcgcctcgggaaggatcgtcttaaactcattttgcaggtgagagcaactgggacttattaacccagtcacatcggacacagagacgtggcgagggcgacacagagcaggagactcaatcaaggagcccgtattggagctctaaggggactcagagatgcagaaggaacgaacttctaaggggtcttgcaattcctggactggggcgttcctaatgcatcccgggaccccaatgccagggaggggcctgcaggaccccagcggtgggcgagttgtgtcctgggt

SEQ ID NO: 1562229 - DNA, 4001 bp, Homo sapiens
tctcaggtaatggagagaagtgaggaaaaagtgatcctagaggaaacaccctcttccagtcacatcatatcctctcactctcttgtggccttgggcttgctggacttcctgggactcattatcctaatgatagacagtaatctgaaccttacagagagattggggagcataggatggcggtgcaccaaggctaaggagaccaaagcagtgcttgggggcctcccactctttatctcgggttctaactgccacccatctcatgcttaatgggtccttctgactccagggtgagaaatgttctccttagcatcaggagatgctgcacatgagcagttcctccccctgggagtactggttcagtgagcaaaacagcaaggggctgggcatcctgagggctggcagggatacgtgggccaaagagggagagggagggtagagaagcatagccagggagagaaattgaacaccaggacgcaagacaagtggggcatctgtaggggccacagtgagctctcaatgatcatctgtagtggcagcaaaagaggtaggatccctgggcatttgttctggtttatttgacagggacaaggggttcagacagtagagagggcggcattcctgttgatgttcttatgctggtgacttgaggtccttgtgcttcggatgtgggcacagtcttggatagaggagttgggaagcaggatgcacatcccagcccactctcccactcacaggatgctcatgcaaacattcccacagtaggtagaacagcatatgttatttgcttgacaatctcggtgagattcacataagtgtttgcatagatatagtttaggctgctgctggcagactttgatttctggggatagctgtgtttctgacaaggagaatagaacggtaaataaacgcagtttcctagagaacatttttctcaagctgaagcctcctccaagacccttgaacccaggtctcagtcatgatactcctggattccttcttcatagaactaccttcctgcccatcaccaaatcctagtgattggtcatattttaaatcctgtctctccactgtacaccttaccccattagaccacaatgcctgggcttcctggaccttctccacacaccagcaatcagaactccatctcccttactagtcatggccttggtgaagtcaccaccaaagaatctacagtctgatcctgagagctcaaagaagcatgagacatctttcaaactctctcctagtctctgaatagtagaattcagagatgaggatcaacatgcctcttgtctctccctctcttctgctcactgtcactgtctctagtcttcctgccccttctttagttccctttccaccaccactctccttgcccctttgatgataaccttaacttggctctgtgtaccccaacttttgcttgtcttatgtcctatttccctacacttatacccattctacacctacacctaccgtcataaccacttctgaatctttactcctcacaaatgtgcataaatcaaataataattgtcttgctttccccactggattctcagccctggtgcgcctttcactatgggatgtgccatttctctctaagtattgagaaggaacagcaaaatatgcaggtttcttcttcattcccattactattcccagggccagctaaggggctggagggccatggtttagggacagtccagagtctacacaacattgtggtcagagctggatatgcagagagtttccaactcctaggtcctactcagactggacacaggccctccattccccctacccaattccccctcacccatccagcagcccatcacctactctgcatcctcttcttgtcacggtatcctccctgggcctgcagcagcagcacacagagaaccaggacaggcagcagagtctggggtgccatgactctgatcagatcgtgagccctatgtctggccaggttgtcacagacttccctgcagagctgtctacggagagtgaaggaaggaaagaaggaatgatctttagctcctcactgcctctactggccaagtcggagcagagcaagagagtccttcctctttttgcttgcccctggccttgtcgttcgtcatgtgggatagggcttccgcaggaatgacgcctcctcctttcacataaccagtcttgtgttcttgccgatagaatgaaagatatcatttatttctgctttctaattacaaaatgttttatggaaaaaagaaaagaaaaaatatattgttaaaaagagttgcttagaattaactgatgtttcattgcattatcttttagtttctctccatatttaatataaacaatccttttaatataaacaacttttgttatctatttttgccacccttatttaatcatgtaagtatttctcaaaatgtggattttcataattgcacagctctcaaatgctaataatcaagtatttgtattgtactaattactaataatctagagaatgtcatattatttttatttataaatctttgatttctttagactaagagagctagaattcctgagtgaaagagtaagtagctgtttcatatataaatgtatataaacacatacacagatatacatatacaaatttaaacacacataaacacacagaaagagagactattgtagggcatgggacagaagggctagtggagaaacatagtaaatatcttagagctcagacagggggagagacctatcagtcaaaggcttggcaggctgtccaggaggaggtggtcactgaccttgaatatcatgaaggaaatgaactctcagaagtgaagatgtttcttcttccctaacaggagaaagaggggacaacctagggtcactggactcccagtaggcatgcaagctgggaagaagatcaccctcttcctctgatgatgataatcttctaaagatttgaacctctttctgacattctgaactcctaatgcagactccttcagtccacagttgtaatttacattcaaaggaagctctctagcctttcccccatatctcaccttatgcaccttcctctgtatcctttgcgatatcctttataattcaaaaattctgatatttgtacctatagtttacagagtggtatttgacccttcccaaaggctctctctttcctagtttttctttttgtccactcataaatgaacaatttagagactggacactgtcataactatcctagcaaagaggggttatatagaggagaatcatcatctcaaatagaagctgcattttccttacccaagcatcttgcagccagtgccacaatgtaaatattttggctaacagacttgtcactactaggtcaagaccctaagaagatggcaagtctctttcacactctttttcttttccaccagctcagtatagatgacaacaaggttctagagcctagtgaagccaaaaggtgaaaggagcctgggtccttgacttcttttatcacatgaaaaaaggatacccattgttttagaatactcattttgaattattatttgagcaagaaataaaaagtatattgtatttcagttattatgtgatggaggctttctgttaaagcagtctagtcaacattgtggcaggctcaagtactgacatttataaggggaaagatttatgggtatatagaaggtctatactttatacattcaaattattgatagagtagtaaatttagtaaagagatgggtaatttgaacattatgattaataagcttgacttaattaaaatatacagaagtctgcatagaaaaactagaggaacacatttttctcaagcacaaataaaacatgtacaaaaagtgactatacattaggctataaaaaaagtctgaacaaaattttaaagaattacatcacaaaggacatagtttcagactataatggaaataattagaaattagtctaaaaaaagacaattactcaaaactgaacagaaatttcaaattaaaata

SEQ ID NO: 1562230 - DNA, 4001 bp, Homo sapiens
aagctacaagaaaataggagtgcccagggtagagttaattggagaatcagaatttgaggaaaggcacaaagaggctttctaaaagactggtaaatgctgtgagtgaagttgggaccagatacccagaagaggggtcaagacttgaaaagggtgacctctctgagatctctggatcatggtgtctatctctaaactgctctgttgagccccaagctcttcaaagtgtggattagttccaatttcttgcagtgccccagtgagctatagaatagctgagaggccaggggtgagtactagttattggtctctgttaaattgtcaacagcttgaacctcagcttcttttaccccaattctggtgccatttgctactacagttatagtcatgacctctttcttcattcattcctttcaaatcatcataatatcctatagatttccttctaattgcaaatatttgcagaggaatagacccacaattcctctatttgcaatagaatgccccacttttgacttttgcccccaaagaaagggagaatcacaaggtacaaaaattaggacctggaagggcttggggaaagggattaatggggcccatctttagagtccaggaatagaaaggagattgtgggttgtggacttagggaagactctcccagggcaggtaggtcttagctttgaactgaaatacttgggggtaggggaggaaataggaagtcaacataatgatgcttattcttctctaacagtagaaagtggggcatcctggtgctctggcctcctgatcgagagacaccaaggaagaaaaaagctgaatctttgaacgccattctgaaatccccacccttcttaccatgaaagaagtcactcccagaacttacttgtgaattgggtcccagctctctgatccagtaccttcagtttaatgcatggtcttcatcctttaccaaaacttacctttcactcattcttcctgtacacaaataacccatgttaggttaaccccagggtaaactatgttgttaatgagaagctctacaacttgctcaagaccacacaatgaatcagtgcagaacgaacatacaaacctctttcttgttcaccacatacaccattgatacccttgatatggacacaaccatagtcaatgggggcttggcatctgaactacaaggatggtgaatgaccaatgggtgcagggttctaccaaactctgttcttgatcaaaaaatatccatgccctgcttccctgctcagaactcagaggaaggcagcagctgaggacaaaacctgatgccaccaccctggaaccatgcaaggcagatgagggtggcaggtttcctggcagttccctgggctttctgagttctgaacattactccagcctgttggtgaggcccttctcttacttgttctgtgttccagagtatatcttggaacctccaccctgcatatcagcacctgaaaactgtactcacctgtgtacaatgcaggaagattgcgagaaaggatttcagtgctgttcctccttctgtgggatagtctgttcatcagaaacatttcaaaagcgcaacaggtaagagatatctcatatccaggtctgatcctagagctgctggtgggagcccagcagaagagtcccttaccagcaactgtgctggatctctccttttttttttttttccttggtggccatgttgccaacatgccccttctcttgaccaaggataatttccataaaagtcctgattagaaaagccctcctcccctcccaatcaccacatcccatcaccatatccgtgaatttctgactctgcctctctgaacacacccacaaatgcctttatccacagaccttcccccgacccagaatccacccttatcccagggacactgtacctgcaggtgtaaccaaaatcccaaagcaaaatttgtcctacacttttgcttgccctcctttcacaagacaccatcctttggccaccagtgttcttgggctctggagatccagcccaaaggaagttttgattaattgtccagacattaacactagccgcaagcctgctaaatggagtgtgctcccagggcagagaaaggacatagggtgctgatgagacatatggtttctaatcccatcttgcaactatgtctttctatgaccttgagtaagacaattccctcttttttactttctttttctcatgagtaaaataagtactcttgttttttcctgctttgcaaggcccatatgaaatttcaaaagactcacagtggaagactcaaccaatgagccctttgagggaagcctggcagtcttgttccctgctgtattccctaccatgagcagaatacccagcatgagataatgtgcagagtgattaagcatgggctcaaagccaaacacctgggctcaaatcctggcttcttagctaagtgaccttaagtgatcttagacaagctaattaacctctctctgggcatcaacttcctcatccttaagactggaacaataatagtgaggttaaaatagacaatccatgtaagctttaaaacattacttgccaacataattgctgtgaattttggggattaggcaaccacttctctttgaagagactagcccttgcaattaaattccacatctttcaatgctctacattggaatgcagaagcataaatataactctttggtgtcattgagttttttgaggttctgccttccctatggcaagagaaatgagcttcatggtctaatattaatggtggaagtaattgaaagaaaaatatatatctctaaaagtaaaacttcactagttaatatttgaaaatatttttcttctacagaatcaaacacaagggctcagaagtcatcatgcctgccaactgaggcatatttcctagatcattttgtaagtacagggatttggtctcgccttcctcatgtgagattcccagggatgctcactttcttcctgtagcctcaccaggggcactacattcccacaagctcagaatggcctctcattacctgattgcctcctcctccatcattcccctccaagggctatctttgcactccctgggggaggcacggtgcagtccagcatgaattctgcaacacagagcaatgtaaggaaccaagtcatggcccagggggaacccagggcactcagatctgaggctttgtcaaggaacaagctcttctagcctccgggttgacagcaccctgggcagggactcaagctgagcccttcacgctctgagactttggtctgctcactgtacctctctgagacagtcacctccctcatgtgaaatatgaagaaaacatccatgccttggggtattgggaggacaacacaaggccatgtagatggaagaacttggtctctgcaaaggtagaaactgccagcaactcacttacaaggtcactcattcaggttccagttttttctctgaaaaaagagggagtgggccgggtatggtgactcacacctgtaaccccagcactttcggaggccaaggtggacggatcacgaggtcaggagttcaagaccagcctgaccaacagagtgaaaccctgtctctactaaaaatacaaaaattagttgggtgtgatggtgcacacctggaatcccagctactcaggaggctgaagcaggagaattgcttgaacccaggaggcagaggttgcagtgagccaagagtgcaccattgcactccagcctgggcgacagagtgagactccgtctcaaaaaaaaaaaaagagggagtgggaatcatctttattattttactgatgcttcaagaatggtgaacaaaatggagtcctgtggaattccaccaccaaaaaaatgatagtattcataagttggtggatttcgtttcagagtatttgaaagaaaaagttagaagtttagggtcttctaatgggccttctgatgtctccagatgttccaaattagaatggtggtctttcagcttagtccttttattaaccct

SEQ ID NO: 1562231 - DNA, 4001 bp, Homo sapiens
tcaggagctgagctgactgtgagaggctctgagtaagtcttgactgggtctaggaatattcccagagttgtttggttgggatgagaaagtgggaaagtgggagagaagcaaagcctgtagattgtcctaacattttcttctctagttctatttccttgcctcttcccactttacaatatactcttggccttgtcctattcctgggacccctcatcaatttatatcatttacttctctccgtaggaaaaaaaaaagaaaaagatttcttttcaagatgtcattttttgctcttgtactaataaaagagcaactcatgcttagtgcataaattttgtaaaaatatgaaaatgacaattaaatttaaaaataattgttaatcttgtcaacctatgctaacatttgtgcatatattctagtagactttttcttatgtacatatatatttttatatagtggataatcctgtgactatttttaagtttaacatttacaataaatattttcctgtactcctaaatattttcaaaaatttcatagattggtagattactctgccaattaatcaccagttgttgacaagcttggtggtttcagtttttccctattgtagaaattcactattagttacataatgataactaaatccttgagtatttatttatttattccttgggaaagccaataaaagtagaaatacagataattcaatctgtgcataaatattaccaattctctcttcataatgtttaggctatacttgcaccaacaaagaaatggtctgaaaatgtcagaccatttccttcatcttgaccctgatatagacattcagaggattcagatggtaggtcggaggagccagcaggctattgactattcacagttgtctagtgtcacaatcacaggccttacactcatccgatgtaaacttaaaacccatctttacagaggcagatactaaaaaattaaaattaaaattaaaaaaccatctttatcatttgctaactccatgaccttgggtaactcatttcacttctggaaaactccattaaatcacatggaaaaattatagcacaggcatacctcatagatattacagattcagttccaggccaccctaataaagtgagtcaaacaaatattttggtttctcagtgcatataaaagatatgtttacactatactgtgatctactaagtgtgtgacagcattatgtataaaaacagtgtacatatcttaatccaaaaatagtttattgatagacatcaataccaagagctctcaaaaccacacacttacatgtgcttgttagtacatgctcctgttcctgaatgactttttggtaaacaacaaaattaagacagaaatcaagaagttttttgaaactaataagaacaaagatacaacataccaaaatctctgggacacaattaaaccagtgttgagaggaaagtttatagcactaaatgcccacatcaaaaagttagaaatatctccaattaacctaacatcacacctagaggaacttgaaaaacaagagcaaaccaaccccaaagctagtagaagaaaagaaataaccaaaattagagctgaactgaacaaaatggagataagggaaaccatacaaaagatccatgaaaccaaaagttggttctttgtagaataaataagactggtagaccactagttagactactaaagaaagagaaaatccagataaacacaatcaaaaataacaaaggggatattaccactgaccccataaaaatacaaacaaaaatcagagactattacaaacaccactatgcacacaaactagaaaacctacacaaaattgataacctcttggaatcatacaaactcccaagattaaaccaggatgaaattgaacagaccaataacaagtaccaaaatttaatcagtaattaaaaaaaaacttaccaaccagaaaaggccctggaccagatggattcacagccaaattctaccagacatataaagaagagctggtgccaatcctactgaaattattccaaaaacttgaggaggagggactcctccctaattcattctatgaagtcagcatcattctgacatcaaaacctggcagagagacaacagaaaaagaaaacttcagaccaatatcactgatgaacatagatgcaaaaatcctaaacaaaatactagcaaaccaaatccagcagtatatcaaaaagctaatccaccacattgtttcctgttgggagctccctgcaatacccaccccccctcccccctgccccgcaaaaaaatgaattcaccacaatcaagtaggctttatccctgggaagcaagattgattcaacatatgcaaatcaatacatgtgattcatcacataaaccaaactttaaaaaaagatcatcttaatagatgcagaagaggcttttgataaaatttaacatcttttcatgttaaaaaccctcaacaaaccagacatcaaaggtacataccacaaaatagtaacagtcaactctgacaatcccacagccaacatcataatgaattgacaaaagctggaagcgttcctcttgagaagcggaacaagacaaggatgcccactcttgccactcctactcaatatagtattgaagtcctagccagagcaatcatgcatgagaaagaaataaaagtcatctaaataggaagagaggaagtcaaactatgtttgacagacaatattcacagacaatataagcctagaaaaccctgtagtctctgcccaaagcttctagatctgataaaccacttcagcaaaggttcaagatacaaaatcaatgtacaaaaatcagcatttctagcagcatttcaatcgtatgaaatgcatagaaatatgtccaagctgagagtcaaatcaagaatgcaatcccactcacaatagccacaataagaataaaatacctaggaatacagctaaacagggaggtgaaagagctttacaatgagaattataaaacactgtatcagagacaacacaaacaaacagaaaaacattctatgctcatggataggaagggtcaatattgttaaaatagtcatactgcccaaaacaatttacggattcaatgttattcctatatacaaactaccaacatttttcacagaatcagaaaaagccatttgaaaatgcatttggaagcaaaaagggcctggatagccaaaacaattctaagcaaaaagaccaaagctggaggcattatacttccagacttcaaactatactacaagcctacagtaaccaaaacagcatggtactggtacaaaatgagaatcattaacaaatgaaacagaatagagaacccagaaataaagctacacacctacaactgtctgatcttcaatgaagctgacaaaaacaatcaatgggaaaaggacttcctattcaataaatgctactggcataactggctaaccatatgcagaagaatgaaactggacccccactttttaccacatacaaaaatcaatacaagatggattaaagacttaaatgtaaaatctaaagctataaagaccctagaagaaaatctagaaaataccattctggacattggcccaggcaaagacttcatgataaaaactctacaagcaattgcaaccaaaacaaaaattgacaagtgggacctaattaaactaaagagcttctacactggaaaagaaactatcaacagagtaaaagacaacctacagaatgggaacaaatatttgcaaactatgcatccaacaaagatctaatatccagaatctataaagaacttaaatcaacaagcaaaaaacaaaaaaaaattttaatgggtaaaggacatgaacagacccttctcaaaagaagacataatgtggccaaaaagcatatgataaaaatgctcagtatcactaatcattagggaaatgcaattcaaaaccacaatgagatattatctcacaccagtcagaatggctggtgagggagaaaagggaatgcttgtgc

SEQ ID NO: 1562232 - DNA, 4001 bp, Homo sapiens
ctgttacacctaagaaaattaactgcagtttcttaacatcatctaatattctatttgcatcttgtttttcttattgtctcaaaagtgactctatggttgttggtgcacatattgcattggctgtaatgtatctgaagtttcttttaatctagaacaatctctccaactcttttttattctcctttcctccctccttcttcttcttcatgctattgacttgttgaacaaaacagacaaattgttctttagaatgtcccatgttgcttccctgtgatgtctttcatcttctttgtccttcacatttcccatagatgaatgctagctgtagaggcttggtgaggttcatgctcaactgtcttggcaggagcccttcttgaatgatgctgtgtgttttgtgttgcatcacctcaggaggaacggaggtccgctttacccatttttagcattgtggagacagattaatgtgttttcggtgtgtacctgaatcctcaagttgtaaacttgtgttttccctcttacaaactgtaaatataccacagggtgatgaaatggcaccctgtaaatattcagaagccatggataatcattgccagaatcaattatttcattagggtttgcaaaacccagtgggttttaattttaattatatttcaggtataaattatgctgaccaaggtgaacactttgaggaggcttcctgcttggggaagagcatatcttttaaaaaacatttatttatttattctgtagaaaagtttagtctatttatccagatcttttaaaatgtcatttaataaagttttagggtttcctttcagaaaatttctgtacatctctagatttatttgtaggtattttatattttattcactttgataatgttgaataggattttttttttttactattaggttgtcttagcaggtttgggctgctataacaaattaccatagactgggtggattataaacagcaaatatttatttcttacagttctagaggctgggaagtccaagatcaaggcaccagcagattcagcatctggtgaggaccagtttctcttctctgacagtgccttctagctgtgatcacacattgcagaagggcaaggcagctctttggggtctcttataagggcactggtttcattcatgaggggtccattcatgagcattagggaggagcaccaggtagagagggaaagtaccgtccctggggtctggactttttgtgactcttccctctttttggggaaaaggacttcaagctcaggttttctttggtggggttgggtattgcttcttccatattccaagtctcaggaccctcaggggcaggtgccaagtgagagtgacccccagaggtagaaaggacccagcatcatttctgaggacacctggtagaggaggagcctggacacttggcctcccatcctggctcagggtatggccttgacacatcttcatccttgtttcctcctttggacaatggagatgttcagactaggtggtctctgagggccctgccagctttagccatccctccccacaccagctaaagggactaattcctccgaactttcatgggtcagatagaggcagggaagggacagccccagccctgggaggcaggtctccttaccttcttccagttccttcacaggaatcacacacttgaagccacagtgcaggtaacaacacttcctttcccccagacagtcctggtctgtgtgacactggggaggatcggacttgaagcagcgtacgttgtcagctgggcaaacccctgctttctctatacctagtggaggaagccacaaggtgatatgagaactccagccccagagggcccctcaggacctctccccagcccagccccacccagctccaccatgtctgctcaccctctttaactccttccacagccaccagggtcacaagaacgagagacaccatgaggaccaagaagctgctggaccccatgttgccaggcaggtgcttggctgggagctgggctgagcctggctttatagtgttcctgctgggcatgccagtgggtggagctgaaggctcaaaatggcaagggaggctgcacttcccagctctatttggaaatggccccttctgaggagggacttggggctttccctaaggctctgcactggaatagatgaagaaatccaagagcgaccctcgttcttcacacgaggagaagaaatggacacgtgattgaccattaggcgccaccagggccaaactatcttatggaaggaggaaaagaagcacagaaagggcatgaaattactcaagttcacacacgaggcagtggcagggccagacttcctcaactccaccgtgttctctatcagtccctcttcatgcctgattcacctgggaccaaaatcttccctccttcctgtgctgccccggacttgttctcagttctcacctcaccccaaggaagaatctgaatggcagtgcttaaaatgtctgtcctgaacattcactctcagccttgcgctccagcaccgtgtgctcctgccccccgccaatctcatgtggcctggaggaaagcagattttggacctgtcaccagctgtgtgactttgaaagcagcttcacctttctaagcctccgtttcctcattcatacaatgagcataataattatactgtatcatcttcataggatttgttttccctcctctgcccctgcatcccccaaattcctggatttggaagaagacatggacgtgtgtgcgtgtgtgtgtgtgtgtgtgtgtgtgtgtgtgtgtgaccaggcttttggggtcctttctttgaatgagtactaaagggaggaaaatccttcctgttggaaaagttgcagatataagcccagaaactccagaaatttggtcctggccctggtgagagagaaattctgagaagataaatctaagatgctgataaaaagagatgagagatggacagggagtaatttagaggatatctagtccttcactaaactttttcctgagatcagccccactcatacccagggttatgttaccacccaatacattcacctttctgcctaagctggtctgaattggatttctgtcatttactaacaggacccctgagtaatgcaaagatttgggtttggggtgttccacatcctgaagtgtggaagggactgagttggggttaagtggaggcagggaggatacctccattcctggaagtgagcctactccttattaggtggtgaatctttggttacaatctcaccagtcatatcactggactcagatcatttggataccagggatggaatctgggaagttcataaacaaatactagaatgttggaatgtattggctatttcctcctccacctttttattatgaactttttaaacatacagaaaaattgaaataacagaacaatgatacttgtatacctacaactggatttaacaattattaatagtttgggatattttagaatacctatagctacatttgttgaaatatttgaaatgaaattgaatacattatgttcctatttcctaaatacatcagcatgcaaattctaagaataaggatattcttcaatataatcacaaagccattatcatatctaagataattaatagtttctgcatgtcatctcatagccagttcatatttgtttctccggttctccccaaaatgtcatttgtaattgactgttgatgatacttctttaaaaaaagtattgtaaaataaatcctacatatgaaagaatgtaatcaacattctataccttttgaaaaagaataataaacacctatgaacctatcaatttagaataggacattaccatccctacttcagaggtaaccactatcttgaactttctgttaatcatcctcatgttttcctttaaagttttgctctcttgctatggcttgcttagtgatacgtgttgtttaatttcgtgtaagcgtaattatggcctaagtattcttttgtatttt

SEQ ID NO: 1562233 - DNA, 4001 bp, Homo sapiens
cctaacatgggttatttgtgtacaggaagaatgagtgaaaggtaagttttggtaaaggatgaagaccatgcattaaactgaaggtactggatcagagagctgggacccaattcacaagtaagttctgggagtgacttctttcatggtaagaagggtggggatttcagaatggcgttcaaagattcagcttttttcttccttggtgtctctcgatcaggaggccagagcaccaggatgccccactttctactgttagagaagaataagcatcattatgttgacttcctatttcctcccctacccccaagtatttcagttcaaagctaagacctacctgccctgggagagtcttccctaagtccacaacccacaatctcctttctattcctggactctaaagatgggccccattaatccctttccccaagcccttccaggtcctaatttttgtaccttgtgattctccctttctttgggggcaaaagtcaaaagtggggcattctattgcaaatagaggaattgtgggtctattcctctgcaaatatttgcaattagaaggaaatctataggatattatgatgatttgaaaggaatgaatgaagaaagaggtcatgactataactgtagtagcaaatggcaccagaattggggtaaaagaagctgaggttcaagctgttgacaatttaacagagaccaataactagtactcacccctggcctctcagctattctatagctcactggggcactgcaagaaattggaactaatccacactttgaagagcttggggctcaacagagcagtttagagatagacaccatgatccagagatctcagagaggtcacccttttcaagtcttgacccctcttctgggtatctggtcccaacttcactcacagcatttaccagtcttttagaaagcctctttgtgcctttcctcaaattctgattctccaattaactctaccctgggcactcctattttcttgtagcttgcttagtccctcttagtcctacaaacctgcatgccttttctgaaacttcttaagcaggacctagcctccccagacacatgagctaccacacttatccctcttctgagccgccagtattctgaagatgttttccccatagaagagtggatgtatgatgaataacagttcttttcccacttggtattggttaaggtcaacattactagagccagagctcttttgagttgagctgggcagtggtggctgctgagatggactctacactgtcccattgatgctaattaccggtaattgtacagtacctctggagtttgaaaatgtggaataaaaggcaagacttcctttccctccttcccaaaacatcctccaaggccaaggttatgtagattctagcttgagttctaccaacttcgttgtctctctgttttattgcttgaaaagtgagtccaagcatccatgaaggagccacgggcagcaagactaagctggatgatgaggctgatcacatttacagcatttaatattactgagcatttaccatggtttagtaagagtgagctatgtctgcatgcattatctgttctcctcctgtattcattataaggataaaaacctgaggcccagatactatgcccaaggtcactcagcaacagagcagggattcaaacctagatcttgccaacaataaagcttgggcccttgaacatgacacggtatttttccaagaggtgtgacagactgtcagccctcagatcctctcctatccacacatgttacttccctccttgggcccagatccagcacctactcagaacacgctgcttgggactcccaggcaccagctgcagtgctaggcagaacaccaccaggaactggagaggcagcacaggcttcatggtgtcagtgggatgggtgagtaagttctggccaagggttgctgggtttgaccaggcactgctgtgaggagaagagaaggaaagagggcaaagtggaggcccagtgtgactagcctttcaccgtgtactccaatcaaaaccggcagggcaggaatccaagcacctcccaatcacacccactccagggtcacgtagtgttttcatatcctcctttattcccctaatcttgaccttgctatctctttcatctgtatctagatcttattcatgtcccttaacatttttttataattttcccctgtggaaattgtacatgttatatttattcacagaggattgaattttttttttttttttttgagatgatggagtctggctctgtcacccaggctggagtgcagtggtgcgatctctgctcactgcagcctcttcctcccaggttcaagcaattcttgtgtctcagactcctgagttgctgggattacaggcgtgtaccaccatgtccagctaatttttgtatttttagtagagatggggtttcactgtgttatccaggctagtcttgaactcctgacctcaggtgatctgccctcctcagcctctcaaagtgctaggattacaggtgtgagccaccgcgcctggtctgaggcttgaagtttttaaaaggaaattgtaaatgttatcataacttttcaactaattccttttgtttactgctaatgtagagaagttaactttccagtttgctcaaaaatctccaccatgacaattatttgacctcactgaaaccaataaacattgactcttcacttccctatttcgtagtcctcccctataggcgtttacttttctttctatcaatgtaggactcagaacctgtcatttaaatctccttgcttgaatctacctacaaaaactgcaaccctgaatgaatccaaccatcaatttcattgaagcttgaacctaggcagataattgttgctgggggaaaataactcaactgggctactaaacagcacaatagatgcaccatcaccaaaccaaaaagggtctggcaatcttactaagtttcttcagtaagccagtgttcccactttctacaaatactatttcaaacttgctttcctctctttaaagcttggatcttttcttctttccacaaatttgtaactagttagcttgctaaattctcccattgtttattatggtttctttgtgtgttctcttcagtgtttatcataggcaaataagcagttatagttttcttcttcaaactttatgccatttttaatgcctcactgtgctcgctaggcccttgagtacatcatatgtaagtggtgatagtgtgtatttttgtctgatacctgatttaaaatgaaaacttcttgtttccccttttagaattgtctccactttaggtttctcataagtaccctctatcaggtttagaaatttttctttcattcctaacaagaaattttaaattagtttatgtcagattatatgtattgcttttttctatgtatattgagatgataacatttttatatcctttaatctgttaatgcagtgaacattcagattttcaaacattaagccatttctatggtaatataaggtgatcattgaatattatcatttttatattgtttggtttagtttgctatttttaaggtattttacatctatgttcataatgaactgggcctgtaacttgtctttctcatattgtccttgcttggtttcatagcaagtttatgctgacttcataggatgtgctgagtagcagcccttctttatcaattctctataaattcttgatttaagataattagttacttgaactctcaactctgtttttcttgcacgaatatacccatttgcaccttgttgttttcatttaacaatatatcctgaaaactgctctccagtagttcataacaatttttcctctattacagctgcatttgacatacaccttagtcatatagccagtctcctatatttgggcatttaggtagtttccaagattttgctattataaataatgctgcaatgaacaattatgcataattttctgtattgttggaggtataatatcagtaaat

SEQ ID NO: 1562234 - DNA, 4001 bp, Homo sapiens
tccatctgagataagggaacaaattcttcatccatcaaacagcaaagactccctcctttgctcctccacctctctcatctggctgctgcctgctttctctccaaatcttcctctctccttctggtcctcctctccctggcccagaggaggggactcatgaccttgaagctgcccttggtgggctgccagtccccctccacttaccacctccctgctgatcggtgtcttgggtcaccgtattacaaaccttcccagcctgtgctggcatcttcaaggaaataacagagaggaaaagtcacaggggctgtattctggataaagaacatcattacagtaccttggttctctccaggtcctatccctgcctctaatcctcagcattttcctctggagaacggaaagctgagattccatgctgtttaagccaccccctgttctgatagcctggtggagactgcagctccagcaagcacctttgagagagtccccagctcgcgctcactcaatccttagagtggaagagattgactgaaagacgacgaagggcgatacagtgtccagggaggattcctcactttcttcgaatcactcagccagttggcctgaaaggcaaaagctgaaccctcactatgactccagcagccatgggatggcggtgtgaccttgggcaagaacatttttttctcaccgatgctcccttacacatctttaagatgagcggggcattttcctaaatctgtaaagttcctttccgcctggacagaggaattggggaaaatcttgccaggccaggctctcccagtctttccccagggctgggggaggcccccagggagggactccaagaggagaggtgagcgccccaggctccgggctttcccgcagggcaggcttcggccggttcgagaaggaaactgcggccccgggtccccaggccgcggggaacaatgtcccggctgtgcgtgcccggaagcccgtcatgcaccagagactcgaatcccagctaggggtggggacccccccttggctgcgtttcaacgacgcctttgtctacccctgggccgtgcgagggagaggactgacggatctggtttcaaccgccttgactttcccgggggtccccgggtccgggggcgcccctgttcccggaacccgggccctcccacctcctcccagcccagcgcggccccgccccgttcccgctcggccgccgtggggttaccattgggcagagagcagaaggtggcacagcccgcgctgcagcacttgaggttgtcggcgcattcgctgtccgagacgcactcttgcgtgcagttctggtcagcctggagctcggggcacacgccagtcttctctgctcctgtgcctgggaggggaggcccgggacagtcgagggtggggcgtagcgccagccccagaggatgcccacctcctgctccaaaccttaaccccaaggaattctcagtctctggccctaggagtccccttacagcccccagagactccttcttccagaccaggagtccctgacccctgggagtacgagagctccctaacccttggcgtcggggccctcagatctcagccctaggggacgccgcacagctgagcgtctcggagcttccgaggtcgaggcagagcagcccccacccccagcccactgcagccacggagtgtccgcgttcagcacagaatcctcccaaattgcagccatcagtggtctctccacctccagcacattggaccccacaccctaggctccaagggtccccgccacttccgcccccggaattcccacttccccagcctccagaggctacgcctccgcctggctccatcctggcgctcgtggctcggcccctctaggcgccgggcctctccccgccccactcacctgagactagggtgaagccgaacagcagcaggctgaggaggagggcggcggctagcgggcctaggcgacaagcaggcatggtgctatgcccgggcggggtgcaggtgtgagccgatgctcaggtgcggggatttaaccgcgcgcgcgggagggggcgtggggtaggggtggagccgagcggggaaggggagggtggagggctttgcgggcaccgcgggcgggctgccacatgaggtcatttcacaatcccccaggatcaggtatcactcttggccccggtgggaaccaggaacttaagcagcttccaggacgggaccagctacggccggacccttgtccacgcctccctcctgacctccctcctggggcctgagggccaaggctcagggctcctgggtttctattccaagactccgaggtttctccagagtgtccccagtgggcggttgaggaggataaggcagggcccgcagggaggcagtagagcatgcgggttaaagggttcgatttggggtcagccagatgagagggcagatccctcttgatggagggctagggtagtgatacagagcacatagtaggggctacagaaatagcacttattattaataaacaaaccctcctcatcagaaacaggcccaggaaggtgaagcacctagcagtctcaagccgtttgggtgtgtgtttctgtctccctctctttgtcctaccggcccctgatcagggctgactgtgccaggctctgtgctccttgtctcaaggaattgtcgccggtcctctgaccggggagttactgttatcagctgtatatgacaaaggaactgagtgtttagggatttaggaccgcacctccaccacaaggtcccctgcaaagctgtacaaataaggttttgaacccaggtctctccctccaggcccttgttttttccattccgtcgtaaatattcactgggtgcctactgtgtgacatatgcagggcaagacgcttggtgaagagaaagtcgtcaaaaggggccctccagcactggtcttgaaggggtgacagggtctggggtctgactcccacctccaccacttcccacctgagggccctggaatgaatcctttcctggatctgagctgccacatcatcagtgaaaatgacacctatatgggacttcagtgagaacacaaatgcaacgttcctgccacggaacaaccatgtactcactgggagcattgagagtagatccacactgattgacacagggactccaggcctgacccatgataggtactggatacatggccatgagtgctccacagataagtgtctcctgtgacgaaggagaccaataagtataaatgaagctttagaatccagggggttaagtgccaaaacagagttacccagggagttagacaagaagtgcttcctgctccaatgatctgaggttctagaagccccaggaggtctttgctgctggaggctagaggggccctggggcagtgaacactgggatgatagtgacaggtgagtagggtttggtgatgtgagtacatctggccactgtccccaaaatggatgctgagaacacctcccccagcttctcatgctcaacttggggactggggacgttattgggaggggccagggctatttactctgagctcagtcaacaatgagggcaggagccaggtgggaacacagcccataacaggctagtgaaacccagtctagggcacaaagagaacactggggtgagcagccagtttttagcccgtggacccagctggctactgtacattcagccccaggcactgctgccaacagctttcttccgggccctattcagctccctgggccaggaaactgcccagccttgctcctcccaggcccttatgagcaccctattgattggctctctcttacaggaatacagactgagggagagtggcagggccaggcagaaggatggggaaggaattttcatcagtcaatggcatcagatgtttagcttttgtggtgccaagttccgtgctaggtatagttatagatattctctttacatcatttaaaagggcagaggctttagaaccaaatgcatccatgcccaatcagggacaa

SEQ ID NO: 1562235 - DNA, 4001 bp, Homo sapiens
ttatccaggattccagagacccaagagcaagaagtgccttcagaagaaagaggcagcttaacatcatgatgatgctgagagttgggacaagagctcagttcaggctagaggtgtacaccttgcccagagtatcagctgaggtatgagcaggactagggatggccccaaacccagtcccaaaaccttccctttcacaatactccccaagaatatcttctcctgacaagaagaagagggattggctgctggagtgtgggaaaattcctggcactaccaaaggggacctgtgatgggaggatcaaattctgtaagcaatatacacaatattcctggatgatgagaaacctagtgggtggctggaaaaatggaggggtggccattggaaaaagaatcaaagagagccctaaagggcattggaaggacatggctttagcccaaataacagagggagggattcacgacactacttaatggccaaagctaataacataaccaagcataataaaattgtggctcctgttcatcctagcaaccaagaaaatacagaatggaacagaccactcagaaactatcaaataggccaaggcgggcagatcacctgaggtcaggagtttgagaccagcctggccaacatggcgaaaccctgtctctactaaaaatacaaaaatcagctgggcatgctggtgcatgcctgtaatcccagctacgtgggaggctgaggcaggagaatagcttgaacccaggaggcagaggttgcagtgagtggagatcatgccactgcactccagcttgggtaacagagtgagactctgtctcaaaaaaaaaaaaaagagagaaaagaaactatcaaaaacctacagaaaagcagtagttgagtttgttaagaactaatgaaaagcaccaaacacctacatctttgtccctctaacccacacaggccattcttggactgtatgaagtctagctggcagaacccaagagaagttgctatgtatgactcaaatagtctgcccacatatacctcctttatttcttttttctccatttctttttttctttatctgtcctggtcatgcctttggttagctgtgatacctaatggtgtccactggcactgcttagtcctatgggcaggtacaaggtaaaacctccttaataggatcaaaaagtttggagccaggaagtcgcccttatggttagaaggctgatgttggctcatggagataattaacatttgatgatgacctcatatgtgcctaatatgcttttttttttttttttttttttttttttgagacagagtctccctctgtcccccaggctggaatgcagtggcgcgatctcggcataattaacatttgatgatgacctaacatgtgcctaatgtgctttttttttttttttttttgagacagtctccctctgtcgcccaggctggagtgcagtggcgtgatctcggctcactgcaacctccgcctcctgggttcaagagactctcctgcctcagcctcccgagtagctgggattacaggtgcccaccaccacgcccggctaatttttatatttttagtagagacggggtttcgccatgttggccaggctggtctcgaactcctgatggcaagtgatcctcccgcctcggcctcccaaagtgctgggattacaggcgtgagccaccgcccctggccgagcatattaaaatctagttttcaaaaactgaactgcaggcgccgctgtaccaaacgcttccctctgctccccaaccccagcctacagaaaactggtcccttcctcctaccccgcagtcatccccaggccttggcccagcgggaaacatcccttgactgaaccgccactgaacacccacactgcacaatcgaggcgcagccctcccgagaggaagccccaacgacctccacctacaaggcctctaagtgtaactgtcctgggcgaggcgcggcggttcggttcccatggtaaccccgcagctccagcgtcgcgcttccgggcggacgagcagcgcgctccagtgacgtcacggcgccactttccggccggtgacagagtccagcggagttgtgggggccgggggcgccatgggagccactggcgacgccgagcagccgcggggacctagcggggccgagaggggcggcttggagctgggggatgcgggcgcagcggggcagctggttcttacggtgagggcgcccccggtgaggtctgggctcaggccgggcacggcctcggggctcctgggaccctggcccgcgggcgagagaacgcggaggctggagctgcagagggggttggcgttttcgcagcccgacgacctggatttaaattctggtgccgccctcctagctaggtgacgtgggccatctctgtcaaccccctgagtcccaggatcctcttctataaaatggaaatgattagtacctgtctcataaaacttgttgtgggatgggaagataaaggcgggtacaacgccccggacatcacctgacacagagttgaccctcggtaaatactgcttcccttcctcctgccgtgccagaaggcagggtcgggacttttaaggcaggaaacttcctcagttcctcttttgtggaggaggccttacaactatcgtcccaccccaaggcgggagagatggtgacggatctgagaagcagggatgtccaggtttaacttcatacccaccctccacctccaccccaccccagtgtcacaggccgcagtgacatttgttccgttggtccccacagaacccttggaacataatgataaagcaccggcaggtgcagcggaggggccgccgctcacagatgacaacaaggtaaggctggccctgcatggggcttatatcccagccactggcttgcatggcagatttgggatccccagtgcacaaggctatggagatctacagccggtagaaagagcacaggactgaggaagaggagactccgattctgtaactctgtgtgatcttgaactagtcaagtcacttccttctctgaactcacgtacaaaatggggaagggcacaggagatgggttgtggaataaacaatacctaagatccctcacattcactggctctgtggttgagggctctaaagaggtcagttagcatggagtttaagagaacaggctctggagtcagacaactgtgttctcatcaacagactctgatgagcccgttttctcaactataaagagggattaatagtatgcatgtcagggaagggagagagcacaaggtgggcctttgggatgctgatagtggtgaaatggatgttcactataattactcattaaagtgtatagacttttctgtataagtattatatttcataaaaacactttgggccgggcgcggtggctcacgcctgtaatcccagcactttgggaggctgaggtgggtggatcacctgaggtcgggacttccagaacagcctgaccaacatggagaaaccccgtctctactaaaaataacaaaaaattggccgggcgcggtggctcacgcctgtaatcccagcactttgggagtctgaggcgggcagatcacctgaggttgggagttcgagaccagcctgaccaaaatggagaaacccggtctctactaaaaatacaaaaattagccgggcgtggtggtgcacacctgtaatcccagctactaaggaggctgaggcaggagaattgcttgaacccaggaggcagaggttgcagtgagccaaaaccacgccactgcactccagcctgggcaacagagtgagactccgtctcaaaaaaaaaaactttgaaaataatatgcacttcatagagttattatgagaaagaaataaagtcatgcctctgtgatttgcacaaaatctgagcatgtagctagttttcaataaaagctgtctagtattgttaaggaattctatgtccataattaactggggaggctgggaaagaatatgtttgggacatgccccctcaccctgtctccct

SEQ ID NO: 1562236 - DNA, 4001 bp, Homo sapiens
tctttgtatcagagacacccagacgtttgagtgagaagggggcagaatggggagctcttataaacagaggcggctgggcttccacaggcaacaaactgagacttcccttcccttggcttcgtcaccttcctccattgtctgaaattctaccaacagctcggcaatgtcttacaggagagaaaccagtgggggacaaggtgtggtgaactgggggagagacaagcttgtcacacctgcccatgcagagtggccctgcgcaggctcggtttctgctgtgccagctctttgcctctgagcagctgggctgaatattggggtgtgctccctgggaacacaatgactcccccaaatcacccacttatgctgtgcttactgtgtgccaggcccttattcctcgagacaccatttactcctgagagagaggcatgggaccccattttacaaggagtaagtctccagacctgtcctgttgccttccaggagtgtcctgcctggaagtcctaataaactcatgcacttgccaatctggccttgtctaagtcattctttgttctctcagctccttcctatgttgggggtgcattgtcctgtacagtcctgggtttttgctgtaatagttggtaaagtgaatctttctgatttcaaatacttgcactcatgcacttgctaatctggccttgtctaagtcattctctggtctctcagctccttcctatgttgggggtgcattgtcctgtacagtcctgggtttttgctgtaatagttggtaaggtgaatctttctgatttcaaatacttgcattcaaatgccacatttggcactaactcagagtcagtctttgaccttgttaagtggttccccgctatgcctcaattttcctcatctgcaaaatggggatgaaaatagtcctgtcctcacagcaccttgtcgaggagttacgtgatgatggtgcatgaatcacagccaacacagggtccagccttggagctcaccagtgtacttccttcctcagcctgtccccattactgtcccctttctttaaggcagggcaagggttgcacaggtgaatgtaggttggagtgttccagccccagaaaaggacgcaggtggaggcctcacccagatcaggagtcacctgtctagccactcagcagccctccctcacctgtcagcaggccagccccagccttgtcaggggtgggaatggggacaggaggttgggggcgatgagagttagagacagagcttcctccccacaaagcccagatcccagaagccacaccctctcctcaattcccaagtcccttccacagatggggtggtggacccactgacccagtcacaccacagcccagcaggcacagacagggtccctccccacacctgaaggcacagagacacacatggacaggcaccaagctcagacacatgcgtgcagccattcctaagtgtacgtgtgcagacagagctttgcacagacaagcagacgcaaagacacatgtctacacagacacaggcacatgcattccccgccctgccaccccctgacatatagacaggcacagacaagcaccgagaaactggcagaaaagacacttacagataccaacacaggcaggtggacaggcacaaatgtacacacataaaaacacaggcttctgaaagcactaagaatcaggcatccacacatacacacacgcacgcacgcacacacacacgcgcacacacaccccacagggcattacctgccttcccccaaacccttactctccctagagaagtagagacaatctggtccccccagcagagggatttcccgcactcacctcccttcttcctgccaaagacagcaggcagctgactccccacagccaggagggcccccaggaggagaaggctctgggtcctcatatttctgctgccggctcagggcccagggccccccagattaacacctgcagcctcagggaagccagagaaacttagtcaggagaggaaagagagggggtgtggagtgacaccgtgcctgcttcatcttggccccaccccctgagggcccgaggactcagtgcaagggatgctgtcacaatagctgaagatagggtggcggcacatcctgcatgtgggggactcagatccagtcttgcctgtatcggtgacttgggctgtgatcttgggcaagtcttgtctctctgggcttcagttttttcatctgtacacagggtgaaggttgttgaggcagatgcttgctatcctggctctcaaagatgttgaagccccagcgatgtctaggcagcgggtagaggtcagctttgaatagcaaaggagtgggggtttgcagagttctggatgcctaggaagggagaaggcattagggttaggccagagcttgcagccaaagaaggctggcccaggctggcataatgagtgaggccagccctggcctctcctcttgggtcctgtggatgggagaaagaccaccccgcctttggtgagatcaccagtggcttctgatagaactgccctcttcctggggctggcttggctgttgagggtgggggagcatggcttttggcttggctaagtttgctggtcacagcagatgtgtggccactggaacctcttctctggccctaagggatcctgagcaaaaaaatgtcatctcatccagggacccccaccttagatttcgtatctctgatgttgcctcctgcatttggtagaagagagggagctgagacttggcatcctaagggacatcctaaacagaaactccatcgaagtacattctctcagccttctcatttgaaagacgaggaaactgtgagatagagatgagaggggactggcccaaggacacgcagctaattcctgactaagctgggacttcccactgtggcctccccatcaccctcattcagttcctgggttttaaaagcaggtcaatacctcatctgatcctgagaaaggagggtgatattacagggcttgtctcacttacccattccaatccaggacagccctggcagcaggaagttcttccttgggtttaatgtgaatctctcgtgctgtcttctaagctattaagataggagaggctctgtcttctatgatctgatgttgcttttggaatgctggcacctccttggaagctttattttggaggacaaatatatgagcccttccttcctccctccctccacccctccctccctccacccctccctccctctttctttcttttttcttttctttctttctttttctttttctttctttccttttttcatttctttcttctttctttccttctttcctctctttctttcctttctctttctttcttttctttctttcttctttctttttctttcttctttctttccttttttatttctttcttctttctttccttctttcctctctttctttcctttctccttctttctttctttctttctttctttctctccttctccttcttctttcctctctctctttctctttctctctctgtctttgacagaatgtcgctatgtcacccaggctggagtgcacagtgccatcatggctcactgaacccttgacctcatggacccaagtagtcctcctgcctcagcctcctgagtacctgggactataggcatgcgccccaatatttggctagtttttattttttgtagagatggggggtcttcctatgttgcctaggctggtctctaactctaggactcaagtgattctcccaccttggcctcccaaagtgctgggattccaggggtgagccactgtgctcagccatgaaatgctcttttttttttttttttttttttttttgagacggagtcttcctctgtcatccaggctggagtgcaatggggcaatctctgctcattgcaacctccgtctcctgggttctagcaattctctgcctcagcctcccaagtagctgggaccacaggcgcccgccaccatgcctggctaattttttgtatttttag

SEQ ID NO: 1562237 - DNA, 4001 bp, Homo sapiens
taggcggtctaaggtggtcagggaaggcatcctggatttatgtagacagagaggcctagagaaaaaagccaggaaatacagattatatacctgtctcttatagctatcatataacctgacacaatgttggcatttgatgagactttggtgactacttggcatctcgagaatcactgaagagtagccaagagaccatgtggtccattatccacacctgtcttatggaaagggaaactgaggcccagaaaggaaaactacattgttcacatcacttaccaaaatagaggaagaaatgaaataaaatccatgtctcccaagtccaggactggcagatttgtgtcaagtagaagatgtacctaaactcttggtcagagaccagccatcagtgaactaggagacagaggtagtgcagtgcaggtggagataggaggtgagggcactgggtaatttaggaagcatctgagttacctttctgaagtctaaacatttctttccacggctgaacgggcaacacttcatgttttctgggcaatctctgggtttggtacactggtctatttcttccacttcgcattccactttgattttgggacacggctctaagggaggggaagatatattccctcaaggccttaaaggagccagtgctccccctccccgagaccagggcacccctccagagttagagaactttgtttccacttcacctatccccagaaggtagtggccctcagggggctcaggaatttcacaacactgctcacatccccaaccccataacaactcaccatcggatgcctaaaccaacccctaccccctacccgcaccatctatgagattcctgagagaaagacgcattcctctaagactgttctggtcactcagccttgctgtgcttggttgctcccccaggaggtgctgtggctctcgatgattgagattaacatttctggcatcagatagctgggcttttgaattctgtgagacgcttggtgtgccaggcactctctctgagccttgatttcctcatttgcccatagggttgctttgaagactaaccagcaacacagtttgacaagccatcgtcaaactgcctggggcaatgtaacgtaacaatgagtaatatggatgaagcacttactgtgagctgccttttctccttaatcctcattacaaatctatgggtaagtactcttaatattcacattttgtaaacagaagaattggaagcataaggagattatgtgaatttgcccaagatcacacagctactcaggggtggagccaggtttgaacctacaatgtgtggctcctgagtgctcactttcaaccactaattttcagtgcccagtacagttagctgctaattgtgagtcttcacatttcagcattccaagggacttctggagaccattctttaacccaaagaccagggtcctctgtgggtatgggtgtgggggctgcaatgagaacatttggaagttgacacaggtggtgttgtggggagcagcctgtttttcttgtgggagacttccttgggcttactactccttcttagttcatttcatgagctctaggtccaggcacctccaggaagaactctttggaatggcagcaaggagtcacttgccacagatttggatgcctgtattcaccaagggagtctcttaccaagagacttcaaatagctcccctctttcccacctggaattccaggcagaggtggagaaaataatttctcagctgcaaaattattctttgttccttcctccccactgagtttcctttccccattgcaaggacggagttcccaatacttactgccaaggatgccttcagcgtgcccaggttcctggatgtcccccaaaaggatgaatggtaccaggattggcagaagtcctgagagtcccattttaggaagtactggcctggttgatggcaccaaaactaagaactgctcctcagcagctcctacatctgcactttgcctgccccggtgtggcccagcaccttaagagacagccctggagacaagccagccagactccccgatcaggaacaccagatccctgaggccatcagtgggactacctggtacctacactgggggataggtggctcctaatcctcagcaatctgaggctttctggtctaccagggaaagagggcacatgttgtcttgggctttccaggctcccttagcagaaggggaggtttaactccagagtcttccatttcccagggggagtttgcaggttaacagtatgctagctctcttccttctttctaatttcactcttctcctgacatgtctattcttatgttttatttttctcactctgtttcttctcttttctgtgcatctgtatgtcttttactctgtgcctgtctttttctcagggagtctctgtctgtctgagtctctttctccccgcccttcacttccctctctcttctttcgtatgtaaagatcagttacatttatcctttaagtcgtttgattttgcaacagtaaataacttctttcattactttgggacttctccaactctgttctccgtttttccctgttgtcacagctacagcattggattaaaagtcacaccctgaagcattaacgcttgagcatctgtaccaagttttatatccttggtataagcccgaaggaggtgaggagccagttacctgggcatcagttccatctggcaaaggactgtgggtaatggaagcatttctgcagggtggcagcagggtgtgtgtgcagcaaggcatgtcatcagtggtgagtgagaagttcattcctttttatggccgaataatagccaatgcacattgacagcctcctacctctagcatcagtccctaattttctgctgtgggttttctctggcccccagggagcttgtatagcttgcaagtataacagtttgaaagagcgagggatttagtatccctggcatccagtgggcgttgggaatcagtggacaaatagcttagctttcccatcactggagacagattaagaaaatttgtggtctgatatccagaatctacaaggaacttaaacaaatttacaagaaaaaaaacaaacaaccccattgaaaagtgggcaaaggacatgaacagacacttctcaaaagaagacatttatgcggccaacaaacatatgaaaaaaagctcaacaccagtgatcatcagagaaatgcaaatcaaaaccacaatgagataccatctcatgccagtcagaatggtgattattaaaaagtccagaaacaacagatgctggtaaagctgtggagaaacatgaatgcttttacactgttgggaatgtaaattggttcaaccattgtggaagagagtgtgccaattcctgaaagatctagaaccagaaataccatttgacccagcaatcccattactgggtatacactcaaaggaatataaatcattcttttataaagatacatgcatgtgtatgttcactgcagcactatttacaatagcaaaaacatggaatcaaaccaaatatccatcaacgataggctggataaagaaaatgtggtacatatatgccatggaatactatgcagccataaaaagaaatgagatcacgtcctttgcagggacatggatgaagctggaagccgttatcctcagcaaagtaacgcaggaacaaaagtaaataccacatgttctcacttgcaagtgggagatgaacaatgagaacacgtggactgttgagggggcagggggagggaaagcatcaggataaatagctaatgcatgcggggcttaatacccaggtaatgggttgataggtgcagcaaaccaccatggcacaggcttacctatgtaacaaacctgcaggtcctgcacatgtatcccggaacgtaaaataaaataaaatatttttaaaaagaaaatttgtaagcctgttttacatgattctttaaaaggtccccaataggattgagccacagtagtaaccagctcataataga

SEQ ID NO: 1562238 - DNA, 4001 bp, Homo sapiens
tggttcaggcatgagttacagggctttcagccacaattcaatgttaatgaaacaataatatatattacataaggtgtctttttttttttttgagatggagtctcactctgtcgccaggctagagtacagtagtgcgatctcggctcgctgcaacctccgccttctgggttcaagtgattctcctgcctcagactcccgagtagctgggattacaggcacccaccaccacgtcctgctaattttttgtatttttagtagagatgaggtttcactgtgttggccaggatggtctcaatctcctgacctagtgatccgcctgcctcagcctcccaaagtgctgggattacaggcatgagccaccgcgcctggcctatatacatgtttaaaaaataaagacagggccagcacggtggctcatgcctgtaatcccagcactttgggaggctgaggcaggcagatcacctgtggtcaggagttcaagactagcctggccaacacggtgaaaccctgtctctactaaaaatacaaaaattagcctggagtggtggtgcacacctgtagtcccagctactcaggaggctaaggcaggaggatcccttgaacccagaaggtggaggttgcagagagccgagatcacaccactatgctccagcctgggggacagagagagattccctctcaaacaaaacaaaaaaaataaaaataaaaataaataaataaataaagtatgtagagttttatttaataattaaccacacagattaaaaaatagaaagtagccagcttcccagaagtcttctgtgtgcaccttctaattaccatctctgtcatgtgtcttcagacagaagcacatataaaaacaaggttatgtattgatcaaatgatgaaaatgtgtggtcagaggcttgcattttccctaggagcaatggctcagtatttgctaatccggtgttcacagtgactttacagaacataactacccccaagtaatgggaatcaactgtatttttattactttggtgtacaaagaactttgagctctccatggcttgccacaacaaaagacttcctaggcaaattgtctactgctttgttccaagtgggggctctacttgaggctgtgggaccaagacaaaagaagcagcctctatgtggattaggccccttctcctggcagagagaaagcacaaaggagctggcagaaactcacagtgcaaaactcactatgcatatgctacatctgctcatactccaataggcaaagcacagctgacagcaaacccaaagtcaatgagacagaaatgtgtcttccttccacgggccgttctaaaattgcaaggtaatggacaggagtgtcctcttaaaggaaagatggaatgaatagttgtgaataataatataacccatcactactactcctgttttaattttttgaaaatgtttagatacatattatatgcttgtttaatttaaaatatcaaactttaccttgctcaggctctgcccctccacactgggccactcaaagatgcccaacttaccctacttgggctccaacagccatatcaggttgcattcgagaccagcctggccaacatggtgaaaccccgtctctactaaaaatgcaaaacttagccgagcgtggtggcgcacacctgtagtcccagctactagggaggctaaggcaggagaatcgctggatgcattgatgccctcttcaccctgcttaggctctgattcctgacacaagacagctctgttctgtggaacccctcctcactatgcttggcccaactccccacagccgaccactctaacttctatgtatcctcctcatctccttgggctcagaccctccatgtctggctacccacccccatagacaccctcctcaccctccttcagttcggacagtccacatcaggcctcttccctatggagacagcttcctcactttgctccagctctaaggctcctccctcatctgctcccctgcctggacactctgctcaccccactcaggctctcattctatgccagtctgcccctctagccccagggggatgcctttctcaacatgggcaggctggtctccatgctatgctgcttcttgcctcttcactgggcattctcatctacccctggctccagcacaccaggccagcagccctcctacagagacaccctccttgacctgttccagctctgatgcccacacggagccagccgtggctcccttccccttggggcaaacgcctaccttgctaaatgtgcctatctaatggctttaggactgactagttcagttagtaaagaaaaggagacaaaacaaggaagagctacttttcctttttgtaaaaatatgtattgtgaaaaacaccacaaaaataaaaatatgcatgaaacattaatgttcagtctaacgaactattacgaagtgaccactcattaaactatcactgaaatcaagtaaaaaatttccaacactttctgctcctttttcattcttttccagtcacaaccccttcctatgctctcaaaggcagctaatggtagtgactttctttttcatattttcaagatcatatgtattcccctaaatatgtttttgtttttgtctgcttctgttctatatcaatggagtcacttggaatgtattcttttgtgcctggctttttgtgttcaacattatattaatgaattccatccacattgttttgtgtagctgtattttgtcaattttcattgccatgccatctattgtatgactacacacatctctactgagttgtttatagtttgcagctgttaagaataaagctgctgtgtgtatacatagcatgtatgtaataacgttctgcacgtgtatcccagaacttaaagtataataaaaaactaggattttctaaataaaaatgttatttatatcaacatgtaataagtttattacgttaaatgaattaataaatgtttttaaatgtcaaaaaaattttaaacaatttactcatgtaaaaaaaagaataaagctgctatgaacactctgtgtgcatttgctggagcacgtgggcaggtgttcttgtaggttatacattcagcatagggaatgatgggttacagggtatgcatatcttcagcttctcaagctgataccaaattatttcccaaagagtttgtaccaattcacagccttgccattggtagttgagagttcctattgttccataaccatgctgtatgtagaactgtcacaatcttttcatttttaccatcctgctacgagtatggaaatacatcactgtggacttaatttaaatttcttgactactaatgaggttgagcacctttttagatctttattaaccacttggctatcctctctttgattttcttttcaaatgttttgctcattgttctctggggttttctgactttttcttgctgatttctactggagtcatgtctttcctcagttatatgtattatgaacatcttccaggatcaagggtaatcttctaaaacccttattggcttgtcttttaccttttgaatgaaagtttttatcacgtgcccttcctaccccaaagacagaatcaggaatcctttttctatgttcctttcctacaatacaataactcgctacaatacaatacagtaactccaatatctgaagtctttgtggacctctgctgttggttgtttttcttgatttttttcatcttgttttcttaagatctgtgtgattttttttattgtgagagtacatatttaatggaagtttatgtatgtaacaatactttgtggaatttcttggattcctgtgtttaaaggagaattcttccgaatcaacttgtcctcaatttttccctaacaactcatgcaattttgaattaaattcatagctttagatttatcagaccatgcacatgtgccaattttcctactctgctcttatgaaaggaaacaaggttgcagttacaaattctcagaatagtctttttttt

SEQ ID NO: 1562239 - DNA, 4001 bp, Homo sapiens
tagtacaatacaaatacttgattattagcatttgagagctgtgcaattatgaaaatccacattttgagaaatacttacatgattaaataagggtggcaaaaatagataacaaaagttgtttatattaaaaggattgtttatattaaatatggagagaaactaaaagataatgcaatgaaacatcagttaattctaagcaactctttttaacaatatattttttcttttcttttttccataaaacattttgtaattagaaagcagaaataaatgatatctttcattctatcggcaagaacacaagactggttatgtgaaaggaggaggcgtcattcctgcggaagccctatcccacatgacgaacgacaaggccaggggcaagcaaaaagaggaaggactctcttgctctgctccgacttggccagtagaggcagtgaggagctaaagatcattccttctttccttccttcactctccgtagacagctctgcagggaagtctgtgacaacctggccagacatagggctcacgatctgatcagagtcatggcaccccagactctgctgcctgtcctggttctctgtgtgctgctgctgcaggcccagggaggataccgtgacaagaagaggatgcagagtaggtgatgggctgctggatgggtgagggggaattgggtagggggaatggagggcctgtgtccagtctgagtaggacctaggagttggaaactctctgcatatccagctctgaccacaatgttgtgtagactctggactgtccctaaaccatggccctccagccccttagctggccctgggaatagtaatgggaatgaagaagaaacctgcatattttgctgttccttctcaatacttagagagaaatggcacatcccatagtgaaaggcgcaccagggctgagaatccagtggggaaagcaagacaattattatttgatttatgcacatttgtgaggagtaaagattcagaagtggttatgacggtaggtgtaggtgtagaatgggtataagtgtagggaaataggacataagacaagcaaaagttggggtacacagagccaagttaaggttatcatcaaaggggcaaggagagtggtggtggaaagggaactaaagaaggggcaggaagactagagacagtgacagtgagcagaagagagggagagacaagaggcatgttgatcctcatctctgaattctactattcagagactaggagagagtttgaaagatgtctcatgcttctttgagctctcaggatcagactgtagattctttggtggtgacttcaccaaggccatgactagtaagggagatggagttctgattgctggtgtgtggagaaggtccaggaagcccaggcattgtggtctaatggggtaaggtgtacagtggagagacaggatttaaaatatgaccaatcactaggatttggtgatgggcaggaaggtagttctatgaagaaggaatccaggagtatcatgactgagacctgggttcaagggtcttggaggaggcttcagcttgagaaaaatgttctctaggaaactgcgtttatttaccgttctattctccttgtcagaaacacagctatccccagaaatcaaagtctgccagcagcagcctaaactatatctatgcaaacacttatgtgaatctcaccgagattgtcaagcaaataacatatgctgttctacctactgtgggaatgtttgcatgagcatcctgtgagtgggagagtgggctgggatgtgcatcctgcttcccaactcctctatccaagactgtgcccacatccgaagcacaaggacctcaagtcaccagcataagaacatcaacaggaatgccgccctctctactgtctgaaccccttgtccctgtcaaataaaccagaacaaatgcccagggatcctacctcttttgctgccactacagatgatcattgagagctcactgtggcccctacagatgccccacttgtcttgcgtcctggtgttcaatttctctccctggctatgcttctctaccctccctctccctctttggcccacgtatccctgccagccctcaggatgcccagccccttgctgttttgctcactgaaccagtactcccagggggaggaactgctcatgtgcagcatctcctgatgctaaggagaacatttctcaccctggagtcagaaggacccattaagcatgagatgggtggcagttagaacccgagataaagagtgggaggcccccaagcactgctttggtctccttagccttggtgcaccgccatcctatgctccccaatctctctgtaaggttcagattactgtctatcattaggataatgagtcccaggaagtccagcaagcccaaggccacaagagagtgagaggatatgatgtgactggaagagggtgtttcctctaggatcactttttcctcacttctctccattacctgagaccagaggcatcctagtgagagtgagtgcctgcaccaaccccaaagctcctcctatccagcacccaccaatatggctactcctctgatgggacccattttgggcctcaggatctgacactccagcaccttccattaactgaatagtccttatctttcccaagccctcttccttaggggctggttcattctcttttctttagatcaagaggaacactaagggatgtggaacaggtggttcatgctgctgttgctaaggagtaattggcacagagtggctatgggtcttccctgtcatcctactgtgagttggtggaaattaatcagtgtggtacagaatctcccactctgcaatcgcaactcctctgaaatgatcctggggctagatccagggttgggtcacatgtagctaactgggacatgaagccaaatgtgaagaggtttcaggaggataggccatgcccagaggcaggtgtgcagtgttatgctccagtctagtgcttcttgctgggccattcaatgaaagagacatcagagaagaaaacttccttcatcagaccagaggctgtgagccacctctgaggcatcaccgggctctgggtatctcaggcttgtcttcacctttctcaagagcttcccttggacaaggaggtcttaggaaagagatcatgatcaaccatcaacacagacaccatcagatgtactctgtgggctgtaagggcatgatctccaagagaccttatttggtgtttccttggatagcctcccttaccaagcatcctctcaagccacccccaaacatgcctactagacactacaggcatatcttgttttattgagccttgctctattgcacttcacagctatagcgtttcatacaaattgaaggtttgtggcaactctgcatcgagcaagtcatctggcaccatttttctaacagcatgtgcttacttcatgtctctgtgtcacattttggtaattctcaaaatatttcaaacttgctaggcgcagtggctcatgcctgcaatctcagcactcgggaggccaaggcaggtgaatcacctgaggtcaggagttcgagaccagcctgaccaacatggtgaaactccgtctttaataaaaatacaaaattagctgagtgtggtggcgcatgcctgtaatcccagttacttgggagactgaggcaagagaatcgcttgaacctgggaggtgaaggttgcagtgagctgagatcttgccatagcactgcagcctgggcaacaagagcgaaactccatctcaaaaaaaaaatttcaaacttgttttattatcatatctgttgtgatgatctgtcatccataatcttggttattactgttgtaattgttttgggacactatgaactgcgcccctaaaaaatgattaatggataaatgttgtgtgtgtgttctgactgctccaacaactggccatttccccatctctctccctctcctcaggcctctctatttcctgagacataacaatattaaaattaggccaattaa

SEQ ID NO: 1562240 - DNA, 4001 bp, Homo sapiens
atttacccctccaatgtgaggtgccatcattatgcccattttaaagatgagaaaactggagctcaaaccgtgtagtaacacagccagtaagagacagaatcaggattgacatccaagttcaagttgacatccaaggcccaaactcaagttgtcccattgtgcctcagtttccccagggccttgctgtgatatctggtggtggggggcaaggctcatgatatctggggcaggagtactgggcatggagttttttgggcaagagttgagattcaagttctgccagtgacttgctacgtgactgaacatgtggacaaacggctttggaaggtggaggtgaagctcagttttctcctctgtaaactggagtagagacaacctgtttctgagtgatgatggagattaaatgaggttctggccagtccttgatcaatgtgattttgcttgtgtccaggtgtctgcctcctgccccggtccacagccaggagccccggagccaacggccagcctggaagacttacagttctccctctgagggttgctgtggctttccatgttgtggtgactaagtccctgtgtttctgtgcagtccctgcttcctgggaccagggaagaatggtcccgtaagtctcaccctaatggcaagtctaggacagctttactttgttctcgtataatcctgggccccttctccctcctagagccccaagtcccctattccaactacccaagccacccacactggcatcatgccctacccatcccctttggaagaacaaacagcaggacaggatgccagcgtggttctcaggcttcccaggcacgaagacttggagcctgagggagagaagctcctgcccgtgctcctcaaaggagcgtgaaaatacagtgagatcgtggcttgtggtggggccgattccatggctctgggaactcagcatttgccgaggggatgacaaggcttagcagctgtggccttggtccagtttgggcttggggaggcacagactggagtgcttctccccctacatccatgtcattctgggctccaccatggctctcctctattgctctgacctttctttgctgtgtggctttgggcaagttgcttaccctttctgagcctcacttgactgaaaactggggttgcaagttgcttaccctttctgagcctcacttaactgaaaattccttatgggattgttgtgcatgttagacaaggtagatgtcccacaggctctttggtgaatgtcccatgcagcattcagggataaggccattactccacagaggtgtctcctgttcccctctagctagggcgggcgggtcactcactgcctaagagtccaacagcattgatgcccttgcagaatgaaccttccaatcagctaggcatccatccaaatgctggctcagagttaggccaagcatgtcatgtcttgagtgcccccattcataatgaggatacattaaagtcctcttcaatttgcctggtaagtttgatgaatgatcatgaatggtcttcacagaggcctcacaaactgtatacccttcacctgggaagatgctgaggcccagagaaggcaagacacatatctgaggtcacacagcagggctggccggaggcagctctgagttccagggagagaagccctgcttaggcatgggggccagactgtgcccaatgtggggccctggaggaattctgccaagggggtccttggctgcgattttacatccccaccccctccacacccaaatagtcagcagtgcattccagggcccgggcctccttacctttgagaggaggcagaggagggagaaggccaggaggtgggtcttcggtgtgcctctcatgtcccctgcagagccagctttgagcctgggaggcggacctgtgagtctttatgttccggcagctgtgaggtcactcccaggcacacacaggcacacgcacgagtacacacgcgcgcgcgcgcgcgcgctcacacacacacacacacacacacacacacacaaacacactagctttttcattccttgcttcgcttcccatcctcatggctcaaaggatgagcccatttacctgaaggtgaaactgtgaaggccaccaagggggtgcctgtccgtgtgtgtgtgtgtgtgtgtgtgcgcgtgtgtgtgtgtgaaagcctgagccagtgccagcaccaagagcctgtgacagcttgcagaggcctctccagctccttccagcccaagagggtcctagccctgctgtagttgtgaagccctattccagaccccctgtccgaaccccagcggggctgcagataccagaagcattcagtaaacaacccctttgcagagctgacccaaggtctcctaagctccgtggccctgactctgggtagccgcggcccagcctgcggtttctggcaggcagattggcagccacccagaggtgggtgtgacccagagcaaaacttccctgggcggcctgtttgctcttggcaataaggggcctcccttggcctgcctcccggctctggaagggggcccgtggtgggcgagtccgggcaggctggacctactatgtgccagcgcttgctgggcaccgctagatgatggggtcaagccaaatccatttggtttcattcggccgcctctgagttcgcctctgcaggagctggaggcacaacactgacctgaggacaaggcccagagagggagaaaacagagggaaaacaggtggaagttcaggaataccaggcaaggtcccttgctcagaccaagagtgagggacactttctgatggaggtgccatttcagaaagccaagaaaagagagggtgagagagggcagaatgttccaggccaagggaacagtacgtaccaacgcctagatgtcggacatagcatgatagcctgcttattctgggagccaaagcgcctggtatgagtggagccttctgtgcaacgggaaatggtgatgtctgtgaagggtgagacacacaagttcacatcaccaagatttggggacatctactatgtgccagccatgggggcgggggacagaaagacatgggctttgtttgtagaatttggcaaagataaaagaggtgatgtcaagggctgtctggggcccccattacctccaccagtagttgtccaaacctcaaagtgatctagctggatagcagaggttccagaatgggcgattggtgaggaagaagtgtgacttgatatagtggcaagacggggattgtgagcatggaggagattccccacgggtgctgtcccatcggaagaggcaatggaaacggaaggtgaagatgaaagtgtgggatttgattatttatggcaggaagaggtggccagggtggagatgggggtctggaaacttggaggaaaagaaacagaagggatcttttaaattttgttttattttttgggattcttgtggaaatgctaatgttttagtcagaagcatgcctagaataatttacatccacagtggatcatttttaacacccctcttccttcatagtacaaaattattttcagtaataatcatgaaacaaaacaaatatttttcatgtatgaattaaaatttgcacttaccaaacaaaatcattaccattcacagttcacactgttttactcttttaaaaactgtaaatacaaatcaaaactccaagtagtttcgtaaaatgacaaaattgaaatacccttatcgtcatctttcccatcattctgcgttcatagttgatttcactctactgtttaaacacagaaatacagctgggccggtggctcacgtctgtaatttgggaggccaaagtgggagaaccacctgagatcaggagttcaaggccagcctggccaacatggtgaaacccgtccctactaaaaaaaaaaatacaaaaattagccggacgtggtgggtgcacacctatagtcccaagtactcaggaggctgaggcaggagaattgcttgaacccgggaggtggaggtggcagtga

SEQ ID NO: 1562241 - DNA, 4001 bp, Homo sapiens
caacaagagtgacacagcaagtgagcagctgggacaaaccctaggagtcctgttttcaaccctcagccccaaactgaatcttctgagttaggcagaatgtgttaacaagtagcagaataaatataacaacagcagtaatcaccctttatatctctagagtgactttttccatgctttccccacactcttaaaatgttacagtctgcagggccctcatgcagacctctcacctgaccatcccaacaggtaagaataatgcaatgataagacaatgagataagaggagtagggattctccctcatttcacagaagaggaaactgaggcttggaaggaggagggcggcttgcctaagatcatatagtaagcaagttcattctgttagagcacagaagggcctaagctactaaatagcaattcagattcaagaggagccctaggtttagaattcctcctctctccacttaactcagtgcagcaggcaccctcagttctggcagaggaagaagactgaaagtgggcagcttgaacaaagcctcagttttgccttaccagttcgggattaaagggcagccagtggccatctaatctcagattcaagattccaaatccccttggccctgttggaaggggaggacccttagctgggggagagggggtcataggaagtagaaggagcctgagggctccccagttgggtccagcatatctttctccaaaaagtccaagaagtttaggcgggatattcatttagctgtctcaaattctgtgactctccttgcaggttgtgaatgagctgcaattctgaactgaggatctttgcgagcaggaaaggacttctgagatctttcctgagcccaggcttggcactcaggcagagaggagtgggttatggcagaatagggccctgtggtcctgttttaagcttcacatttatcttcatgagccccgggtcctccccactcacgcacacccctgaggatctctttctctcctttcttgaaccatcccctcccctctcgaaggccaggtcagaccggatggcactggggttggtcagggcttgggggcagaggtcagggagaagccgactgagaagaaattagagctgcaatggggtggggagggggggaggtcaggacaggagggtagcccggaaaggtcagatcagggctgggacgtcaggtagcccttcgccacccccactcctcgggctcaggtccctccacctgcgcttctcctacctccagacctggccgagctgcaggaggtggacgagggtctgcagcagccagatgcagaggcggcagcagcggcggcggtaggcgctggccgaggagggcgcaggctggggacccggctcggggctgccttctttggtccggaaggcgccggcgctgtccttggtgctgatggcggctccgccggctacgctgtccttggtgctgacggcgggtcccggggaccctgcgggctccgagtagtcgtagacgaaccagcggaagctcagtaactgcacgaccagcgagggcaggagcacgaacagcaaggtgaggctgaagtaggtgtgttgattctgcaggtagtaggaggccgccagccacaggtccgtggcaccgtcggagaagaacacgagcagcgcgcacagcacccagcagcagtcccgcagctcgtagcgcggccccgggccgcccgccccgacgacccccgggggcccggccgccgccgccgcctccccgcgcccgccggcactgccccgggctccaccggcagccccctccgggtccgggctggccgaggccgccgctccatccgacttcgcggccatgttggcggagagggaggcggggagcgacttccgggcggcggaggggggtgcggcgtggggaggaccctgcgcgggcggctcctcttcctccttctcctcttcttcctcctcccctccacttcaattattcattctcctcggcgccgccccgccccgcccccacccgcctgagctgcggccgaagggggggcagcccccgggaatgcggaagcaggggaggcggggcgcaccccaggtcaccctctccctccttcctcggaggcgcggggctccaaccccatgctttctgtctctcatctcccctcggactgcacttccttcttttttgtttatcgcctcccccttcccattctctccacttcgtttttctcctgtgttcacctccagtggcctgggtctgacgggggggtgggtgggggacttggaagaaaggagctgggggacttgggcgggccccccagtaaccctttagcagtcactccatgctaacgctcatttccagtttcctgagtgctcacatattgttccatcccctcctttgatcttgaggggtccccttttcttattgtcttcgttttgaagctgagaaagctgcagctctgagttgctgtctcttccttactctccgctttccctctctcggggactgccttcatctggctacagccctagtagagtagggggagggaaggggacaacatccaacatcaagaggaaagggatgggaggaaacaccgggtggaggaaagagcaagtgcaaaggcctggaggcctgagactggagggcatatcttcaagcaagtctggatctcagatccaggggaggagaaagatggggaagatagggctgcagagttctgaggatgagatcctaaggggccagaaggtggcctttatccagcaggcaatggggaaccactgcagtatttgagcaggggagttatgtggtcacatcaggatttagaaagaagacccagcagccagagtagagaagcgatcacaaggaagcagcctggggctggtgagaccagaaggagattatagcagtaacctatgagagggggtggagttcccacacatcctggataccccaagctcatttcccatctctgcctttgatcagattggatgtatccaggcatttattatacaaacatccatatagtagtgtctctttgcctggcactgtccaaaacactacaattactaactcattctaccctcacaatttgtgaggtagctccttttttcctcccattttacagatgcagaaactaagtcacagagaaattaatttgttcagggtgacacaattagtagctacagccaaattcatgcccatcatctggctccagaataggctttgctacccttcaaggggagggagagaggaggggcaaagggtaggggttgaagaaagaggagctgaggaagggaagtgggagaaccaacctgcctcagagtggcagggaagagaggatgaaaggagagagctgccctgggtcaggaaggagaagccaactgcagtcctgcagcctggcatccttttcatgcccagggactgttttggtctcagcatgcttaggaggttggggtaccagctgttgcccaaggctgaaaacagaggggaaagagttagggattaagggagttttccaggatggattcaaggctgacagttgcctattgacaggcatgtttagtgagcaagggtgtttgtgggtcgggctggaaggtctgaatcccagtgtaatttagaaaggaatatctctgatttttctttctctcccacaaccctaggcagggagactaatgaagtgcacagagccctggatggtagcgggcaggagagaaactctggccccagccaccctgagggtcctcagtcagttcttggatgtgtctggatctcttccttttcactggtgtctggataggatacggcaaagttagagtcccacttctgggccccatccaagtgaaggcagcctctctacttcccatgatgctctatatcccaggatttgcctattcaaagaggcagcagaagacaggtttttaggtcggagactccacagccaggaaatctgggtttaaaacccatgcatcagccaggcacggtggctcacacctgtaatcccagcactttgggaggccgaggcgggtggatcacg

SEQ ID NO: 1562242 - DNA, 4001 bp, Homo sapiens
gcctaagagacatagcgagactccgtctctaaataaataaacaaatgaagtaagatgatgatccagaaaacagtacctcccactgaagaaagatatgatagcaataataataataaaatcccagatgcagctttccagcaagcctacagaatagccaggtgtgacagcaacaaaaataaataagaccccaagaaggactattcaagaagaaagatgactcttgatagactacctggtaaaatagagtccgggcgcggcaagatgtaaagtggaaaaagaaagacagccccagggaaaaagacaaaagcagcacaaaaaacaaaatcacagtacataacctgaatctacacagtgtcaatagtcaactatcctatctgatttttcagcattttaaatctgtatagtcaaagccctgatcatttaattttggatgcccacaacgcaaaagtacagctgacaaacttgaggtgaaagggaagaaaagctaagatcgaccttagaaagcattgagtcaagggatacgttacacaggcgatggaatgaaaaaggcaaattacttagttataaagcttaccaataaaaatatatatctagtgatttactccattaagagtatagagggagggctgaataggtgactaaatcctctcctattccagctagaattcaacagatctaaaagtgataacgtataagtatgatacttagagacagaaccaaaacagttaaaggtggagaaatgggatgagaaggggtagagcaagaactgttgctttttgtttaacccacgtgcaagtaaagttcaataaagttcgattaaaattttacaaaggaaacaagtattcaatttagcagttgctttttgaaaaaaacaagaaatagtgggaatgtcactaagacaaggcttttggttcctccttggatagaagccaagaaagttaaaaaaaaaaaaaaaagcagaaataagttcacagtgacaggcaagcactgccttcaaaaactaaggagtgaggtacgcgtgatgtgcctctgaacgtttccaatccagaaattctaattaagagcacaaaatcgaatccgcatggaatgacgaaaacaataaaaacaaaactcaataatggccaaaaatctacttacgtattaactaacaacaaaaattgtactgctcaagtacatccagtaatcttgaaattttcaacaagcacccaccccgttcagtagtcagggcacacagagaagggtaacttctcagaattctatagcgctcatcctggacctgacatactgctttcagcgtccaatctaaccagaacaacaaatggtcctgaacactaggagaaaacctttccggcacaattggtaaacaacgaaaaggtcgccgccagggattcctttacaaggttgtcaaaaagctggcctccgaatccgtgcatccataacccgctagctcagctgacctggcatgcattgctcaacaacagcctctgaacctcttccgagacccaaaatgcgcggtctggagaggaaacaaagcagtgggcggggccttccggtgccgggaaaaagcgagtaggggaggagcgaccctcctgcgagttcggaaccctataggcccttgccccgccgagggtcctgaattcctcgcccccggggtgctgaatcccacagcccgcgtcccatcgcgtgtggggctgcgactgctcgcgaggctggcagcagggcgcgagctccggcaaggctccccgggggcaggcggcggagcccatgggccgcggcctagacgtgccgggggcccgggctcgagtgtggcggccgcctggcgcctcctcaccttctcttccacgcagttgactatgatggacgggtacttgcggctgagccagcggaagaacgccgggactcccatagcggcacacggctggaggcggcggccgaccggctgacgagcgtaaccaaagagacgggagcagcggcagagggcaccagcacttcctcccacgtgcgcgctggagaacggaagtgacgtcacggcgccgccgccggggaagctgggaaggaggcttcgctggatgagggagcggcggaaaagggccttgccgggctgtttgtgggaggcggagtccggcggcggaccgggtggcgaaggctgcagctcgccctcggtggtcccagccccggagcgcgaggccgagcgcgtctgagttgcgggggctcacgggcgactgctctgccggggctccgccgggatctcccagccccagccctccggctccctgggcacagaatcgctgcgctctgcatgcccgggaggaggtctcccttgcccgtttggtcacctcttgtttggaagaaaatgtctttttttgcctctatgctcacccgtctcaatctagggtagaatcgaagcatccaaacttactcgttacttccatttcctggtttctcctagttttgtgctgcagtacgtacctggactatcaaaaggagcattttaaagcattttacagtaataatggctgctttgcaccaataatttgattgttatgcaaataaataattatgatagttaccgaatggaatctagccggtatttagcatccaatacaatcttccagctacaattacgggtataaaatagttgctaatatgattttccagcatttactgagcctttacagtgtaccaagacattgactaagggattgtcctatgtaatcttcacttgaaccttgtgagggtactgttagcaccctcgtgtaaatgataagaaagccaagttacagaggagttaagtcacttatgcacatagcttctgtttcagttcaagcaaaggtcatttttaatccatccttgttctaacacgatacttttatcttttgttttctggtggtcccaaacgaattttttccatatgaaaggagaggtctggaagaggaggtatatttgtccgtttgctcaagcctggaagtctccctgaatcccctcttggtttgacacacatcacacacgatgctaaatgctcacctcatgaggcctctgtgaaagtatttcgccgagttacctcacaggcagtatttattgccccctcctctgtggtctgatgactactttgtttaaactactagtgtggaaattagagaaatagtcatcccgtgttttacttaaggatagccaaaactattccaaagtattatgtctatggtgaaattcctccttttacctggaagcagcccctctggtttccctgggaggtgctgttataggaacatgtacaccataggcagttcagggatagacagctggccaagttgagccatttagaatccttaaccagcattttggcgggttgggagggtttattgttttgtttttgttttttcagacggagtctcagtcatccaggctggagtgcagtggcaagatccaggctcactgcaacctccacctcccgggttcaagcgattctcctgcctcagcctcccgagtagctgggattagaggcgcctgccatgacaccccgctgatttttgtgtttttagttgagacagggtttcaccatgttggccaggctggtctcgaactcctaacctcaggtgatctgcccacctcggccttccagagtgctgggattacaggtgtgagccactgcacccagccttaccagcatttttgagctttgaaccataagaaatttaagactgcatctttccagtgcgtgaacgctaaaagataagaattgggacttgttgccagtaggcaatgagagaagcagggttaattccctggttccagttaaatccctctcttcctgcagtttgattaagtctgtcctttgattctgtgagccaaatttttttttttttttttttttaagacagagtctcactctgttgccaggctggagtgcagtggcaccatctcggttcactgcaacctccacctcccaggttcaagcgattctcctgcctcagcctcccaagtagccgggactaccaatgtgc

SEQ ID NO: 1562243 - DNA, 4001 bp, Homo sapiens
aaatcaagtgttaacacataatgcaaggaacacataaccagggtgaaaactgacatggtctaagaagacttatgtgtggcaaaaagaagtggagcctccaaaagcccaaatgcagaatgtatgcccaaacgtatggagaacggagggaagaaaacttaggagggaaggggctgcaactgaaggactgttgggagctattatctgactctccacagtgaaccccaaatatctgagacaggtctcagttaatttagaaaatttattttgccaaggttaaggacacacccatgatacaacctcaggaggtcttgacaacatgtgcccaaggtagtcgggggacagcttagttttatacattttagggagacatgagaaccatcaatgtaagatgtacattggtttggtccggagaggcgggacaacttgaagcagggagggggcttccaggtcataggtagataagagacaaacggctgcattctttcgagtttctgattagcctttccaaaggaagcaatcagataagcatttatctcagtgagcaggaatgactctgagttctgtcctttgtccaccaggaatttccttgtgggcaaactgtgggggaagtatgtaactttttttgtcttagaagctatctttttcaggaatagaatgggaggcaggtttgccctcagcagttctcagcgtagctttctccctttggctcagtgatttgggtgccccaagactggttttccttttacaccacttaccttcccactgttattatgctcagccagaaaaagcaagcaaaggtaaataaagtgctgggccttttccaatcttaaaacacgatgaaccgtatttggttacacctgagctgacacacaaactggctaaaaaagtgttccaagtaaacgtgaagtgtcacttaacagttttcacatgagtgcgctctgagggtttatcccaagccataatgtcacaggagatgctaacagacttggaaaacgggctgcaactaccggggatgtggagcttagcctgcagaaccttggactgcccctctcctagagcagcccctgctgggcggaaaaaggcaagtcgctcaacccctgcggccatgtccacccggctctcctacctccccttccccaaagcaaatccatgatcatgcggtggggagagacgggcccaaactactctgagcaatcatttattcacttcttgagaagcccctgtcttcgacctgtcaaatctcccagaatcgtcgcacaacctcaagttttatctccctgaagctggcggaagagagaaagtttccggttccagacgcagcttcctggaccgttccttccccgtcctcctccactccagcccgcgccggccgtcccgggactccgctcacctttattatcttgtccttttgttctctgcaccgccgcaggccgggacgtggggtacacacaacccgggggaagagggaaacacaaagttattcaccagagaactggtctccaacgggccgcgagctccgccggccccgacgcgcggtcacgtgcgaccccggccccgagaccccggtcccgcctgggcccggcctccgcgaccccgggctctgcgttccagccccaggacctcaacccagaccccgcgcctcggccccggccgcggcccctgtaacccggccccgctacctgggtgtccacgctggtggccgacatgcttcatgaacaactagacgcggggccggggcgcccgccggctcgggcctcccctagaggccgggcctgtcaccctagctcgcgcggccccgggccccgccgccaattccccgggcgccggccgggcggcggcggcggctgctgggcgcgcgggcccctggcgaggcggcagcggcggtgagcccgggacgcggacgcactgaggaggcgtcgactccaatggcggcggcggcggcgacagcagcggcgacggcggcggcaggggacgagactgcgcggcgtcagcgtgcacgcggggcaggccgggagcgccgcgccgggccgccacacttcgcgcctgcgcgctcccgtcttacgggatggatttcgctctcaggtcccagtctcgtgcggcggggcggggaccgcagccggctgggcggggaagccctgagccggggaagtcacgtggggcgtgtccggaggcgccgcggggcctggcgggaaggggctggcgggctgctgccaggtgtacagccgcccacacacaccccggccacagccgcacccccgacgcgctaccggcactgaggcctctgtagttttccccaaggtccgaagactaaacgctgttctggtccgacagctgggctacgggtctgtccggggtcggtctgcccttcccccgcgcgcaaacacctgcccgcccagagctccgagcccccgcgtgttccaggtcgcgcgcctcggcccttgccgcgggacctgcgggctttgttcgctttgcggccctggccttcagccgcagcggagccctgggcccggtcccggaggtcagctgttgtgtggatgcacccctggacctgcgagaggctcgccggcttataaccaagttctcatgttagattcttgaccccgatttcatcaccaggaggaaaagcagtgctctgtgccccagcctaggccgggccaggggacttgtcatctttgttcgaggatggacagccccttcttagcagcaactgtgcaaagagagcccagttctcagttcctaacccctcagcatccccaacctggacgcccttctggtcaaggtgttgaatttcgctccctgcagccagtatccaatcctgccacccttgtggctaactccctacagaggcttccaggttgatatttttctttccagctctggcagctgtaacatcttcacgtggcctggatctgggtcctgctaaaggagaaagacctggaatggggtgtcaggcaggttgacgtcaaatgagtgttttccacaaagtgggcccgggcagatgcgctaagcagggtgaacagtgacagcagggacggcaatggagtcccaagacggctccaagcctggacatccgcatcagtggggtagcagacagcctctcacactgctgcaggaggaggtggaaactgcccccagcaggccggtcagccacagagaggactgctgctccaagttgctccaggtctccctggagccctgcctcgcctaaagctggggaaagcgggctgggcttgtttccctggaacagagctgggggatgtctggtgccctgaggatgaatctggatcccctgggactttgatgtgtttgggccatgggcagacatctcaggccaggatgaaatctgtgcatttggggtacatccgaaaatgaacagcacgtttccaggatggtggcccacatggagaagatgtgtggggattgtagggacagtggggtccctgggggcaccctgccacctgcttctgtgtgataaggcctgcgcatcctgggcaggccctgagtgcctgcttcccaggacactgaactgtttggcggccaagactgcagcaagggggtgtctgggtggtcagagtagacactcggactcttggagcccctgtctgtcttctcacccagctcccatccctgggccaggacggtgcagtggtcaccactggagttcagagcctcacagccagttacagggccttcagcctcaggcctactttcctcctccgtggtgggttaattactcccctttcacaggatgagtgtgtggaagaaactgggtatgcagcccttggcgtcaggccagggctctgtcaacactggctgttacctgctgccttcacccacaaatgcccagccagtcacaggaggcagcactggccctgcgggaagtggccactccgagcttaggggccttcttagatggctgagtgccggcaatgcaggaccctggaggtgtttcagtttcctggagctatctcaacaaagtacccggaactggggggcttaaa

SEQ ID NO: 1562244 - DNA, 4001 bp, Homo sapiens
ctgcctccctgatctatagcgctccaattctaaaatggcttcaatataacaagcactgcaagatgtgaaatgtacaaaagattacagggtaggcgtcatactccaggggctggcaatccataaatatttgctactgatgaatgaggatattcagtttgaaaaaaactaggtgtatagtctaggccaaatcacctcatttctcataaagacttcatctgcaagataggtgaatggtttcttatctcattggaaggacaggccaggaaaataattctgcagttgctacaggattattagccttccattttgaaagccacacttaaatttctaacttaggtccaataagattgacaggttttacactcacacaccgtgtgttgccaaggacagggatccaagaaaaatgagggctcaaacaaatgagatatccctaagtaagaaatagggtacactggaagcagtcaagaagaaattcaccaagaacaaatacttatacacatttccaaatgaaaatgcaaaagctgcagtgtccaggtctacaaactgcatctgtgtctggcttcacatgaactgacagaatgagaaatgcagacaattttcatattcttataagtgcttcacctttctcttttggttcccgaggctgattttatgttcatagcatcatcttgccaaattccatctcccacacagggcaagcaaaatcaggacctgatgctatctagccttaccaaagagaaatgcaatgaaggcaacgacaagaaacatgtattttacagaaaggttggcaaattgcttaccaaggctgccacctctgaaaaccccattatatgggagttctccatttgcggcaaagatgcactcaccttcccacctcttcttccctccgctccccaccccccgaccaggaagccaccgggcaaatttcagaccgaaaaacgtgctaacacacaatatgggggaatttggggtaaagacacaaaagaatctggcattaaatgacggtaaatactgtgagaaaatactccgattctcaccccctgatattttttcctggggatccggcctgactcagtaaccggctccaacaaacagattttcttgattcaaacccaattcccttcctagggaatcttgggtcctgccaggctccataaccagtgaaggatgatgaaatggttttactgcaaaatgggagggggttcccccactgctgtctcccaaggttaaaccccttactcatccaggaggagccaaacacggggactggggctagaaaactcatccgcgtttgattaaattttaatttctggaaaccagaaagcacggagcagaggtgacagggctgaaggggacgttcttgccgaccaagacgcagggaggggtcgcgtggggcccgaagcagatagtgagggagggtccgggatccccggctccgctgtcccttacggcacagtacggagttgcaccccgcccggccggcaggacctcaggcggcccgagcctctccaagaggtaaagggcccggccccggaaacagggaggggccgctgcgaggtctggcctcgccgccggcggccgcgcggagcgaaagaggcagcgcgccgctaccccacggggcccacccactgggccgccgtcgtcgcagcagccagagaggggcttcgagtttgggcccccgggggccccggtcggaccccgcgccgcactcaccgtgggagggctgcagggaacaaagacccttccgagcgaagctccgagcgagatgacctcttccttcctaagcccactactcaggcggcggcagcggtgcctgcagtggctgcagcggcggcggcggcggcgactaccccggctccggaatcggcggcggcggtggcggtagctccacttccgctccgatcgccacttccgctccggtcctggccgcgccccgccccaaaccgtgttctcattgggcaagcgaggcacggggttgccacggccccacgggaggggcgcagacggaagggaggaggaagaagagcgaaaggcagggttgcaggggccggggcagggcggatggccgggggagggacccaggaggaggtgggcggagaagaaggaaatggggcgggggagcgggaaaaggaggtgggaggagagagggcggagctgggggtggtcaagatacgggctgtgtgggaataaggaggactaggagtgtggtctggatggggattgccctttctgctgggactggaaacgcgccagggccagtcccggagattcgaggtttagcagttccccctccaccccgaaagtaatcctcactgggtcggaggccgatgtcagtcctcttactgtgtgctttggtaatgctggagccagggaagaacagaaattgctcatccctcaatgttcatttaatcctttcaatccttcagggtacttaccttttccttctttggtagactgaagaggccacgtgaagtgccaggaatccaatgcacaaacgtctttttaaaaaacctgtgtagggtcgagcgcagtggttcgcgcctgtaatctcagcactttgggaagctgaggtgagaggattgcttgaggccgggagttgtaggctgcagtgagctatggtcatgccactgcactccaacctgggagacagagtgagaccctgtctccaaaaaaaacccacaaaaatctgtgtacatgatttcttctttaagatgccccctcgttgaggaagttcagggaaggaaacaggcctccatggctcccctcccctccatgactgctctcacaattaccaacattctactcctctgaaggtagttgattttgttttgttttgttttgttttgttttctgtttttgagacagagtctctttctgtcgcccaggcagtgtcacaatcttggctcactgcaatctctgcctcccaggttcaagcaattctcctgcctcagcctcctgagtagctgggataacaggtgcatgccaccactctcggctagtttttgtatttttagtagacacggggcttcgccatattggccgggctggtctcaaactcctgacctcaggtgatccacccgcctcagcctcccaaagtgctgggattacagacatgaaccacctcgaccggcttcaaggtagttgatttttaaactcagtccttcaaaatgcctctcgccttccctctctcctgttcatttattctttcaacaaatgttgaacaggctttttgcttagtgctggagacacagcaatgaacaaggcaggtggggccctgctgtcttggagtttgcagtcgggtaggagaaaaagccaagtaaataggcctttgccgtcttgcctttacccttacttagctaaatgacagacttctaattcaccatttggtctcagcctcgcccgtcaactgccaagtgatcttttaaaaataccattctaatcgtgtcctgttcttgcttaaattatttagtgtgcactcagacctagatgacaatatataagttccttgagtgtgacaatcagggttctccaaaagctgcccttatcctttagctgctatttctcccccatcgtaaataccccaattcaattggatgattccttaccctcccaatatgccatctccagtatttctaagcagtttgacttagttgccaacacttttttaaactgaaaagtttctgtgtgaacagaaatctgcctctctgccttgtctggtaacactgtgtccacatttctgtgtggcaacaattggctgaagccaaggagtggctgcctgttctagactgggcatggactttcccaaatgccagggacccttctcgacctgagtctgcttttgtcacttatgttatctgtcatgtaggcatgtgtgccagtgacccctgtactgtgccaccttttaagttgaacaagattgagaacgtgttgtgtaacgtaaacagcatggttttgggtcaaaaccattggatttgaatcctggagaggttagtgcaaaaact

SEQ ID NO: 1562245 - DNA, 4001 bp, Homo sapiens
agttttttgttttttggttttgagatggaatttcgttcttgttgcctggtctgcggctgcagtggtgtgatctcggctcactgcaacctccacctcctgggttcaagcaattctcttgcctcagtctctcaagtagctgagattacaggcacgcaccactacacccggctgatttttgtatttttagtagagacagggtttccctttttggccaggctggtgtcaaactcctgaccttgggtgatccccgcaactcagcctcccaaagtgctgggattgcaggcgtgagccactgcgcctggccgcagttttgattctggaaggctgaccttagggagccactgcctcggctccacacaccccagaggagatgggggtcagaggtgtggatgcaggacaagcactggccctgggctggcctcgactgctgagtcccaggctactgtgtctgaaaatgggaaattgtaaaatggagcaggtgtaggcaacaatttggtcacaaaaggaaaatcaactggggaggaagacaagaaaagccagcgagggctgagtccggaacctgcgtcagcacccgtgagtccccgaagaggaagctccacaggacctccgcggtcagcccggctcctgggccacaccctgacattagccctcccggggcacactctgtgttggttttttaaaattctgatggctgatttcctgggtttgagctcctagccctgccaactactagctgtgtgacctcccctccggcttcaggttcctcttctgtgaaatggagacagtaataactacttcaaagattgtggtgaggattaaaaacaaaacaaacacatcccccaaaccgcaaaaccacacttcacctacagtccacagcgcttagtggagaccctagagaacagcaattactcgatacactattggctttcattgcaactcttccaggaataaaatgaatgaaatgttagttgaggaaaggatgcaacaagggggaacaaaggcacacatgtatctcatcaaagcaaaccgctttgttctcgatatgactgtgacatgggtgttcagacgctaacaccagcgttcgccagctgtgttaccctgagagtgtcatttcacctctcagggcctcagttatctataaaatgggaatgacatggcacttgtccctgcaggccatcaggaaatgcttggaaagcatgtttcgaggtgcctggggcacagtcagctgtcaaagggggatggctatgctgtccctttctattttttttttttttttctgagatggaatctcactctgtcacccagtctggagtgcaatggcgacatctcagctcactacaacttccacctcccgggttcaagcgattctccagcctcagcatcccgagtagctgggatcacaggcatgcgccaccatgcccggttaatttttgtaattttagtagagatggggtttcgccatgttggccaggctagtgtcaaactcctgagcttaaacagtccacctacctcgcctcccaaagtgctgggattacaggcgtgagccaccacgcccagctggtctactattctttaggatactgctattgtcatcatgatctggaccaagcgaaacaggaggaaagagaagtagaaatctcaccccgggagctaccgctggtccttggaaggaagaagtactgtaccttctctgcccgggtcagcaggagcctgggccatgctgacagcagctgcaaggagtcggagagacttggcaggtgtgcaggcttctgcactgtggccctgagagggtgggctaggtcgaggctggggcttctgaagtggccgagcctggtgcttcttgcagctctgaacccacaaggggagggatgccagcttccactgggcaggtgtcagctgcttacagcccggaaatagatgcctagccaggccggccagattcggtttcaggagaaaaagaaaatgaaacttctctgttcgtcttttgaaagaaaaaaaaagtggaagccaggtggatgagcaagacagagttggggacctgacttgatgttgacagggaggagctgtaaacttggcaagaccagagcgtcctccgaagaggcctttgagacagaggacttccctcaccttccccgttccaggcacagcccacctggacctctacatttttattttctgaatcagcatcagagaactgaagaaaataaaaataaaaaaaagagcatgcaccacgtggagggggatgccagggcgtggcatcactctgatgatgtgaggggctggggctggttatctggtttctgtgtttttgtttgtttttgagacagggtttctgtcatccaggctggagtgcagtggcgtgatcacggctcacggcagcctcgaccttccggactccagcgatcctcccacctctcagcctccctagtagctgggaccacaggcctagaccaccatgcccggctaatttttgtattttctgtagagatggggtttcatcgtgttgcccaggctggtctcaaactcctgggctcaagcgatctgcctgccttggcctcccacagtgctgggattccagccgcaagcccccacgcccggccccgctggttcctgtagtacttcctcctcggggactcacaggtgctacagaggcaccgtccccagctctcagtggcttttcttgtcttcttccagtttgtttcccttgcccacactaggggcagaacatttaggtgcgtgaaggccctgagattgttcttgtgtgtatccatgtgagcctctttaatgaacacctattatgcgttttccaatctcaagtgctcctccaacccatctacagggtaggggccagttctgtcttcttctcaggggggaaactgaggctagaaaggcaagatcacttgtccaaggccacacagagtccatgacagagcttgtcctgtccattccccaattgtgtttcctgatctataacacccagaagtcactggtgaatcacccttagtgcacagatggcgtggagttccccgcctcatcataaaacttgcttattaattccagagtcagatgcctggggtcagcagccgagtggttcggaatgcaagcctgggtcagcatgcttgggtccaaacctggctccgccatttaccggctgtgtgacctcggacaaattatttaacccctctgtgcctcagtttccccatgtgtaaaaggacttaatcaaaggacctagcgcatggggtcgaggtgaggacctaaggggctgatacagcccagctgtcgggctagagccccagagccatccgtagtcacgggcaccgtggtcacctcacaggaatgcttctgggagaggacccgttgcttacataattctcaaaagggccagtgacctcagaaaaactcagagccactgttctcttccagatcacagaaggaggaactgaggcccacagaggtgaatgctgtgtacaaggccccccagcttttggcagccaagggggttgagagctcagccctggaagtccctggacttggggtctgtgtctcatctgcagagggctgggagggctagagacgtctgtgctccttgcagaccccatttatgcataaggagcagcttagcggcaaatacaaatggaaagggggtccggaggtttatcctgaagctatctgtctttgcagagcgagcacctggagcccaggtcttccgccctgcctgcatgttaagtgtttgaagcaaaaaaaaagtctcaatgcccaggccggcccagactagtcaactccaacctctgcggctggggcccgagggtgagattttttatgctcctgggtgacttttcctgcttccaggtggagaaccagtaagtctggggcaagtcaataacagcaaactgcaggatgcttttattctccttttatgtaaaagcgaaaactgcaggtatcaccctatgaaataacaatagtgctctttaaatgggggggtaggtggggtgctgagggag

SEQ ID NO: 1562246 - DNA, 4001 bp, Homo sapiens
gcagcccccatgtggccatctgaagatgcaaagccatgtctgccggccccgggctgcccaggccccgggctgcccaggtctctgtcggaggccctgccagccccgcccctccctgcccactggcccctttcagttccttcatctccagcccggctctgacgcccaggccgcctcctccgccttcccgaacctggctaccgtcacttccttctttttgtttttgtaatggggtctcactctgtcccccaggctggagtgcagtggcgcaatctcggctcactgcagcctcaacctcccaggctcaaggcatcctcccacatcagcctcctgagcagctgggaccacaggggcacgccaccacacgggctaatttttttgttttgtagagacggggttctgtcgtgttgcccaggttggtcttgaattcctaaacgaacctgccgccctggcttctcaaagcgctgggatgataggcgtgagccactgcaccgacataacgtcacttccttctgtcgggcgtccccagccagagcccagcacgcttcccctttccaaacacctctcactgccctgcgctgtcccatctcagccccagccaccagggtctcggtgggctgtggggtccctgaatggaggggcttccactcccacctcagcagctccaggcctcagcatccctccagctccagccaggtgcccaccagtcacacgcaggggaagcctggagcagtgcctggctcgggccatgtgtgagggtggcaggggtgcctccagatgggcacaaggtgctctgggcacccaggagggggccggggcagctgagctcctagtctgtcatttgggttatagatgacacagtggaacaggtcagatctgtaaaggcgaatcctgccatgaatcacaacagcagtcctgagccctctcagccaatggacacagcctccccctcctccaggaagccctcccgggcgtcactgttcttacactgacagcacacatgccacctcgctgcctgacactgccctgccctcctctcagcccagggaccacatctcaatgctggacaggcccaacacatacacttggggtcaacaaaactacagtaccaggccgggcacggtggctcacgcctgtaatcccagcactttgggaggccaaggcaggtggatcaccaggtcaagagatcgagaccagcctggccaacatggtgaaaccccgtctctaccaaaattaaaaaaattagccaggcgtggtggggggcgcctgtagtcccagctactcgggaggctgaggcaggagaatcgctataacctgggaggcggaggttgcagtgagctgagttggcaccactgcactccagcctgggcaacatagtgagactccgtctcaaaaaaacaacaacaaaaaaaacctacatgacttttttttttttttctcagaaggagtctcgctctgttgccaggttggagtgcagtgacacgatctcagctcactgcaacctccacctcccgggttcaattgattctcctgcctcagcctcctgagtagctgacattacaggctcacaccaccatgcctggctaatttttgtatttttagtagagacggggtttcaccacgttggccaggatggtctcgatctcttgacctcgtgatccgcccacctcggcctcccaaagtgctgggattacaggcatgagccaccacgcccgacctacagtaccttttgaaaattaaatctgtaatactgatttacagtatttcaaaaatgtctcatactaagtgctgatagaaggtaaaatgaaacagcagccgggcagtgtggtacacacctctaatcgcagcacgttgagaggctgaggcggcagaatcacttgagcccaggagttgcaggctgcagtcagtgagctccgattgcaccactgtgctctagctggagtgacagagcaagacccccatctctaaaggaaaaaaaaagacacagggaggagagaaggtcatgtgaccacaggcagaaactggagtgacaaagtcacaagccaaaggatgcctggagccaccaggagctggaagaggcaggaaggaccctgcctggagtctccagagggagcatggccctgagacaccctgagttccagcgctggactctggaactgagaggagacacctctgctgccgcgagctgcccagcaggtggtactttcacagcagccccaggaaactaatacacaaagccatgcatcagcttttttttttttttccttttttttgagacggagtctcgctctgtcgcccaggctggagggcagtggcacgatctcggctcactgaagccttcggctcactgcaacctccgcctcctgggttcaagtgattctcgtgcctcggcctccccagtagctgggattataggtgtgtgccaccacacccggataatttttttgtatttttagtacagacagggtttcaccatgttggccaggttggtctcgaactcctgacctcaggtgctctacccgcctccgcctcccaaagtgctgggattacacgcatgagccaccatgcccggccccaacttttaaaaatattataattttctcagaaagctaatcagctggctgggaaaggtggctcacgcctgtaatcccagcattttgggaggctgagacgagcggatcacctgaggtcaggagttcgagaccaacctggccaacatagtgaaaccccgtctctactaaaagttaaaaaaaaaaattagcctggcatggtgacgggtgcctgtaatcccagctactcgggaggctgatgcaggaaaattgcttgaacccgagaggcagaggttgcagtgagccgagaacatatcactgcactccagcccaggcaacaacagtgaaactccatctcaaaaaaaaaaaaaaaagaaagaaaagaaagctaatcagcttaacaaggcaagaaaactatttgtgtacattttaaatctgagatactgctatggctaactctgacctgaaatggtaacttcaaaaaaaatagaacctaaataagaaggttgtaatacctgcttaaaataaaggcaacactatgctctcaaggaatatgatggaatctttctctttttttgagatggaatctggctctgtcacccaggctggagtgcaacggtgcgaccttggctcactaaaacctccacctcccacgttcaagcgattctcctgcctcagcctcccatgtagctgggactacaggcgcccaccaccacgcccagctaattgttttgttttggtttttttttttgagatggagtctcgctctgtcggccaggatggagtgcagtggcgccatctcggctcactgcaagctccgcctcccaggttcacgccattctcctgcctcagcctcctgagtagctgggactaccagcgcccgccaccacacccggctaattttttgtatttttagtagagacggggtttcaccgtgttagccaggatagtcgcgatctcctgacctcatgatgcacctgcctcggcctcccaaagtgctgggattacaggcgtgagccaccacgcctggccaggattggtgttaattcttaaaatgtttgatagaattcaacagtgaagtgatatatacaatcatatacatatatagagagagacagagatggacttttcttttgttggaagtttattgactattgattcaatttctttattgaaattgacttttctttttggaagctaaaaagtacaataactgtagtgaaagtttctgaacttttctttcattggaagttttttgactactgattctttatttgttataggtctattcagattttctgtttcttcttgagtcagtttggtctcgctctgtcacccaggctggagtgcagtggcgccatcttggctcactgcaacttctacctcccgagttcgagtgattctcccacctcagcctccccagtatctcggactacaggcgcacgccagcatacc

SEQ ID NO: 1562247 - DNA, 4001 bp, Homo sapiens
catctgctggaaaaccagggaattggtccaaaccaactctcaggttctttccagcaggaatattctagattccatgattctataaaaaatggcttctgagccaccaaaagagctgtcatgaagtccatgcatctttgtgccataagagaggcccttggccaccattcagagcttattgattcagattatatacacttctaacaacactggtttcacaaattctcagaccacgtagattaaaagcagcaaattaaatgagggaggggaagagctgcaaaaggtagacactctgatagaagccacagtcaacaatgttttcaattcagcaaacactgatggagtgcctaccacgtgttgggccccgtacctagtgctggggcataaagatgagcaaggcagcccaaagggtgaaaatccaggggaagaaaaggtatggggcggggagggcgggaggggggcaaggagagagagaaaaagtacaagaaacaaaacaaatacccaatagaaaaacgaaaataaaattttaaaagggaggggcaacacatctgcacgctacagttctccgcagtcgttattggtgacagagtcaccaattcagaacaggctgaaatggagtaaactcggtttaagaaggcatagagagatgtctcttgtaggttttaaaaagatctccttcaaaaacgataaaaaatggtttaaaaaaaagttttggcacttaagagggataagctggctgtgtgttcaccctggcaggcaggcgggtgtttagtgcccggccacgccggttagctgagctgccacggaattgtgcactgctttgggacactgggcaaaggcgtgtcctcgcttgccacagaggttgcacacgatgcccttccggcagtaagggctcaggtgcccctcctccccgcacctgaagcacctgtcctgcgtgcagctgccgctcatgtgggtccgggaaccacatttaaagcatgtcttgggctgccccttgtaccagctgtagcccctctcggcccccaggaagaaggcccctggcaagtgcctgaccccgccctccccctggcgcagctcgatctcgcatttgtactccccggtccagatcccaaacctgtcggtcactttcaccggcacggccagcacgtcgcagtggcgcttgagccaagtcacaatgtcctccacgtccaccgtctcgttccggaagaggatgaagagcgtcttcaagctggacttgctccgccccagcaccacaaagttctcccagcagtcctcctgctcccgcttctcctcgtagacgcgtaggaacagggccagcttctccgctgagcggaagctcacgtcgaattcgcggctgcccgggatctggatgaccgcgtagatgtcgctcgggtccatgccgatggagcgcaggataagcgctcctaccacgaagtcccgggtcgggcaggcgccctcgtctccctggaaacagatgcggacgaggaagcgacccttgcccgggcctgccgccgccgccggctcatcctggaggggccgctcggccgcgtcctcggcctcgccgggcctggccggggtcgccatggcggccgccgccgcctcggccttcttcctcctgcccgcctccgcagcgcccttctttttgcgggggtccaccgcctcgccggccggatctctccgacggcccttcggatccccgcggccagccggtgggaagtcgccgaggtccggcgccgccaggcccgcggggccgccgagcccggcgctccctccaccgccgccgctttcctcctcccgccgcggcggccgcggctcgcggaattcgcccttcttctcggctagattcttcaccacctgggcccagcccatcttctcgcggccgccgtcggcctcctcgccccgggccgcgggccgcgcggggggcagaagctgcggccgcccccgtttcctctcttcctccgcgccgccgccggtggccattttacctccttcccagcatcctccactcgctcccgcagccaaagggcgcccatcgcgcgcgcccgcccgccggggctgtgtgggtttggtttttttttttttttgaaatttgacgctaccctcccccgccgcgccctcaaaggtatcacatgcggcgcatattggccagcgccggctctgcgccccctgcgctgagcctctcttccgccagcgctcgctccaacctcacctccgtccgcagcgggatggggcgcccggaggcggccctttccccagcgcgggtttggcagcctccggcctcgctctcgaggatttggcgtttcgcaagcggtgctcgacgatttcatgctagcagctttgctaacggcccacagcccacaggcgggacggagttcggcaacatctctcccattttttcttttttgtaccttttctgttaaaaaagcaaaagcaatagcaaaattaaaacttagctttccgtttccccagaactgactgcaatgcgttattttttttcccacgtcggattatgcacgttttcaagaagaaaagttgaaagttttacagtgaacattttaccattaactttttatcattaaaattttactctgtcacactacgcctcgatccattcatcggtctttattttttgatacatttccaagtaagtcatattgcattaatttttatttttttgaaaagactttcgtcgtatttaggatgaagtgtgagtgctgcttaagttcccagtactgtgttaagcacacttcagactttattacatggaatcttccaaaaacaatgctgtaattatgcccattttacagataaagaggcaggagttaagtcacttggcggagttaataggcagccccacgtataggtagcttatatttctttctttctttcttttttgagacggactcttggtctgtcgcccaggctggagtgcagtggctcaatctcggctcactgcaggctccgcctcccgggttcacgccattctcctgcctcggcctcctgagtagctgggactacaggcgcccgccaccacgcctggctaattttttgtatttttagtagagacgggatttcaccgtgttagccaggatggtctcgatctcctgacctcgtgatcgcccgcctcggcctcccaaagtgctggggttacaggcgtgagccaccgcgcccggccggtagcttatatttatttaaccactttatttctgacgccgtggatcaagaactgtgcatcagatcctaggaaaccttgttaacaggcagattcccttcatcccaactgctggtattggtctcaggggagccactgacttgggccgtttgcactttccagtcctctcactttatatcctcaggcaccatttcctttatcccttctcagccacgcattcccgtgatcatactcggaacttcaccattaccagaaacatcaatgtcttagattcacatacttctctgttattctttctacttgcctggtcaagtttcaccatgaggagaatacttacacaaccaaacaatagatgtattttaaacaatctcttccattcctcttatcttaagccctcactccaggtaactatcacataatcaaatatctgcaagggtcaggcaggtgccttaagtagaagatatactgggtgaactggagatcgaatattctatctgaaggggcaactgctagtcaactgtagctgaatattcctctccagaagtgagggtccactgtggggggatctttcagtttccaaagagaaatctgaactccagtttcttcttttatgggaaacattcttctctctctttcgtcttctttaagatggtctcagctatatttggaacctccatataaatttcacaacctgcctactaagttccaggaaactatgagatcttaattggcgttgcactgcatttgtacagaattaccactttataacacggagtctttccatcaatgaccccacttgatttctcacttatttaggccttattttatgaat

SEQ ID NO: 1562248 - DNA, 4001 bp, Homo sapiens
taattttctgaaaatttgtaagatatttacattatgtccaattttccccaggtctagctaagacaagaaatctctgttcagaaatacagtttggttgacttgctaaggagactgggctgagcactgtgataagccatcttgcagggatacacttaagcactttgcaatcaatggatggaaggaaggaaaccttttcttctctggcagatactgagatacccatggaactaacaaggaaacaaggaagtgagacatgaagtagcttgcattgctgacgattccttaatgatggaataggactgacacccagaatgaaaggattttcataacagataatgtcactggtatgtggaaagtgcaaaagtaacgacatagaccttcgttagaatcttgacactgtcgcttaacaacagtgactttaagcgtgggttttctcatctgaaaaatgggaggagaggtttctaatccatggtttttgtttgtttttaatttctccaagaaaaaacacgggcttgttatgagaattaaatgggatggtgctcgtaccagcacagtcccccctccccgccagtcccccagcatgttacctgctgggttcttactgaggtacactatttaaacatggacatatctgagccccacctaggagatactgagtcataacagggtggggtggggaggatggtgtttaggaaaatctgtgcttttcacagtaatgcaaggaatacaccgccaagtttgggacccagtgtctcccaaactgttaacagtagcagctaacaagctgggagcttactatgtgccagattttctgcaaacccctggtagatgggttctcaaacttcatgtgcttcagagttgcccaggcagctacgaaggacagcggatccccagccccacccccgagattgaatgggtggggcccagaaagctgttttaaaatacacgctctcgctcccaggtggctggttgcactcagtctctggaccacactttgggaaacaatgcaccgggagaaaccagggacttgaaaaacgctgatgtcctcctcggttaaataaaaactgaaccccaaacccaaataaagcgaccacggccccgttttccattcagatctccacccttaatgaggaaaaggctttgcaatgagccggcaggacctcgtgagacctggtgattcccccaatctccaggctctaattttgagccactgaggcagaagttttcccatcagtgttgccccgtttaccctagattcctccctttctcctgcccgccccaaactccgcctgatggggcgggaatgcccttagggggtggcgattgtctgaacggcgtgccctcccccactgttcccttccaaggggtctcgcaaggctggagagcgcccccggtcttgcgccaggtcgggtgcgcccccaccccaagcccactccggcgccccctgcacagcgcgcccgccgcggtccccgagacgcggctccgagccgtcaccccgatttcggggccccgggcctgctggctgcgtcgcagacgtgcttgggcccgggccccggagcgcgcactgggccccggagcgcgcactgctcccggaaaagcacttactttgcaccgagcccgcgaagctctcgccctcgctgctcgcgttcatggccgcagactgggaggtccccggccggccgggatgccaaagtgggggacgctgatctacatggtgcaaggacttttccttttatttttccacaccccccaccctgccttctcccaactctgcgaggcggggaggacggatgtaaagcaagctgcacttccgctgcctagagggcgctggccgggcccggcgccccaacctggctttgcagcagcggctccccggggaagcggcgggcgaatcccgaggcccaggcccgcggagccccccaacgcccccggggagctggatggccacgcgcgtcccggcgtgctgggcgaccgcgggtggcgagggatgcgcccctgcccgcactctgcgttctccgcggacgcgattggcctccccggctcggggcgccttttgcacctgcaaccccaggcgttgggcccccagcgcggccgtgcagcagcgctgctcccgggacgcctgggtggtttgcggggagacccacgtgcggctgccgttgcggggtgggtgcgcggggcgcggcgagctccggagaaacccaggttgggcgtgagcgctgggcaaatcagcaaagcgctgggcgggtcccttgccccgctagggagactgagaggaccgcgaagaggtggggtcgtagcgcggagggacccctgctccaggagctgccaactttatcgtgcatcgcagtcgcctgaaaggcttgttagaacacacgctgttgggcccaccctagcgtttctgcttcagtaggtctggggcgaggcgtgagaacgagcatttctaagttcccaggtgatgcccctagtgttggtcggcgtccacactctgaggacagtgacctctctgctctgtccctcatgtcttactactactgtctcccccgggctcctgcgtcagccctattgtctctctgccgaccctcccaagcctcagacctctcccagcctcgagggatttgcccatagagtctgtcctgcttctgaaggtcagcattcaaattcacactcagggaggccatgcttggcctaatctaatcattctaatattgcagccccctcctcctcccccaaccactccctgtctccttcctgtttttttctttttctttttcttttcttttcttttcttttcttttcttttcttttcttttcttttcttttcttttcttttctttctttctctctctctgcctctctctctttctccctttctttttttagagagggggtctttctctgtctctcaggctggaagagtggtcggatcctagctcattgcagcctccaactcctgggctcaagcaatcccccctacaggcgtgggccaccaccctggctcactttttaatttttatttttgtagagatgttgcccaggctggtctcgaattcctggcctcaagcgatcctccatcagcctcccaaagtgctggggttacaggtgtaagccaccatgcctggcctgctttgtccttaaaaggtgttagatggaacatattatgtatctcgagtatatctgcttagatataatttagttgtatattatctgtgttctcctcccccttattttcagtaagtccctgtaaaaatggggattaaaaaaatctctttgcttcactgatgtagtccagtgacttggctggtgcctgacacatagtaggcttagtaaatatggcttgtataatgaatgggattttccctgctgctgcctctaaggcttggtttctgcctgcagcagctgtttattctcaagtgtttgtgaagtgccaggcactgggctagctgctggaggtagaccagggaggcagtcaacatgaaataatcaaatcagtactgtaaatatatatatatttaatatataatatttaatatatttaatatatatttatatttatgtatatatatattatatataaatatatacaatatatattatatataaaatattatatattatatattatatatttatatatataaaaaatatatataaaacttccttttttttttttaaccttaagttctgggatacatgtgcagaacgtgcaggtttgttacataagtatacatgtgccatggtggtttgctgcacctatcaacccatcacctaggttttaagccccacatgcattaggcatttgtcctaatgctctccctcccgttgccccccaccccctgacaggccctggtgtgtgatgttcccctcctgtgtccatgtgttctcaacattttgctagtgataagggctccaaagaccataaaatggggctgtaatagtggctgtagaactggtcatagcaggcctttccgagcaggtaatatctgaacaaggagccggggagg

SEQ ID NO: 1562249 - DNA, 4001 bp, Homo sapiens
tggtcttgaactcctgacctcaggtgatctgcccgcctcggcttcctaaagtgctgggattacaggcgtgagccaccgcgcctggcctccttccatgcttcttgattcaccccagaaggaagacgtagacgcctgaacacagacacagctgtcaaagcacgcctgccccaggaagctgagacaaaactgcaaagcaaagggagggccgatcctgacccgaccctgtgtgcgtgccccttacgcccctaaggttggcatctgacaacaaagggctttacctgcagttctccttaaagcggcactttccctccaggaagaacgggcacggcttcagagacttgtgagtggggtacaggtaaagcacacggacacccgccgagccatcctccgcctcttccgttcccaccaccatggcgttgtgatactccagagtgccccaggagctgtagtagggcgcgctcacctttgtcccactcagctcttcctcgtcctctccctcttcctcctcctgcccacctgccgcagattctggccccgcctctgctttaggaacggtctctgatccggacccacgggccgctgctggtgcctccaccgcctcagtgatggcctcccggaaagcctggtactcagcatcttcctggcggcccgggcgctcttcgtccagcgcggccaacaagctgctcttcctgacagacaccaggctggcctcggtgagctcgatgagctccttcaggtccccctgcagctggcgcaggtcagcctgctcagacgaatccaggccggcgcccaaggccagctccacctgctgcagctgcgcacggtaggtctgcaaggccgactccaggctctcctcgtccatgctgagagagggaggcgctggaccagggctgcaagaagagaagccagctgagccccgcgtctcgggaccgaccccacagcctgagggcgggcacgggcacgggcacgtcccctttccctcggggagacaccggctcagaggcacagctcccagcgcagaggtcgcagcccgggtacccccgctcaggctccgcgcttcccttccgagccgccgtgggctcgccgctagccgggtcccgcgtcactccggagccccttccccgcggggcgccccgccgcctcaccctccgccgagcccacccgccgcgcccgccgccttccaggccggccgcgcccccccgcccggcgtctcttctgtctggccagggccgcgtccccgcaaaccgcggccacctggtccccggccgggcacctcctccgcgcggtttcccagccgcagccacagagagcccgccggcctcaccggctagagcggcccggcgcccccttttcgccccagcagccgatcggcacttcctcccgagcgccgccgcttccggaagtgcttggcgcgcgggggcagccgggaagcggagcgcggaggccgctgggacgcggttcagctcattccctgaggccggcccgcgtcccgtcaggcgccgcgcggggttagcgcggggtcagcggaggtcagcgggggtcagcagcagcggctccgagggcgcggcggacgcaggtaggccgcaggctgtgcggtgaggcgcgaggcccgaggggcggcccaggactcgaggtgggacgcgggtgtgacaggagccagctttggctgcttgtcggggagcctcagacctggcggcggcggcttggggcggacgtagccgggggccgcgacccaggttcttccttcgcagtcgttccctgccagccgcgcgccgcctccaggtgcactccaggagcagccgcgccgctgctcacccgccctgtagtccgctccccccagggccgtccccgttttaagaaatggggtgatggggcgtccctacccggcgcctgcaggggctcctggggagcgcgccggtggctcgctgctcccgggtggggcgcggggctggcgctcgagggtgccgtggcccaggcggggctgcagcgagtgtgttccccgttccgcgcgcgtgaagcgtgggagcgaagcctcgggggagggcgggagcgcggctgagctcactgtgaacacccggctgggtagtcccgcgagcaggggaggggccggaaccgatgtgtatgcggagaggtcgcagtcattgctgtgagcaggacacagtggcggctgacctgggagaagttacagagggacggggtgggagagggacgaggagtcgggaatggcccccaggctctcgtcctgagcggtcggctggacgtggggcgccactgaccaccgtggagaagcccgggggaggggaggtgctttctggctgcacactgacctatgttggggtgcccagggcaggatgtacacgctgctgtcgggcttgtacaagtacatgtttcagaaggacgagtactgcatcctgatcctgggcctggacaatgctgggaagacggtgagtgcccacgcccttgcgcgcacctttcccacggcctggcggcgcccccttcggttttgtgctgtcagctgcacgttcactacccagacggaagccaaatttcacctgagacggcaggatagtcaccaccagcctcctgaagagcagagtgttgctctgtttctgtttctgtcttttaaagaacagacctgagtaaggatatttggaagccagtatagcccctccttgatgtgtttcgcctctgcctctctcctcagaccttcctggagcagtcgaaaacccgatttaacaagaactacaaggggatgagtctatccaaaatcaccaccaccgtgggcctaaacagtaagggtctcaatagcaggctgtgggtttggggccttgaggatgccgtgatattcacagtccagctggcccgtggccacagccctgtcgggcccctctcaagtctcatttgagtggcaccagcatggtttgccccatcccctgggagagctgggactgggtgtgtcgaggaccaaggtcatgagccttgcctgtttcctcctctccccagtcggcactgtggatgtgggaaaggctcggctcatgttctgggacttaggagggcaggaagagctgcagtctttgtgggacaaggtaagactccctggccaggaccacccccaccccagccctccagtgccacttctttccagagtgccctttgggcccttcctcagcagttttccttacccactctgtccctcgggttttctctctggtcctgtcccaggttcccgagtggctccctgttttgtcccagctgaacccttagctgaagttgccccaaaagtggtggtaggggagtttcccacttgggagttccctgcgatggggccagtggagaattccagggaaagaatcactaaatgccaaggcgatcagatcagagcatgtattaggggaacctgttgacagagtgcggcatcctcaggtgaccagtgagagaagggcgtgttcactggtcatgcctgaagccgggggggatctgggttcagggctggggctagtttctttcaatgttttgaaacctgaacattatgttaacaacctaaacatcttacaagtgtctgggaatgttcaaaccctggcttgggtttgagcctaagggcaacctcgctggccaagtcagagaggtcagggcagtctgtttctttctcagtcaggacaagacaaagtgtggggacctggggaccctgcactcctccaaagtgagtgcctcctttcggctcagagaccttgctgctgaccaccacaggacacagaaatggcaaagaccagatgtggggacggcaggatggctgcctctcccctgatgaggttccttcagttctagcttaacatttgttcttccatgatcaccagaagactcctcagggtctcacagcggcagtctcctattttgacacaggttttgggcatttctgagatcccagtgtggtgccccttccccacacccccaaggctgcagtttatctccttctcagcctgggccaggcactgagtccagca

SEQ ID NO: 1562250 - DNA, 4001 bp, Homo sapiens
attagccagacatggtggcgggcgcctgtagtcccagctactcgggaggctgaggcaggagaatggcgtgaacccgggaggcggagcttgcagtgagccgagatcacgccactgcactccagcctgggcaacagaacaagactccatctcaaaaaaaagataaaaaattatagtaatataaaaattagctgggtgtagtagcgtgagtctgtagcccagctcctaggggggctgaggcaggaggatcggttgagcccaggaggtccaggctgcagtgagccaggactatgccactgcactccagcctggttgacaaagtaagaccctgtctcaaaaaaaattaaaacaaccaccaaaaaaaaactgacgataggctggagacctactctcttccacataagccttgcactgctgctcgggctgcagtacagtggctgcatctccactcactgcaaactcggcctcctgggttcaaccaattctcctgcctcagcctcctgagtagccaggaccacaggtgcgcgccaccacgaccggttcatttttgtgtttttaaggagatggggtttcaccatgttgaccagcgtggtcttgaactcctgacctcaggtgatctgcccgcctcggcttcctaaagtgctgggattacaggcgtgagccaccgcgcctggcctccttccatgcttcttgattcaccccagaaggaagacgtagacgcctgaacacagacacagctgtcaaagcacgcctgccccaggaagctgagacaaaactgcaaagcaaagggagggccgatcctgacccgaccctgtgtgcgtgccccttacgcccctaaggttggcatctgacaacaaagggctttacctgcagttctccttaaagcggcactttccctccaggaagaacgggcacggcttcagagacttgtgagtggggtacaggtaaagcacacggacacccgccgagccatcctccgcctcttccgttcccaccaccatggcgttgtgatactccagagtgccccaggagctgtagtagggcgcgctcacctttgtcccactcagctcttcctcgtcctctccctcttcctcctcctgcccacctgccgcagattctggccccgcctctgctttaggaacggtctctgatccggacccacgggccgctgctggtgcctccaccgcctcagtgatggcctcccggaaagcctggtactcagcatcttcctggcggcccgggcgctcttcgtccagcgcggccaacaagctgctcttcctgacagacaccaggctggcctcggtgagctcgatgagctccttcaggtccccctgcagctggcgcaggtcagcctgctcagacgaatccaggccggcgcccaaggccagctccacctgctgcagctgcgcacggtaggtctgcaaggccgactccaggctctcctcgtccatgctgagagagggaggcgctggaccagggctgcaagaagagaagccagctgagccccgcgtctcgggaccgaccccacagcctgagggcgggcacgggcacgggcacgtcccctttccctcggggagacaccggctcagaggcacagctcccagcgcagaggtcgcagcccgggtacccccgctcaggctccgcgcttcccttccgagccgccgtgggctcgccgctagccgggtcccgcgtcactccggagccccttccccgcggggcgccccgccgcctcaccctccgccgagcccacccgccgcgcccgccgccttccaggccggccgcgcccccccgcccggcgtctcttctgtctggccagggccgcgtccccgcaaaccgcggccacctggtccccggccgggcacctcctccgcgcggtttcccagccgcagccacagagagcccgccggcctcaccggctagagcggcccggcgcccccttttcgccccagcagccgatcggcacttcctcccgagcgccgccgcttccggaagtgcttggcgcgcgggggcagccgggaagcggagcgcggaggccgctgggacgcggttcagctcattccctgaggccggcccgcgtcccgtcaggcgccgcgcggggttagcgcggggtcagcggaggtcagcgggggtcagcagcagcggctccgagggcgcggcggacgcaggtaggccgcaggctgtgcggtgaggcgcgaggcccgaggggcggcccaggactcgaggtgggacgcgggtgtgacaggagccagctttggctgcttgtcggggagcctcagacctggcggcggcggcttggggcggacgtagccgggggccgcgacccaggttcttccttcgcagtcgttccctgccagccgcgcgccgcctccaggtgcactccaggagcagccgcgccgctgctcacccgccctgtagtccgctccccccagggccgtccccgttttaagaaatggggtgatggggcgtccctacccggcgcctgcaggggctcctggggagcgcgccggtggctcgctgctcccgggtggggcgcggggctggcgctcgagggtgccgtggcccaggcggggctgcagcgagtgtgttccccgttccgcgcgcgtgaagcgtgggagcgaagcctcgggggagggcgggagcgcggctgagctcactgtgaacacccggctgggtagtcccgcgagcaggggaggggccggaaccgatgtgtatgcggagaggtcgcagtcattgctgtgagcaggacacagtggcggctgacctgggagaagttacagagggacggggtgggagagggacgaggagtcgggaatggcccccaggctctcgtcctgagcggtcggctggacgtggggcgccactgaccaccgtggagaagcccgggggaggggaggtgctttctggctgcacactgacctatgttggggtgcccagggcaggatgtacacgctgctgtcgggcttgtacaagtacatgtttcagaaggacgagtactgcatcctgatcctgggcctggacaatgctgggaagacggtgagtgcccacgcccttgcgcgcacctttcccacggcctggcggcgcccccttcggttttgtgctgtcagctgcacgttcactacccagacggaagccaaatttcacctgagacggcaggatagtcaccaccagcctcctgaagagcagagtgttgctctgtttctgtttctgtcttttaaagaacagacctgagtaaggatatttggaagccagtatagcccctccttgatgtgtttcgcctctgcctctctcctcagaccttcctggagcagtcgaaaacccgatttaacaagaactacaaggggatgagtctatccaaaatcaccaccaccgtgggcctaaacagtaagggtctcaatagcaggctgtgggtttggggccttgaggatgccgtgatattcacagtccagctggcccgtggccacagccctgtcgggcccctctcaagtctcatttgagtggcaccagcatggtttgccccatcccctgggagagctgggactgggtgtgtcgaggaccaaggtcatgagccttgcctgtttcctcctctccccagtcggcactgtggatgtgggaaaggctcggctcatgttctgggacttaggagggcaggaagagctgcagtctttgtgggacaaggtaagactccctggccaggaccacccccaccccagccctccagtgccacttctttccagagtgccctttgggcccttcctcagcagttttccttacccactctgtccctcgggttttctctctggtcctgtcccaggttcccgagtggctccctgttttgtcccagctgaacccttagctgaagttgccccaaaagtggtggtaggggagtttcccacttgggagttccctgcgatggggccagtggagaattccagggaaagaatcactaaatgccaaggcgatcagatcagagcatgtattaggggaacctgttgacagagtgcggc

SEQ ID NO: 1562251 - DNA, 4001 bp, Homo sapiens
gaagaccagagaagtaaatacaaagtacaagagaaaggaactgtacacagagcattacccagcaggaaggcattaaagcagcagcatagtggcacattaggagctcgttgctctgggtcacactgtgacatgtgaaacatggagcatgccccagcctttccaaacctccatttcttcatcattaaaatgaggtcaataacactatccactattaatgacactactattaacacagggttaatgatacatgtagcagtccttagcacagtgagtgacatgctatgagggctcaataaatgcttgcttttataatcagaccaaactgaagttggttaagtctcctctagctggaaatcaaattctacagccttactggcatcttacctgcaccctagggcttaaaagcctttgtttacttttagaggaagtatattacaatattaacaaatgtaacaaaacatagcagtaaaactatgctagtaagatcactgagctagaaatacttcattgaatagatgttttagaacctacattcagaggggagttccatgagagtgggtgtcagccaggagtaagtttagtaagggactgaaccattaaaatgctaacaaaacctcaggataattcattaggatcacaatatgcagactaaggaggaagtttacatctgaagaaaccagggatccagaatctgaagagagggacttgggagatgaaagtgaagaaagcttcttcaggtacttgaagggttgcatatgttatatatgatgggaaagactaaggaagtccagtgggtcaagagtcccaggacaaatattgtggcttcctatgaggaagactgttcttgtgctaaccaagaggtgtcccctacgtaagatgatgagttggcatctcaccagtgggcatactggaaaaccctgtggtcacttcctacctgaaagtctgcaatcctaatgtcttatttggacaccagaaataaacataattgggaatcaatagagtgcagctcctatgtgccagcatttctcaccctgctaacaacaaaaccttcagagaataatataacagctcaaatttagtctgctattacatttacttgggcagtcttattccatttgagaggcattctagttaaaggtaaataacaactctataatgttttttcttaaagataaattaatcagcccaacactatatcaaaaaaggcacaaggataatctgtcacatgattttgagtaattatgctaagggtttcatttaatcaaaggcatcattgcttttttgctctgctaggctcagaaaactaaacattgaaaaaaatcaagaaatattctaaaaatcacagccactgagaagaaagtgattcaacattatattttctttgttccacctgccaaaaatgatagagtgaatttggagctgagaaagacaaaaagaaaaaattcaagagtagaaaaagacatatgaaagacaagcatgaggctaggtgcggtggctcatgcctgtaatctcagcactttgggaggctgaggcaggtggatcacttgaggtcatgagttcgagaccagctttgccaacacggcgaaaccctatctctactaaaaatacaaaaattagccaggcatggtggcaggcacctgtattcccagttactcaggaggctgaggcaggagaatcgcttgaacctggaaggcagaggttgcagtaagccaaatattacaccactgcattccagcctgggcgacagaaggagaagaaggagactcggtctcaaaaaaaaaaaaaaaaaaaaaagccaagcatgagagtttagtgacattaaccacccaaaaccttcctgaaactccagatgtatgatttgtatacctaagcatatagtgcagtctccacccgcgttttctttttccttcaccacaatgagttgggtagcaggagagaaggatataaaggcagaagctcatctttcattcagtctatttgctgcctttgacggctatcacaattcagcacacaagaatgttagtgctcatcaccatggaggcaattgtaatgtcaaacccagaactgtggaatcacaaaatatgagacacatgtaacaggctttgggatgggagggtaggagtggagatccaaattaccaggcaagaaattcaaggcttcagaagcccttttgaagcaattcagattcttagtcatttttttttcctttcagaaaattgagacactgattatttctagttaaattaatctgttcatagaatatattataccagaattccagccttcagacccagtgagaaatgaatgcactattaaaggatatacaatcaagtatagataccttcattataaagtgtggctttcacctgaactggagaaagcaatctttgtcctagatcacgcagtatttcattgtaactctatccctcaagcactactagactggggagacaagtcaacagggtgctaagtgctatcacagaggtaatctactttatgctccaggagaaatggaaaaggagaagtggcacctacccagcccgaggggtcagagaaggcttttggaggaggggcacctgagacgaagctggaaaggcaagtagtgttggcctaatgggcaggatagggtttattctatgcagaggggcacaggggaagccaggaggaccaactggaaacccagaagactggggaatgctaacatttcagggctggcctaaggacttggggaccagaaaggggccacagaatgatgggtcagaaagacagacgggccagaaagacagaagggctaaggaggagggcctttcaaggcagaagtcgctcacagtgtgaaggaacgcaaaccaagtcagacaagggctaaaaggcctagacttaggtaaccacaaagggcctaaggtgccctttgcctgagacatttcagggaagtaagtggcagtgacagaggccagagtacagagggttaaattgcaggaggtgaggaagtagagaccatggataaggctactcgcaggaagcctggctaagaacagggagtgagctaacaggaaatactggatcaaattgtattttccagcctgaacctcttctttaagctccagactttcatctcctcttgaattcctccttttcccccaccgactacactcaatttatattctggcctccccactacccattctccatacaacagtctgggtggtctttttaaactataaatcaggccatcataccaccccatactcaaaatatacaatggcttctcactgaccttagaatagaatcttaatgccttgctatgccctgtaagttcttgagtgatatgggacctgctttgcgctccagtatcttctcatacacctctcctcctcttagtcttgtaccaacctggtctcctttcagtccttgaattcattaagaacagtcctgccttaggatttttgcccttcctcctttaccaggaactagtcctaggcccccaagcccttcccaagctctgtccatcgaggcaggagcctcttcattccctcctgtgtttgcacaggtcctgcctcacccttctcagagctccctccaccattttgtgcaaataaacacccacacaccccaaaatcacctcccatccagcagatgcaggcaaagggtgagttacctataaaggaacaggccaggccgggcgcggtggctcacgcctgtaatcccagcactttgggaggccgaggcgggcggatcacgaggtcaggagatcgagaccatcccggctaaaacggtgaaaccccgtctctactaaaaatacaaaaaattagccgggcgtagtggcgggcgcctgtagtcccagctacttgggaggctgaggcaggagaatggcgtgaacccgggaggcggagcttgcagtgagccgagactgcgccactgcactccagcctgggcgacggagcgagactccatctcaaaaaaaaaaaaaaaaaaaaaaaaaaaaaggaacaggccaccgcaag

SEQ ID NO: 1562252 - DNA, 4001 bp, Homo sapiens
catgcatacagatgtgtggaggagacctgaaaaaaggccaaaatgtgttggtcagtgagtcctgaatcaaacccagtctggtggtagatgagattttgcactatacataagtcctaaaacatgagcacactgacaccacccccccaacacacacataccaccaccaccaccagcttctacaccaccaatgtttttagggctctgcacctctaagaacaagcagtttcatgacatttcacaagcacatcacctactcacagtttgaatatccaaacaaaccccattaaaggtctagagtcaagtcacaatgaactgaacatttctcccctgactcagggtaaacaggaagtataatcttcaatcctagctgcaggttatcaggaaaaacagtggattcaaacagtcacctaaaatcaagacactctttaaaaagcccttattttgttcctgctaatgaagcccccaactcctgtagccaagacccactattacaaacagaccccaaatgttcgcaaaactcttcaaacatggtcacagaggaaatggattgctttacttacccaacaaatgttcaagcaaccgtctcatttttccacagttaggaagagagaacaggctggcagatttgggacttgatcaaaaaggaaatttttttaaacagttacatggtattattaaaaacacacacaacaacaacaacacaacccaacaactgaatatggaatgctgtcatgagccacagacatgattttatttcctctacactccatgacacaggagaagagaggaggatacaatgtataaaagggacaggaaaatgaaaacaaggataaaaggtaacattagttccttgaaaatcatgcaagagtagaaagctaagggattcagaatccttgcagatttttttttttttttttttttgcaggatgttgtccaagatctctccccccaccccccagtccccatccctactccaaaaaacttcctccaaagcctagaaaacactttcagaaacatttgctggctgtaggctggcttgcagaacactctgtagcaacctaagtcaggaaaacaggctgaacaatgtagtttcaagtgcagaagctctgtagaataagagaagaccgtgtacagacaccaccacccacctaggccccaggagctagactctccttagcactgctctgctgagggcacaattcttttgcaaacacgctcctctcttgtcaaaacttatccagccttcccagaacctctttggagaggcaaacttgcctgctctgctgtctgccatgagctctccttggagaggagcctgtttgcttaccttccattttcttcccccagcagggcatgtggcaaaagagaagacaatagtgcaggggtgggagggggggaactgctcagagagagagagaggggaagagagagggaagagggaaagaaaaaaaaaaaaagaaggaaaaaaaaaagcttcttttttggcataccaggatctagcttcaaactcttccagaaacaccatgccctggtggaaggaaaggtgtgccaggcccttgccagtttgcaaaatcaagctatggctaatggctactgagccatgtgacccaagaaagcaaaaaaattctctctaaacagttccaagttaacataagtgctctgggggtgagtgtggcacggccagccacagagaaatcacactgctcgcccacaattcggatgtctcagagggagggggaaaaaagatggttaaaaagtcgagcttacctctgtggatgcattgttaacactgtgtaatgtcaatacttataaaacatggaggacaggctcctagttctcacagaaaaagggtttggcacttcggctgatgatctggccgcctaataaaagctcatccccgattggctgccccggcaaatcggagtgtaaagccgccccggattggctgaaacacttcctgagcgattatctttgtgaggctcgggtgagcaagagccatcctgtgcatagaaaaagacaggctaagctaggccttttgcagcaagaaaaacttgggaaaggggcccccacacgcacttctcctgcaccctggctagatttcccggcacgggccagccagggcagccagcctgacctgctccaggaaagcctgaggcccggaggtccctgggaagggagtttcttggagtgggctggaacggctcaccctcacctgcccccagagaaacggcccttgtccagggaggaaggccagcctttttctagaacagtccagcagggtggctctccaaggggaaggggaagctggggagtggggagtcccggggaaacagccaaggggccagaaaaaggggcttgaggcaggcctctgagaagctgggggaagcaggcagcccgggggagccccgaaaaatcagcagagagcagccctggcttctcagaggagcgaggagtagctgctgaggggaggaggggagcagagtggtcaagtttgcatagtcattgtccccatgcctccttgcaaggcaggccagggagccgtgggcctctcgcgccctgcttagccagtcctgcaggcaaaatcaacgtgggttcctgtcgccctgccacgatgccaagggggacccctctcggtccttaccctaagaaaaacccaaagccctcctcgcaggccacatgcctggatctacaaacttcccttccctcccggcccctcccccgcggccgagacctgctaaacctgtcagttaaacacaaatctgacttccgtattagcctgcgatgccttcggcttcctgcctgttaaccctctctcggactcggggcctggctgggaaaaactaggccttgagatcgcagcgaaggcctgtggaaaaataccagctgcagctctcccggcagatgcagaaagagagagagagagccgctgtctctcagcctttgcttcccagggaggcgtgtaccttgtgaatccagggcacaggcagtgcctctcgggctgagaagccatttcaatccagagggagacagaaagatggcacgctcagcccggaaacaagagcccccattatgcgtcaggcctacccccgtaggtcagcccttcctgccacaatcatccctgtatgtgtgtgcctgggggagttgggccctcctcggtgggcagacaaatcccctgggcttcctaaggattcttgcttccatttatttgcacagagaacggcttcttttcgtcccccaaggcagatggagcagcgatttcacacacagccctccatttggcagcccccccacccccccatctctggcaccgctccccagtaaaatattaactggttgttcagagctgcttacaattctacccacttcaattgcgttaggaggtctttgctggtctcctccctaaagctgccttcgcagttggtctgtacccagagatagaaaaggaccgtaaaatgtccccagctttctcgctctctttccttcttcggcattttaaatgacaaggtgcttaattaacaggattttttaaaacagcaacctggaaccacagaagctaaataaacaccattctttagaggctggagaaagcgtccagagttaacgcagccatatgccaggaggcataactccggagcaataaagtctcccctctcctcctaaaattaggacttgtgggctttcttgtcccacacggttcccacaaagaaaacgaagagctgatggcttgctttccctgcccccccccaacccccacatggacaacagatgcccactgcttgtacataaattcttcctggccgggaatctcatatcaaacaggctcaggaacgagctgggaatcgaaactcactgtacggcagggcaggacccaggctttataaaaacggacaggatgttgctgttgttactgttttaggctgctgaggccaagctgcagggagggacagctccatggccacccaacctgacaaagctccagggctcaggacagcaggcctggg

SEQ ID NO: 1562253 - DNA, 4001 bp, Homo sapiens
gtaggggaagaatataggtgtaatgaatgagagcatcagctctgaaaaatattccctgtgaaaatgatcactcttaaaacaagcctagtttcctgaaggaaccagctggggccctgatccctggatgggacattgtagaacacagacgtcaaagctgagcaaaagaaacccactcatggttcgaaatgcaaaaggtaagtggcacccacctgaagctgggctgtcaggagctcaggagtaccccctttccccagcaggcagtcctctctgggcagacaggagccacagggaggcagaacaagaacaaaaagcgttcaagaaaatcaagggaaatcctctccagcagggcagtacctcctattccttaacagcatcaggaatgaacctgccacagaagaaaaggagaaaagaactgcgggcagcttcctgggaacacagctggggtacaggttgaaagcacgacctgccctgatatgctgttgacgctgagcatgaagcgaccttctctgtgcctgttattaatgaaaggtaatattcactgaacacttagtatacaccagagactgttacagccactgtaggagtttcacctcattctatcctttcaacaacccaatacgatagatgctattatcctctttaggataaaatcgaggaaactgaggtacagtgaagtcagcatcttgcccaaggtgacacagctataaagtgacagagcctagaggaaatgtggctgtggagaccgtgctcttacacagtaagggcagtgacggtgaactctggattgcaaggattctctgtgtccattctgagatgaatcaagattggtcataaggttttaagtgttgaatctgggtgatggagatctggtctatagagttctatctacttctggctgtttgaaatttctccgcaataaaaacttaaatggaatgtaaaatcccaaagcctggccacaccaggggcctgggaatccgtaattcttgcgatcaatgacggtccctgggacctttggaaaaaacctgtcctgtgcgtcccagccagacttcctcctccaacgcccgaacccgggggtgaccaaccaaagtgaaaccctaagatcgcggcaaaatggccaccccagatccagtctaaccttggcttgtttggtcaagccagaccgctcctcattccactccagcaaagccgaagaatagtgtggccccaagagactagccctcaaccgaccaatgcctcggggacacatggccccagggatggttcccattccaccacctgggaaataccattcccccaaaaagcttatttattcaactcccccaaaaccggggacttatggcatcagcgactccctttcccaatacccgacttcagccaaagccgaacctgtccccacccacaagaaccctaggagagagagcccgatcccccactcatcaccatccagtttcacggatgggcttcacccaactcccctggagatgcacgcccacacccccaaaataagacatctgggagaggacggcctgcgccacgccagcgcgttcccaccacaatcaccacccccgcgccacccgcacggtccccaaattcagcccatagtccagcctttcgggaccttccttttcgcgcagaaaagggtacggctgcggcaagggtcccgcgggagcctcactcaccagcgccaccaaagaacaaggggtcgctccagccaccagctggggagctcctccagcggggcgccaggactacactaccccgaatcctcggcacagcgcccggaccacacctcccaggatgctcggcgccaccaggcgcgccctgaaggccggcagctcccattggcctctgacggatccgtttctgagtaacacgctccggtcaccggagaatggccactgtggcacctgaattctccctcttttttcttaaccacgtgcataaaacacgtaggagctcccgagaagagtgcctggccctactgtgaccctccttctgagcgcctctgtctcgaaaactacacttcccagtgacccctggagcgacttccgcacccggtaccggccccgccccttggcgcgcggaaatgacgtttcggggcgcatctgttcggcttctggggttggcggaggtgtaccgctggctgaccaagcttgttcaggtgctggtttgtgttgcagcggcctgtggtctccctggctccagccgcctgcttggaaagtcacgccccatattcctaaacaccgggcgaacgtcatgtcgtataccctttagctccatttaaagccttgaaaaggccgagcagtctgcctgaagtctcacatcccgtacgaggtagacccgattctgagcccacgccctcaacccgaatacaccttttccggtgccctgagacctttttcttctttttgaaatccacgaagttattgttaaactctcatctcctgagaagcagaagcctcagtctcgggccagagcttggcctgccgtcggcttggatctctaggtctttgtccgggatcctggttgagaacaagattgcgctggtgccatctgggacgccccatctggggagctcgaggggaaggcccacgtcactcttgagagggcttttccacccgtgcaccctctcactgcccttcaccttcctcagataggctttctgaaactttgtcattctcttggaagaccaagaaaatgaccactgtctgaagggccagggagatgagaatttcctaaaattcttttgtagctctcagagggtgaatccattcccttctggtaccccgaggctacattatttattgtgaattcagttcagtcctggctccggagacatgtccagtgtcaattggattcatccctcaacatcattctctgcctcatgagtcagtcatcaccaagaaattagttgttaatacacataaaggttcagaacaacaatgcagggatgcctgtgttcaagtgttcacttgtgctggctgtacaataaagacacagatggctgacatctcttaagcctggaaatgaagacttacaggatgaggtgctgcctgaggaattaggcaagatgaggagttggaagaacacagacgagtaaggaagagtgtaggaagtgtgaacagaatctcagggtctgagccactgggtggactgtcatgaccacagtgagattttcagcagcacgtggtcttgcagccagctgacttgcatatagacagggatgctagatgtccaccgtctagatgtacagctctgtcatacagatatttggtgtgtccagcctccagtttcatctttgacagacctcagcatttaataattaggagtttccatctagaaatctggattgcctgctttctaaaacactctttgctgccatgtcctctttttctcctggcatttcccacccactccatgccatacctcatctggaatacccttagctcctctgaatccatctggtccttcaagaccaaatacctagctctctttcgtgaaaccttccctgatcactatactatagtgactacttgagactcttctaaccctggctgtacttggaagcttttaaaaatacaatgcctgaacaccaccccaagaaatgagtttgcagtggagcctgggcatccattattcataacagagctgttttcctcttgagaagggaagatgttgtgtaataatgtagaagagagatcttgttttggaaaatcagaagtttagttattggttgttgctatttctgaaccatatacctcggtagatcatttaacccagcgctctcaaaaacatgcatacatgtcacttgggatcttgtaagcagcaaattctgaatcagaatgcctgatggagcccaagcatcagcatttctaataagcttccagatgatgctggtactgcttgtcttcagaccagactgggtaacaaggctttaaaccaatcaggggctcagatctttaaattgaatataagcagctagattaaagaatctccaaatt

SEQ ID NO: 1562254 - DNA, 4001 bp, Homo sapiens
agatactgattgggaacaaaatcgccccagttaagaagcagtgcatttgggctggatgcacaagttattttttttttaaagtgtgttttgtgagcaaaacgatacacgtttaaaaaatatatatatattttcagaacaaggagacctcttaactcaaccctgttattacagaaatgagaaaattaaggccctgagaggttaaatgacttacacagagtgataccaaaaagagcctggacttgactctggctctccaaaccccattcctggccagcgttgtctggagatgggaatagagagggggagacggggagacagacagacacaggcggaacagcacgggacggagacagggcagcttacccagatggattccttcgggaagcccatcctcagatccgtcttcagaaccaccttcccctcgatccacggctccattttcatccagaggggcggcgaggtcaggagaacacgtccccggctgcctcccgtccacagacatggtgggcgactccgcgccggccctccggtccttcttgtggaccctggagtgcaagaccagctggtggtaggttctgaaagctttgccgcactcggagcagtgagtgggcttctccttgctactgggtaacttgggatccgcgtccacggagggcgcttcgccgtgggagtgtttgcacttctctttctcttgcgagaggcctgcacaactgcccttatttgtttctccaagctccttctcggaactcgaatcgtcgttgtcggtgctcccttcttgccccgattccttcacttcttggcaaatggcaacttttcctttggtagccagctgccaagcctggaaggtggtgaacggatcgagctgagggatgcatctgacaggcttcttccccgtttcagggtgagattttggtctcaagttgaacaactgcaggaagtcctccctcgaggacggcattcctccttgtggagagtctgtctgcgcgctgctggtaccgaaagcagtttttttggtgtgcaccttgcggtgctcaattagactttctttatttggaaataggaagccacaaaccatgcagattttgtaaggagaggagatgctctcggccgcgtgcacctggacgacctcgttgatcgttgctggactactctccaagccttgctgcagtttgcttctggcccccgatttgccattatgtgtccgcatgtgatttttaagaaaccaaggctccttgaatcttcttccgcacatgttacacccgtaagtgaaagaatctttgtgtgttctcatgtggatctcaacatcaaaagcgactctaaatgtctgcccacatacctcacagctaaattcattttccttgcaattcttttccttgggaggttctgttcgcacttgacttttatcaagcggactgagatactctgcttcaacccgaagaactgctggttcacagagggtaggccggtgttgcattaagacatgtttattaaggtcttctgaatgtgtgaaggtctggctgcagaacatgcaatccaagggcatatacccctcgatttggatgacatttttttcttgtgtagctcggaatggaacaacagcggtccctttcattgacaaggcatcctccatctccatcggactgccaagagagctgccaatcacttctggcccatccatgtacattaagagggattgagttggcatgtttcctgtcactttcgattgcatataatctcaaagttccgttgggcaatttctggagttggaataaggccacttgtaagacttgtcactcacccctctaacagccctgggttccaaaaaccagagcaaatatttattataaaagttcaaaagaaagtgtatagtcctctaacttcttcgaacttttaggaagctcagtgatggtgtcactggttctttccacaaacaaggcatacagggttcccaatgcctcgattcaaatatgaatcagcacaaagcattagttctctttgtctccattgaatgagtgtttcaattgagcaagaagtcaatcccagcaacctggagacaagggatttccaaaccctagaggaaaaaaaacagaaacggttagctacactcagagcgaagagaaggctggtgtgggtgagtcatacggtcttttccacgcagcagagaaggtacctaattcaattgcttcacttttaactaatatatagggcatcctgttaaacgtgcttgttaattaaatcattggcattttatccagtcagtacacttattaaatcagaatttcatccagttaaaatccagtttaaatcagtgctttaccgacttaaatctaaaatgtcaagttttaggtcagaaattgttaaattcagctgaatacattttaaatgccactaaaatgcacatgtggatgccatcaacagcctccctaaatctaaagactataagaactgtgaaaattaagatgaaaaaattaaaacactttagtaaactattttaaatccagtgtatacaaaacaatttaaaatttgtttcatatacaaacaaatctgcatccaagaaatctaagtgcccaaacacccccttagagattttgcacatacagaggtcaacaaaatgagcacagaaatacagaaacttttcctaaaatccccattcaagaaatacttaacacctcagaatggtcactcatcttggccaggggaaccctgatatattttggttcactggatattcgaaacctcaatccactgttcaaatcccagcttgctttcaacgactttctgccttcaacaagcactgggtggggcttcctagtccaaacaacaaatagggaaagacatacacaaagctcctttgtgaatgtatagatttaaaataaaatcctcaacagggctgtttcaacatggcttagtctttcatcagaaaatgggccctctcatttttttaatctacctttcacatcatgcactggccaggtggaaaattactttatttagctctgctgcttctggtttagaagctaattttcactcctggagaagaattaacttctaaagccaataccctctgcctttatggcaaacattggataggcattgtttttaaatagtcccaactacttaaaacttaagtcagttaattccacccaagaaaaccaaaaggcatgcaaactactcccagcaaagtaaccttaaaaaacaaaagcatactttactttcctccctctctctacttccttaaagagcaaggaaggcctgcaggctcagagaagccaaggaaacatctcctcctttacactccgaaatagaaattctcatactccttgttatctttagttttgaataaactagatctttaacattaagcttttctaaataagactgcagatcaaggattagggtaaaggaaagaatgtcctgaagtcttttctttgttgctatcacaatggaggatcaacacatgggctggtgaccagcttggtgtgatataatagaacactccagagacccgagttctagtcacaaccttcaagttgtcactgccacataccacatctttctattatctatttaacgcagttggttaaactataggatggcctttacagttccaatattctgtggttctggggatagagctacacattgaaaagaatattcaattactctgctaatcagaatgtgaagtgacttaggtttctatacatagaagcttaagtttcatttgcttattcaacaagtatttactgaatgctagcgtcccaggcaaggttttaactgaataacagcacataccctagaaaaacagttatcaaattctgacaacgctgttttccctggccaagaacaaagactcatttatttgaggtccttcctacttttagatgctaaaatacgcttattttttaaaaaatcaaatagtggcaataggcaatagtggagttttttggttttttttttaatgtccttatttagcaaaatcaaagttcagtgagaatttgaaa

SEQ ID NO: 1562255 - DNA, 4001 bp, Homo sapiens
tgaaataaagttatggggcattatttgaggaacactattttatttgttataggttttatccatttattctaggtcttatcactggatcatagacatcacagagaaccatcagaatgctgcctgttcggatgacactggattggttccctgtaattactgtgctctgcctgggtatagaagtcacaggaaacccataccatttctttctcagctgtttttggcagaactgtctctacttcacttactcaaagatcatccaagaaaatttttagatataaatgatgggaaaaccacacaaaaatccagtgtaagggctatctcatattgtctgggcctttctggaaccatttgagtaactctataggaatatatgatttctgtatatctatgtccacttttccagtattgatcgaatactcttctctgatgctgaattttatacatttcgtttcatctgcaaactactctaaacctcttgaaattcactgtataatgtgagaagtaaatccctgagcaacttacctgaaattttttcattttcatgttctcttgagaaagggccaagagtgttgaaagcagagctgggtaaggaagaatggcgaatggaatcatgagcgatttggctcacacagcagctctacaattacctacaaagccacacacccatttaaaaacatggccctttgaccagtctggttcaggaagcaacatgttgaggaaacgttcacttgtccatttatagttctagaatggtctcatagagcttttcttactgagtgagtgtcaacaaatgttttctactgaattactgtcaatctatgcctcctttgaaaaaaattgaaaacgtctgagtccaattaataggagactaggtcaacgaaagttagtatatacaaagcctggaacactattttggcattaaaatggactctaggattaaaagatttcttggaataggaaaatgatattatgtcacttacctgttttcctactaatgtgtttagccacttgagatgacagaatccagagagaatgaatgaaagtgctttaaggtgtttgtctttttgacagtttggtttcccttagctgcagtttcacaagaggaccttttactaagaaacttcttgtggtaggtaacgtaaatgtggtagatgacaaaagccctgacctggtactcaaaggaccagaattcagttattggatctgtcactagcaaactgcattactgaaaaaaatatttactaagtcgtaattttaatataagataaattggtttttagtctttcctttacccctatcgtgtagctctgtaaggggtaaactcagtaaatcccaggtgaggtgatgaacatggttggtgcagctctgaataaacagagggtggagatggtagggaatgacatgtatgtgtttaggaagtgatgaagacatcatttccttatttataaccagtactccttccctccaacccaggactctcgcagatacctccagtgaagtgtcttttcctgtcaaatcttgaccctgcccattccagctcacatccttcttccgaaagttgaactgaactttgctgagctataataatcaatggctgcaagactaagtgcatcagcagaagttctggaaagaggttctagctacttggatgcgtaaacctttcaccttcaccaagcgccttcttcgggcaaatcagggccctagagagagctcgcccgtggcctgcaggtcaggagcccaatcctgccctggctgcctcgcctcccgaccacaggaaaccctccctccaaagacagggagagcgcgcgtccaccctccgcagacccgaggcccgctccgcccggccccaccgttccctccgacgcccgagtgctcagagctcgccgccagcccttcctataggttgtgggtgcacccgcttcgcctccagttcgcaccaggtccaagtctcggcgggaccagggattcacgggctgcaggaccctcacccggaagagcctggcgaaccggaagggcgtccaggtaaaaaacaggaacagcacatgcgcagaaaggcccccgggccgcctttcccggggctctcccgggccccccgccggctttccggaccacagtccccagaaggcgtcgcggccaccgccctaccctgagggatctttgaggagcttctgctttaactacagagtttaggtgactgctgtgaatcatcaatacgaaaagtaaagtttcatatccgtttcaccgaagtctatagatgagaaaggaaaattctgcgaaatgaaaatgactgctaaagatattccagcagaatataatactaacgacctgcagaaaatttctcccaaacaggatacaaaatcattgctggctttcaatacgtgaaggttgaaaataaatcagaatatctctgaagaaaatgaactattagccgtaaccccaattcccagagatatccgagtttaacattaggtgcacattcttctgacagctttacaaagaggaactcatataggtctagtaatttgttattttttaaattagcaatatagttaatatactttaataccacgaattatctcatatacattgtgagtaatatagaaaatagttttacatccacaaggaaaatacatacaatcatgcatggtttaacgatggggatacactctgagaaatgtgtctttaggcaatctcgtctttgtgtgaacatcatggagggttcttacacaaatctagacaatatagtctactacacacctaggctgtatggtatagcctatttctcctaggctacaggcctgtgtggcatgtcactgtcctgaataccatatgcaatggtaacacaatggtatttgtgtatgtaaacatatctaaacatagggaaggtgcagtaaacgtacagtattgtaatcttatgagaccacagttgtatatgcagtacatcgttgactggaacattcttatattatgcatgactgtatatgaattgtatacatattgaataaatagaactttataaaactttactcattggaaggcatgaaagtttctgacaaagttataatgtattattattcaattccagaaaagaacaattagcgactggtggtagctagtcttcaaagatggcccccaatgaactaaacttcccagtattccaggcttgtatatttccctcccacgttgactttgactgactctgtgactctctttaaccaaaagaatgcgtcagaagtcacactgtgccagttccagaaataagccatacaaagtcctggcagcttcagctttgccctttgaagagtccttagacgctgtgtaagacatgcagttaacctgttagaccaagtggagaaaccaggagaagtaggaagtgagaggccctgagaccacatggaaaaagagaggcccatctttcctagcaatgcagctatcccagccttccagtcatccttgcctagagacatcagacatatgagtgaacattctaggccagtgaagttcctggatgacttcagctccagatgaaatcatatagctgatgccagtaaacatacagactacaagaaataatgaattttattattttaagcctctaagttttgggtggtttgttacacagcaatagctagctaagcaccaacaaaagatgatttccaagaatataatatgaaaagctgccatttcaaatcattgagaaaggcttattgttaaatagattattgaaaaagtgatgtgggacaactcactaaccatttggagtaaaaaactaagattcccatctcacacattataatcaatatatttcacattgacatataatttgaaatgttaaaagcaaactcacagactaagtgatttttgcattacttgctagggaagctcttttactgaaatttattaaagcaaagtttcctagtcatcaagaaaattgaatatatttctattcattcaagtttagatagtctcaaatgttttgctacttttgtaattgggaacat

SEQ ID NO: 1562256 - DNA, 4001 bp, Homo sapiens
actgtgccctccacaagggcctggaccaaacttgtcttttcctctgctgtatttccagggcccagcacacgctgagcacatggtaggcccccatctctgctgaactaatgaaaccccaggaccccaaagtgatgaccactgctgtgtacttctatcacgtgatatactgaatatgaccattatcttgcatataagaatggctaatacttactgagtgcttacaatgtgctgagcactgttttaattattagctttgcatatgttaattcatttcatcctcacaaaaactctatgaggcaggtatatttaccattcccactttacagacgaggaaacagagctagatgttgggtagcttgctcaagatcacacggctaggaagtggcacagccaggaggagatggtttacaaaatgtttgcaagaggatgtctggtgggagctcacaatcaagcacccttgaaagcaagtatttctgctttactttagccgggatactgaggctcaaagaggtctcccagtaaactggaggcaggacccagtcttaacccagggcacttgcgtttttttttttttttttgtagagatgaggtctcgctatttgcccaagctggtctccaactcctgggctcaagtgatcctcccacctcagccttccaaagtgctgggattacaggcgatgagctaccactcctggcctagacatctgcctctcaaagtgtgaggactgtgggtagtatagtagctaagaccacagcctagatttgaatcctggctctgtctgcactctgtacctcggcatccttttctataagatgtgggaaaaaatggtatgtgtcttagaaggtatgaagctcaaatgagaaaatccattttaggggtttggcttggtgcctggctcacagtaaaccagaaacaccaagtattagctacaaacaagccttgtttcctcttggctgtcaggcactgctgctcgcggtccttgcctccacccacgccgtccagccgggtccatacctgagaacggctgccgcggtccgagctttgccccacgccagagtcatcggcctctgcctgccccggggcggccgcggcgtcgctgctgtcggcggacacggcttctgaggtgcccacacccaggccgctctcagagggctcctcgggccggccaggcccaggggccgcgtcgctgctgctctccacctcgttctcctccatctgatcggcgggctgcctgacagcggggcgtagggtctgggaacttcactctgagaagagaggtgaccgtggctggaacaagtgggccatctccccagccccggcaaccacggccacccatttgcacccctgcgcccattttgcagatgcgaagattgagtctccgacggggcggagcttcctggtgtattgcgaggggagctcgggaaaaacttgacggagaagctgtgcttcccaggctaaggcccttcccgggagggtggtcaatggctggtaatcttgaccctttccctcgcccccacgattctcgtggagcgttccgctctgtgagccccatccgggcccagtggttcagcccttcggcccccgcgtccccccgggttgcagggccggtggtacagcccgctggccccctgggtcagtggttcgctcccccccggttcccctgcggaggcggctgacagcgacggtctcggggcctggcgatttggggctgtccccggcgctgcctgtgctccaggcccgacgccatcttgtggtggcgccgggtttccgctcaggcaagtgcgagagcgactaaagggcctgggaccccggggccctgttcggacagccccgccggcctgggacctcgcctccgggtatccccgcagtgtgacctcactccacggcagggtacggtggggccgcctaactctacccgaagctcacccgaggctttcgtagccacgttcctctctgactccggcatcgacgaggtcgccatcctctttcctccgctgcggaggaacccatcggcctattgtaggccggaactacttcccccgctggccccgggaaagacacattttcagtgttccggaaggtcgctccgaggcctcaaaaccataatcgggtctcaacagactctgggactttatacgtcgcccggtgtttggcactgagcccactatggtttggggactactttatctcggcggagtgttacgtaggaagtggttgtgacgtcattctggtcccttccctaggccgcagggttgggcgcggcgaatgcgcgccccgctctcttggggcgtggctcccagtggggggcgtggctcccggtggcttggccgcgcccctcctacaacagcccggaagagcgtgtggccgcgggcgactttggcttggccaaagaggaattcatgttgtcagtcattttacctgactcattacttattacttagcgcgctgctgcaacccaatcgagctctgcccgttaggtttgatgtgttttgttgggaagggaatgtataattattgtacagatagggaaactgaggtctgggtatgggaagggctggtccaaaatcacatccaataaagggactcaggagctaagtacggatggcaggagtcggggaaatggaaagaagttaatgcttgtcccttaggtttgtatacatatttgttaacattaatagagctgaggccgggcgctgtgagtcacgcctgtaattccaacactttgggacgccaaggcaggagaatcgcttgatcccaggagttccaaaccagcctgggcaaaagagcgagaccccatctctacaaaaaaaagaaaaaaaagaaaaattagccaggcatggtggcgcgtgcctataatcccagttgctcgggaggctgaggtgggaggatcgcttgagtctgggaggttgaggctgcagcgaaccgtgatcacaccactgcacttcagcctgggcgacagagcgagaccctctttcaaaaaataaataaatacaagtcaactacctatcctttaaaagtggagaaagaaaaaaaattttaattaaaagtcagctgcccttaaggtatgtccttcctccggaaatgtcaccttctgttttaagacttttagcagtttgcagtggaagagcacaagagggagtaaggcgctctggtttttgtccctaagtctctgtagttccataggctattttccttaattgaaagatacaaattttgggggaaaaaaatctcaaaaaaactcctaagcaggctgggcgcggtggctcacgcctgtaatctcagcactttgggaagctgagtcgggcggatcacctgaggttgggagtttgagaccagcctgatcaacatggagaaaccccatctgtacgaaaaatacaaaagcagctgggcgtggtggcgcatgccgtaatcccagctattcaggaggctgagccaggacaatagcttgaacccgggaggcagaggttgcggtgagccgagatcacgccattgccttccagcctggggaacaacagcggaaactcttgtctcaaacaaacaaacaaaaagtcctaaggagaagacctattaataaggagaaaaggtccgggctcggtgggtcacacctgtaataaccagcactttgggaggctgaggccggtggatcacttgaggtcaggagttcgagaccagcctggccaacatggtgaaactgtctctactaaaaatacaaaatttcactgggtgtggtggcgcgcgcctgtagtcccagctactcgagaggctgaggcaggagaatcgcttgaagcccagaggcggaggttgccgagattgtgccattgcgacaagagagaaactccgcttcaaaaaataaataaataaataaaaataaaaaggacaaagggtgctttgagctgttatttgtgtgcacttgtgtatgaggggattcatctggtccttttcttaggtaaagttttctttcctaggtttcccttttgggttgagggaatggaacaggagg

SEQ ID NO: 1562257 - DNA, 4001 bp, Homo sapiens
cacagggaggggaacatcacacactggggcatgttggggggtagggggcaggggagaggatagcattaggagaaacacctaatgtaaatgacgagttgatggatgtagcaaaccaacatggcacatgtatacctatgtaacaaacctgcatgttgtgcacatataccccagaacttaaattaaaaaaaaaaaagaaaatcagtatatagaagaatgagatgcaaattgtatcaaaaaatttatatttacttacacagaaaaataattaaaaaacaaaacaaaacaaaacaaaaagaagctaaaataggaatacctggacagtatcaggaaggggcaatagacttaggcttgcagtcgggcagtcacgaggaaagtcacaaatgaggagattgagtgggagaaagaagtctagcaagtagggggaaaggaggcttcctgggagaaggagtccagggacctcaggagaacctctcactcagcaaggactggaaggaaggcagggccaggtggtctgaagagcagccaaggaggccagaacagcttccaggtcccctggcctcagagaagcctcctccctcctgaaaggcggagtgccttgtgctctgtctgccctgtctatcccctcacctgcacaggggcctggccggcgtcttctctcttctccccagggcacttccccttgctctagccgcctgatgagttctggtttagaatggagaattcctgctcacagggaaaaaaaccatgaggtgactcctggttgtaggctccacgggccatttgctggagccacccagggcaggaagggagggagaatcagagggggaaggctcaggaggaccctgtctaccatgctcagagtacaaacccccagggggagccccagtgtggggaaaggcctgcaggtgcccagtggcagtcagtatgaaactttaccaaagccagaccttcctcaggggaatagagaaaacaacattcttgtctctgaacctaaccctatggcaacatcagaggcaccacaggccaaatgttaggctcgagggaagccacgcttacctagtgagaccaggtggctgtagttctccagtgtcacctccctgtacagggccctctgagcagggctcagcagcctccattccttctgggtgaaatccacagtgacatccccaaatgccaagaaagcctgtaacacaaaacccaggcatgctcaccagggacagtgttgcactcacgcagttggaggattccaggttctgccatctgtacacagatcactacttgatgagtgacacccacaggccagtcacctgctggaggacgccaggaaagacagatcactccccaggagcggtgctggccttggtcctgtgctaataatgtaactgctagggccagtgaaggaaatgggcccatcctgtgacagcaagaacgacagttctgggaagtctcacctgtctcctggctccctgaggtcccatgactgtcttcctgctctccacggagaagggaagcttgcagatggccaatctgtgggaggagagaagtcagagggtggctgggtgcagctgccctccccatgtgtgacagttggtgtgattccaataccaactggggatctggggagggcgcacctgcacaattcccctgtggggatctggccaaaaggtctagggagccaggctccctgcaaatccaggacaagctcatctgggagtgaagtgtgccccaggagctgggtgacgtttgttgcttacatcactgaggggctaaaaggatgaggaacacctgcagatgaggtcttgcatttaaggttagggctcagagttccaggtgttctttgcactggacagaatacacaagagctgtctgcctcttctagcctctgtctccccgggtttgaagtcaggataaccacaggtgcagacaaacttgagaaggccacaggcagatggcattggcagttattcagtactgtacaacaccaaagcctttaacaaattaatagcatggggagtgtgagctgtcaggaataaaagtcctcagacacatggttaatctaaggcaatgagtgatccaatgcaatttggatcctgattgcaacaaagaatatgtgaggagtattaacagccagtgaaatctgaacactaattggatattagattatcaaacattaattttgttgttataaaagtattttgggttttaaaaacatgagcccttccttgtatacaaacttttggaacattcatgagtgaaaatgatgtctggatgtgcttaaacaccccttctcaccctcaaaagtcaattgagcattactggccacacttcataatttttagaactgaataatgtgtactgggttcattatattattttctccgaattttttgaaaaaaattccagtagaaatacaggaaaagaactgtaaattaaagtggtgggtgtaatgatttcattagagtattcactatacttttaagtgaatgttttgactaaaaaaataaaattaaaaacacagacatataggggtgaaaagaaggaaatgtgaaggaacaaagatgctatcatgtggtgattatgatgaacacagcatacatccactagccagtaactttgagacagaagtgaacaaatactatggtgttatgaaaagaaaataaaactagggaccccagtccactctgccaaaaggaaaaacattaagctgaaagctaagtcatgcaagaagctgcctttccttttgttcttaaggagatagctacagataaaacgttaaatatctccatagtagctactctatgcacaccgtatcttatgtaaagtgctgatttactgagtgtgagatgaatgcataactattttcctacctgctccttttctcttgtcacaggtggattaccacacctttcctctttcccctccagcctacttttcctttttaaacaatgaggctctcaaactcatctttggggaaagccactggcctctttctgtggcatgtcctcaactgtggcaaaataaacatctaaattggtacttgactctgatactttttggtttacatgtagttggagaagaaaaacagtgaaatttcttcctctgacggcagttgaaaggtgatttaaaacatttttgttatttctttctatatacttacataaatagtttacctttcatgtcccatctgtgctatctttacctattccaaagtcacaaagatattcccctacatttactcttagaagtttaaatatgttgtttttgatggtagtataaatatgtatttcattttttaactgtttgctgctaggttacagaaatacaagtgctttttaaaaatactgaccttattttctgaagttcctaaactgtgtgttactagtatctagttgtttaactattcttccatgtacatactcacatcttctgtgaataaaaaatttttttttctgtttcaacgtttatgccttttattcctttttaataccttaacaggttagctagttattctaggataatgctaaataagagtgataagaatcaacattaatgcttgttcctgatcttagtgtgaacacacttcaccattaaatatgatgattgcagccaggctgtcacacataacctttgtttcattaagggaaattctttctattcctcatttactgagaatttttaccctgaataggtgtgaaatgttatcaagtatttttctgcattaagatagtaatgtaggtttttctcttttgctccctgaaagcagtgaaaggaaaataaaaacgttggaacccaaaccactctgccaaaagaaaaatattaagctgaaagctgattcatccaagaagctacctttccttttgttcctaagcggagaactacagataggttaagtaagggtaagtatctctgccgggcgcggtggctcacgcctgtaatcctagcactttgggaggctgaggcgggcctcctcctcgtggtcaggagattgagaccgtcctggc

SEQ ID NO: 1562258 - DNA, 4001 bp, Homo sapiens
aatttgcatctgcagcgaatctccattaatgtagccagacctcctttgttctaagcctttcttaggtctggaagagacagccagcctgacgcgcggtggctcacgcctgtaatcccagcactttgggaggtagaggtgggtggatcacctgaggtcaggaagtcaagaccagcctcagcaacatggtgaaaccccatctctactaaaaatacaaaaattagccaggcgtggtggcgggcgcctgtagtcccagctactcaggaggctgaggcaggagaactgctcaaacctgggaggtggaggttgcagtgagctgagatcacgccactgcactctagcctgggcgacagagcaagactctctctaaaaacaaaaacaaaaacacaaaaacccaaaaaactgaaaacagacatttaccatctattctgagagttgccaactaagaggcttcatctacataataagaactttgatctacgcaatccccttaactctggcatgcttctgattccagtcttcaggcagtagcttaagtctctcaaccaactgtccactaaagaatccctaagtgcccccatgaggtgtaaaccctttggagatataccagctttttgggaggaacccgtgtatatctttctcttattgatttatgattttctttttggaggcaggatctcgctgtgttacccaggctagcgtgcagtgcagccaacatagctggttacagcctccacctcctggactcaactgactgggcctcccaagtagctgaggccacaggcatgggacaccacgccccgctaatttttttatttttctaatttcatgtagagacagggtcttgctgtgctgcccaggctgctctggaactcctggcctcccaaagtgctgggactacaggcatgagccacactgctcagcctgatttatgactttacctgaaattcctgtctccctgaattgtataaaattaacctgcaagcctgaccatctcgggcactttcacaggacctcttgaggctgaataacctgggccacagtcactcatactgactaggaataaacctttttaaatatattttggcagaacccggattttgccgtcattagcaaggccccagggaagaggccacctgggtccccacagccacctcacctcccgcggacgctgccccacgcagatccccccccccccccaccaaaacacgtctagacgtgcccgtgcgaggacatttggtcccggcctacactcctatccgcggaagatcgtcccaaggcggggtgctcccaacccaaagcagcggcccttccccaaaacacgcgggcgaagtcctcccctgtcccgcctcccacaataaagtctggagcatcagagtcggagggaacccgagtcggacctagcccatccgtctcatggctgtaacccccaccccaccagtggaccctggctgtggccgagtccccctccacctccggccaaaagacccccgtggcagctcgctaggccgctggcccgtccccacccgaggagcggcgaccctggcacaagaggacctgggttgctcggcgcccctgtgaaatccgggctgttcaccgcccgagccgccactacacgcaaccgggaacggagactgagtggcggcccagacccggggcgctcggcaagccgcagccccaccgcccacttcaaggcgcggcctgggtctccgcccctccccagaacgcggagacgccgggcctggaggagcgcgcgctacggccccagcagcgccctcacgtcccaggccttcccggcccttcttcctgcgccggaagggcgcgctgcagagagggacccgcaggagcgcagctcaccggggcggctgagggcgaaccgaggcggtgaggtcaccgatggtggaccacgcatctcacggctcgctgacgcccagggatctggaacgctctgcgccgcccgggactacactacccagaatcctcagcgcggccgggactacgctacccagcatcctcggcgcggcccggaggctatgcgaccctgcgcgtcgcatcccctcggtggactacactccccagagtcctcgggagtcgtccaggtacacgccccagaatattggtcatagcggtccacccgggactgcgcgacccggaatccttggaaggacttctcggaaggactcctctctgacaggtggggcgagcctatggtcgtttggacgtggagggatcctttcagaaccggcgatttcttttatttaggtagccctatacatacattaagcatattttcccatttctatgatataggtaaataattttcccactgtcttttgattatgggtatgtcttttttttttcttttgtttcttttttttgctatgtagtacttttgatctctgattttcctacggattttgtggttttatcattcacatttagatctctcaatggtttaatttttctccaggtacacactgtaaatatacaattatttttaaaattttctaatattttattaatttcccattaaatttattaaaaatatagtcttttaccaaataatttaaggtttcagctacataattcagtatactcaatttacatttgcatttcaatttctaattgttcccccatttatctaattatgcatcaatgccagaattctttcattatgtagggtgtataatatgctgatatcttttgtggcttgccaaaccacgtagactttatatttcaggcctttactaggtatacttgctgtttgctttttctcttttggtttttaaatttttaattattctggataaatattagttgtacatatttatagggtacatgttatgttttgatacaggcatacagtgtttaatggtcaaatgagggtgattggggtatccatcccctcaagcatttagcatttctttgttttaggaagtttccaattctctcttatttttaaatatatagtaaaattgttcttaactatagtcactgtatagtgctaccaactactagatcttattcattctaactgtatttttgtatcgattaacaagtccctctttatctcctctacccaccatccttcccagcctctgttaactatctcattctactctccatctccatgagttcacgtttttagccccacaaatgagtgagcacatgtgatatttgtcatgctgtgcctcatttcgcttaacataatgtcctccattttcatacatgctattgaaaatgacagaatttcattcttttaatgactggctaatatcccattgtgttaatgtaccacactttccttatccattcatctgttgatagacactttgattctatatctttactattttggatagtgctgtagtaaacatgagagtgcagatatatccttgaaatactgatttcctttcttttggatatatactcagcagtgggattgcgggatcatgtatatatttattaattcttttgaggaacctccatactgctctccatagtggttgtactaatttacattcctaacaacagtgtatgagggtgtatccacaccctcaccagtattcactattgcctgtctcttgaataaaagctatcttgactggggtgacattatatctcattgcggttttgatttacatttctctgatgattagtggcattgagcattttttttcatacacttgttggccgttcatatatcttattttgagagatgcctattcagatcttttctccatttaaaatatcagattgtctttttcctattgagttgttttagctccttatatatattctggcaattactttcttttcagatggatagtttgcaaattttttctcccattctgtggattgtcacttcactttgttgattgtttcctttgcttgcagaagatttttatgtgatgtggtctcatttgtccacttttgctttaggtgcttgtgcttttgcagtcttactcaagaaatctttgtccacaccaatgtcctggagtgtt

SEQ ID NO: 1562259 - DNA, 4001 bp, Homo sapiens
tttgaatcggaaccccactagatggagacagggctaccccgccccccatttcctggtgcgaattgtgatccttcaagaagtgaagggagtcctggagcagtcgctcacgcctgtaatcccagcactttgggaggctgaggcgggcagatcacttgaggccaggagttcaagaccaatctggccaacatggtgaaactccgtctctattaaaaatacaaaaaaatggccgggcgcggtggctcacgcctgtaatcccagcactttgggaggccaaggcgggcggatcacgaggtcacgagatcgagtccatgctcgctaacacggtgaaaccccgtctctacttaaaatacaaaaaaaaaaaaaaattagccgggcgtggtggcggatgcctgtagtctcagctgctctcgaggctgaggcagaagaagcagaagaatggcgtgaaccccgggaagcggaggttgcagtgagccgagatcgctccactgcactccagcctgggcaacagagcaagactctgtctcaaaaaaaaaaaaaaaaaaggaaattagccgggtgtggtggtgcacgcctatagtcccagctactcaggaggcggaggcacgagaatcgctcaaacctgggagggggaggttgcagtgagccgagatcgcgccactgcactccagcctgggcgacagagtgagactccgtctcaaaaaattaaaaagtgcagggagtggctgagatctcctaggaagctgcaggactcaaagcttcagcttcatcccgccagtccagtacttcgagtttgcaccctatctgtatactcatctcatcccactcctccaagaccattcttggtctgtatttcccacaatatctattctgcgccatggccccgagtcgctaaggctgcccttcctccccgacgcccagcagatgcacacatggaggtgctcagtgtttgctgtctccaaagcccacagttttgagcctgagcaccaaccccatcccaggttcttgcagagcacggaacagtctgtcggcacccagcgtttgctggcctgggtctgggaacaccgcgtcccggccgggcacaccgcgccagcacccacggtgtcagtttaatttgtaaaactgcaccggccacggtgcgcactgcaggcgccaggtgtttgctggcttgggtccctaagctctgagtccaggctgtgcacacaggtggcgcctctgctgctgtggtctgattttgagactacgtcctagcacgaggcatacagtccgctccgcagaagttcttcgtggtcaggccgccgaggccctcctgcccgcagctgcgaccgcacccccgtcccgggccccgcgcgccgccaagccgcctccctggccgcggctgttccagaccgccccgccgtcgcctcccgcgcagttccctgcagggagcccctcccgcgcccgcccaaggccgcccaggctggcgctgttccggacccgagccccctccccgccggcctggctctccccggctgttccggccccggagctcccccgccgggcctcggctcccgcgctgttcccgcccgcgcccctcccgccccgcggctgttccagccccggcgccctccgccccgcggccgctgcgcgccctaggccgggcgctgcgagggcgcggcgggagggggcgcagcgcggaacagccgcctccgccggccccgccgccgctcaccctccagggcctcaaagatcgcctgcgccatcttggagccgccgccgtcgccgccacaggaaccgaagcccggctacgcgagcattgtgggagccgtggcggttgagtcggggccgccagggggcgcccaggagccgccgccgagcccccagccctggaaacccaacctaggctcgcgggaccccagcatctctgggctgccctggctccactcgataacccagtcaccgggccaccgagtgtggaccccgcctcacttgaacgaccaagtctacaccgaccttatatccgccgcacacgcggaacttcccatccctattatctaaatccgcatccccatctcaccggacccgaccccccagctctgacacagaatcccccattcccacagcacgtgagtcctccaggtctgctgcacggaccccatttccgctgagcacagtataccccgactctgcaacaaaccatgacccctatcccatctcacccagaccacccaactgtcacagggatctccaggctgtacaacatagattcccatccctcatcccctattagagacttcccgcccctactaccctgctcaactctgcctgttgggagcccgcctcagcctccagagtagcggggactaccggcacacgccaccatgtcctactaatttttatttttatttttttgtagagatcagggtctcactattttgtccaggctggtgtcaacttctggcctccagcgatcctcacgtctcggcctcccaaagcactgggattacaggcgtgggtctccgtgctggggatcccattatctcttaagtaactccatctcttcaccctccatccctgcttgttgggaccccatttctgtcacataaacccccaacacccaccccagccactcctagcccagcctccgaggggtcctatccaggtctcacagaatgagaggtgctcctcactgggacttcccctacacacacagacccctctcatcttcattcatcctccatcaactgcttattaacggcctgctatgcaccaagtcccgtaatagctctagagacatggtggtcctttcccatggagttagaggtgggaagaaagaccgacattaggccaggcgcggcggctcatgcctgtaatcccagcactttgggaggccgaggcaggcggatcacgaggtcaggagttcgagaccatcctggccaacctagtgaaaccccgtctctactaaaaatataaaaattatctgggcatggtggcacgtgcctgtaatcccagttacttgggaggctgaggcaggagaattgcttgaaccagggagtcagaggttgcagtgagccgagatcgtgccacagactccagcctagcgacagagcaagactctgtctcaaaaaaaaaaaaaaagaccgacattaaatcttaaaggttatttaattacaatgtgtatgccggccacagtggttcacacctgtaatcccagcactttgggaggctgaggctggaggatcatttgtatccaggagtttgagacctgtctgagcaacatagtgagaccccgtctcaacaacaacaacaaaagtagctgggcatggtggtttgcacttgagtaccagctactcaggaggctgaggcaggagaattgcttaagcctaggaagtagaggctgcagtgggctatgatctcaccactgcactcaagcctaggcaacagagtgagaccctttctcaataatcaatgtgtgatagtggtttcaaagtacccttgggaaacaagcaagagtttagggagtgcatagaggggagggggaaactaaggaaggggctattgttaaagaaaaaattaggccgggcacagtggctcacgcctgtaatcccagcactttgggaggccaaggtgggcagatcacctgaagtcgggagtttgagaccagcctgaccaacatggagaaaccccgtctctacttaaaaacaataaataaataaaattaggtggccatggtggcacatgcctataatcccagctactcgggaggctgaggcaggataattgcttgaacccgggaggcgaaggttgcggtgagccgagatcacgccactgcactccagcctggacaacaaaagcaaaactccatctcaaatttaaaaaaaaaaagaaaaagaaaaaattatttacctgggtgtggtggctcctctgtaatcccagcactttgggaggctgaggtggcgggaggattgcttgagcccagaaattggagaccagcccaggtaacatagtcagaccagcatctccac

SEQ ID NO: 1562260 - DNA, 4001 bp, Homo sapiens
gttcgtctgtctttctgagctaacgtactgtgtagttcacaataagtcaatctggctcagtttcaattttaacataagctgcttaattacatttatatttactccgactcataataagaagttacttttaagatcaaagtgtgaggtcaggcatggtggctcacgcctgtaatcccaatactttgggaggccaaggcaggtggatagcttgagctcaggagctcgagaccagcctgggcaacatggcaaaaccctgtctctacaaaagacacaaaaaaattagccaggtgtagtagcttgtgcctgtagacccagctacttgggaggctgaggtgggaggatcgcttgagcctgggaggcagaggttgtggcagcggcatttgatccagagcaactccatcttgaataggggctgggtaaaataaggctgagatctactaggctgcattcccaggaggttaggcattttaagtcataggatgagattggaggtcagcacaagatacaggtcacaaagaccttgctgataaaacaggatgtggtaaagaagctggccaaaaccaaaatggtgatgaaaatgaactctggttgtcctcactgctcatgatacactaattataattcattagcatgctaaaagatgctcccaccagcaccatgacagtttacagatgccatggcaatgtcaggaagttaccctatatggtctaaaaaggggaggaaccctcggttccgagaattgcccaccccttttccagaaaactcatcaataatccacaccttgtttagcatacaatcaagaaataactataagtatagtcagtccggcagcccatgccactgctatgcctatggagtggccactcttttattccttttttttttaaataaacttaccttcactttatggactcgcagggaattctttcctttttttttcttttttttacattcagaatttttattttaaaacaaagaatcagagtaacatttataatagaaaatccatatggaaatattcacaatcttctcagtgagaaatgggaaaacaacttccctgccttactgccatcctactgtttgaggagccagaagttgacttgaagttgcaaggtcaccttttccagctaaaccccactccatagctatgtgtactttttttttttttttttttttgagacggaatctcgcactctggcctgggctaggatgcaatggtgcgatcttggctcactgcaacctctgcgtcctggattcacgtgattctcctgcctcagcctccccagtagctgggattacaggggcccaccaccacgcctggctaagaattctttctttcttacacacgatccaagaatcctctcttggagtctggatgggacacctttctggtaacagttgcagtgagctgagatcgtgccactgcactccagcctgggtgacagagaccccgtctcaaaaaaaaaaaaaaaaaaatcgaagtgtgattctgagcctctttgaaaatactgcttaggatagctggtgtggcccactcccataatcccatcactttgggaggcctaggcaggaggatcccttgagcccaggagttcaagaccagactgggcaacatagtaagaccctgtctctctacaaaataaaattagctgggcatggtagcacacacctgtgctcctagctacttgggaggcttaggatctgcttgagctggggaggtcgaggctgcagtgaggcatgatcataccactgcactccagcctgggggacaaagggagaccctgcctcagagagagacagataaattatactgcttaaattcatctcaagtcgctctaactcacaacaaatgcttaccctggcagagaacgtgtgattttgaggttgctttcacacatacctgctagtgtccactaggtctccacttcttaccgtgaggctgggtttcgcgttctggttccaggctgtccccccactgcctgcccctgccccgaatcgcaggttttgccgcaatggcaagtcccaacttggccaacagggggcgcccgcccgaaccgccaggaccgagactcgcgagcttccgggcccagttcctcagattcagcgcgggggagagctgcgggccccgccgggggagcccagggggccttcgcagaggatctggaggcctttcagaaaggaagccaggtgcagggacgacccgaagcccggaccccagccccggcgctgcaacaggcccgccctccctgccttggcccttccctcttactatttttattttgagcgagagtctcgctgtgtcacccaggctggtctcgaactccccctcccaaagtgctgggatcacaggcgtgagccaccgcgcccgctggctcccgatcttccgcggggcccagacgccaaggtcccggctctccattcgaaagcggagtccccctctccggagtcgaatggaatccccgcttcccggcttcccgctcctgaggcttagtccccgcctctccccgaggggctcagccccgctgtttcctccagaggcggatcccgcagttttccccccagaaaaggaattcagcattttttatcctaggtctaacccggccttccgctccaagactaagtgatggtctacgccgccggcggccgaatccccacccgccctaccagaggctaagcccccacctcgcgcttaagggaacgagtcccgatctgtcgccgtagtgccgccccaggctgccggccgccgagtccccgttccctccgcacccgccaccccgcgtaggctgactccccgcttgccgccccaaaccgaagtcccaatttttagcttcagtggcctcagagacctgacttttccaagcttccataggaaggtgaggatggagagcatctggcatccggagcccctgtccctcggcacagccccgaggcctccggggggtcgggggaaagggttcggggaccgcaggggcgatgaagccccaaaccctgagccattctccgtgcttctggccttagagggacttgcgcacacatggctgagaatattaaccagaaaggtgttactgataccagaaaggggtcccgatccagaccccaagagagagttcttggaccttgggcaaaaattccaggcgattccatagagtaaagtgaaagcaagtttattaagaaagcaaaggaataaagaagggctactccataggcagagcaccagcgtgggctgctcaactgattgtagttacttcctgactatatgccaaacaaggggtggattattcaggagttttccaggaaaggggtgggcagttcctggaactgaaggttcttccccctcttttagaccatatagggtaacttctggacattaccatggcatttgtaaactgtcatggtgcaaaaaaaaaaaaaaaaaaaaaaaaaaaaaaagacacttttatcatgctaaaatattataattagcatataatgagcagtgaggacgatcagaggtcactttcctggccatcttggttgtggtggttttgggcaggcttctttatggcatgctgttttatcagcaaggtgtttggtctttttgtttgttcattcttttttttttttttcttttttttttttttttgagacggagctgtcacccaggctggagtgcagtggcatgatcttggctcactgcaacctccgcctctcgggttcaagcgattctcatgcctcagcctcccaagtaggtgggactataggcgcgtacctccacacctggttaatttttgatttttagtagagacagggtttcaccatgttggccagactggtctcgaactcctgacctcaggtgatccacccacttcggcctcccaaagtgctgacattacaggtgtgagccaccactctgggctagtaccttgtgcctacctcctgtctcatcctgtgatttagaatgcctaacctcctggaaataaaacccagtaggtttcagccttattttacccagcccctattca

SEQ ID NO: 1562261 - DNA, 4001 bp, Homo sapiens
gcacacctgtaatcccagctactcgggatgctgagacagaagaatcgcttgaacccgggaggtggaggttgcggtgagccgagatcgcgccactgcactccagcctgggcaacaagagtgaaactgtgtctcaaaaaaaaaaaaaaaaaaaagagcaggcctccttttcctttaacaaaataagcctcagatctgtcagagaagagaataatgtaaacagcttctaggggacagaaccatgtggggacatcagaatacagtctgccctgacaagctgctattacatatttatccctttaatgcctatgggcctcaaattataatactattagtaatagttaacacttactaaactcttactgtataccagaggcaattccagacaccatgcaagttttacctccccaaagctccatgagttctacaccttcctcaaattgacaatgctagaaagtgcctagatttgaagtctagctgtggagcgccacacgcttagccagctgggccagtaatgatgtcagcaatggccaatccctgtggggtctgacaattctcaaagtgtatccacacatagggttgaggggatgtagatgaaacaaaattggccatgagttaacaaatgtggaatctggtgacaggtccgtggcagttcactgaatagctctactaggtaggtttaaaatttgtccctacgaaaaaattaaaaataaaattaaacgcctgatatccagaactcaccatatgccggaagtgatttggattgttaactagaagccgtcagagttccccaccagacctaacccttcacagccccaaaccagatgtttggccctaacatgtgagggaaaagcagtccaggaaaggagtcagccagacgggccacccagatgacgaccaaacccaggaactttgccacaaagcacagggggcacctcccacatgacacaccttgagacaacaggtcccagagaaaagacctgcccccattcaaaagagctgcctagatgcctgtcagagtgatacagcccaccactatcagaggacgaaacctccctcacctccctaaaaaccccagggactcctgacccaagacactcgcccaggccctctcaggatattttgaccacgtcaagctcacctccacttccaaccccccaacccctaataaaccaaggtccatcaagcatcaaggcctgagacggcctccccctaaccaccccggtcaccactcgggacatatccagccccacccaaaaaacagaaaaactcggtgatgcaggactcaagacgctccccagccaaaaaccacccagggatgtgcggacctagccacgtccccaccccagccgcggggatgttggtccatttggccctggcagaactcaaccccacagcccaaataaaccccaggacgcacgactggggccgccctccgtattcgaaaactggttgacccagaataatcccgcctggttcaagacaggcattagagttctaggtcactctcgtccccccggggggaaaaaaggtccgcggaggtccgggcaagcaggggctcaccccatcgcctcgccccaatgagcaccgcgagctgcgccctctcctccaaaaaccaaatatctccaacccgcactccccattggccacactctaccccgcgtcctaacctacgctcggcctttcccgaccctcctttccccacgagagagggcatcctggggccaaggagccgcggaggccgcgctcaccagagccagcgtgcccgggatctcggccaccgaccgacgccagaactacaattcccaacatcctcgcaggcttcggctcccattggccgccacagagccacttctgggccgtgcaacggttacttttccaggacagtgaccactgcagtgacagcctctccgtctcttcttaaaatacccatgttgaaaacaggttctggctcccgagtgaagtctctgtccccttggcccattctgcaaaaaaaagactacactccccacaagcctctgcggcagcttccgcaggcgcttccggaagctggggtcaacgagagaagtcatttccgattggcgaatctagcgggagcaatgcgctgtctgtcaggcgtgtgttgggtacagagtttactgcaccggaccacctgaattccctgggctgaggctccatagcacgcgaactaccttgcgtgagcactatgtagattcgacttcgtgttgcctgtgacacacaggcagggcaaagccgcctcccagcgtctcagttgaacccttaccctcaacaccagtgcactcctgtgggtggcctgtagtcacctttcttgtcgaagtcctcaaagttagggacagactctcatccagtttctggagggtggaagcttcactcaggctggagtctggctctctggcctcttatctaagatcccggttcagatctgggctactagagccgggcgtggtggcgcgcgcctgggattcctgtaaccccgagggaggctgaggctgaggctggaggatggcttgagcccaggagttaaatgtatatattttaaaactaataatatttttaaaactgggctacgctggtaccttctgcaacacggcaattaggggtttgcagatcagaccttcagctcataggaggcgcgtttaaatcttaatggcaaatacaaattgaattaaattttacttgttactgaaggggaaataaacctgacctcacgcccttggagtatttccatgagaaatctatgtataagtgctcctttgatatgtacctgatacttttgaaaggctgaataagcacctgccaactttacaaaagaggaatgtttcccccaaaggcctgatgagccatctctttgaaatgtaaacagtgaagaagatagtgcccttatctccctgtcaccttgggagtttagcttaggtgcctagctccaaactcgtaactgcccgcttgtcacagataaaagttttattttttctttttgataaaggcaattaactagtgtagatggctactccaattaccaggtgaatttagaatgaattatgaaaaattgtatagcaaacaatgtcaaatcctcttacaagggggcaaattaccattaattttgaggacatgtttgtaatagattgtatctgcccaactagataaaaagtaagatctctttctgtctggcatctgattagcagattgtctacaatgtgcttcccagtccagttcaatattatttggtaataaaactgttctccttcttttctacgtttgtgaaggggattttctgggttagcaggagattttgtttttattttctccaacacctccttccatcttcttatttcttttcaccttcccaatatcagccttctgaggcttctctgttctccagtactcaggagatagagaacatggccccaaggccgttgtgagccaggagacagacaaacatttcttgatattctgtcctgcctttcacagaaaggaccaattcccttctcttgtcttggaggctgccgtgttagtactgggcagaatctgttactgaaacaccaggggttgggtctaggtcctgctggttgccagtcagaaaaccaatcactgagacgagtattgcaagggaagaaggccttaattgagtgctgcagccaagaagatgggagatcagtctcacatccatctccctgactgaccaaaatcaggggtttgtatagcagggaagaaatgtaactatgtgtgggaaaacagaaattagggagaggtaagttggaacaggaaggaggtgattggttaggcaatatgactgatgaggagtgtgggttctcattgtccacatgcaatgatttggtaagttgcagctccttgatactatctgggaggcctgatgtttggttttcctgagaaaggaactcaggacaaatgtgaccttctcaagttttaagactgggggaatccatttcttttctttccttttcctttctttttttttttttgga

SEQ ID NO: 1562262 - DNA, 4001 bp, Homo sapiens
tttcggctgccatccttcccgggaccactcttgctggaccccgggagccgacggcctccaacgcagaaaggatccgtcatctctgcagagcaagtagacaatctgtgaagcctgacgggccccacttggaacacgtggtgaggctgccctggagccctgcccttggcaggtcctctctggtcagggaagaggggcctgccttcctgtggttttgttcacgtgggaaaagcaagtgatgggggcttctgacttaggggaggggctgccagccaaggtctccccagataacccaggagtcatcatcagtttgataggatctagtcctgtcctgagaccctcaccaacttccagacccccttcccaacacgcagctctacagtgtacgcagctccacagtgtgcgtagccccacagctgcgaagatgatgccgaaggtgatgcactcctacccagtgctgggagggggtgtgcccctgggagaggtgccttgcgcaggaggaaggaggctggcaacattcctccaggggccaattatgtctctgatgatggctgctggctcacaagctgcccaggcccagcagtgggggcacagcttctcactggggccctcataccttcccatgctgacttgatgcaatgccagcctacccaggcaggtacccttggaatcttctctccagacacagatggaaaacagccaaggtgggcactgaggacccctggcccaatctggcactgcaccaagctcccgtccctgtgccggctgaactatcctacctgatgctcttcgcagacttgtctccaggcttggcaggctgacccgccccccacctctctctggatcctctcagtcctctgcctacagacccaccactaccacttcagccaaacaagtcgtggaagcaccagcagtgaaggcccaggatgctggccagagagaacgccctgctgcccaaggctggggcccccgagggcctgtgctgctgggaaccccatcctgagagctggggagcagaggagactctgggcccagccctgtggaaaagccacggaagggggtgggacaggaagcagggtgagggttgagtgggcaggtggccccctcctgatagcttctaattaacttggatccgaggggatgggaaggggctgctgtgtccaggagggccagagagctgaggtcagaggtcaggacagtcactgcccattgccaagggggaggccagtgtccggggacaaagttctctggaagtcctcactttgcaacttttgaaaggagacagggccggcatgagtcatcccagcacctgatgaccccggtggcctggggtgcaggtgcctgctgaggccccacttccaatttttctgaagcctgggagaagaattcagaatagtggggcctgaggccagggccagcctgggaggcagagacgcgactggcgccccggatgagaaggggcttcggccctcccgagcccagcggggacacagagccctcgcggggagagggggctccgccgcgctgcgcgcaggagacgccagcagcgggtccgccgcgtaggccgttcggcccgggaccccggcccaggcctggcgcgcgggtgagcgcggccagggacgcgcacctggggccagcctcgccacccacctgtcacctggggccgggagcgggcgcggggcgcgggcctcggcctggccgggcagggccgatcgcgggcgcggggtgggggggcgaaggcagtgaaccaaaatggcgactttttctggagaaggaggaggcaggaagacggcgccggcgcggggcgcgggggctcgggcgcggcggggggcgggggggctccgggcccggccccctccttggcctgcgcgcagggtcgagatccggggcgcggtgggcgccggggctgcggccagaatgggtccggggcgcggccgggcgcttacctgcggcgcccagcggggctgcggccgggccgggccgggccggggcggggggcgcggggcgcggggcgctgggtccgggcggcgcaggctgcgcgccgcgctgcgcacatgcgcgctcccgcccctcccacctttgacagttttactgcgggggggagggggcgaactctcgcgttattcccgcggccgctccgcgacggggagggggcggggagggggcgggggcgggggcgggggcccggcgctggcctgtggttcccccgctccgcggttccgcccccgtcggccgggcccgcagtccagagtagccggttctgccgtcctggggcgggggacgttttttggacagtggggtaaactgaggcccgataggggcgctaggcactgcccggagtccggcgcgcacggattgaggcgacctgattccgccgcatcctggcccgcgcggcgagtgtggtctctgggctcgggaccctgacctctggccctgggggccgtgcaccggcagcgcaggattcagccttcttccaactggccctgagaccacttttgcgactgacccccggaggtgcctggcggcttaaggccatggggttttactggggtcactgaccattgggtcaccctttcccagctctgggggcagtggttctgaaccagtgccagggccttctctgccccacagcttgggcttctgcaggcagggggcactggggtccggtgtgggctgagtggtctggaggtggcggggcactgacagcacaggacttgggaatgaatgagacagagaaaggttggctctcctaaagaggactggtaggaggcaccacacgggactggcacaggacccacaagaatctcccccaggagagcctgcctgcctgcctgcctgccttccttccttccctctcttacttccttctctccttccttccttccttcttccttccctcccttctcttccttcccttccctccctccctcccttcttccttcctttccttccttcttccttccttccttttctctttccttccttctcttctcttccctccctcccttcctcccttccttctcttccttcccttaccttcctccctcccttcttccttcctttccttccttcttccttccttcccttcccttcctcccttccttttctccttccttcccttccttctcttccctccctccctttctccttccttccttcctttctctctctttctttttctcccctcccctcccttctcctcccctcccttcccctcctctcctttctccttctccgttctttttttattcttgagatagggtctcgctctgtcattcaggctggaatgcagtggtgtgatcttggctcactgcagcctctaccacctgggctcaagcaatcctcccacctcggcctcccaagtagctggaactacaggtgtgtgccaccccacctggctaagttttaaagtattcatagagacgaggtctttctgtgttgactaggctggtcttgaactcctgggcttaagccatcttcctgcctcagcctcccacagtgtgggcattacaggtgtgacccaccgcctctggctaggagggcatttttttttttttttttttttgagacagagtctggctctgtagcccaggctggagtgcagtggtgcgatctcggctcactgcaagctccgcctcctgggttcatgccattctcctgcctcagccaaccaagtagctggaactacaggcgcccaccaccacgcccggctaatttttttgtatttttagtagagacggagtttcaccctgttagccaggatggtctcaatctcctgacctcgtgatccgcccacctcggcctcccaaagtgctgggattacaggcgtgagccactgcccctggccttaggagggccattcttacctgttcacagcacccatctcccagggaaggcctcaggcctcaggagggaagagtcaaggagactctgggttttcatcttgtgcccatagagcatttttttttttttttttttgagatggagtctctctctgttgccca

SEQ ID NO: 1562263 - DNA, 4001 bp, Homo sapiens
gctccctgctgcctctttctgcagaggaaagcccagttctgccccactgcccattcccacctccctggctttcttgcctccatggggactggctttcattttctggtagatccttttgaacgtctcatccccgtacacctgccacttctcctgggagaacatcttcagccttctctggccgcacttcctgccgcccgctctgcccttgccggccatggcctcccgcgcagcagttctctttgcgtctgtgtcctctgcgggcaccagggcatcgccaatgggggtgcctggcaggtcctccaccgcggcctgtctgaccagggcccggggatgcccactgggaacgtcagtcgagcttagtcccgagcggcagcccaggcgggctgggccgggcctggggctcagaggcttctgcgtcctggaccaggggtcccggggctccctgggctccagccacgtcctggagccctcgacgaagggcagcgagttgctcctggtgacggggacacattccacggtggtggagagctgagtggggacggagtggaagaagaggggccgagacttgtctgggggcgtccaggtggagcgcacggggcccggggccctcctacggcctggctccagcgcgcggatgtcaaagtggaaggagtccttgtaggtgtagggcgtgggcaggtcgatgctgccctgtttggacagcccggtcttccggggccgcacgttgtccagctgggcatcgtccaccaccgcctggttgtgggagatgagctgggcgatgcgctcctccagccgcttcttctccagctccaggccggcttctcgcgccccgggctcggcccctgcgacccctggccccgggcccgggccgccctccccctcggactcggcgctgtgctccgaaaggctgtgcagggggctgcagggcgcatgcggctgctccgcgctgtcggagcgcgacaggtaccccgagtcggtgctctcacacttccgcagccggccctcgggggccttggcatcccagggcttctccgctgccgtcgcctgctgccgctgcagggcgcacggcttcccggcggtcggcgacttctgctctggcaacttacgccagggttgtgtgctggccgctgggagcccaggtgacgccatgggggcagagtcccaaggagcctctctgtcggcaaatgcggaccctggacagggagcagcttcggtcctcacatccaggttcttggcaagtaggggcacgtgggcacccggagaaaggggtctctccgaggcgccttcgtgcatcccctggcacctgctctcgcccctgccctctggtctggggggctctccggccttgtccccttcctccaggaggccgcccccggcgccctcggactctgaggacagccgggagttgttgaggtgcgtctgcgtccgcctgtgcttgtagagattgctctgggtcttaaaggcgatgccgcaggtggcacacgggaagggcctctcacccgtgtgggaccggatgtgcttctctagaacactgggcttcaggcagtcgcgaccacagtgcggacacaggtacttgcccgcattccgcaccttgcctgggctgcccagcgtggggcccaggcccggcgacaggacaggcagagtgcccacgatgttcaccgtcagcgtaggggccgccggcttccccacctgggtggggccaggcccttcaggctgcagcacagggctgagtatgaagggcacgttgcccccatctaggctgcccgtcactagcggggcgcggggctggaggcccccgggaggcaccgtgtggtacagtgggatgggcagggccttcaggaacacagtggggggggccaggccctgctctggcggcagaaggacagggcccagggtcaggtgaggtgaggcctggccacctggggcccctggagggccaggagtgggagctggctggtccctcgcaggaggggcagggcaggtgggttctggaacctccattccgcatcatctggatggcccacaatgctggaaaacctgcagacaacaaccaaactttaccatgggcacctctcctctctcctcatgcagtaaatcttgcctaccctgcaccaagcacttcatcacccaacggaagcctgacaatcccctaaggaatgtactctcatcccaagcgagaggaaggtactctcatccaaaagggaaagctgaggctcagacagcgaagtaacttgtcatgcaagctgacatgtggcaaagcgggatttggacccagatctgtctgaatcctgtctcttatttaacatgccatctgcacaggtccatggcaggtttgccaccatcatcccctggcaccagcacagtgccacatgcagagacactcagaaagtgtgctgacttcatgaaaaagtcatgcagcttgttcaaggtcctcgaagttcacagtgattccgtgcacttgcacaaatcccttttcttctctgggactgtttccagatctgcaaaatgggcaaggaatcagggccttcccactctgaggttctgagtctctgctgcaggatgaagacagcaagaaaaaaaactgacgcaaggaaaggcttgccagatttatcaaacaaaaatccaagactcccagttaaatttgataaacaatgcatagttctttagtgggagtatgtcccaaatattgcatgagaattacttttggtataagtatgtcccaaatctcacacgtgccatgcttatacggaaacactgagcgctgcttatctgaaattccaatgtggctgggcatcctgtatttgatctggtgacaccactaggaaaaggagcacttcctcagcctcaagacaagacttaggtctctgctcaaaggtggggcttccaaagcccctccagactgagttaggacaaaactggttccctctaagccaggaggagtagcttggcaaatcctaggggagggagcaagagaggtccagctatgctcttcacatcacaaaggaaaagccagatgcaagaaggaaattctggacaggcctgtgactagagaatcaggggtccccagatcctttttccacagatacccatcaccaaggagctccataagcacatttcacccatccccagctccgttccccaagaaaacaaccacattccagccgttagcagtaaggggttctaagcagggtgtggcggaagtagtagcacagctggacatggtggctcacgcctgtaatcccagcactttgggaggccgaggcgggcggatcacctgaggtcaggagttcaagaccagcctgtccaacacggtgaaaccccgtctctactaaaaatacaaaattagccgggcatggtggcaggagcctgtaatcccagctactcaggaggatacggcaggagaattgctagaatcctggaggtggaggttccagtgagccaatatcgcaccactgcactccagcctgggtgagaaagtgaaactctgtctcaaaaaatatataaataaaaatttaaaaataataaaaaacatagaagtagcagcacattgagctggctcataccactcatactggctcaagagagctgattgttaaattttcaaaaattgcgcaagccagctgtgaaacacagccctaattaaaagatacgttacataaacttacaatcaaataatgttaaaaacaaataaatgacaactggataacttaaaattgattacagtctcaaatgtaagcactaaagttataaaactcttagaagacaaaggattaaaacctcatgacttttttggatttagcaatggatttttttatttttttatttttttattttttttttgagatggcgtcctgctgtgttgcccaggctggagtgcagtggtgcgatctcagctcactgcaacctctgcctcctggattcaagctattctcttgcctcggcctcctgagtagctgggattacaggtgtgcgccaccatgcccagctaatttttgtatttt

SEQ ID NO: 1562264 - DNA, 4001 bp, Homo sapiens
aggtttcattttcctttcctaagaagcagacaatattgttgccaggacaaaaaggagtacatttttgttaatccaaaaccatgtgctcaccaccttatctggcatttacatatctgccacttatatagtacccaatagcttgcagtaccctacagtttataaataattagtgagcagttatccccttagcctactctttggaatggagccaaatgattaagctctctgctctactgaatcaagagaaagaaattacatgtttcaataaccaggaggtttggcaactacgaggtgctgtttcctcaggaccagctagaaatctgatattctttcttcctcctcattcttctaccttggtgatttttgacactggtcctgtaagaggaagaggaagcccctttaagggagcttctcaacccaactcatacacatggtgtgggctggggctaaggaaagagtgggtgactcagagtcctcagcaaagggatttttgagactgtcttcactgagttctaaaatattcataattggaaactgtgactacatttggcattatatgaggggcagcttttttcctcatctgaaaaaggagtctcttttcttccccctgggaatatctctggtgagtcccctccctcatcttatcaaacccagccctcctggcgcaggctcagtatttagagtttgtttgtttattttcaattctccgaggggaaaattccttcttccccttgttgaaaaatgctaaaatagaaactccagaaaatttaaaagaaacggaagaaaagaaaaaaagatgttaaaaaaaaggcaagggaaggaagggaggagtagacatgaacaggaaatgctgggatcgaaaacagactgaagtgtttttttttggtggggggaatcaaggcctaaagggcacgaagaagaaaatcagtgatgatcaagctggcctggagtcagaatgagaggggctagtcatcaccagagtgggacgcaggaggctgaggtcggaggcagagctgggtttgggggaagtctccagggtcctggggaatccctgacccagggagcccacggtccctaatggaaatgttatggggtcagggagcgccaaggctgtgaggtggcggggttatgggggccttggggagagggtggtagcgagcaccagggggtgcttgctgaggacggaggcggcggggtgggggcagggagcaggctgaagggggtgccgaggtgctctgtagaagagggggattgataaggtgacaggaggtgaggccggaggaatgaggggggtgcgagtggcagaagggagggcacagacaggggtaggggcagaggagatcgaagtgctgagggcagaagcggtgacggtgtcgggggtgctggggagagcgacgggccagctgaggggatggggacactaaagagagtacaggggagccgaaggggcgacggggcgctgagatgggccaggggctgagtgggtgacggggcgctgagtaggcgatggaggtctggggtctgagggggagacggggcgctgagaggcgctctgagtgggtgctgatgccgctgggggccaaagaggtgacaaggctctgagtgggtgatgggggtctggggattgagggggcgacggggcgctgaggggccaggggctctgagcgggtgacgggtgcgttgggggcttgagagggtgacaggtcttacgggcagaggcagtggcgggtcggcgcgggcgccggggttcgcggcgaggcaaggaagaatcaggggcaggggcagttgcggggccactcacccggctccggcgcgtcctttcactgccgccggcgagtgctggggcttcggcccaggcaggtcggtggccccgcccggcgccgcgcactttcggtttccgttccccgcagaccctgggcggagccgggcgggcggcccagaggaggagaaggaggaggcgggggcccagggtggagagcacgagggcctggcccaggcacggccggcgcctccgccctcgaggagggcgtcacctcagctccccccggcggcggagccggcgggctcaggcgggcgcggctgaggggagcggaccgcggggggcgggagatgactgcgcccaaggcctttgcgggcctcagccggccccagaggaaggggaacccgtcgagcggtttggtgcgtgtgaagcgcgacatggcgaggaagcggacaagcccgggtggcccggcgtgtagagggaagggggcggggctagacgcggcctggacaactactagagcgcctcgggctgtgctgctcgagactacatttcccagagcgacgcgcgcggagcgggcgggaaagagagcgtttcgggtccagtgcgcaggtgcgaaagccatctttggttatataagggaggttcaggaagccattcgttctttcgcgtctgcggtgcccggagtgtggtacttctcctagttgcagtcaggcttcatacgctattgtcctgcccgtaagttcccgttttgtgtgtggtgagtggaaactccatgttcttcgttggagacctctggtcctcccttcccttctttgtgccgtcgtctctgcggccagccctaatctccttctcgtggcttctccgtctctgaccccaaataggccttaagggcgtgggagaaatgagtttctggagctggaaaagccactgccttctgcacgggcctgagaagcccttggctggtgtaaatgatgacttcacttttttccccatcagatcgacaatgctgacgtcttatattttgccagttagttctgatacatcggcctcaaaaggcccggccttgttcgtttctgaccgtgggaagatggcggttaacgccctttatttgttggttcacaggttagagcagccagcgggtacagaatggattttggaagagggagtcaccactggacctccaaggaagccacgtgcagacatctacaaccttcgatctcctgacgagtaagtctttgtctcctatgggtctactgtagaaaacacgtgctttgagaagctttagttttctaggaaaacgtgggatttaacaaagcactttctatcgagcatttattaggtatttaaaaaagtgttctgacggccgggcgctgtggctgacgcctgtaaccccagcacttggggaggccaaggcagatgggtcacctgaggtcaagatttggagaccagcctggccaacatggtgaaaccctgactctattaaaaatacagaaattagctgggcgtggtggtacgcgcctgtaatcccagcaactcacaaggctgaggcaggagaattgcccgaacccgggcggcggaggttgtagtgagttgagattgcgccactgccctacagtcggggcaacagagccagactccgtctcaaaaaaaaaaaaaaaagaaaaacatgttctgaatgttttattctcacagttcaaatattggaactaggtttctggtgaagaaacaggtttaagagaaatgcctgaagtgaaagaaccttgttagtgaagaggcgtttaacattttaatgccacttaaacatatttttggattccattcttcctgtgtgttggggcgcttaaatttccaagtggagggatgatttattgacatattttggaaagccaaatgtgtttttctgttgaactagccactcaaaccagtgcccgactacataactaatatttttgctagagtccaggagtgaggcgtttacaaagtctgggcttcatgggaacacatgtgaagcttattgttccagattgttcttttgtcaggtaacttgtggtaacttgtgttaaaatgcaatctcttggtacttgttcacttcccaactcagtaaatgccaactacttcctcaactcttccagccacactggcttctatcatgggcctgtactcagagtgtaagcactgaagacaggggtgtttggtttggctaccaagttattgccagctacaggatacaacacagaag

SEQ ID NO: 1562265 - DNA, 4001 bp, Homo sapiens
gtggctgagcacattgtgctctgcagggaggtcaggagcagcctttccacgggccgttcaagggacagctgatagaacttggcctggaggaacttacaaatgtggaaggctgagagaaggacctcagctgtggggaactccatagctaggataggcagtggaaggaaatgaggatccaccaggatggtacagactctctcccatgctggattaaacttcttgaatacttggaacatctgggccaggccttcagtgtcctccttggcagggatggcaaagtagactgctcgggcaagatgaccctccagctgcacccgaggtccatccaccaggaaggtatataagaccttaccccttgggttataggtccggtggataaataagatctcagggaaatggtcaaagacactttgcataaagcagctctggtagttgaaggtatctaactgggcagtcttgttaacctggtgcagcagcataggtgggcttgagtccttaatcaggagcccattcagcattgtcagggccatgggagagatgggagctgtccaaatgccaaggtcaaaatactttctttgcagggcagctgaccacggggctttgagtctctcaagcatcaagtaagttgaggctggaggctagacaatcattcccagatcttttttccaaagatgggcctatggagagtaacagaggtttaaggagacagcagggacctggctcttcaattattcatccacacaatatttgttgaacacttactatatgtcagcactgttctaggggaagatacacaataaacatgtaaacaaataagcaaatatatatccaataatgaagcttacaaagaccataaacctgagtaacatgtcagagagtaagctggggaagggagggatactttagttaaagtggtaatggaaggcctctcaggggagaaggatgacattggagctgaaatctaaatgataagaagttagctatggaaagatatggttccaggggatttaaataggtatggccagagctgcatatggccttttaaaaaaatagcattctagccaggtgcagtggctcacacctgtaatcccagtactttgggaggccaaggtgggcagataacttgaggttgggagttcgagaccagcctggccaacatggtgaaaacccgtctctactaaaaatacaaaaagaattagccgggtatggtggcccatgcctgtagtctcagctactcgggaggctgaggcaggagacctgcttgaacccaggaggctgaggttgcagtgagccgagattgcgccactgcactccagctctgggtgacagagtgaaactctgtctcaaaaaataaaataaaataaaaatacgattttatatttataaatgactgattggcatccattctttcctttggtcctggtatgtataagagaactgcaattgctccaaacttgctgtgttatcttgggcaagtcaatgaccctctctgagcctcaatcccttccaccataaaatatggctaacaaatgtgcatagcttctcctgcctctactatatccctcttttagcagcaatactctattccattgtttcctctatttggccccagaccgagttactgtcctcattttacagatgataaactaaggctcaaagaagctaagtgacttgcccaccattactctgtaagtagctgaaagttgagtctttggttcgggatcctgactgctgtccacagtacctggggtccaaaaaccaacagagggaatacggcctttgacctctcacctctaacctgggtgggagatgtggatgtctgacattcccagagtccagctggagccggatgagaagaaaacctccctcccatccctttgggagctgtgtgacggctaactgcggtgatccgctgtctcacactttcaccccttcaggaagcactcacccacagccaggctccgtcgccatttctccctatttgaccctgcctccgactctgactgacatccaaactcaccaaccacagcgtcagcatcgcagtgactcggaccaatgtctgaggaattcgctttcaggctttagcaccacggaccaatcgtagcgtgacgattcgcgggcgggccgtgttgccagggttacaaggagctggctggaggtaaagatacttgcatctgggagagctgagccttgaagctggagctccggggcttcccttcaggctaggcgactggaaggacacgttactatggaaactccctcaaaagcagaaaatgaaaaggaaaataaatagcagttatatatatattttttctttttctttttttgagatggagtctcgcactgtcgcctgggatggagtgcagtggcaagatctcgactcacagcaacctccgcctcccaggttcaagcgatgattctcctgcctcagcctcctgagtagctgggattacaggcacccgccaccacgcccagttaattttttgtatttttagtagagacggggtttcaccctgttggccaggctggtctcgaactcctggcctcgtgattcgcccacctcagcctcccaaagtgctgggattacaggcgtgagccaccgcgggttttgttttgttgtgtgtgtgtgtgtgaaactctaaagcccctggaatttaggaaacagtgcatatatagtcataacgcatattctaccttatggggaaactgagttccaggtctcaaattctactcctccttcggggatcaggagcccaacttttagagctgaggaaatccagatccccttaaacaagccaaaacttggcattctctagcccaaccccctccagtattctacagaatgatgccatgacttatttagggtcctactacagtagtgcaagggcctactaactggtctcttgtcctcagttcccttgaagatggcagacttagaaaactgggtgtttaccaggccttggaggattaagattaccaactagcaacatcaaatcagtgttggtacttacgcatcgaaaatgttattgggctgggtgcagtaggtcatccctttaatcccagcactttgagaggctgaggcaggtggattgcctgagatcgggagttcaagaccagcccgaccaacatggtgaaaccccatctctaaatacaaaaaattaggcaggcgtggtggcacatgcttataatcccagctactcaagaggctgaggcagaatcgcttgaacccagtaggcagaggttgcagtgagccgagattctgccattgcactctagcctgggcaacaagcaacaagagcgaaactccatctcaaaacaaaaaacaaaaaggtgcttatgtaaacctagaggggaaatctgggattagaacaggccaacatgctaatttttacagaggaaactgaggtcaaagaaattgcccacagttccccagcaagttgctggcagtcaagtctaagattcaggtttttcccccacaccctccagtctatttggcctcttcccgctagaatataaggaaacctgaaatcaaccttgaaggcttagttgtaggaaggaggcaaattaagacgcagattgccaaatccttgaatgtgaggcatcaggttctatttggctccacaaccccattaggttgctaatacttaattttcttttcttttttttttgttgttgttttttgcttgagatagagtctcactctgtcacccaggctggagtgcggtggcacgatctaggctcactgcaacctccgcctcctgggttcaagcgattctcctgcctcagcctcccaagaagctgggattacaggtgcgccaccacgcctggctaatgtttgtatttttagtagaacagggtttcgccatgttggccaggctggtctcgaactcctgacctcagatgatccatccacccgcctcgacatcccaaagtgctgggattatgagtgtgagccactgcgcctggcctcaattttctttaaaattaataaatccacctag

SEQ ID NO: 1562266 - DNA, 4001 bp, Homo sapiens
ctccatggtactcagtaattaaccacagatctactctagcactctacattcattcacagcccagggaaaccatcaattccagtgtgaagacttcccccacctcccaggcatttgtcattcatttctttctccgtacatttctttttttttttttttttccacattccttttaaagcatttatcacacaccagtttgcttgagttcaagtttatcctagttctctggggatagtttgaacacttattcatctttatgtcacctatacccagcatagcactggacttcagaacagtggaaagaatatagcctggctgtctaattgaggagctttggttgagcatctcaatccaagtctcaaactcggatatgctttaactctgagttggcccgcatgctctgagttaaaatttgaactgattcaatttttttaaatgggaaaatccacataaagtgtggatttctgacaactcttgcccaaaattctggcaacactagatctttattttcatatggcagccatcagctggagctgattagatggcatctactctccatttggcccatttcacacttctgttgtccctagcacaaagacctggtgttggttgctatttcatcattctttttcttaaagtaaaattcaaagttaaaactttcttacattgggttgtttcacctaatccctgaaggcatttgagttttcaactcctgtcttaacctctaagcctgacttctcatctgtcaaatcttctcatctgtcaaatgcaaaaaaataacatttatctataattctgaaaaaaaagccctgcagggtaaagcatgcatagagaacactgcctggcacatggaaagtgtttgaaaacggttaatataaggagctcaaaaaccatttacaaaatgaatgaatagaccaggcatagtggctcatgcctgtaatcctaacactttgagacgccgaaagatcgcttagtccaggagtctgggaacagcctagccaacataacaagacccagtctgtacaaaatcaaataattagccaggcatggtggcgtgcacctccagttccaactacttgagaggctgaggtgggaggatcgcttgagcccagcagttgaaggctcagtgagctgattgtgccactgcactccagcctgggggacagagtgagaccctgtttcaacaaatatataagaactaaaaactgaatgaatgaatgaacgaacattccaacgaccatgtgactgttttgtaaagaggagactgatgaaggaaattatcgccaaggtgtttttatccgtttatgaaagccatactttgtatttgggttgctgcagctgctcaaaacaatgggagaaactgcagttataaattccagaaaagcctgtgaatggagtgaaagtggagtgggtggtcaaaaaccaatggccgtggaggcttagctctcttcacaaggcacacagcaggtgctcaatgagtgcctgttgaatgaatggccacgcagcccaatgcgtgcctatgcacccctcctcctccaggcagccctccggaggtccagcctcctccccaccctcttggcccgccccgccccgcccgcccttacaggatgtcttcgcggatggaggtgccatggttgaggttgtggaagcggacggagacgcagtccctgagaatgaaggagcacctgttctcccttttgtaggcgctgaagcactccttgaagtcctcataggtcttgaagcagctgcccagctccatggccgcccccacaacccacactaggggctggtcccagcccgggcccaagatcacaccaggggtcaaaggtcacactatgagggtttataggcaggcgtgggcccagaatgccttaagggtccgccccaactgggtggcctattctggaactcagggaggaaccctaggcctgaccgggttacaagaggaagggggtgtatttgctatctgacaggggaaatgacactcagtccatattatccagtcccgaggttccgcctcctcagcgacatatccagtcacacacaggattcgcagattggcattcattttctccaattgctagagaaagagggccacagccaccagcggactgacaggagtcctgaccaatcataacctagattcctccttcccggggtctgcaggagacttccggttactagggcaatctgccggaagagtcaggttctgtgtatgtctccgcgtcttccgcggagcgggtgtgcagggcctgcagcattgaactagatgtcgtccccgcaggccccagaagatgggcagggctgtggcgaccgcggcgatccccctggggacctccgtagcgtcttggtcacgaccgtgctcaacctcgagccgctggacgaggatctcttcaggtagccggcagctcctgcccagcatcccctcctttagggcagaaacttgatcttgactgccgccgcccggggcccctggctccgggactagtatggctctgcgtgggatgcaccctctgccacgattaggagagaactcgcccccaacagagctgtcctctctgctctggcttcctcccttcctctccgcgctgcgaggtctgcacagctgagcaaatatagtggtgacctgagagaccctgctcggcagcctgccctaagccttcacgggggagctagcccagagagggcagtgatttgcccaagggcacacagctgatggatcagccttaaaaccgacgccgcagctccttgtgtcttcagtatccttttcttctcacaatatcccgcccccagtaccatttggtgggtctggtttctcattacttattctgaggcctaagcatgtttttttctttcccagcatcgctgaagttcttgactgcagcaagggtttctttctttctttgaggcggagtcttgctctgttgcccaggctggagtgcagtggtgcgatctcggctcagtgcaacctccgcctcccgggttcaagcatttctcctgcctcagcctcctgattagctgggacatacaggcgcgccacagcccagctaattttttaacttcttttagtagagacggggtttcaccgtgttggccaggctggtctcgaactcctgaccttgtaatctgcccacctctgccaaagtgctaggattacaggcatgagccaccgcgcccagccccctgcagcaaggcttctaacagctttgacctccaaggcttctcctggctttactggaagttatcttactttgagctcccttccttccacttaaggaattgtaaataacttcttggagggctatttgatttttgtttttgaagacaagatctggccctgttgtccaggctggagtgcagtggcacgaacatggctcactgcaacctcgacctcctgggcccaagtgacccttctgcctcagtctcccgtttagctgggaccataagcgcttgccaccacatccagctaacttttttatttttagtagacatgaggccccactttggagcccaggctggttttgaactcatgggctcaggcgatcctcccacctcggcttcccaaagtgctgggattgattacaggcgagagccacctgccaggtcatggagggctgttcataactcattgttacagaaaatgccaaacagctgggacgtgggaggctagagacataattattcagcttccaatgggcctacattctgggcaagcattttcatctctggggccaagctgcagttttctcatctgtacactgaaggagttagacttgatgtctgagggctcttgttatttattcatttatacatttatttaattttattttttgagatggagtcttgctctgtcacccaggctggagtgcagtggtgcgatcttggctcacctcaacctctgcctcctgggttcaagtgattctcctgcctcagcctcctgagtagctgggattacaggtgcatgccaccacgtccagctaatttttgtatttttagtagagatg

SEQ ID NO: 1562267 - DNA, 4001 bp, Homo sapiens
aactttttttaaagtacccagttttcagagaggaaaataattttcaaaataaaataatgttctccaaaacaatgagcccagccgttactgtctccacgtgataacaagacagttgagctccgggggcatattatcaaatgataatataacattttttaaaaacttggtattaaaaatctgtaccttaaaacatcggattcattatttttccacatgtccattataggaaaacccacaccaagccacctttgcagctctagaaggaattcaagagttaactagcatctaatacaagatctataactttctctacctgcaactaacatcaataacctccttaattttccatggtcaacctcatttagaaatcctaatagatgaacaagtgcaaaaggcagaattcccaagtgttgcccaaagattcaaccagagaaaagcaagtgtcaccgggagggaaacggcttttccgttttgttcactgcctcttctacgtagaagccacgcagggaaggcagggcagcccagagaggcgagtcagcctgcgggtctcccgctcgggctctcccctcctccacccaccgcctggccatgtctgcggccccattctatcgtttacacaaaatcattatataatgagctggcgaggctccgtatgttctacagtaacctgtttggaatcataggatgcagttgtcacagcggagcatgcgcagaaacctggctattttttttttttctcttgagctcaaggcaagaggtaactgtcggtcaaatcctgctgagccctgctgacttcaaatacaggatgctaaaaatgaaatacaggggaggggcggggtgagccccggagcgtgccatgcactgtgggcttacagcctcggggaagtaatatcagggtagtaactacacagatacacggcgtggaatacggaagactttccatttgtactttagctacctctacgatgttggtgtgctgggcgtagacatgaagggcgctaggataaggtgaggtgggtggctgggggcctgatgattggtttgttgtttgttcctaatgccagaaaaccagaaagggagattcctgaccacccctggaaacagcacttacagtaactgtgtccagcagtgaactcgccgacaccccgccatccctctccggagctcggggaagtgaaatgcgcatccctgtccccaccgcgtctctctctccggcgcgcgcagaaaggcggccggcaggaatccgggcttgcccctcgcgggtctccccgggccttcgccgccgcctccccgagtgggtccgggagagggtgtccccgggagtgcagtcgcaggctccggctctctgggggcagcttcctcttttgttcccccagaccttgcctggcgttcctggggatggcgcgagaagtccccggtccccaagcccacagccgcgcgcgcggggctccccttcttcaagtcccctcttccctccggcccaagctgcggcccctccccagtccccagtgcgctccgggtccccagctccccacgccccccgcccagaagccatcaggtcaaggccatcggtccaacttgtagggcaactcgctgcccccgccccactcccggcccctccacctagtccgtgctctctgccggtgcaaggggcatcccgaggctccaggtggccctggcggaggggcaggggcagcgatcggagccgggcgccactctagggtgccctgggtcagcgcccagaggacgcgctcctgggaggggtgtcaggtcgagcttgcgagtctttgtgtgtttcctgctctccttgaaaataaaaccgttcccggcggacgaaggatgcgctcactcaccatggcggtgccgaccgagaaagcggccatcagacaggccatgccccgggggcggcggcggcggcggcggcggcggcggcggggacgaggcttgagctgcggggccgaggctgcgctggctcccggctcagccgctgcgcggggtgcgggctgcgcttgggctccggctgggatccggctccggctctggttccagcgcgcccgaccccgccccgagcgcgcgattggccggcaccaagggggcgggcgggccggcaggtgcgcgtgctcttgttttgctcctgctgggggcggcggaccaggacccctgaagtgcaggttccgggagcggcccgagccgaggcctcgcaggcggcatgggaaccccctgccaccccggaaaccccgggtcccgaactcgcgggggctgggccagcacgggtgaggctgcggggacaccggacagacgccggggttcccaggctcggaaatccactgcctccaagcctcaagcggctgtgtgatggggtcgaagagggggcgtccagggagggagagtgagggccagggggcttctttcttgctgctgcttcttcccttcccgcccaccccaccccgacggtgttgggcagctctctgccaggtaggagcttgaggactaaagaagagataaccactccaacgcccccaacagcaccggtgtggggtgacccctggcagtgaggcatcgtgtgcactcacacatgtgacattgctgtgcgccagccatggtgctaagtgctgggttacaaaggggtgctgagtgaagatgcccaggcctctgccctctgttcacccccgaacaaaaaaagaaaagcctcattttctgcagacagaggtgtttccagagccatgttcatggaactgtataaggaataacaccagggcacactcccatgtggccccaggctggaatatcagatggtccagcatctctaaagcccttattatatataagtggggccatttcctggtatccatggtgacaaggaattctttactcccagtctcaggccctaatgcttttgttcagttgtttgcatgttgggacgaaaaacaggaatgcatttcttttcatttccagcacacctgggtcccccctcccaaccacacctcagatgagccaggtctctctctttctcctcacctagaaaggaggcacagctttttatgccaggcaggtggacttcacacccacaggtcagatgactgtaaccaaattcagccgctcaaatcgaaggagagaaaggagacacggttatgagtttaagtgggaggccttgcctttgtctgaatggtgttgtctcaagagtcatccagccgggcgcagtggctcacacctgtaatcccaccactttgggaggtcaggagatcgagaccatcctggctaacatgatgaaaccccgtctctactaaaaatacaaaaaattagctaggtgtggtggcgggcacctgtagtcccagctactatgtaggctgaggcaggagaatggcatgaacctgggaggcggagcttgcagtgagccgagattgagccactgcactccagccggggtgacagagtgagactccgtctcaaaaaaaaaaaaaaaaaaaaaaaaaaaaaagagtagatccattaccttgattttacacttggctgaaatgaggaaatctgactgctgtgtttaccaggtgccactgcccgggtgccaggccttggaggctgtgtggtgccttaaacatacactgcagggaggccagcaaagcttgagtgtgttgggaagaggattcagatccacaaacctagggagtgtttacgccaaaacacagagaggaaagtgcctgatggctggagatggggactggtgcccagccctgggacccatctcgctccaggaacagacaggccctggagcacgagaggaggcacggaacacagccggggaggaactgtccatgtggccagggcaagtgagggtgcctgcaatgacataatttctgtccaatatccatcctcctcacttccaggaatgtgcccagaatttccttctagacattccccctcttctacccccacccagttctctgcccgaagatttatgcgggattgattcaccttcagctcgagaataggcaattggcttcagc

SEQ ID NO: 1562268 - DNA, 4001 bp, Homo sapiens
agggtctgtagcagtcagtaagccacccacaggccgtggtgagccgcattcactccatttccaccaggaacacagagacagaaactttttctcctagcattaggaggaagtcaggaaacaggaggaggagccagtcagcagcacagttagcacgcagctgtctgtcttctctctttggttcactgctgccagccttggtacctgcctaagcatcctaagcacataagaggaaaatgcactgaccaagagcccccaaggcgactgcccagaagaaaataccaaaggcatcataccctgaactgagccagagaccagaccgcacttgaggggtcacttggaatcccagaacacctccaaataccaccctcccactggacgcatttgccaccccttgtatgcccaccgaactcaggggctccagcatgttcccccgagtgcctggctcacccccaagtacctcctttgactcacagctcagagggtccacaccaggatggaccccagggcagggaggtgaaggaaaagcaaagcttaagatcctggtatctctgaagggctctttgtttatgacttggccagaatttattttatttttaatttatttttcttttaaccctacagcccccagaattcccaggtggtctctcattcaaggactagccggggcctaactctgcttagcttctaccatcagattattgctttcagggtgggacagctgtgcatgaatagaaatgtttaaactttttttaaagtacccagttttcagagaggaaaataattttcaaaataaaataatgttctccaaaacaatgagcccagccgttactgtctccacgtgataacaagacagttgagctccgggggcatattatcaaatgataatataacattttttaaaaacttggtattaaaaatctgtaccttaaaacatcggattcattatttttccacatgtccattataggaaaacccacaccaagccacctttgcagctctagaaggaattcaagagttaactagcatctaatacaagatctataactttctctacctgcaactaacatcaataacctccttaattttccatggtcaacctcatttagaaatcctaatagatgaacaagtgcaaaaggcagaattcccaagtgttgcccaaagattcaaccagagaaaagcaagtgtcaccgggagggaaacggcttttccgttttgttcactgcctcttctacgtagaagccacgcagggaaggcagggcagcccagagaggcgagtcagcctgcgggtctcccgctcgggctctcccctcctccacccaccgcctggccatgtctgcggccccattctatcgtttacacaaaatcattatataatgagctggcgaggctccgtatgttctacagtaacctgtttggaatcataggatgcagttgtcacagcggagcatgcgcagaaacctggctattttttttttttctcttgagctcaaggcaagaggtaactgtcggtcaaatcctgctgagccctgctgacttcaaatacaggatgctaaaaatgaaatacaggggaggggcggggtgagccccggagcgtgccatgcactgtgggcttacagcctcggggaagtaatatcagggtagtaactacacagatacacggcgtggaatacggaagactttccatttgtactttagctacctctacgatgttggtgtgctgggcgtagacatgaagggcgctaggataaggtgaggtgggtggctgggggcctgatgattggtttgttgtttgttcctaatgccagaaaaccagaaagggagattcctgaccacccctggaaacagcacttacagtaactgtgtccagcagtgaactcgccgacaccccgccatccctctccggagctcggggaagtgaaatgcgcatccctgtccccaccgcgtctctctctccggcgcgcgcagaaaggcggccggcaggaatccgggcttgcccctcgcgggtctccccgggccttcgccgccgcctccccgagtgggtccgggagagggtgtccccgggagtgcagtcgcaggctccggctctctgggggcagcttcctcttttgttcccccagaccttgcctggcgttcctggggatggcgcgagaagtccccggtccccaagcccacagccgcgcgcgcggggctccccttcttcaagtcccctcttccctccggcccaagctgcggcccctccccagtccccagtgcgctccgggtccccagctccccacgccccccgcccagaagccatcaggtcaaggccatcggtccaacttgtagggcaactcgctgcccccgccccactcccggcccctccacctagtccgtgctctctgccggtgcaaggggcatcccgaggctccaggtggccctggcggaggggcaggggcagcgatcggagccgggcgccactctagggtgccctgggtcagcgcccagaggacgcgctcctgggaggggtgtcaggtcgagcttgcgagtctttgtgtgtttcctgctctccttgaaaataaaaccgttcccggcggacgaaggatgcgctcactcaccatggcggtgccgaccgagaaagcggccatcagacaggccatgccccgggggcggcggcggcggcggcggcggcggcggcggggacgaggcttgagctgcggggccgaggctgcgctggctcccggctcagccgctgcgcggggtgcgggctgcgcttgggctccggctgggatccggctccggctctggttccagcgcgcccgaccccgccccgagcgcgcgattggccggcaccaagggggcgggcgggccggcaggtgcgcgtgctcttgttttgctcctgctgggggcggcggaccaggacccctgaagtgcaggttccgggagcggcccgagccgaggcctcgcaggcggcatgggaaccccctgccaccccggaaaccccgggtcccgaactcgcgggggctgggccagcacgggtgaggctgcggggacaccggacagacgccggggttcccaggctcggaaatccactgcctccaagcctcaagcggctgtgtgatggggtcgaagagggggcgtccagggagggagagtgagggccagggggcttctttcttgctgctgcttcttcccttcccgcccaccccaccccgacggtgttgggcagctctctgccaggtaggagcttgaggactaaagaagagataaccactccaacgcccccaacagcaccggtgtggggtgacccctggcagtgaggcatcgtgtgcactcacacatgtgacattgctgtgcgccagccatggtgctaagtgctgggttacaaaggggtgctgagtgaagatgcccaggcctctgccctctgttcacccccgaacaaaaaaagaaaagcctcattttctgcagacagaggtgtttccagagccatgttcatggaactgtataaggaataacaccagggcacactcccatgtggccccaggctggaatatcagatggtccagcatctctaaagcccttattatatataagtggggccatttcctggtatccatggtgacaaggaattctttactcccagtctcaggccctaatgcttttgttcagttgtttgcatgttgggacgaaaaacaggaatgcatttcttttcatttccagcacacctgggtcccccctcccaaccacacctcagatgagccaggtctctctctttctcctcacctagaaaggaggcacagctttttatgccaggcaggtggacttcacacccacaggtcagatgactgtaaccaaattcagccgctcaaatcgaaggagagaaaggagacacggttatgagtttaagtgggaggccttgcctttgtctgaatggtgttgtctcaagagtcatccagccgggcgcagtggctcacacctgtaatcccaccactttgggaggtcaggagatcgagaccatcctggct

SEQ ID NO: 1562269 - DNA, 4001 bp, Homo sapiens
tgcgttcccagcatcaagaacagctcctggcacagagtcggtgatccctgatgtctgctgagcacggggctgaatcttaggtctcaggaagcgaagttcaggttggtgtagcgctgtggtggagtggaagaaggtcgacagaatgaagctcactcagattaactcagggtagctcaccctgtcatgtaagacaagtccccaacccctgggctgcagaccagtccgtggcccgttaggaatggggccacacagcaggaggtgagcggcaagcgagggagctttatggcttgagctctccctcctgtcagatcagtggcggcattagactctcataggagtgaaaaccctattgtgagctgagcactcaagggatctaggttgcacgcttctaatgagaatctaaatctaactaatgcctgatgatctaaggtggagctgaggtgctggtgctcgtgctggggagtggctgcaaatacagattaacattggcagagaggtttgactgcacagagaccataataaatcaactgcttgcagacacgtatcaaaaccctatcagtgagtggcaagtgacagttaagctacatctggtggcaggctttatagtggcaagtgaggtgaaaaaaaaaagcacaatatgctgggcttaacacctaggtggttggttgataggtgcagcaaaccaccatggcacacgtttacctatgtaacaaacctgcacatcctgcacatgtacctcgggacgtaagaaaaatgaaaaacaataaaataagaataaaacaaaatacaaaaaacacagtaggccaggcgtggtggttcatgcctgtaatcctagcactttgggaggtcgaggcaggtggatcacttgaagtcaggagttcgagaccagcctggccaacatggtgaagccccatctctactaaaaatacaaaagatagctgggcgtcatggtgcatgcctgttgtcccagctactcaggaggctgaggcaggagaatcacttgaacccaggaagcagagggtgcagtgagccgagatcatgccactgcactccagtgcaacagagggagactccgtctaaaaaaaaaaaaaaagtgcaacataaaagtattgcatttgaatcatcccgaaagcatccctccaccccacccccaaaccatggaaaaattgtcttctgtgaaaccagtccttggtgccaaaaagtttggggacccctgatatatgaagactgcacgtaaaaaggttgcaaatcaaagccccacacttccaggaagactgtattcatgcccaacacttgatcagaattcttcttcacaggctgagagggggaggctgggaagccatgggatgtacccaaaggcttctctggagggatctagaaacccgttgggaccctgcagaggagtaggcaatccaagccaccaagccggcctcacccccatggcccggctggccgcacatgctcaccaggggccatgggcagccctgccacaggcccacctgaacttgtgactcccctgcacacaccatcacagaaaccgagtgcaggatcctcacaccggaccccaagtcctcagggtccccctttctctccctcatgtcgtgggctctgactcattctcactgcatctcccaaatccaggcagctcaccaatatttggtgtctgactggtataggtcacagatactttacatcacagtttaagtcacaaatgattgctgcctgaactaggagatgtggcttacatttttcttaatctacatctagttaattacacttattccatacatttatatttaaagatattttcttactagaaagcattttgtcagtgacttacccacaaacataggtagtccagctgctgccctctgaagtgacatatatttattttgcaattaataaagggaagaagaaactcccttaagtgggacaaaatttcagttttcaccactgcaggcatgtaaagccccccaaactacaaatgatgattcagtgtctgtgtaatgctacagggaggattgttttaaaatcagcatgatgcaattccatgtgtaataatattgcctaatgtaattgttactgcagaaaacaggaagtgagcagggttactaaagggcagttctgttccctcacaagtcactgggcgtaaagcagcacctagtacctgtccacagaaggacccaagtaggaaaatctacccatctctcacttttggtcagattataagttgtacattcgtgaacatagtggaatttattttttataacacacattgaaaacaattacggcaaaaactgaaattcctccaggtctacagtgtaatagttttaggtaaatcaaattttcgtctagattaactttaatgacatcatatcacaatacctctagccaatgattattgcagcaaagtgggggaaagtgagctggtgaagcctctgagatctcagccctggaagggagcttagcagaaacctggtaacaaggacgaatggaatgaaggctgtattaggtgctctgtgctgagaagtctatccattaactcacttaatccccatcacagctccatgagccagacactgttattattcacagtggggaagtaaggcacagattattttacttgctcaaggtcacagcaagaaagtacccaattccagagtcaaaacaggtgggtgtggctccagaagctgccctttttttccttcctgtaaggactgctttttaagtaaagtgcacaaatctttctgtaaagtctgatgaatattacatgtctatgcacctgtacattcaccatccagatcctgatatagaccatttgcattgtgtaaaaatgttcctcttccatttcctaaccaattactgtctctacaggtaaacattattctggcttcaattaccatagattagctttgtttattcttgatctttatataattggaatacagtattactactttgtgtctggcttctttcattcatatgtttttgtgattcatgcacgttagtgcttgagtccatagtttactcttttatgtgagagagtatcttttcattctcctattggtggacatttgggttgttctcagtttggggctattataaataaagttgccactagcattcttgtatctgtctcttggtggatacaaacattcatttttgttgagtgaaatctaccagagaaattgccaggttatgggacaagaatgtgcttaatgctagtggatgctatcaaccagttttccaaatttttaccgacttatactcttgcctgcaatgtgagagttccagtggctccacgtgcttgccctcactttgcactgtcagtttctgtaaaatgtagccactctgattggaatgtgatgatcatatcatcaaggctttaatttgctgttctgtactgattaatgatgtgccacttcattttttttaagttgtattgttttgattttagtattggtttgtagaattgcttaatatttctaaataggtgccctctgtcacatagatggattttgaatatgttttctcagtctgtagtttgccatttaggttttgttttgctttttgtttttgtttttttgatacggagtctcactccgtcacccaggctggagtgcagtggcatgatctcagctcactgcaacctctgcctcccaggttcaagcaattctactgcctcagcctcccaagtagctggaattacaggtgccctccaccatgcccagctaatttttgtatttttagtagagatggggttttgccatattggccaggctggtcttgaactcctgacctcaggtgatccacctgcctcggcctgccaaagtgttgggattataggcgtgagcccctgcgcccggctgaccatttaattttgtaatgatgtcagttttcgtctttgttttttgatgacagaagttcttagttttaatgaaatctaatcacttttatagttagtatgtgtgtgttttctttaagaaatctctgaagaaatg

SEQ ID NO: 1562270 - DNA, 4001 bp, Homo sapiens
tacatcaggcccacggaacgagttgaaacaagcccagtctggatctgagctttagcttccaaatccttccctgtctcttctgaccacacctgagggcagggctttctctgttttgtccacccctgcgttcccagcatcaagaacagctcctggcacagagtcggtgatccctgatgtctgctgagcacggggctgaatcttaggtctcaggaagcgaagttcaggttggtgtagcgctgtggtggagtggaagaaggtcgacagaatgaagctcactcagattaactcagggtagctcaccctgtcatgtaagacaagtccccaacccctgggctgcagaccagtccgtggcccgttaggaatggggccacacagcaggaggtgagcggcaagcgagggagctttatggcttgagctctccctcctgtcagatcagtggcggcattagactctcataggagtgaaaaccctattgtgagctgagcactcaagggatctaggttgcacgcttctaatgagaatctaaatctaactaatgcctgatgatctaaggtggagctgaggtgctggtgctcgtgctggggagtggctgcaaatacagattaacattggcagagaggtttgactgcacagagaccataataaatcaactgcttgcagacacgtatcaaaaccctatcagtgagtggcaagtgacagttaagctacatctggtggcaggctttatagtggcaagtgaggtgaaaaaaaaaagcacaatatgctgggcttaacacctaggtggttggttgataggtgcagcaaaccaccatggcacacgtttacctatgtaacaaacctgcacatcctgcacatgtacctcgggacgtaagaaaaatgaaaaacaataaaataagaataaaacaaaatacaaaaaacacagtaggccaggcgtggtggttcatgcctgtaatcctagcactttgggaggtcgaggcaggtggatcacttgaagtcaggagttcgagaccagcctggccaacatggtgaagccccatctctactaaaaatacaaaagatagctgggcgtcatggtgcatgcctgttgtcccagctactcaggaggctgaggcaggagaatcacttgaacccaggaagcagagggtgcagtgagccgagatcatgccactgcactccagtgcaacagagggagactccgtctaaaaaaaaaaaaaaagtgcaacataaaagtattgcatttgaatcatcccgaaagcatccctccaccccacccccaaaccatggaaaaattgtcttctgtgaaaccagtccttggtgccaaaaagtttggggacccctgatatatgaagactgcacgtaaaaaggttgcaaatcaaagccccacacttccaggaagactgtattcatgcccaacacttgatcagaattcttcttcacaggctgagagggggaggctgggaagccatgggatgtacccaaaggcttctctggagggatctagaaacccgttgggaccctgcagaggagtaggcaatccaagccaccaagccggcctcacccccatggcccggctggccgcacatgctcaccaggggccatgggcagccctgccacaggcccacctgaacttgtgactcccctgcacacaccatcacagaaaccgagtgcaggatcctcacaccggaccccaagtcctcagggtccccctttctctccctcatgtcgtgggctctgactcattctcactgcatctcccaaatccaggcagctcaccaatatttggtgtctgactggtataggtcacagatactttacatcacagtttaagtcacaaatgattgctgcctgaactaggagatgtggcttacatttttcttaatctacatctagttaattacacttattccatacatttatatttaaagatattttcttactagaaagcattttgtcagtgacttacccacaaacataggtagtccagctgctgccctctgaagtgacatatatttattttgcaattaataaagggaagaagaaactcccttaagtgggacaaaatttcagttttcaccactgcaggcatgtaaagccccccaaactacaaatgatgattcagtgtctgtgtaatgctacagggaggattgttttaaaatcagcatgatgcaattccatgtgtaataatattgcctaatgtaattgttactgcagaaaacaggaagtgagcagggttactaaagggcagttctgttccctcacaagtcactgggcgtaaagcagcacctagtacctgtccacagaaggacccaagtaggaaaatctacccatctctcacttttggtcagattataagttgtacattcgtgaacatagtggaatttattttttataacacacattgaaaacaattacggcaaaaactgaaattcctccaggtctacagtgtaatagttttaggtaaatcaaattttcgtctagattaactttaatgacatcatatcacaatacctctagccaatgattattgcagcaaagtgggggaaagtgagctggtgaagcctctgagatctcagccctggaagggagcttagcagaaacctggtaacaaggacgaatggaatgaaggctgtattaggtgctctgtgctgagaagtctatccattaactcacttaatccccatcacagctccatgagccagacactgttattattcacagtggggaagtaaggcacagattattttacttgctcaaggtcacagcaagaaagtacccaattccagagtcaaaacaggtgggtgtggctccagaagctgccctttttttccttcctgtaaggactgctttttaagtaaagtgcacaaatctttctgtaaagtctgatgaatattacatgtctatgcacctgtacattcaccatccagatcctgatatagaccatttgcattgtgtaaaaatgttcctcttccatttcctaaccaattactgtctctacaggtaaacattattctggcttcaattaccatagattagctttgtttattcttgatctttatataattggaatacagtattactactttgtgtctggcttctttcattcatatgtttttgtgattcatgcacgttagtgcttgagtccatagtttactcttttatgtgagagagtatcttttcattctcctattggtggacatttgggttgttctcagtttggggctattataaataaagttgccactagcattcttgtatctgtctcttggtggatacaaacattcatttttgttgagtgaaatctaccagagaaattgccaggttatgggacaagaatgtgcttaatgctagtggatgctatcaaccagttttccaaatttttaccgacttatactcttgcctgcaatgtgagagttccagtggctccacgtgcttgccctcactttgcactgtcagtttctgtaaaatgtagccactctgattggaatgtgatgatcatatcatcaaggctttaatttgctgttctgtactgattaatgatgtgccacttcattttttttaagttgtattgttttgattttagtattggtttgtagaattgcttaatatttctaaataggtgccctctgtcacatagatggattttgaatatgttttctcagtctgtagtttgccatttaggttttgttttgctttttgtttttgtttttttgatacggagtctcactccgtcacccaggctggagtgcagtggcatgatctcagctcactgcaacctctgcctcccaggttcaagcaattctactgcctcagcctcccaagtagctggaattacaggtgccctccaccatgcccagctaatttttgtatttttagtagagatggggttttgccatattggccaggctggtcttgaactcctgacctcaggtgatccacctgcctcggcctgccaaagtgttgggattataggcgtgagcccctgcgcccggctgaccatttaa

SEQ ID NO: 1562271 - DNA, 4001 bp, Homo sapiens
ctgtaaccaaattcagccgctcaaatcgaaggagagaaaggagacacggttatgagtttaagtgggaggccttgcctttgtctgaatggtgttgtctcaagagtcatccagccgggcgcagtggctcacacctgtaatcccaccactttgggaggtcaggagatcgagaccatcctggctaacatgatgaaaccccgtctctactaaaaatacaaaaaattagctaggtgtggtggcgggcacctgtagtcccagctactatgtaggctgaggcaggagaatggcatgaacctgggaggcggagcttgcagtgagccgagattgagccactgcactccagccggggtgacagagtgagactccgtctcaaaaaaaaaaaaaaaaaaaaaaaaaaaaaagagtagatccattaccttgattttacacttggctgaaatgaggaaatctgactgctgtgtttaccaggtgccactgcccgggtgccaggccttggaggctgtgtggtgccttaaacatacactgcagggaggccagcaaagcttgagtgtgttgggaagaggattcagatccacaaacctagggagtgtttacgccaaaacacagagaggaaagtgcctgatggctggagatggggactggtgcccagccctgggacccatctcgctccaggaacagacaggccctggagcacgagaggaggcacggaacacagccggggaggaactgtccatgtggccagggcaagtgagggtgcctgcaatgacataatttctgtccaatatccatcctcctcacttccaggaatgtgcccagaatttccttctagacattccccctcttctacccccacccagttctctgcccgaagatttatgcgggattgattcaccttcagctcgagaataggcaattggcttcagccggtggatggcccccatccagcctggccatcctggctggtccggaactggaagtgtgaggcagtgcttactgggctgctgggaatggccagggggatggtgtgtggagcgtgaggatgaagtcagagagggaagatgctatgctgggcccttgttggctttggctgctggattttctgttgcaggataagtgaaagggtcctcacttatctgtctgtacagtggggtcaaaatccccaccacgtgggaaataaggcatggcaagcactttctagcatgcccagcaccgagtaagcatcccactgtagtcactgctgtgttcccctccagcgcccgatcgggaaagaagccaacagtagcgtagcacaggaccccattcctatcaaggctcttggttgtaaaggacagaaactccaactggcttaagctaagtacagaaaggttcggagtgcagtggtttcaggactactgggaccaaagacctgtactactctgtcctcagcccctggtctcttgctgtctccacggctctggcctccccaggtggtctcccctctggcaggctgtctctgcatggccccccagcagctgcaggcttgctcctgtcacctggcagcaaccactgcatcagggggttgccaaaccctgatgggcctggcctggttcacatgggatgaaatgagaaggttaaccccaatgggaccctgcagaaagactgggcatgggtgtccagccaagacttttcgaggcattctaagtagaaccctgaggatcaaccaggcaaggggagctctcgacaggaccagcttagtcccaaccccaacagaaatttctgctaaggcattgctgacagctggtaatttccagtggggagccacttcctgtctgtattagtccattttcacgctgccgataaagacatacctgagactgggcaatttacaaaggaaagagatttaacggactcacagttccatgtggctggggaagcctcatgatcatggcggaaggtgaaaggcatgtctcacatggcggcagacaagagagagagcttgtgcagggaaactcccctttataaagccatcagatctcatgagacttattcactatcatgagaatagcatgggaaagacctgcccctatgattcagtgatctctgaccaggtccttcctacaacatgtgggaattatgggagctacaattcaagatgagatttgggtggggacacagccaaactatatcactacctcaactggcaacccactccattattaagtgttgtcaccattagcaaactgaacctgtgtccaattggactccctatcaccctgactgctctgcacaccatagcaacatggagtcactccccagagtaggccctggccagccaatgatggcaacaacattctttccagacccttgttctctggaccagatgcccccagtctctccagtgtggcttcctagaagacgcccttttgtcccactttccccttctcgggatgggtgccagttcctcgtgtccctcatgaaattcagggccaccaaagaacacctattcagtgtgatcaggacagaacaggccagggtgatgtgctccttccctctagagggtctgcatctattagcacagcccatgttggccttgacttgcagccaacagcatcacccagttgacttcgagtggagtcaatggaagtctaggtctgtgggaagagaactcttattccatctggccttccctatggtgtcccattttagaagtgtctgatttatttctgtggacttccagctgctgaggctgaacatgaaggggagaaaggggcacactgaggacttggcctctggcgtgaggatcctgcccttggtgcttgtgagggtgggtgcaggggagtcacatgtccaggtgggcctgtggtggggtgaccccttgtccctggtgagtttctgcaaccagccaggccattggggtgagactggcttggtgacttgaattgccccatcttctgcaggaccccaacaacaggtctctgaatccctggttcccctgcagatccctctgcttctccacctgggccgaggctggtctgcatgcagcctgccaatgtgcacacagacctgacctgcctgctgtgtcttcggctgccttgtgcttcactgtgtggccggggacatctcgctcacttgacacctccccatttcatggaggaaaacaaaaaaacaaagaaagctgtccctctgcccctttgcccagctcctctctgcaccattcccactgctgcctgatggcaatatgaagtatgacagcttatgggatttttttcccccaaattctggaaactgggtaggagaatggggagaaggctgcagagagatgtttgtctgcttgcctgcttttcacaacccagatctctgactctgaagataaaagttcccagccagttaagaacagaagatgctgccccaagtgtaagtaggaaagagggcttgtggctctcctgtctgacagtggtgagtgatgtgagggagggagagacagggatgaacaccgtgccctcgtcatcccaggccgggacaacacagcaggtgctcatgctcgagacgcatccctgtggcgagcttgccttgggctgggcctggagatctcccttctggtcagcctggccccggccctgttggcttctctgaccaagggagggagtgtacgtgtgtcttagtctattctggctgctgtaacaaatatcgtagactgggaaatctgtaaactacagaaaggtattgttcatagcactggaagctgggaagtccaaggtcaaactccagcatctctggtgtcaggtgagggcctgttcctcatagatggcgcctctgtgtcctcacatgatggaagaggaagagatgggcccttcaacctgtcttatgagagctccaccctattcatgaggcaaagtcttcatgaactaatcaccttccagaggccacacctcttagtactatcagagtattaatcacactgagcattaagtcccaacaaataaatttagggggaaccccaacattcagaccatagcattccaccc

SEQ ID NO: 1562272 - DNA, 4001 bp, Homo sapiens
aggggagaattctttaaaaaatgacacgcgagagagttaaagaaggaaaaaggcaccaaagtgatgaaacaaaaagaactggagaataagcactgcacagagagaaggccgtagcaggaaggaccggcagtgactttcaacagtgcttgagagcagaattatggccgcgagagggagtgcaaactgggaggcggggcaaacccgggaaagacctcccaagcaggttctgcgaaggggccccaccgccttcagcccgcctgggtcagccttataagggggaaaggggacagaagtctgcagaacagagatcctagcgtagccgctcagggtaccttcccaggtcaccattgctcctctgccctctccacatccgccctcccgtgagcgcaggatgcacgcacaggcagcggttacaaaactcagcgcaacgttgcaacccgcacaaaaggcgcacacaaaatcattaaaaagaaatacacagagtggaaagaactcgcacaagctccaactcgctaaaggtggaaggagtcaggttacaaactctccctccccggcctaaatgctttgctttagtttgcagaaaatcgtttgtcagtttttttcttggttattcattattcgggcaaatgcaagtatgttttctagctgagttcaccaatccaaacctcaaaccacattcctccactccaggcctccgttctgtccgcggacttatgatcctgcctgccagcaggagtctaccctgaagtcgcgtgggatagataaagtgaggagaggaggatgaatggacagacaaacgagagcaattcttctacctgtgggctgtcctacgccttgcagtgccgggtcctgcggcgaccactgagccccttcgtcctcgccctcagtcccttcgtcctcgtcttcggtctccgctttcccagtcggccggggctcgtcgtccacgaccccgcacgtgccgccgacgtcgccctgccgattccgccgcaggaggtggaactgtagtggtgccggcggcttctcccctggggcggcggtggcgaggcgctcgctggcggcgggcagcggctggatgaaatacgcctcccccagcaggtagaaggcgccgcgcacgccctcgcagaggctgagggcggcagccgagctgggatcgccattcacggtgccggagtagaagcagtgcgccaggtcggtttccggaagcggcgtctcggacccggatttgcgccccacgttctggagcgtgaagccgggcgccaaaaagctgctgtcgggccgcagctccagatccagctgctggtcaaaggcgtgcaggcggaggcgcgtggtcccgtgtcccggggcgcgctccagctccggcaccactagctcctcgtcctcctcggaggggcgcccgagtgcgtccgacacggccagtagcgccgcggcgagcagcagcagcgtgggtactggcccaaagctccgagaccccggagcccgctccgcgttccccatgtcgctgcccagcttgcgccttccgaacccctcgggcacagctcgctgcattggagccccaggagacaccgctcgtagcagcgcacggagcgagggacctttagttcgggtcgggagagcaaagcctcgttggcctgctctggattgttaaaattaacaatttctattattcgttggaagggcgcgcagagccggctacagccgaagctcccggagtcactaaaaggaggcgctgcagttctgccggcgcgcgggaagtttttcttccagcgcaaagttggagacactgagaggcaggcgcaggcagagtggctctgctgggacaagaagcgctctggggcgcctccggggctgaggcaacgcggagattggtgcctggcgcccctcttcggcctccgccttggctgcgatgttgctcactctgctcagggctctcccctctccgtccggtagcgcaccctggctttgcaatagcccctggctcggagccgctttccagcgagtgcaagaaccgggcagccgagcggtccttttatagtggaccagtgaaacccccacccccaccccactcctcccctttggcccttttccatcccaaagacgccgcccccggctccgttggtgctaaaccgcgctccgcgctgcgggctcgggagggggagggggcagcctccgcgctggctccacgccactgctcgtcaatctaggggcggaaggggcgctgtgaccagcactttgtactgctggggccgctccagggagaagactctcccttccaccgcttttctccctcgccggtttcctggaccacccttcctccccaccgcccggttgcggtaactcagttaccgcgctgggctgcggttcccaggagggagggttcggttggagaacgcagtcccttcttcaacatttccctatcctggagctgccctgggtctccttccctcctccctcagttccctcttccccaatctaggagatgagctagggctacactttctagaaaaatacctcaccccacttctccaccttcccagcctgccaggagctccttagccgccgcctgctctctcttcgccccagcttttctagggaaagcttggccctgcgcttcccccagaaagcatgcctgggtgaggggccaggtgacacttcctacgatctggattttaaaatatgtttgcttatgccttcaccctccaccaacccccaccccgcacgccacctcttcaccagagacgactttgtgagggcccggtttcacatttctggaatgggtgatctgggacgcggctcaattccctagagcataaggagggaattgcgctttttcttcttcattcgagaaatgatcggctcccgccagtctgcgtgctttcactcaacagcagctgcaagccctaggccagcgtcgcagaaacggccaggaaccccactttcctacccgggggccagcagcgatcgctggggctagcaagcgtgcagagggggaaagaaggaaatcggcttccttcccggacccctccttcctcttcctaccaggaagggaaaaggctatatccgcgttacgaaagcgaggagaggtccaccaacaggtccttaggaaaaaaaactgagtggctcttctctccaaaaagtgggaggggctcaaggacccagaggaaggacgtgtttcacaggcggaaagccgcggggacaatggcgagagcgaccgccctagccccgggcggacccgcaaccctcacactcgcgcgcccccgcgttagtgctcgaactggtctccgcctttccgccccactcccgtccggtctcttggttggctccaagtagatctgggtcctttcctcgctcctccccagatcttccccacttcagttggccccagccagaagcgtcccttctagttctcccacacgtccctcttacaagctttcttttccggatgctttccaacttcttttttcctagcgagattgcttacttgaaaaacaaaaacaaaaacattgctttccactcatcaggaaaaatcaaatgagcaagaatggcagagagaagcaactcagcttacttctgaagggcttagtaacgacctctagtccctacacatttaggagtgggtggtttcgtagatttaattttggtttcctaaaatcaccctcatcgttgaacgttgaataatcaaccaaggccttagatatattttgacagcgctcgattaacattctgatagtgtttctgcctacctcttttcactgagtctctcctttgcagccctcgctgtctctccccccctcccgccgttgcatttctccttcaaactcaacattgacatccgcacacctgagtgtgtgattcctttctgcattgtcaagcattgtccagcctacctccttctcttcgacttcgaactacgaggattattccttcctgtttctctgtttcccaagcgtcttttcccaaacatctgatcattcctacttcccagtttggttttcagacttttt

SEQ ID NO: 1562273 - DNA, 4001 bp, Homo sapiens
gtgaatacaggagcagagttgaaggctggttggatttcctgcaagaagcagttaaacacatccacagctgcaggaggtttgagggagaagcaaagccaccagcaagattcccttctacctacctcctgatatcagcgctgggacccccgcatcccggctggacctacctcccgagtaaacaggatagctgcatcgtagtgctcctcatggtcatctcccagctggttgtgttggtgctgccacttgcaaaagttcttgagtgtggtggcagcgttcttgctcacttccaggctcttgtccttgtcgcctagcaccaccaccttcaccacggccaggcggatgtggttctcgatgctagcatggctgtacagcctattggcgatggaggccagggtcagcaggtaatgctgcaggccccggccatacaaccgcgccatggacgcgtcagccaccagaagcagctccacctggcgggcccgggagatggagcggcgccgccgccgccaccacgtctgcggtcctgagcccccagcgggcgagagagcggactggtccaagagctgcgaggccagtgctgcgcgtccgctcgggttgctgtgcgccggagcatgctcgtgggcctccggtgtggacgcgggggtttcgcagctggcgcgcggcggcagggcctcgaagctgaagccctcgcgggtgtagacgtgcaggatccgtgcggacccatccccgtacacgcgccccttttcttcctccgcccagggtccgcgcagcagtggctttagggtgtagcgcgcgtgcttgaccgcgaagaagccgtcgagacccccacagaggtcaaagacagccagagagcggggactaccgtccactgtgccccgatagaagcagtggctccggtggcgccagggcgcactcgtcccgcctcctgcgggcacgaagccagcaatgcccaccgaaccatctcgctccaggtccaagaggaacctccggccgcccgcgtagacgaggtagcccaccttgccgccgccggagtagagttggtcgatgttctgcaccagccccttgctcctgcgccgctgcgccagggggtgcgggtggccgggaggctcggctcgctcctgcacctcctccccctgccgccggcggggctgggcggctgctgcagcagtcggaggctgcccggctttatcctgggcaggtgtcgcggcggggccgaccgcggccaggggcaggcggaacgcgcacagcagcagggacgcccacccgagcagcatagtgcgctgcccgcggggaggggctgcgcgactgggactttatgggtatttgttatttgctatgaagttaacggggcgggggatggggacacacacacacttgcttgcaggattgagtcaagtgtcggagggaggggggcccggcagcagcgccagcctgtccgggctgcggtgccagcgtgcgaacttttctttgttgcttgggaaaatgtttggattcgtgctccagaaagaggtggggtggggggggggggaaagaaaagattaaaaaaaaaaagtcggatagtggagattcagcaaatacgggaaaaggaaaaaaacaaaaaccaaaaaaccaccaaatgcaggcacgatcgctgtttcaagaaaagtaaggaaaggtaccgcgcaccgggctggcaactggtgcgcgcagcctcccgcccccgcgctgcgctggacaagccggctgtggaggttccaagctccggggcccacttcctttcttattttgtgggtttccttggctctgctgggaccaggaggaagggaagaaagagaggggaaaaagccgtaaaaattaaaacaaaaatgcaggggggcagcctgaggcgagctggtgaagcggcgtgtctgtgtcccttcggctgcggtctcctcctgcccgccgtcatccccagtcggcagctgcgagcgccgagagcagcgcgagcgctgtgaagatgcgaggaggtggaacaatgaatttatagcggcatgccatcctgcaatggcaatttcaacagttcgtcactgcacgctgcctcttaaagggagagcttcccccaccactcccacccttcccagtccgcgcctaatcagatgggggagggcaaaagaggagggtgatcgaggaaagggagacgaagtaggaggaagggactgggacccggcgaggtggtaggaggggagaggggaaaataaaaagtaatggggcaagaaaaacagatttccttggccacttttaaagccacagcggctccgggtctgtctgatatttcacaaccaattggggttggctaaccttggcttacctcatctcctgaacgggtgttttggttaaagttattgagacgtttcaagtctctccctgcctccttcttgcctgcttttctcgccctcggtgggaagttcctgccgcaagtttttcccctttgcacacccgtgcgctctggcctcgcagaccgtgcaactccatccaccagccagagcttttcagcttcccgtgcgtcccctaaccaccgcgttcccttcgcttcctcccctccgtcccggcacccggtttcctccctccccattctccagcctcttgatgctttgacgctcgccggattcgggctccgggtgactaacttctcccggccaccagcagagcggctggacagccagagagcccagggcgcttcctggcgcgctgcggtaccccggggcgagaacgcccgccgcttgggaactccgcagctttgtgtgcgaacggcgggctcccagctttctccagcacgcctttcgtcagggtccacaatctgtcccttactcccagcccactggaacttcctttgctctaaaaaggcagagcgagaaagagttaactcttagagggaattccgctcattttttttccctgaaagattttaaaattttgcgctcatacttttattttttgcttaaatgatactttaataataaattcctatatctgtttttgtctcttctaaagcaaccacttatcgccataggccttgacctaccttcattctcagaaattccttttagaagaaaaagaatacttttggcggaaggaagattggtgcttattagtacgcgggtgacattatcactgctactcgtttcctctgacctctttgtttcctctaattatcattctaagaagggagaaggaaaacccgacgacttatggttagaaggtctaccttctactgtaggggtaagagctccctccatgcccaaattattcttcaggctaattaactaatgcaccagtgaaaaatgaatgtggtgtaatttgtacatttccatctttttctacgtttaactttggctacgctggggatagcagggcgggtgccttaatggggccccaagctgatcgctttctctgggagggaaccatgagggtccagagcttgatggaggttcttagagtggcaataatcctctggaaggaatttcagaattgcccggcaacaatacccattgccgtgtgcctgggaacaccctctggagtcttgtgaggggcagatgtatcatcttgttttaacttataaataaagaaatcactggggccttagggacacccaacagcccctgatagattctgaaatacatcaggaccagggaggaagttactattgctgaaggccattgctttataattccacaatgcctcagcctctcagtggccagttgacccaggccaatgctaacagctggatgggtcagaataggaggttccagccattttctctatcccaccaaggcctttgagccttgcattagccgttctcttttgtggtccttgctttgcacctacaaatagcaaacttttatctttttaaccagttacagtgaaaaggagtccaatatttggcactaaacaccatttctaatacaaccttgattcaataaatttaacaattttgtcattgttcatgccaaagaatcattttaataggcattttaggtgacagtggt

SEQ ID NO: 1562274 - DNA, 4001 bp, Homo sapiens
tgtgtcatcaatttctcagagctggatcgattatttttaagcccctgtccctgcaggagggcctccttttttcctttccaactacagcttcaaatgtgatgtagatgtagtgggatatacccagtcttaggaaccctcagacatctaacagggcatcactcacagacaatgcattcctttcagagtctgtgtgagttcatcctctccaccacaggcaagatataggcacccagctcagcctgtctcatcaaatacttaccgagcccccgttgtggctgtccatgcatactggaccctgtcctccggaggaaccgcgcaatgagagacagttaattctcttatccaagaaggaactgtatcagccaagcttttatcctttcttccttctccctttcccctctgggaaaccctcagcaggcaaaaaggatacagcagtctcaaccccaaggaaaagatggtcatcaaaagacaattagcttttctatctcctagaaacaactgctcttaagacaacctagcgttttggaaaatgcagctctgggtggcacctttcgaagcaataaaacatacggcaaaatttaagaggaaacaaagaggattaaatacatatttgtattctcaattaaaaaaactacggttctatcatcttaattatggagttaaacgttaaagaaacaagtttgatatcatgccacttttcgttatacttcgagaacggaatgcaataatggttagtaagaaggaagtaaaatgcctgtatcagaagtaacagcccaaacctgctgaccaaaaatattaactgggaactaaacaccacggtgcagatctccgacatagaaacctggacaggaacacgttttaggttaggttttccagcgtgtaaatcgggactccaacacgtttcagcgtccacagcccaatctgacaccttccctcgcacccatccaccacgcaataattttccttctgatgtgaacacgtcaaaagtcacctcgggcccccaactgccccagattgctcccgatcgctgcagacgcccggcacccgcaggaacttccctggcccgggccgcccgcggcgcagagcatcccgcgcggacactgcgccctcggaaggacacgcaggaccgtccagggcgcagactcgtccccaacgcagtctccactcccgtggcacagcgtcccctcccaaggcagcctcccctgcccgggcccagcctcatcccgggcgcagcctgccgtcccccggcgcagcgtcccatgccgggcggagcgtctccccagggacatagcctaccgtccccaggcgcagccttgttgccaacgcagcctcccgttccccggcgcaaccttgtacccggggcagcctctggtccccgggcgcagcctcgtccccagcgcagcctccgatctccagggcacaccgtcccctccccaaaacgcagtctcggtccccagggcgcagcctcgtcccggcgcacctgccctccccgcggcgcagcgcggcgcatcccacgcggactcggcgccctcgggaggggacgcggggccgcccgggcgcagcttcctccgggagccgagcgccggagcagacgggcgacccaggagggtgggtgcgaggcggtgccgcggcaccctcgcttctccgcgggcgccctccgctcccgggacggcccgcagctccggccccaccaccagtccctgcccggcgcttacataaacgccgccaccgcggggtccggagcccgcgcccgcccgagccgccgcggccccgcgccgccctcacctcagccgcagccgcgccgcgcctggtcctccgcacgcgcgccccacgcttcggccgcagtctcgcgccgggcggcgctctgcctcgttggttgtgcgcagcggcgcggcgtggccgtggcctcgcgcggcccggagccccggccgccaacctggccgcttggccgccgctgccgccgccgccgccgccgccgccacggccgcctcagcgcctcagccccgccgccggcggctccgccccctccccgcccccgccggcccgccgggcgcgcgcacgccgagggggcgggggcggcgcagcgacgccggacgtgcgcgcgctggggcgcccgtgtctgtcgtgggcagccggagctgtggcacctccctcacgaccacctgcggcggacgggcgcggggccgttggggctggagcgcggccggagctgagagaccgcggctgggcggctccggagcgtggggcgagagcgcgggaccggcctggcgtcgcggcgccgcccgcccgagcgcggctgaggagactctgcccgccttcgttttggggacggggtctcactgtcgcccagactggagcgcggtggacctccgagctcacgcgatcctgccgcctcagcctccctggtagctgggaccgcaggcgcccggcgattggcgtttgcgttttgcggaggtggcgtctcgcggtgctgcccaggctcccgggcccccgcgctcctccctgcagcgggcgctgcccccgccgagcccccgccgagcccccgccgagcccccgccgagcccccgccgagcccccgccgagcccccgccgagccacccctgcttctccctctcccggagttgcctgggacacgcgggtcccgccggccccctctccccgcccgtcatcctcactgtagactccgggagaaccaggtcgcggcccaggaccctggctggacacggttcccgccgtctcctgtttagtccgcactgacactagcagctgctccagttaccaacgtttaggtgatggtggttttgtttgattttttttgtttgtttgtttgttttaggttgatagtaaaagcatttttttatagcatatgcaatagacctactcttcgatttatctatatttactgactgttccacagttataccaagaaatgtttacacagatgatgataagcatatgtagaaatgcaacgttttcactgaccggaataaccagctccaggctgcagttctctgcacgaagataaagtttgataggcaaacttggcagctcctgaccgcggcgacctgagcccagaggagcagccgggggcggtgggcagagccaggtgtggacaagcgggtgggtcccgcacctgggtgggggaagcggcaggttccagggtcaaattgaggttgtactagccctggcctccaaacctcaggcggcccactctgccctcggcctctttcctcccttgtaaagtggggagtaagagaccatcgcaagccagggatggggtggcgcacactgtgatctcagccagtctggaggctggggctgggcggtgggggggtgcgggtcgcttgtgtctcagagctggagctgtggtgtgcgaggccgaggtccgcgcctataaatggccgctgcgctctggcccgggcaacactgagactccgactctggaaaacaacaaaacttaaaagacgaacacagatggaagtttgggagcctggtatgcggtaagcactccgcaggtgtcagccgccagcccgcagtcccggacaggtcaggggaaggcccgcggtatgcagcaggctgccggcttcagtcactgcctggtggaaaacaagcctgtctttggggccagccagctaacaagtgagcccttcaccccatctgaaggcgaagcacccaaaggggcaaccgtggacggctaaataaaaatcaagactcctgggacgccttctcgggacacattcttaaagagatacgtgcctgaggacgttgtgtgtatttctgtgtaacaggccaccccaaacctcagagggcgaaaacctctcttcactgctcatgactctgtgggcctgcagcttaagccggttcagctgggacggcttgcctcggctccatggggtgtctgctgggcccacttacaggcaggcgccccgggcagatccgggccacatgtcacccacccaccgcaggctggccgggcctccctcccgtggtggctgggctcc

SEQ ID NO: 1562275 - DNA, 4001 bp, Homo sapiens
gacagacccacccagtccttcagctgcaatagaacatttcaagcaaaaaacactccaacttttaactctgtggggttcttttttaaagattttgtaaatttataaatatatatacctactatgtacccacaaaaattaaaaatacaagattttgtaaattaatgatattttataaaagagagtaatacaccttgctgtaaaaattttaaaccaagacgaggtacatggtcagaagggaatgctcagccctcaccccgtctccatccccaggactgaccactgttcaaatctggtattggctggtggctcatgcctgtaatcccagcactctgggaggctgaggcaggcagatcaggagtttgagactagcctaggcaacatggcaaaaccctgtctctttttttttttttttttttttttgagacagagtcttcctctgtcgcctagactggagtgagatggtgcaatcttggctcactgcaacctccacctcctgggttcaagcaattctccgggttcaagcaattctcctgcctcagcctcccaagtagctgggatcacaggtatgctccaccacgcccagctaactttttgtgtttttagtagagacggggttttgccaggttggccaggctggtcttgaactcctgacctcaagtgatccacccacctcggcctcccaaagtgctgggattacaggcatcagccactatgcccagccctcctttttattaaaaaaaaaaaaaaaaaaaaaaaaaaaaaggccagcgtagctcacggaagctaccccagcagcacgacacagagctcttttcttaaatgccgcagcatggaaacccaggaacgcgccgtgggggctgggggctcctctcgtgcacgcgtggcccctgaagctgcctgttctctgtgagaatgaaacacccgagccaacgctgggccaccccaggggatcccggataaaatcacccccagtcctgccacacagatgcgcatgccctccctgctggaccaccccgctgtcctacgtgttacctgacgtggtccccagagaaacagcttgttcagccaaggacggcagagcgaaggctcagcacccccttggcgccagtgcgttactcaagaacactccagatttcaccgctgctggaggacagggctgaggagctggagtccatgtcccaagcaggcgtctgtgtctcaggcaaaagtctacagatgacctgtaccctggtgctgacccagcgggagaaggcaagccgcagccaccgtaccactgaatgctccagtggccacagtaaaacacagagaaaagtggaattaactttaacgatgtgttttacctaatccaacatatccaaaatatcacagacttctccatcggacactgaaatccagtacctatttccagctctcagggcctcacacgtgggcctcgccgcttctcctgggcaggcagctacatggcgccggcggccaccacaccagagaggccagctctgggtttgttactcccaggacatttgcagcagacgaggattggcctgccctgacggagaaggtggaatggacttgggagtcctgctgtggcacgtcctgacagagctctgtgtgggaatgtgggcgctggagacaggcgcaggccagatgcatgaatgtcacaggtgcccaagtcaacacagggttatggggtgcaggggcaacaagccacggggctacaaggggtcaatgccccctgaggggacagagcggagctggaggcgctggggctggggctgaggaagagtccagcccagagggcacagacttggagacagcatggggtctgagaccaggaccccaagctcccgttctccctcccccttttgtctacccacaatgactcaggtgcctcaaagtcagccagggaagaaagagagttctgctcaggggcagccccgctgtccttaccttgttggaccccgggggcaggtccctggctggagtgtgtgagcagcaggaggtggcagaagtgtggggccctggcttttatctgctgcccagactgggaggggcaggagggtggggaggaagaaatcttgctggatcctctcttgcctgagcagggaggaggactctgccctcttccccgcatgacccagagtctctgcaagccaggacggcagaagcagccagcagcatggctgggagcaaccacaggagggcccgggacagtgcctacggccgctcacggcagctgagccagcgccagcgaggggagagagtcctgccagggtgggcaccgtggccgtcttcccgttctcatcatcacagagacactgaccaagaggatatgaccaggccccacactcacaaaagaggccaagccagaagtcgaacgaccatgtgtcggcgccctggctgaagtgcagtgaggaaggactcgcaaagaaacaagaaaatgcctcttctcacacagctcaggtaaaaggtcaaagacacacggggcttgaaatcctgacaactctgccaagttgtaggaggctcgggctgccatcccaaaacgcacattcccacacgcctctccaacacggcagccctggactcagcccacagggtgacagcccaagccccttgcggcagggtggggctcagggggagtcttcaaaagaaaagcccaggcgtgcccttctcgaccttcctgcctggaatgcagatgaaacagccggggcaaggcagccatctcgagaccagcgagccacagctaggacagaagccggggccggagcatgatgtcggaggaggtcagggtctctgcggcatggcagggaagtggccgccaccctgaccgcctgattgctaacaggaggaagatggatctgctgttcgtgaaagtgcttgcaaaggcagagcctgctcctcacgggagcggacctggggagctgtgtgataagcagcaggtatttattggtcttagtccctggttcctgacacaaagctcataaattccttgtaatttcctgagtgggaagggtgacaggagcatcttttgttctatttggttcttgtacaaagttcttaaaaccttacattttcctggctcggcgcgatggctcacgcctgtaatcccagcactttgggaggccgaggcgggcgggtcacgaggtcaggagattgagatcatcctggctaacacggtgaaaccccgtctctgctaaaaaaaaaaaaaaaatacaaaaaaattaggcaggcgtgctggcgggcacctgtagtcccagctactcgggaggctgagacagaatggcgtgaacccaggaggtggagcttgcagtgagctgagatcacgccactgcactccagcctgggcaacagagcgagactccgtctcaaaaaaaaccaaaaaaaacaccttacatttcctacaggatgggagcatctactgttactcctaacaagcctttcaatctcacctgagtgacaggagacttgcggggccctcgacagcactccccagccccctgccgtcctccaggaaggacaggggctggagaccaggctccctcaaaactcttgtacaatggacttcagggtggtgaactcacccacatgctgggaggcccgtgcaccccagctccccagggacagaagccctggtacccaggatcccccaggcctcactctgtacccctttccccctggctgtccatcggatccttcgtaacaccctctaccagaaaccagcagacacagctggtatttccctgagttctgtgagctgtcctggcaaatgttcaaactcgagggcatcatgggaaccccagcttccagccagttgggtcatggatcacaacctgggattggcatctgacagtggggcagtcttgtgggactgggccctggccctgggggatctgacgcgtcagaactcaatggaattggagggcgcctgggtgggtgccctggagcactgcttgtggggaaacatccacgcatctcacggcagaagtgttctgtgttgagtatga

SEQ ID NO: 1562276 - DNA, 4001 bp, Homo sapiens
aacctcgggcaagtaactcaagccctgttgtgtcagatcacttgtttacgaggtcaaagtgcggaggggatgggaggcaggtgtatcagtcacgtgtctacggcagggacggaacagattactttggtgaatgctctttttctaatttccaaaataaagccattactttcagtttgcttccccagtcctggcacacagacgcgcgtccaggcgcagggtgtagctccccagcgtggagtctgcactggggccccagcctggggcggggcagcaccctccctccaggaaggcctgttctagaatccacactcctggggactttcccacccggccacactgcctttaacccagcagtcttcaggctgctgcagcgcgtccccctggcagatacgccaggacagggccacgcacaggtagggtgaccacagagggcggccactccatgaagtcaccttcagaatatttaaggcccctacaccttctaaggccaaggggccctgttctgtctgaatgtcaatggcatgcagctgctttttagacaatgtcctcaagaagatacttaagactaaccagaaatggatacaagaagcgagttgtaacaggcacaggctaacgccgaactctgtgggggaggaggattggttggaaagagggagggggggcggcaaagaagtggccaaatcaagagagtgctcagcatcctcgggagacccctctgaagctttcaaactgagaagacgaagttcagcaattcctaagcgagtcgagtcggagcagccgcgcctgcaatttaaaagctgcaggatcctgggtccctctagcagcctgggcccgccgcccgccccacctcccagcccccagcaggctctcggcgttggctttcatttttaataagagccgcatgctcatcaccctctgtctggaggccaacagcccacatctttcttctactaagatcatgtttcccaggaaaaagaacccaactgctcaagtattctcctagacaaagcttttaaaattgtgcttttttttttttaaaggtctgggaagccatttataaaagcattttccccatgtcactaaacttctctcaaagttaaaaaaaaaaaaaaaaacactgcaccatttttaactgccttcaaatactaataaccctcctttcctaagtacttgggaccaatgttccaagggtcctggggtggccaggagtgggttttcgcccccacggctcttgcccccggactgaccccatcccctgacccgcccggtgcaaacgcgccgccggtctccgggccgaacccacagccaaccccgggccccgcagccctccccgcgcggagcggcaaaagtgaaactgctcccttggcctgggcgcgcgaggaggaggcccctggggggggtcccgggtccgccgcgccccgaaaccaggcggcgggcgcgtcctgtccacgggggagccgagcggggcccggagcagagtccaggacggagggatgggacgtccccgcgggaacccactcgccctccctcggcccggcccgggcccctcccgggcgccccgaacccccgggcctccccgctgggcccagcgccaccgaggctgctgcgggaagcggccggggcctcgcgctggaccaggccgccggggaggccggggttgcggggggcgcacaggacccgggcccagacctcctcccggccccgcgccttcccaggccccgcgccccgcggagcgcggccggcccattgcggcgcggggccccgggcggcccgaggtcggacggctggggcaggggcgacctccggcggcgggagggcgacctcgggcggcggcggggcgtgggggaagaggggggcggcccgacctcgggtgggggcctcggtgctcacctgcagccgccgccacctgctcgtcgcgcgggcgtccccggcgtcgcctccgcggccccgctctggccgccgcgctcctcggccctgggcccggcccggccctgcgtcggggcctcagcgagtgcggcgcccgccgcccccggcccccatcccgccgccctccgccctccgccctcggccgcgccgccgccgccacttcctgtgcgcggcgatcccacagttccgccggcgcgcgcggggcggccgagggacacgctggggggacacgggggaaggacgcggggggggacgcggggggacggcgcggggggggacgcggaggggacacgggggcgacacggcgggacacgcgcgcggagagaggtgtgggccgagggcgccggcggggccgggcgcggagcctgcgtgggatccgctaacggacggggctggggcccgggctgggggagggggcgggccgggaccgcggggggcgcggggatcaggggggtcggggctgaacggggggaggcggcgaaggaccaggctggggtcccgcgagggctcccccggaccgggtcgggggcagagggggccggggcgcggggtggggccgggaggggcctccgagctctgcctgggccccgccatctcccctgccggggtctcctgcgggcgccggggaagtttcgcgcgcgagctcctgccctggtcggccggggcttagggtcgccgtcaggggtcgccgcgcggcgggctcggtggggacggccctgcgcgcagcggctccgcggaaggatcgcgtttcggcccacgtgccgcgcccttggacttattcatagttggcacccggctggcaacactgtatcgacacttgaccgtggcgggggtgggggtcgccccggggctgccctgcgaacccccgcgggcgctgacgccgtcccctccagaccgcggagccctctcagccccaggacagcggctgccgtcccccctcccttgcacctggccagcggccgatcccagaacctgcggaggccgcgcaggtgccgctgtcagggcagggcccgctgcgggctccgcctcctgcgcccggtaccttgtgtgacctggcgcctgctcaggtcctcaggccccggctggacttgctgagcttgggtgggcttcatttgaaaaccatttaaaataccaagtactggtactgtctactgtgcccctttttttccttttttttttttttatttttattattattgagacagggtcttgctctgtcgcccaccctggagtgcagtggtacaatcatagctcgctgaagccttgaactccagggctcaagtgatcctcccacctcagcctcccaagtagctgggaccacaggcacacaccaccatgtctggctaatttaaaaaaaattttttttgtagaaatggggcctcacggtgttgcccaggctgatctcgaactcctgagctcaagtattctcccacctcctcctctcaaagtgctgggattacaagtatgagcccccgcacccagcttgcacctccctttaagcctcctcaaattatttcagaaaatacttagactaaaataaaatgaaagtaccgtgcacctgtcctactcacagttcccttattcttgaaaaaggagttaagatttgcaaagctcgtggaattcaccatttgtaaaacctctcacccctcatgtcattttgggtaatctgtgccacagataaattctcacaggcaccacgggatgtgtggatacagggatgtgctgacttacagctatacctataatcacaggaagcctgagaacaaccagacacttggttaaataaactctagaacattcatttagcatttttaatttaaaacattttctaaagttgtgatgtgataattctgtgtacacagataggatatagtctccaagatctgttaaattaaaaaataaaaatagtgcagagcagtgaatatacaatgatgtgctttatttaaaacaaacaaacaaacaaaaaatggccaggcacggtggctcacacctgtctgtaatcccagcactttgggaggctgaggctggtggatcacgaggtcaggagttcaagactagactggccaagatggtga

SEQ ID NO: 1562277 - DNA, 4001 bp, Homo sapiens
ggtgcctgagaagggggtcccagaaccagggtgcagtgggggcaggggcgactggcaagatcatgcttagacccaaggtgtccccttcctgggtctggtggtgcagcttaggcccttggaatgacacaccaggccagcacgtccccagcccctaggacagggtctcagagggcaggccctgctctgacccctgaccccttgcccctggccagggagaagggaggcgctcccactgggccccgctcaccgttcccgagtggaaggcgctgctgctctgcgctgctctccggcttcttggggggcttggccttcagttgagagcctgaatgggggagctgggggcagcctggcctcccctctcagtgggggtgagtgccggtgggcaggggcccgcggtgggagggcgtggagggggcggtccagtgctgggtagtccctttgccgggctctggtttctcatcagtaaaagggaaatgagacccgcccgcctacttcaccagctccggggagctcagccttcaggcaggagggagctgagaggctggtccagtgtgtgggtctagtacccagaggagacccccacagccccaggcaggctggccccacacccagtgggtgggagcccgggtggggagggggcgtgggctcccggggaagcccgggaagactggagaccctggctggcttcccctgcagggagggtacctgggctggcggtgccccttggagtcagggctgctggcgcggcagctcgagcctcttctgaggccttcctcttggtggggagtctgggtggcggtaccaaagccttggggacggccgggggcttcctccccttccggggctggctgaggtccacatctgcagctcaggggcaggagcagggtcccaacctcagggttttctccaggggtagggtgggccccagaactggacaccttggccagacaggtgaggcctggcccctttgcctcttaggatccaagacggtcctggaacatcacccacgggctcctcaaacaccactccggttccagtccagctgggctgagcaggtgacagcagctgccccaggcccccagcatggctgagtccaccaggacccacctttggggaagctgtccaggatgggctgcagccggccatagcgctccaggttgtagtccttgaacagcaccctccagaagtccaggatggctgtggagtcctgggtcagcagccaggacaggagggcgtggaaggcctgggggcagccctccttttccttcagatgaagcgtctcctgcagtggggtggcatgagggtccctgccatggtcccccacaccctgcggcctgcccatctccatcatgactagagggtggagctcccaggcagaggcgctggcgacctggacagctccacgcccatctcctcggcttgtggtggagtcaggtggtggtgtaggggtgttgagggtggggctgggggaacctggaggccattcccttggcttgggggtgaggtgtggggacggctgggggaaggggaccaacttctaacttgtcatcagggacgcccctggctccttgtggggagggagttggggaaggctggaggggcttggggatctggaggggcggggtcctcctggaacttccccggggactatccctggctcacagggcctgggggcagcggggggcgggcggggagcccacctgaaacttgtcctcggggaccacgtcgtggtcagccagcgcgtgcagcagtgggaaggcgctgtccacggccaccgcgatctccgtgcggtgcagcctcagaagccggcgtagcgccgcgtccgtcgccatggggtgggcgcggggacccggggctggggcggacgcggtgggtcccgggacactggcagcccctcgcttggcctcgggtcccggcggggctgtggggcctccgcgccggctgtgcgcccgcccgtctccccggtctgcgagccacgcgcgccgctgttatacccccgcgaccacgcaaagagcaaaggccgctccgccccggcgcccaatcagggccagggcctcccgcagggacacttccctgtgatggaggcgctgctgtccctccctcgctctcgggaagtctccgggcctggcctgactcacccaccagggcagctgccttgggggctggggacagagactcgctctgtgcgggactcagagaactctcacttccgaatgtggccctgtcctgcctcggcgagggccctgctcgaatggggcaaagccgagacaggtgccctcggcggggaggctcgggtctcagggccctggcaggggctgcccagggtgcaccggcccctcccagtggccggcaagagcctccatggaggctggatcggggtggtgttcctgggggacctccacacaagctgagagcccctactcaggggcccgcctggggctgtgggaggagcccgatggaggctcagtctgatgcaggagacggtacggcagcctgggtgttgccagggagctcctgacctcaccatcttaggctagctgtgtgacgccaggcaagtcctttccttctctgagcctcggttccctcatctttaaaaggggcacactcgcctggggattgaggctcgcattgaccccctccttccttcctccaggtgctttagaaggaaggcggccagccccacaacgggggtcctgagtgtggccctgagtgagagctcccaaagggtcttcctaggaccagtgacagaggctgagggatgctgtggcctggacaggagcttccgggggcatctgggaaggtgtccgggaggggagctgcagtggacaggagccgagggtcccaggtggacgtgagtggggacagtgcccccagtaaaacaagaccaggtgcagaggcctggggcctgcaatgatgctgaggctgtggtggccccgcaggcatggcctggagggggggtggcctcagtgggaggccttggtaacagtccccttgtctgtgcggtcaagccagggaagcaggccctgtgtgcaggctgcagagaaccacgagaggtctctgggcacgagtgttcccactgagccagagaacgagatgacctggccagcatggattagggctgaagggtggacgaaggtaccaggaagcctgaatccaggcagcactgggctgggggctaactgatgcagtgagagacgccaccaagattcccacgtgggcaggcgtgccgtttgcttttgggcagccagagtccaggatggagagcggcagacacctctcctctagaccaggggtcggtctcggtttctcctaccgccttcaggcccagggtccccctgagcgttctgcacgtctgagattgctccggaaaagactctaggggtgtttgggaacaaacctggggaggaaggtggggccagaggtggtggccgaggtggtcagcctggggtcaggtgctggggacgtcatggggagctgagggggagggggtccatctcagtggtggctgtggagtatcaggcagtgcagggttggaacaggctggctcctgtgtggaatgtcctgggagccttgagcggggagcagggccctctcgctgcccaggcctgggcgtctctcactccctgcactgcgccttccgaagaccccgagagggaagccccctgcctgcatgcctgccttgccggtccccgctccaacagacacatcctgtccccagccaggccgggctgctgctcgctgggtttcctgccctctcccctgcagttctgtatttacagcaaaaatatttaaataactgcaagcgaaagttgcacagaagcccagctttgcacaggatccctgtctgctcctgaaacacccccattctccttgctcatccatgggcaggggtctcacgaagggagagctcactaacatcaagttcaatggcaacccttgggcccactggctgcacagttcatgcataaaagcccctggggtgccagggaaccagcgcacac

SEQ ID NO: 1562278 - DNA, 4001 bp, Homo sapiens
gccctaaggtgattcctgagccacttgtgggtaaaaatcagaagagaaaaaagttcaatgaccttgcaaattagaaactaaaaaactaatggtgtgatagtctgtacagcctcagtggaattacaggaaaacatctgcccggaaattgctttttttcttttggaaaattactaggaggctgggggaaaagaggggaaaaacgggtaaggaaggttgcaaatgttaagatgccaaacaggaacccaaccgaagtccgaagtgaaatacagcctcctctggcccaactgtcatgcaaacaacttctaagcatcttcagatgtaaagaaaaacagtcattgtgcacaggcgttagctgaatgttcgagagttggatgaatggggaagacttgttatacacctagtggtgggtggatttcactaggctgcagcctccacacagcttttctttgctgcactgcagaggcgccatcttctccgtcttaatcttcactcaattcgatccttttatctgcaccctaaaaaaaagacccttcggaccctccccagcatcctgtgcccccaggggaactaaaccagagtccccagagctgccagggaagaggccgcgccttaatcagacaaacgcctccttggatgcacaggacagagcccgtgcctccccaccatccgccactgccctttccagacgcacatcccactctccgccttatttcctccccgccaaggactttacagcccagcacagaattaagcctcggaggtgatccgagggtgggaagcagaggggccccgaggctccgccagaagccccggcagcgtctctgccccctcccaggcggacgcgcagccccgggaagggagccgggcgggagcctcggtggcgcactgagactaacgcggctcggcccacggcgagggcggggtgtcgcggcttttgttcccgcggaccttctgcctctcagacagagcttagggtgcgagcgaactcccgggacgtccagacttggggaaggcgcggggtggctatgggtctccgacccctcccatttctcgcaagttacacaaaagggagacgcggacatgcacaaagtttgcctgtggaaggcggtgcgcgaccccgacgccggctcgggctagggtcgcacccaggctgccgccgccagcagccgcgaaaagaggttggagcaaggaagggggatgggggtgagagaggaaggtgaaacgaggcggagaacgcagggaaaagcgaggggctcctagcttcctgggctgtcccgactcctcctcctcctccccagggcccaagagaaaggaaagggcaacgattcaagagcgaaggactggctttagggacgctgcgttttcggttttccccacgtgctccttcccccttcccccctgtctgaatgtctctcgcctcccccgacccccgcttccaaggcagggactaagtcggggtctgggctcagggtcgccccctacccttctcgccccgggctggcgcggaaccagggagaccagcgcctcgcccgctccctctcagcgggccggagcgcgactccctggggcagggctgggccgaaagcggggatgcgctggacgtccgcaagcgggggcggagaggagaggggtcccattgacggacccccggcttctctgcattaaagacttgggttaaggtcttggggggtatcgcgtccccaccgtgcagcctccccccgccttccgaggcgcggcacccacctccagcgcccgagccgtccaggcggccagcaggagcagtgccaaaccgggcagcatcgcgaccctgcgcggggcaccgagtgcgctgctgtgcgagtgggatccgccgcgtccttgctctgcccgcgccgccaccgccgccgtctcccggggcccccgcgcacgctcctccgcgtgctctcgcctaccgctgccgaggaaactgacggagcccgagcgcggcggcggggctcagagccaggcgagtcagctgatccggcccaccccgctcggcacccgagagagacccctagcggcgccgccggggaactgcgcccgctcgcgccgggaggggccctcgcgccccgcgcccacaggtgcacgcgcccttggcgccgcctgcaccccacgcgccccctccgctccccggccgacggcccacctgggcttcgtgaacagtgggagggagagtctggggccaggagagggacggtgcaggatcagggaaaggtgagtcctaggacgctgaggctctagaaaagtcgagagcgctcctgctcgtccccgtgagcttgaatcatccgaccccgcaggcctcccgggggtgtcgtataaaggactgctgctagggtgcgtttttatccgcatttcgttttttctctcggtttggagaggtggggcaggcgtttctggaagagaatgagaacgagtgaagcttaaaggaaataggattttctttgcttgttgagacagcaaaacctcattttttaacccccaacgtcaaaagcaggcacgagcaacctggaatttctatctttagaacgaaccaaaggagcaaggcgcaggacctggcaaagaagcggccaacccatttacttcttcttgaaagcagggttctgggcttgggttttgtttctttcttatatttttgtttgtttttggttttgttttgttaaagggggtggtcagtgtggattttgcggggcggggggtctttttttgttgttaagcagggatgtaacatccatctgagttggggaagaaggaaaaattaggagagatcattcgtattcgacccccgtaaatgaggacttctgacctcaaacgctgcccttgttcttcattgtgtctgtcctgaattatagaaatgaaccttctgccatgccactttctcctggattaaacacaaaccgtccactgtccagttagtgtccagatagtttagaatgctctagaactgcccagatatatcccctgctcttgacctgaagtagcatttagttaccaagccacagcccactccacacagggcttggagcgaaggactgaagccagggagtgctctggcccttctgagggctgcactgcagcctgccttctctcccttgctcattgcgctgacaagggtgcctaggcccgggaaggatggctcagccagcggggtacagacttccttcctgggaagtcatttctgtaccagctcccctaaatgttgtcttgtgtgtcttttcccgcactaggcattcagtcttgactcttggattacttttgcccctgaatgtcctttggatgtcctcaacaaataaggacaaatatttattgtcatgcagtatttgtttatacgcttcatgtcatttacttcctacaaaagccaaagaggctgttactattattcctatttatacatcaggaaaatgaagctaatgaactcccaaatctaatagcaagtaagtgacatgaagctgggacagcagggaaaagcctaaagtgacaggacaaacccagttgttcactttctgcaccacatttacccaccgcaattccgtatttgttccgggtctgcatgagcaaataaggcaaaaaagaaggtatctgaatgcaaagagaaacgtggtccaaagctacaaatcttgcagagtccactgcaaaatgcaaacgtgagaccctttgttacattattaagaattttaaggccgggcctggtggctcatgcctgtaatcccagcactttaggaggcccaggtgggcagatcacctgaggtcaggagttctagaccagcctggccaacatggtgaaacccccatctctactaaaaatgcaaaaattagccgagcgtggttactcctgcctgtaatcccagctactccagaggctgaggcaggagaatcgcttgaacctgggaggcggaggttgcagtgagccaagattgtgccattgcactccagcctgggcgacagagcgagactccacctcaaaaaaaagaaaaaaaattaaatta

SEQ ID NO: 1562279 - DNA, 4001 bp, Homo sapiens
gactgaaactacttatagaatgtcattctcaagccaggcacagtggctgatgcctataatcccagcactttgggagatttcttgagcccaggagttcaacactagcctggccaacacagcgaaactctgtctctacaaaaaaaaaaaaaaaaattagccaggcatggtgttcctctcctgtagtcctagctacttaggaggctgaggcgggaggatcgcttgagacaaggaggttaaggctacagtaagccatgatgactccatggcactccatcctgggtgacagagagatagcctgtctcagaaaacaaaacaaaacaaaacaaaacaaaacaaaacaaaatcctcctgcaaatattctgttggtggatagttttcaatgtatacaatacagtcagtacctgttactcaatatttatccattgcaaacacaacacagaaacctaaggaactcaaaaagcaaactgacatttgtcaggaactgctcccttgttggtcaaagaagaggaaaaggagggctttcttcgatattattgtctactttcttggtaagcaataaagtgtttgcagttttatgtagactggcggggtggggcggggaattgtgacacggttacactttcgtatatatcaagttactcccatacatgattttaggtagagtctgtattttaatgtggtagaaaggggtgattagtatcttgaactgcagaggctacaaaaaacaatgatgcaacattacgtaagggatgagaaataagtaaataagtaaaaaaaaataagtaaattgaaaagtttgttaatgcacaaaaccaagtaactggagagaaaaggacagaagagtcaaagaatcaaggtccccagacctagagtgagaatgtacattatcgtgtgcataccttaatctcaaatataagctcattatcaaataattgtgcaaaaaaatcatctgttaccttgtgaaggatagaaagggttatttcttccaaagctcaaaatgtggtccacagataaggtaaggttacattagtggttctccaattttaacttgcaccagactctactcaaggttttgttaaatagatctctgggcccactcccagaaaacggtttgagaactatgtgtttatactatggctaattcttgcaaatcatctgattttgaaaccagtcacaattttttgaaacattctatgagaaacatcttattaataagaattttcaacagggctcagtggctcacgcctgtatcccagcactttaggaggccgaggcaggcagatcacgaggtcaagagatcaagaccatcctggccaacatgatgaaacctcgtctctattaaaaatacagaaattagctggacgtggtggcacacacctgtagtcccagctactcaggaggctgagggaggagaattgcttgaaggatgcagtgagccaatatcgggccactgcactccagcctggcaacagagcgagactccgtctcaaaacaaacaaacaaacaaacaaacaaacaaacaaacaaacaattttctggcaaagtaagagtattttacaaagagaacaatcacactggtagagaactgcactgcatggatggccaaattaaatcattacaccaaataatttgcaaacttcatccctactttggtcacaataagtaacattgtacttttgaaagatattactgtctgagaacagagtttcatcttacccaaatacagactaaaaacaatgccaacttcacagtactcacttacatagttgataaacagaaccaacaagtcctctaattggtccatttgaatctggggaagagctggctccaatcattgtcaattacatcagcaactgtggaatactccctgagatcaacaaactgttaactgcagtgaccacaacttgacccaggccagagcttccatcctcgggagggtgagtcaacagcatgtcaacactaacccaacttctaccacgcacagcaaggctgtgctatttaggcgtggatcacacgcacactgcgccaacttctaagctaacaatggacaaccaaagcctccggaactctgtcttgggtagagtaaatcaatttccttttgtaggattttcttggcacaaagccaagtgtcaggggctgtggagaaggaactgctggcccaaattccatccaaggttgaccagtggtttaatcccttctctaaatcaggcctctggcaaaacagctagaatcaggaagccaattcatatttaacaaattcaaagtctatcacaacacaggaacttgttaggcaagaagataactgaatgaacacctttaaaaattctgcttttttaacaaaagctgtctacattattttctcatgggagttttggtactagtgttaattcatagactctcccttaaactcaaataaattatctattgaaagaatggcaagaagtactgccaaacttcatagggtggttgggctaaatgttctcaagttcttttccaacgttaaaacaaccggattataagaaacaattcatttaatggagcattctggaggagtaaagacagaggatttggaatgagactgcataggtttaaattctaacactaactgtaattctggccaaaaggttatgatgtggggtcctcatctgtaaaatggagtatctatctcatggagtcagtgtgagaattaaataagcacataaatttctcaacatgacgcctggcacctagtcaacactcaaaatagaggaaggctaataatgatgacatgcaaatctgatattgcaaataccaacgcaaagagtctaatgaaaactttctaaattatatgtcattggttcattatttaagcttctgaggtttgtacaagcacagattaactcaaatgttacttaacgttttacatttactataaacaccctgatgatgtattttacagtttcttgatttttccctacagtttgggcacagtcttattatgacagaaaagaaagcaacaaacccaaaggaaaggcttttccctagactgcttttaattttctattaactgcccaattttgaaaaatagatctacaaaactgggttctggatgactgagttcttttactttggggacaagagctgatgctaaaggagaagacagaggattaagaaatttacattctgtcatttacaaacatgggtatgaacatgaacagagcctctgaaaacatctggcaaatagaagacactatgagccaatcaatcaccaatgctggcttagtagtcatattaataaatacttgctgagtatatactatgttctctgggctgtattatttcttttacgcctcacaacaaccctaagtttggtacttttctatcggttccagtttacaaatgaagaaacagggaagagtaaggggagttttcaaaaagaaataatatcaacagttattacatcaagggtttcacaaatgaagcattcaaaaattcagaaaggcaatgaattgctttgctagacctgtggaaggccctcaacctgcacaggtagccaacacccggtacatacccaattacatccagttaggtcacctctgtatggctgcaaggagccagggccatgtgtggtgcctagccacactatatacataacctgggaaccatgcagcaagatggaagaataggaaacagtatccagaatccagatgttagatctcaggggtagggtatgcacaaggagtatttgcaccatttaaggtgataacgctgctgtctcatggcaacatgcggggcagtataagaggcttggtaaatatccactggaccttccctaagcttagcacaatgcgtcctggatggagaaaatatcaaagccaccaatctgagcatgttgtggaaccagagagacttaagaggctgcaccaccacacagccctcactcgatctttctaggctctgctaagaatgttgctgctggctcactgcagaaactaacacttactcaaagatggtgcatcctg

SEQ ID NO: 1562280 - DNA, 4001 bp, Homo sapiens
atcttcagatgtaaagaaaaacagtcattgtgcacaggcgttagctgaatgttcgagagttggatgaatggggaagacttgttatacacctagtggtgggtggatttcactaggctgcagcctccacacagcttttctttgctgcactgcagaggcgccatcttctccgtcttaatcttcactcaattcgatccttttatctgcaccctaaaaaaaagacccttcggaccctccccagcatcctgtgcccccaggggaactaaaccagagtccccagagctgccagggaagaggccgcgccttaatcagacaaacgcctccttggatgcacaggacagagcccgtgcctccccaccatccgccactgccctttccagacgcacatcccactctccgccttatttcctccccgccaaggactttacagcccagcacagaattaagcctcggaggtgatccgagggtgggaagcagaggggccccgaggctccgccagaagccccggcagcgtctctgccccctcccaggcggacgcgcagccccgggaagggagccgggcgggagcctcggtggcgcactgagactaacgcggctcggcccacggcgagggcggggtgtcgcggcttttgttcccgcggaccttctgcctctcagacagagcttagggtgcgagcgaactcccgggacgtccagacttggggaaggcgcggggtggctatgggtctccgacccctcccatttctcgcaagttacacaaaagggagacgcggacatgcacaaagtttgcctgtggaaggcggtgcgcgaccccgacgccggctcgggctagggtcgcacccaggctgccgccgccagcagccgcgaaaagaggttggagcaaggaagggggatgggggtgagagaggaaggtgaaacgaggcggagaacgcagggaaaagcgaggggctcctagcttcctgggctgtcccgactcctcctcctcctccccagggcccaagagaaaggaaagggcaacgattcaagagcgaaggactggctttagggacgctgcgttttcggttttccccacgtgctccttcccccttcccccctgtctgaatgtctctcgcctcccccgacccccgcttccaaggcagggactaagtcggggtctgggctcagggtcgccccctacccttctcgccccgggctggcgcggaaccagggagaccagcgcctcgcccgctccctctcagcgggccggagcgcgactccctggggcagggctgggccgaaagcggggatgcgctggacgtccgcaagcgggggcggagaggagaggggtcccattgacggacccccggcttctctgcattaaagacttgggttaaggtcttggggggtatcgcgtccccaccgtgcagcctccccccgccttccgaggcgcggcacccacctccagcgcccgagccgtccaggcggccagcaggagcagtgccaaaccgggcagcatcgcgaccctgcgcggggcaccgagtgcgctgctgtgcgagtgggatccgccgcgtccttgctctgcccgcgccgccaccgccgccgtctcccggggcccccgcgcacgctcctccgcgtgctctcgcctaccgctgccgaggaaactgacggagcccgagcgcggcggcggggctcagagccaggcgagtcagctgatccggcccaccccgctcggcacccgagagagacccctagcggcgccgccggggaactgcgcccgctcgcgccgggaggggccctcgcgccccgcgcccacaggtgcacgcgcccttggcgccgcctgcaccccacgcgccccctccgctccccggccgacggcccacctgggcttcgtgaacagtgggagggagagtctggggccaggagagggacggtgcaggatcagggaaaggtgagtcctaggacgctgaggctctagaaaagtcgagagcgctcctgctcgtccccgtgagcttgaatcatccgaccccgcaggcctcccgggggtgtcgtataaaggactgctgctagggtgcgtttttatccgcatttcgttttttctctcggtttggagaggtggggcaggcgtttctggaagagaatgagaacgagtgaagcttaaaggaaataggattttctttgcttgttgagacagcaaaacctcattttttaacccccaacgtcaaaagcaggcacgagcaacctggaatttctatctttagaacgaaccaaaggagcaaggcgcaggacctggcaaagaagcggccaacccatttacttcttcttgaaagcagggttctgggcttgggttttgtttctttcttatatttttgtttgtttttggttttgttttgttaaagggggtggtcagtgtggattttgcggggcggggggtctttttttgttgttaagcagggatgtaacatccatctgagttggggaagaaggaaaaattaggagagatcattcgtattcgacccccgtaaatgaggacttctgacctcaaacgctgcccttgttcttcattgtgtctgtcctgaattatagaaatgaaccttctgccatgccactttctcctggattaaacacaaaccgtccactgtccagttagtgtccagatagtttagaatgctctagaactgcccagatatatcccctgctcttgacctgaagtagcatttagttaccaagccacagcccactccacacagggcttggagcgaaggactgaagccagggagtgctctggcccttctgagggctgcactgcagcctgccttctctcccttgctcattgcgctgacaagggtgcctaggcccgggaaggatggctcagccagcggggtacagacttccttcctgggaagtcatttctgtaccagctcccctaaatgttgtcttgtgtgtcttttcccgcactaggcattcagtcttgactcttggattacttttgcccctgaatgtcctttggatgtcctcaacaaataaggacaaatatttattgtcatgcagtatttgtttatacgcttcatgtcatttacttcctacaaaagccaaagaggctgttactattattcctatttatacatcaggaaaatgaagctaatgaactcccaaatctaatagcaagtaagtgacatgaagctgggacagcagggaaaagcctaaagtgacaggacaaacccagttgttcactttctgcaccacatttacccaccgcaattccgtatttgttccgggtctgcatgagcaaataaggcaaaaaagaaggtatctgaatgcaaagagaaacgtggtccaaagctacaaatcttgcagagtccactgcaaaatgcaaacgtgagaccctttgttacattattaagaattttaaggccgggcctggtggctcatgcctgtaatcccagcactttaggaggcccaggtgggcagatcacctgaggtcaggagttctagaccagcctggccaacatggtgaaacccccatctctactaaaaatgcaaaaattagccgagcgtggttactcctgcctgtaatcccagctactccagaggctgaggcaggagaatcgcttgaacctgggaggcggaggttgcagtgagccaagattgtgccattgcactccagcctgggcgacagagcgagactccacctcaaaaaaaagaaaaaaaattaaattaagaattttaagatggcaatggcagagcgttaaaccaagcatggggctcctcccaccgcagggcctgtgagactctccagggttgcatgcccatgaagccagccctgggaaggaggaggcaactttaagagtgagggacttttctttgggaggctgaggcgggcggatcacgaggtcaggagatcaacaccatcctggctaacacggtgaaaccccgtctctactaaaaatacaaaaaattagccgggcgtcgtggcgggcgcctgtagtcccagctactggggaggctgaggcaggagaatggcgtga

SEQ ID NO: 1562281 - DNA, 4001 bp, Homo sapiens
ataggttcacccgacatttgcttagccctagatactgtgcaaagtacttccatatatatcctttccttgtacccttacagcaatactctcaaagagttaaagtgttcttatccctgctttacagatgataaaactgtatctaagaaagattaagctgcacgtattctcacagttaatttgctctaagtctgactgcatagatgttactccttctgcaacacgggtaaaatccactttcattgtttcaattatccaccatgtaagtgcctatgattccccaatcgcatttctaattttagtattcatcctgagccccaaatctatccacagcattcaacagttctcatctcccttataagtcctacgaactcatccaaaaaacgaacacataatcccatatcaaaacttgttccttctcctttaatccctttcattttttttcactgattagtgaatgcatattgtccactaaaacgcagaagatagtcattacacaaatagctgtgaaataccacctgacataaattctctattccagtaccatcgggtgccacgagagcatatgatagcgtctgacatgatcagaaagactggggaaggcaacagtaagaaaacactagtctgagcagaggccttgttctgggtgggagcatggttctatttatagtgatgactgaccggccaaaggttagtaggttcgctgcctcttcagtgcatattcctatgaacaatccataaagtcgcctaatgaagtgttagcaccatcgtttttaggtgggatgcaaactttcaatattatgactaattttttccctcttaatggtacacgttctgcctaagtagcctagacgctcccgtgcgcccggggcgggtaggcctggccgaaaatctctcccgcgcgcctgaccttgggttgccccagccaggctgcgggcccgagacccccgggcctccctgccccccgcgccgccccgatttgccctcagagagggtatcgatcttatttctgggtctacggcaaactccaaggtctacaaacgtagaggtcagctgtgaccccgggccaggccgtgaaggtccccaggacacagagctgctctctcctcctagtaaaggtgagaggcagcccaggcctcgtgaaaaaacccagaactggagtcccaaaaggccacgctgatctagctaccctcccagtcaccttgcactcagtcccgagctgccaaagcctccgccgccaccacctccgctctacttccggccctggctccgcccccacacgcctacccgccatcgcaatgcattatgggccgccgtttcagtcggtcgacgctcaccggacaggaagcgtctcggagacagtctgcgaccggacgggtctaggtgagacagaagccaaacaggaggaggaagtggagggtaagtgcttccgggtcccctggcacagcctccgccatcttttcttcgcctaatttgacccgttctttttcccctccttgaaaccttgctctgtacgcatgcgctctttgagtggcctttcccctagttcaagctcccctccgagtcagcgtcctgttcgttagggttatcgaagtgtataaaggtgcagggaaagtgagactgtgtaaaacaaagcggattggggcgttgtgcttccttgtacctcgtgagcctccgttgccttgggcggtcgttttgcgcaccctgccgggagttgtagtcctggacccgaaggtgcctgggaggcgggaggggggttggggcttctcagcgccgattccgcgggaagggccctgggacctcacacttctagtcgcgggagctgcaggtcttacccggagagacgctgcacgtggagccctcgccgctgccgttctcagccggctctggagtgcgggcgggggcgacagggccgattccggagtgggtgagtgcggccgccggggaggaggggagcgcgggccctcgcgggccggcctcgttccggggccttttcccccacaagggcccccccgcggccgcctctgtgttttgtttccgctggtccccggcgctgtgactcccatttccgttcgtggagacttgagggagccgggtggggaggggcgggagagctgtgcggggagcgaaggggaggggcggggggcgagcggcctggagcccggggggaccgggcaccgccgggacccgtgccggacgggtcgcctgtcgccgctccctcctttccgcgtcccctcctcgcccgtccgcactcctcagcagtctcagcctgctcagctgggatgtggtcctgacgcccccgagattttaagagcaaaatgcagaccctgtctcatcgcgggactcagcgattcactcatttcaaatccgctctctttatagaacaacacacaccagaatcatttatcagcgtatatggtagccatctgggtttgtttttttgtttttaagcaaggaagtaaaccaaggagataacaatgggttgtctacttggaaatttttttgtgtactagaagacacgctgtatgtgcgtgtttggatttagggaccccagtttgatcaggttagcggaccgagaggacaatgcctaatattgcattgcaagatgattagaaatttagaaataaaattcatttcataagtagtttccactaatagcagtaggtctgactcgtgagaagagcaaagatttagcaggattcacttgagcgaattgtagaacgaggcggtgataacattcttcggtagtgttatcttgaacttcagaagaaaccgctcaactctttagcaactgcttgagggactagcctgtctctcagggttccatccaggctttccaagcttctttatttttagacatacagtgacgctgagtggacttcaagtcaattttacctgaattgtgtatacaagagcatctgtcatgaggcatgtatagtaatgaagtaattaaatcatgagctagatgttaggttgaagcaaatcatcagaccgagtactaaattaaaactgttgactttagccttccctcaactctttatatataaaactccaaacctacagaagaattggggaaaaaatcatgcagtgaacacgcagatacccttcacctgagggtcccaactgttaatctttcactgtatgtgctttctctttttatattacatagatatgtatgctttgctttttcttaactgctacctttatttttgaaaataaaaatgtcttttaatttcctcagacacagaaaagcatttgataacttaggaaaatgtgcagttaatctcgcaggtacccccacactccacttataatatattgggaacaaaatgttctaagctctgtaataatgctctccaatgaaggacaattctcaaatttatctgtagtttcaaaagggaatgttacacctatctgtattttaaaagacactagccgttcccagaatttttcgttaaattcaagtttagtttgtatcccatcttgtgaaacattccgaaccccaggttggatttaatccagcagaaccagagtgtcaaagtatatgaaattgttctgtgcagttctggcgggggcagcccttagacggagaaactgcaagtaattttctctcagttttcctaagtattgacatagaagcctgaggaattggtttcagaaaaagagataagactcactcaaaaactgatatgaaagatttggactatttctcaaatctctgttttgcttctctggactaagcatagagaaccaggagagaaagaaagatttaagagactgagtaatattttttgacagatcatttaagaaactgagtaattttttttttctccaaaagggcatgggtttttgttttgttttgttttttctctatttggcactttctagggattggtctataaattttttgaaagatcataggataaatttctttgtagcaacttcctattttagtgtttatgttaggggagccccaggtgtccctgctgatacgccattagggc

SEQ ID NO: 1562282 - DNA, 4001 bp, Homo sapiens
ctacaacctccgcctcccgggctcaagcaattctcctacctcagcctcccgagtggctgggattataggcatgcgccactatgcctggctaatctttgtatgcttagtagagatggggtttcatcatgtcggccaggctggtctcaaactcctgacctcgtgatctgcccacctcggcctcccaaagtgctgggactacaggcgtgagccaccgcgcccagcccggtaccttgattttaatatcgtctcctgtaataacttcctgtgataacttgggcatgtcactttgttaaacctgtttctttcattaaaaaaaaaaagtaagtaaatgctagcttgcctattttagagggttaatggaaaaacaaatgattaaaaagttttcatatttaaagattatgcatgggcctgtcaaaaagcaaatactcaacaccattcctttccccaccctatgcacacagcacattttgggaaccacaagtcacgcaaaaaggtttagatagtaactacacaaaaatccacgccctgactgtactgctgtttgactcacactttcgcgtactttatcattacagaagaatataaattaacataccctcacaagcttggcaaatggtctgaccacagaggtactgaagcatcgcaccttcaaagcaataaaggaaaatagatcaaacaaaattacttgaaggatttctgcatttaactcaataacaacaaaaaattttaaataaccttaaaatcattacttttgtctctttgtatattcacatattacatgagggtgagctacttactattactaaggggtaaacttacccaatgaggattatgccaagttgcttgggaaatcaccttcccacgaacctcctagtttgctaggaatggaccgaggctagcatacccgtaagacagaaaaacactaacttccaaggagtgcatgtttcaaaaatatttaaccaaaattttggcgtttctattaacagacccttgagcagatcatttgcaacagacgtaccctcctcggaatgcaaatgctatctgaaaataaagatgaattttttgagtactgccgcagagtttgatctgacaagaagccttagttctgagagacactatcctgcccatcaaaagacagagctggaatacacagtttaaaaatcacctgcaagcgcacaggtcacagatcacaggtcaccttcaaatactccagctatggaacgtgttttatcaaaactgcttgtgaggattaagactttttaatgcttatgaaaaaattacctaagatgccaggaaggggtcatgatatgtaaagcaccatggtgagatgcagcacaaacagcataacattttttcaaactcgatcttctgggtgattccgtgggttcaaatctcaattctaccacttactgactgagcagccaaagactcatttaaacttttcggcctcattttatttataaaactgtgaaatgtgttttacaaatattccttagcattactagtaagtgatctctgacaggttttaccacaatggcaaaggaagctgatttgggggctagtccatgccccttccccggaattcagcgaagggcagaccccctctcctgcgcccctcaggctagcagcttccaggggctgtgctcggaagacgccaaggttacggcacgcgcagccccgcgcctactgccccgtaggcatcccgggggacaaacgctgggtcgtcctgagtcgctcccactcgccaggtcccataaccttgaagactgccagacttccccagccgaagcatcgcaccctggtgctcgaggtttggtaccggtcatcccaggagggatcctcccactggctctcaggaccacctttctctcacctgccgggagagcccggacactgctggggcagccatcttctcccgggcggctgtaggtcaaacccgagtgggaagagagaaacgcgcaagggcgcacgcgcgcgttggcgtaaccgctaggttctctgggaagtgtaggcgtagggcgtcaggccgcaggcgcagagacctccctcgggctgggagttgtagttcttagcagtggtaagggctggaccctcggggtggagccacagggcttcgactgcatctgaaaatgaagtcattgttactggccaagcggcgctcactgtagaatggatttgctgtccccagttttaaaatttacatttagataaatatggtggcatttgttccatttcacagttattaccagcgtcactggcttctttacacttccttcccagcatgctaaagcctgcatcaatggctttttctcacgttgcatacaaagacaaaaccaaaacaaaacaaaaagcccccaggagccttgcagctccaggagcggacaccacgtctctcttacctgggccatgactacccattgttaaataaagaattattcagtgatgcttattaaagcatgataaggaagactttattcaggaccatagcgatgggtataggaccagtgcaacagggtctgggagtgggcagagagattgggctcaactccgaaagcagaatgggcaaatgggaatttatggccaaggagcagtgcgggggtcagtggatagaaaattacttagaggaaactggggtaagagggattctggctaaaatgacctagaggaatcttgtagaagacaggccagggtgatcagacatcacctgggggatggtgaaggatgaagaccctgatcagatatcaaagatgatcggttgtcgaagattgggggttctggctaaactgacttagcagttttgctaaaactggactttacaaggaggtgcatagataggactacgagaaggttcagaagtctcactaaagtttggccaagcaaaagcaaagaatccctgtggccctccattcccctcccctctcccccatctcacctgagtatagaactgagctgttggtttgtgagggcatatgggattctggtacctagattcttgattctggctagggcagagtggctatctgagcatcaggcctaaaataggagaacccgggtttgagcaaatttgatattgaaactgagaactgggtactagccttggatatagtttgtctgcatccataaaaacaacctatcttcaacccattctctctaaatagaacttggtcgaattttctcctctgtcagagaagagactggctggcagagcaagggtcagtattcctggttgtaatagtgggggttctgtaatcaacttaaaagaaaaattctctgctcagatttattatagaaacacgttaattcactattttgcccttttagagagcagttttctcattattacaatttttattttttgagacagagtctcgctttgtcacccaggctggagtgcagtggcgtgatctcagctcactacaacctctgcctcctgagttcaagcggttctcctgcctcagcctcccgagtagctgggactgcaggtgtacacaaccacacccggctaatttttctctttttagtagagatggggttttgccatgttggccaggctggtcttgaactcctgacctcaagcgatccgcctgcctcagcctcccaaagcttagaggtgtgagccaccacacccaaccccctaaaaactttttaaaacgtagagaaagataaagaaagtaattgtcctcttttcttccactcggaggcaattgttgtaaatattttggtgtcttgtttctcaatatttgtttaggctgtggcctgaactaccctggcctgaatcccaatcagttccttggcccaattatataacttctctgtgcttcagtttattatctataaaatgggtattataatagtatctgcctataggtcattagaagaaacaaaaaggtatacatgtaaagtgcttagaacaattgcctgagagagtggtgcttattaatttagtcttttttttttttttttgagacaatgccttgctctgtcaccaggctggagtgcag

SEQ ID NO: 1562283 - DNA, 4001 bp, Homo sapiens
acccggggagagaggctgataaagcccaggcagcttttcaaagtcactgtaaccaggattcaggatcaggctctaggcctggcagaaaaccaagcagaaatctgatcagacgcccagttaaatggacaagcatgcatggggggcatcccctgggatgccagtactgggctcagttccatgcccaggaaggacaagatggagaccctgaaactcttcttggacccgtctgaactggcctgaatctgtagctgtccagggacagaggagggagggctacaccttcgtgtcctctgctgcatggatgaaggttaccatccgtgtggagaagtttggccatggtgaggtatgcagaatctcataaaaccaactattaaaggtggcccttgtttattcaaagtacctacttagaaatcctacaaaagaagggatgcccttgtctggaagaacctttgcaaagacaaccttgtccttgtcaatcttctgaggtgacagcatagtgaaacatctctttccgatttgcatctccaggaggtaacgtccatgggcctcacactgagctccttcctgaacacgtcagatttttattattattaaatttacctaacaaagaaactacttaagacgaactgactttaaaagagaaggaaaaaatgaaaggagataggaaacaagacttaatacacatgcaatcattccttaaaagatataaaattctccctttgaaaccaaatttgcatattacacgcacctgttttaaagaggaaacaccacaaaaggtacatgtaaagatgggcagaatcagcatgcatttacctagaaatgcccctccgaagacttcctacatctgtaaaatactctcaacagcagccactgcctaccccaagcacccaacgaaacatgacacttccccagatctgtatcttcattaaattctactcctcctccatctccatctctttgaaaaagacaaaaatagtaaatgaggaagatgtggagatgagaagtaatgttaatatttacaataggtggccacatataacaaagacttaagtttgctatgctaacataaaggaccagtgaaaaataattttccaacatctgattactgcagattcagttgctattatttggaagctgtatttatccctcaagagtcagaaacctaaacaaaaaacgaaacaaaaccacgaaggaaaattatggtgcggtgtgtgtgagaacacacgtgcacatgcgcacacatacgcgcgcacacacacacgcactcacacacacacacacggtacagatattgtttttaaaataatgttcattactgagtcttaaggtacctcactgtatttagcaatgacctacagactcccttctggtcctcccaaagtcaaaacccctggtgtcatctcttaatgaaaagctgtctttctcatgatcctgcccatcagccccttccacaacccccacgatgcagaagctgcctgccgcagggtgcttcagagtttgttttgttgttgttgcttaagattaggccattctttttaattgtgcgatgtttccatccagtgctgattccctaagtcttgtgtccgcaccgtgcccacccaggaacacaacttcctcggggcgtggcgtgagtagcgataagactttataaatgagtatgttttcacaccaagtttgatgacatttggtctgtaacaattttctttcccttcatttaaaaggaacgaaggagaaaacagaagagcacgcctgcagtgcgcggccgcgccgcggtcccctgcgcccggcacccacgcccccgcgcgccgcaggacccggccccccgctcccggccagcgctccccgcgccccgcgccccagccccgggccttaccgtgcgcggggcagccccggcaggcccagtcgggctggaagccgccgctggctcagagccgcatcccggcccgcggacgcagggggcgcgcggccggtccccggaggcgctgggtccaggccgaggatggttttgctccccgctccgctccgcatttaggaggtgggaggagcgcgcggcgatgcgcacaggaaatctgataggtgaggaggccggcgggccgcgcagggcggcgcgggctgggggacgcggcgggcggctccgggaggcgacgggacccccaggccggcagccgagtgaagaggcaggaactgtctacaaatgctccggctccgaagccccgagggaaagagcatctttcacggagcaccaggaattgacgacggtggaatttgctcagatcccctgaggccggttctttgagtttctgtctggccctccgggagaaccgtcccaaagttaactttgaaaacactcacaggagagggaaggctgtggggtccttcgcttctcaaaccccagatgcccccggaaagaacaccgcccccgaccaccaccacaaccagatgtttttaaaaagagatgctaagcaaaaggcctgattatgaggaatgagccaaagtcatgcaaggcgtggggcgctatgggactgcgcagtgacgacccagtgaagtagatgccttgacgattcccatttcacggatgagacgactccggcacagagaagtcagagggcctgtcctgggtcacacagccacaggcggcccccaggtaaatgaatactgatgtaccacagccatagtgcgggggtgggggaggggtcgcaggagctgaagccagtgggaccccacctttctctggcaggaaaaatagatatatatttatgtagacaaatatacattttttaagggattgagaacatatcattcaattcagtgatcttcaaccctggctgcagtaaaatctcttgggaaactcttaaaagtcccaatgctcaggcgcctaccccaagcccaatgaagctggcttattttccttaatgtcataacttcagcagcttcagagcagtgccagccctttcttccccacggctgacatgtgatccttcttgcacaaagatgacgtgagctaatagggaagtgaggagagaccccccgctccaaaaacaaattaggaacatggagtccagagcctaaaaggtgtagaatcgcttcagagaacggacaggcctcggaagcttgagcgtcgggttggagggaagcctatgaggggtctgatggagaggaacgcagccgtggggcagcaatcaccagccgggattattaaactcccacgcgattctgcacgtggctttgtgcagctcccgtttcctggggtaaccatacgggcctggcacactcacagctgagcagggccagacaggatgccgcctcaggcagcatcaagtggggtgggtaccagcccagaggggacaggaggtgagcctgcctgccttccggggtgccccctgccctctccctcccagtccccggttgctgttccccccactcccttcccaccctttcctcctttcccacccagcacgtcctgcaccaagaagcacatcagacctctgtccagctacggacacctcaattgagccggcacctgaggggctatgacatggggcaggtgtttttttaataaaggtggtgggggaggagggtgcaggacccagagaaagggccctgggagactgagacttagagctctgctctgaggggcagggggccagtctcagcaggggccacagaagccaagcctggatacatgtcaataccgacatataaattacatttatatgttaaatgtaaacagttaaaatacacttattgcgctccaagtataaaaatcagggaatcgttcaggtagaatttcagctttgggtgctggtggtggagctggaagcttcttccctgaaattgtccttgggaggagggtcctccattttttgtttccaagaccagagtaatttaattatactacaatgacttcttcatttgagcagcttgttttcaattaggctagtaagtggtataaaaacaaggataagggaaacgaattggagggctaagggcctctgcatggg

SEQ ID NO: 1562284 - DNA, 4001 bp, Homo sapiens
gaggacagcaagaaatgaaactgaaagagtgaaaagcagagttggtttgggctttttaattttaatatttcagagacctgatgtcactctgtctcccaggctggagcacagtagcacaatcatagctcactacagccctgaactcctgggctcaagcgatcctcctgtgacttgggtcacagcttcccaagtagctgtgaccacaggcgcatgccaccatactcttctaactttgtattttttgtagagatggggtttcactatgttgcccaggctagtctcaaactcctgggctcacgcagtcccctgccttggcctcccaaaacactggaattacaagggcaagccactgtgcccagccaagagctggttattttgatggccaaaagagcacctgaaaatttcattgtcaaaattctgttctacatatattcgccaaaagcaataggaatataataatggagctttctagaaccagctcgctctccagggacttctttcctggaggcaaacttagccaactacctgctctgcttggcacccctggggagttcctgcccagctcctgcccccagcaacttcagagaaatcacagcagaaggcaagcaggagaccagaacttgtctgaactggtgctccaggatgctgcaaagtttctttctttcttttctttctttccttccttctctccttccttcctttacttttctttctctttctctccttctttctctctttcattatttatttgcatggctaagatatgcagctgattaggggggttgggggactgctttctcccccacaatacattttagagagaaacataaaaaccaagtgcaagggaaagaagatatttttctactttgtttccttgcttgaataattctgctccttttctatgggttgctttaacagtaaaccttaaattctcattctctctgatgtgcctctcctcaggacccttcacagggctctaaattcccagggatgggcgctcacctcatgcagtgcattggccaaactgtttcccaggaggcagagcaggtgccaaacccaactggcagagcaggtgccaaacccaaatgacccggggtcatttgttttcatgggcagttgaacatttttcctgcctaaagtggagttaccaccagaagtcacagctcagaatcctcatatatgagacatctgcatctttggctgagtctgtattgggcctaaagaggacctgggggccagccttccactgaaggaggaggtaggggcacctgcagcaccagcagacagagcctggaaagggcagcctgtgtccccagatcctagccaccccaggccagctgcaaagcagaagccctcagcacaagctagctctgccttacctgggacagagccatgaacaggcactatctgtgctacagaagccctacctccaaacacatctagaccaccaggctgtatggcctgaccagccagtcaataacggaatggcagtttctccagcagattctgcactccaggtgtattagtcagggttctctagagagatcgaatcaacaggttatggatagatagaaagattgataggtagattaatcaaaagatagataggcaggtaggtaggtaagtcggtaggtagacagatagatagatagacagacagatagatgagaagaaatttcttagaagaattggctagcgtgattacggaggttgggaaataccgtgacaggccatgcaagctggagacgctgggatgccaggagtgtggctcagtccaagaccaagagcctcagaaccagatatgccaatggtgtaactatcagtccaaggccaaaggcctgagaacccagaaacctgcttggtataaatcctcgggtccaaaggccagagagcctgcagctctgatgtccaagggcaggagaagaagaatatcccagctccagcagagaaagaggaattcacatttcttctgccttcttgttctatctgggcccagtcaatggatggtgcctgcccacatggagggcagctcctccccactcagcccactgactcacagccaatctcctctggaaacaccttcacaaacacacccagaaataatgctttaccagttctctaggtatttattaatccagccaagttgacacctaaaagtaaccatcacaccaggctttgctctgtaactcatgagcaatatagatgccaggagagaaccttggaactgaaggagataaatacagtgcagaacgtgtagacctcccttctcctctgcctctgcctgctgcaggctcctctgagtgtatcccatctgctggctcccgccctctgcctaggtcactgccccccttctggccatagtgcctgaagggcaaggggtatgtcttacatccctcctgaaaccccagagaactgtgcacaagctggttgctgggtacattttgaattaaagtggaacaagtaagtaacacacaaagctagagccgtcaggatagggaaaggctctctaacgggaaatctgggcatcagcatcctacccgcacaggcacgtgcagcgtcctgggactctccccaggccaggtgaggagaccttgccttaagcctgacctgaggctacagggcacagagacaaaggaatcagaagtccacctctctaaggactggaaaactgaagggggggtctggaaagttaagttcaagatgcacttcctggacctgaaaggagagatctggagtgaagggacaatggccaagccccactatgaggccagaaagagtatgcaaggacaaagcactcagctcaaggggtctccaggggctgtggccctcggtggagaggaagctggtgagcattctgagccccgtgaaggacgtggcatctgcactggtccttgaaggggaggtgtgatgtaacaggtggaaccaggggatgggaattccagaccaaggaaacccggggagggtgttggcagtcctgagtgctagagtctgctttcaggacactcgctccagatcactgtcttgtatccttggagattctcaccaccgcataggccttgggagaacagaacagcatcaccaggaacgcagaaggaacaacatcaacgtccctgctgtctgaacaaccccacggttctcaaatccagtgagtgtcagaatcacccgggaggcttgtttaaaacccaggttgaaaggttccatctcacagagattctggcaggtctggggcccaggaatctatattttaacatgcggtcattctactctaggctggcctggtaaaaaacgccagtggaaactgcctgtacagacccgaccagtaacaggcaccacgtataaacaaggtcgaagaccccagaccactgtgcccaccttaacatttcagtggattcgttgtacagactgaaaatatcccttcccctggagaaggtggaaaagagcatgacgggggtggacgagaacgatgcttctccactggaaactgggatggggtaaactcccgtgtcacacatggcctggagcctccccgcagctgaccccagactgacgccagcctggctgggcctttggaggcctgggctttctcagaggaaagacattttaggaggcaaattttccacgagactagtgaagctaagctgcaggacgactcacctctgctgttttcttttccttaaagaggaatgccccccaccccaattgtataagcttcagaccccatcagacctggacctacccctggcctcaagcagagagaatctcccaagtgagctgaagtgagcaaccagggtgaccctctaagtaattaagaagtcacagggcggagggagattctcagcaactgtccaggcccacactgggctggcaaccccaagtcctcccggcacccagctccctgcccactggaggtgggctgagcatcagtgttagaagcagagagggttttgcagctcttgcagcacgatggtgaatgttatgtgccagcttttctgggtcactca

SEQ ID NO: 1562285 - DNA, 4001 bp, Homo sapiens
caactagaatcaaagtttgaatatacgcttttgaaggtttttttttccccctaaactaattaaacaactacagaagttattcggcagtttccttttttaaaagaattagcatggcatgtctttcctcttaaagtcttgaataatttaatgagaattatacaaaagtcatgagtatgttctatttatgggggaatcatagctgaatcaaaacccaaatgacaatgttaaaaataaaaataaactatcttcaaatagtgcattcaattgagcaaaggacttcaaatcccacttggattagacagtttgaaagtaggagggggcagatcaattgggattttttttttttttttttcagatcactgtgcttgggaacatttgtttcttgctacaaaaagtgttagtaaatgaacatcagagtaagagaaaaggaaagctgtttgattttatttttgtgttgtaatcgggataccacttggtccccggacacctcactcagcccctgtttttttcccggtagctggaatgcttttcacactctgcacacccgcgtgtagatgcatcgctccgtgcagaggggcagggccgccggatgagcgaggacacagctgacaaaccaactccgagaaaggaaagcgggcgcaggggagacgctgctccttcctcagagcagcaagcgagccacttcttaaccgggttgcttttagctgagctcatgcataaatcctttttaaagggtactgcgcctttggaagccggccacgagcctctttagcaatgagacagcatggtggtggggtggggggggggcgggggggagggagggtatgaacacgaggtgattttccccataatagcccgtcgcccaaggcccaccgctccgtctcccgctggaagtaggtgtcgcccgcaagaaggaaatcacgttattggaggcggcaagttccaggtctcctctcccgcccagccccgcggagggggagctcacaagttctgaaacactcgcgcacacccctcagtgcgccccgggcgggggctgccgtcctccgcgactcaagagcgagcgcccccgctccccggcccacccgagcccctctgcgttccccgctcttctgtgcggggacagctgctgctttgggggcgacgctaagccgcgtggaggcgtctctggacagccccctccctccaacgagcccgaaaagcccgcggcagcagccgggggtccctaccttctgcgggggggtcccgatcagcatctccaggtagtagccgcggccagagtccccctgcaggttgtctaccatggccaagaagttggcggcgcccgcgggggacgccagggcaggctccagggcgagcgccaagccgtcggcgtggcgctcggcaggggtcccgggtcccggggtgggcgcaactacgcggttcgtggccgcggccacccggaggggcagcgtgaagggcgcgggggccagctccggggcggcgcgcaggagccactgggccagcagaggcagcagcagcgcccgggccagtgcgcccatgcccacggcggggcccggggggcgcgcccagcctagccggtcccgtcccgtccggcagccgcggctcagcgactcggccggcgcgcggggctgcgggcagggatgggcgcgcaccgggaccggcggcggcggggaggacgggaggagggcccaggggaggaggctcgcgggaggggaggaggctcgcgggaggggagaaggcggaggccggggaggcgggcgcggaggcgcagagccgccccagcccgcgccgccaagttgggcaagttcttctccgctgccccctctggcggccgcgactgccccgcagcggcccagcccctcccccgcggccaaggtcacagcggggctcggggggcgccggggtccacctgcgcctgccctccccaccctcgccgggctcaggccgcgcctcttccccgggaaactcgagtcccgaatttcctcggaaagcgccccagcggccacggccaacggatgtgacgaggctcatctgataccggggggaaagtttcgagaacccttaaaggggcagcgagggcctgaactagggccccggccccgcgcgcttgggggtccgcgggggtctattcgcccggcagtggcgggagcttccgggggtgactcggaggtcagcgaggagagcggtggatcgggaaggagcctggagcctcgcgcgcctttccgagcctgcgcctcccctcgccaagctcctccgcctcatttcagtcgccgggtctggctgctttcgaggcgtttcccgtccgctgcccccgagcccccgccctcagtccagcccgttccccggcctcatcccccggcggcccctgggtggttttaaagaggtctcagtggaggctgggagggtggagggtggaaggaggcagaggaggatgcgagagctttggagaattttccctaaaaatcgggggaggtggggggcgtggctgctgctggcgcctggccccagcctcattgcccccccttactccctctgttgcccacagctagctgcgaagctgggcttcaccccagccaccttccccccacccccgcccccttcgccccctccgccgcgcccctgtccctaatgcaggtcagatgctactggaacccgctgcctcccctggcacccagccctcaggccacctagtaagttgctgtcaggatcccaaatcagggccacgagtccaccctgctgtgatccctgcccttctcccccacctccccttctatccccagccagctctctgcggactgtctaattaatactcgtttagccatagacgccaagacgcagaaatgcgttgagtaatgcaagcaacgagggttattttattttagatactaaaggcaggggggacaattagacaagctaaagtccatcgatttctacagaaacaaggaatagaaaattctttgtacctcctccagctgaattatgttggctgttttaaaaaacaaacaagcccatcttcaaacagtggggagttagaagccaagcttccccgaatcactgcaattttcagctacttctactcaagatttgatttttattcctgtgttcccaattttagaatcacgtctagctctgcaagggacctttatgtcagagatcttcaaatgtattgattttcagatgactttaaccataaatcacacttcccccaaactatatctcaactttaacaaatccccaactccatgaagaaaggcatagctggatcccgtgatataacttaagttgatattctccataaatctgcatagttattccagagcccttctattcatatattcacgtttcagattcaaggttgtggagggaatgtgattttttttaaaatgattatttatactccttggtgtccagtcttgaggggttcaaaaagacattcagacagctctgggaagaatataatctttctgaaaagcacatgaaatgtattagggccattgataaagaggctatgtgacatataagtttaatactagagacatttgctctgtctaataattaaaagccacaagggaaatttttaaaaaatcaagtctaattaaagtttgtacaagaaacgcgtgactcagtctagggtgagtattcctaagcttttcattttaagagggatggtttgggtttgtggggaaaaggatgcataaagatccagggatggaggagcacacaggcttccatggatggcagagctgtcttgtcagaaaataatgcaagctgaagggacagcattgggtgactgtctccttggttgtctctgttttcatgaatggtcttagagcatatgatccctattcaagcctatggtgctgggtggatttgggagacaataattttactttccaggtgttggaactgaaatgataagtggcagccctctcatggaatagcattgatttttaaaccatggtgaccgatgcagggcagagaaaggagaaggtgagacccac

SEQ ID NO: 1562286 - DNA, 4001 bp, Homo sapiens
aaagccaagggccatgagaaacagagcaagtcccttctgtgtactcataaccaaatttttatgacgcacaaattaagctcactgcttgaaacttatagaccacgtaacagaaaccacaaaaaggaaactaagtccagtaagagtagtaaatatttttgttacaatattttttattgggttacccctagctgcaaatttcttccccagttttagctctctccagcgcaaatttattctcagacagcaggtcacgaggctccgtctttaaacccgcctcagtgctattggccactgcctaagagtgctcttccacttcacccactgataacctgtatcaaaacaaccccagctgggtccccttcagccttctgaagcaacctctctagagcgctctttggccttttatagtggaggcatgtgatgagagtatttgcaccagctgtttctaattacctctcaagctggggcgaatgactcagcaacccaactttttagagagtcatcctaccttgttaaccaaccaacataccgaacaacagtaaaccacttgacagaaacataggttaaacaacaatacaagaatcactacgccaaagtcaccctactccaagctgactcaccgggagcctttcttccctaagcttcttcaagatgtccaaaggcagaagtggcaagtgccttcaagcccagcccagcccttgcaccactacccaaagaccaggaagaagcaagccgacctcttcccatttctctgcttgactatgtgaagcgctcaagtgctctgccactaacacatctgggatttccaccctttatccttctgaactgcattcaatgcagaccctctgatgtaaagggtgttcaaatacatgatcaaattcccatagcatcatccatgggtaacagtccctacccctacacaattctccaaaaagcaaagcatcctacaaaacattctttgttcctccaagcatgacattgtagctcgttttcctcatacacgttctttcacaattactactacactttacctggaatcagcacaagtttaacgcagaagcctcactccataaaagcattccgcacaattctactcaatgacatgaaactgccgtgtaagaatgagaaagcaacggcactcgtgttacattacacgagcacaaagctggtgtctccagaatcaacgcccactctcaccatattgtgcgaggcttaattacaacgcgtgggcaaaactccaacaaagggagtcctgggctctccggtccccaaaaccagtcttcgctaaatccagctcagcacggtggccttctctccccagccacaaactcggcttttcttacgcgattccacgcgcgacagccaccgggctgagtagacgcgaggctgggcatgcggtgggaggcggcggaggacaatacggggccccagccgcgagggcggtgctgatgtgtcacagcccgggcgggccgcgggcgaggggccgggctggcgcccgagggcagggaggggggtggggcagggaccccgcggcccccagcccccgcccgccccgggtaaagtacggcgcgcgcgggtaaacaacagctccggcagtgcagggggttcggccgccgacgggacgccccttccggcgtcgcggccacttccaggatcccggccgccggcgccccccgcgggccccgatacgtgccccccgcgccccgcccagcccagaaagagccgcccccggcccgcccgcgccttcactggacctgtccgccggcctcccctcacaggcccgcggccctgaccgcgccaaccctcccggagaagggccggcgggacggccgagccactcaccagagctgaggcgcggcgcggcccgactgactgaagcgagagcgcccggcgggcggcgagggcagcggtcaggtgactcactccttccgcgcggccagccgccccctcccttctgcgccgctctgctgccgccacctcgcggcgccaaaaccccgcccgcccgctgaaggccccgcccccggcgccgaagccccgccctgccgccctcgaagcctctgtcagcgaacgagcgcgcgcaatagcgcggggcaggggtcgccgcggccggaagcccacgcggggggttgcagggacgggtcgtaaggggcggggcgggcctcgaggaggcggcggtggggtccccggacctccgcgcgtggcacagcccgcatcctgaactgactcccactcgaggaccacctctcctctcccttctgagggcggaacggaaaggccaagcgcctcctcgcctcgggagctgcaggacgccctaattcagccgagtcgccgcgtgcccgggtgcccgcgaacagcaggagagaggacgggcgctggccccacaggggtcgctttaccccttgaagagctcctcgctgcctgccctgggggtggtgggcgtccaggttcacagggtacttgagcttgctggggtgggggtgtgtatgaagtgcgtccagggttttgtggagcgcgtctagcagttgctctacttcttactgacagtgaaacaagggcgcccacgacaggtgttcccttttcgctgtcgctgccaggaagcttccagccaggttcagcgcccagtggtgtcagccggcccatctcgagccttggttccgctgtcatcttctggtgcttattctggtgtttatccaactgtccgttttgaaattatgttcccaagccatttaacacctctggagaaccaaagcactggctgtcagcggagcgggatgcacgcgcagcggaggggactgggcacgccaaccccacgagggttcctgcggagatgacacggaccttgaggtctgaagccaaaggacgatttgtgtgaagggattttattgttagctttggagccagcaacaagaacacagccctggagttcccggggcaaaaaggataccaagataataattcaggtattacgactaacatgactgcatttgcacccacaggctgtgggacttggggacgtttgagctacatccaaaatacatgagaaaatcacacaagtgaaattggatgagagtgcgaggggtgaagtgatacattatgacctagaattaggggaggcttcctggagcaggtgacatttgcattgggtcttgattgggaagagtggaacccagcagtctagatagggtccagaggtaggaggtacctcgcatcccaggctgcctcagttcatggtgagagtgcagatatttagtgaaacaggaggaaaggacacttggaaatacaccatgaaagaaggattgaagttcttgcagacacatgggagtgtccgaggctttattctccttccaccttgagccagtggaattgcagtgtcttttttctacacctatgcagttttttctacacctgtgcagttttttctaggggaagatcagaccctcctctttgggaggaactcttgcttctttagataatagcagtgacattttctagcctgaaaattatgatgtatgccctgataggtttaattatttgagaagttctcacaaaggtatacagatgtgctaagagtatcaagtcaagtgagtgactctcaagcttcattatggggaagaatatttggtttgcttgttaaaatgcagattccggccgggagcagtggctcatgcctgtaatcccagcactttcaaaggccaaggcgggcggatcacgaggtcaggagatcgacatggtgaaaccccgtttctactaaaccccaacatggtgaaaccccgtttctactaaaatacaaaaaattagccaggcatgatggtgtgcgcctgtagtcccagccgctcaggaggctgacacaggggaatcgcttgaacctgggcggtggaggttgcagtgagctgagatcgcgccactgcactccagcctggcgacagagcaaaactctatctcaaaaaaaaaaaaaaaaaaaaaaatgcagattcctgggtcccacccccaaaagatgctaa

SEQ ID NO: 1562287 - DNA, 4001 bp, Homo sapiens
ttccggttgttgaaagaatgttactgacagtggttaacaggctatgttcccccagcaacaaaggggtggaggacatgcacgcgcattatataatatgaatacacgattgttagtctgcatctttaagcttaatgtctttcttatattaaagtttttaaaagttttaatatattccttccaaatgaacctccttgcaccccaccttggaggccctaatacttacaaaattcatgatttctaatctcctctagtcccagacttaaaggaacaaaataaatcgtttttcctaatacagaatattttaaatgaactaccattaataggaatcatcatttttttcaccaaagggccaaattcccagctctacatttcccattcctaaactttgtttgcaatgaggactcatataaatatttgggttgtgtgctcctttttaaagcaagaagcaatgacaccaggtgtaaaggcagtggtgtcatataatcaagacaatgagacaggtatttacggttggctatttattaaacagctctttcgagacttaacccaatgagacctattaattccacccatatggtgcttaccctcctctgactcctgaaacttcttgtgtatgcatgaaaagccaagggccatgagaaacagagcaagtcccttctgtgtactcataaccaaatttttatgacgcacaaattaagctcactgcttgaaacttatagaccacgtaacagaaaccacaaaaaggaaactaagtccagtaagagtagtaaatatttttgttacaatattttttattgggttacccctagctgcaaatttcttccccagttttagctctctccagcgcaaatttattctcagacagcaggtcacgaggctccgtctttaaacccgcctcagtgctattggccactgcctaagagtgctcttccacttcacccactgataacctgtatcaaaacaaccccagctgggtccccttcagccttctgaagcaacctctctagagcgctctttggccttttatagtggaggcatgtgatgagagtatttgcaccagctgtttctaattacctctcaagctggggcgaatgactcagcaacccaactttttagagagtcatcctaccttgttaaccaaccaacataccgaacaacagtaaaccacttgacagaaacataggttaaacaacaatacaagaatcactacgccaaagtcaccctactccaagctgactcaccgggagcctttcttccctaagcttcttcaagatgtccaaaggcagaagtggcaagtgccttcaagcccagcccagcccttgcaccactacccaaagaccaggaagaagcaagccgacctcttcccatttctctgcttgactatgtgaagcgctcaagtgctctgccactaacacatctgggatttccaccctttatccttctgaactgcattcaatgcagaccctctgatgtaaagggtgttcaaatacatgatcaaattcccatagcatcatccatgggtaacagtccctacccctacacaattctccaaaaagcaaagcatcctacaaaacattctttgttcctccaagcatgacattgtagctcgttttcctcatacacgttctttcacaattactactacactttacctggaatcagcacaagtttaacgcagaagcctcactccataaaagcattccgcacaattctactcaatgacatgaaactgccgtgtaagaatgagaaagcaacggcactcgtgttacattacacgagcacaaagctggtgtctccagaatcaacgcccactctcaccatattgtgcgaggcttaattacaacgcgtgggcaaaactccaacaaagggagtcctgggctctccggtccccaaaaccagtcttcgctaaatccagctcagcacggtggccttctctccccagccacaaactcggcttttcttacgcgattccacgcgcgacagccaccgggctgagtagacgcgaggctgggcatgcggtgggaggcggcggaggacaatacggggccccagccgcgagggcggtgctgatgtgtcacagcccgggcgggccgcgggcgaggggccgggctggcgcccgagggcagggaggggggtggggcagggaccccgcggcccccagcccccgcccgccccgggtaaagtacggcgcgcgcgggtaaacaacagctccggcagtgcagggggttcggccgccgacgggacgccccttccggcgtcgcggccacttccaggatcccggccgccggcgccccccgcgggccccgatacgtgccccccgcgccccgcccagcccagaaagagccgcccccggcccgcccgcgccttcactggacctgtccgccggcctcccctcacaggcccgcggccctgaccgcgccaaccctcccggagaagggccggcgggacggccgagccactcaccagagctgaggcgcggcgcggcccgactgactgaagcgagagcgcccggcgggcggcgagggcagcggtcaggtgactcactccttccgcgcggccagccgccccctcccttctgcgccgctctgctgccgccacctcgcggcgccaaaaccccgcccgcccgctgaaggccccgcccccggcgccgaagccccgccctgccgccctcgaagcctctgtcagcgaacgagcgcgcgcaatagcgcggggcaggggtcgccgcggccggaagcccacgcggggggttgcagggacgggtcgtaaggggcggggcgggcctcgaggaggcggcggtggggtccccggacctccgcgcgtggcacagcccgcatcctgaactgactcccactcgaggaccacctctcctctcccttctgagggcggaacggaaaggccaagcgcctcctcgcctcgggagctgcaggacgccctaattcagccgagtcgccgcgtgcccgggtgcccgcgaacagcaggagagaggacgggcgctggccccacaggggtcgctttaccccttgaagagctcctcgctgcctgccctgggggtggtgggcgtccaggttcacagggtacttgagcttgctggggtgggggtgtgtatgaagtgcgtccagggttttgtggagcgcgtctagcagttgctctacttcttactgacagtgaaacaagggcgcccacgacaggtgttcccttttcgctgtcgctgccaggaagcttccagccaggttcagcgcccagtggtgtcagccggcccatctcgagccttggttccgctgtcatcttctggtgcttattctggtgtttatccaactgtccgttttgaaattatgttcccaagccatttaacacctctggagaaccaaagcactggctgtcagcggagcgggatgcacgcgcagcggaggggactgggcacgccaaccccacgagggttcctgcggagatgacacggaccttgaggtctgaagccaaaggacgatttgtgtgaagggattttattgttagctttggagccagcaacaagaacacagccctggagttcccggggcaaaaaggataccaagataataattcaggtattacgactaacatgactgcatttgcacccacaggctgtgggacttggggacgtttgagctacatccaaaatacatgagaaaatcacacaagtgaaattggatgagagtgcgaggggtgaagtgatacattatgacctagaattaggggaggcttcctggagcaggtgacatttgcattgggtcttgattgggaagagtggaacccagcagtctagatagggtccagaggtaggaggtacctcgcatcccaggctgcctcagttcatggtgagagtgcagatatttagtgaaacaggaggaaaggacacttggaaatacaccatgaaagaaggattgaagttcttgcagacacatgggagtgtccgaggctttattctccttccaccttgagccagtggaattgcagtgtcttttttc

SEQ ID NO: 1562288 - DNA, 4001 bp, Homo sapiens
ctggccaacatggagaagccccatatctactaaaaatacaaaaatttgccaagcatggtggtaggcgcgtgtagtcccagctacttggaaggctgaggtaggagaatagcttgaacctaggaagcggaggttgcagtgaaccaagatcgcaccactgcactcaagcctgggcaacagagcaagactgtctcaaaaaaataaataaagaaagaaacaaagcagtaaggagtacaatacagtgcataactgttctcaaccttgacaatgtcaatgttagaaatgacagatgtaagcacataaagggaaaaggaaaggtaaaaagaagagttgcagctgggcatggtggctcacacctataatcccagcactctgggaggctgaggcaggtggatcgcctgaggttgggagttcaagaccagcctgaccaacacagtaaaacctcatctctactaaaaatacaaaattagccgggcatggtggcgcctgcctgtaatcctagctactcgggaggctgagacagaagaatcacttgaacccaggaggcagaggttcaagcaagcagagattgcaccattgcactccagcctgggcaacaagaacgaaactcacagagctgtgccatcttcaggctccaacctccagctcaccacaggggactcctccttcatcagcctggcttggagcagctgggcagacaatgccagaaaaacctacaataggatgcagaaagtggcagtgttagagcctcaccctgtcatgctgcccactgggtggctggggccagtttcagcgaaggcactcacacccaccctccaaagtccagcctctcctcctagaccaagctggcctcctgacctggggtggggactggagacaccacagtgtccgaggctagttggggagcaagaacagcagaaactcagacccagccagtcctccccacccaagtaccagttcccattcctgactcctccacccacaggaccctgagcccccatggtgcccactactccatgcctggggctcccagatggtccccacaacacagagcaagagggcaagggccgggtaaccatggtgggtgtgagggccctgcggtggtcagaggattgccacaaaaactctgtgcaccctccgcgttccaacacgagcagaagttcccctttcctccatggacaatgcaacatttcacagctcccctaaagcacccccgactgcctgccagttggcattgttgctgacattgtagctcatgatagctcacccaacccgccccctgcatcggccagtgtagcagctaataatgcccctaattccccaccaccttccgctggcagtgcacgacggcacacacaacctgcctccaaccccccaccaccttaggcagtgtagactctgatagcgcagcaaacctgccccactgccagcaattcaacacctgatagtgccacccaccagccccccacggcagggagtgcagctccaaaagcacaccaaacccgctcccccaccaccccgcaagcaggcagtgcagccgcagagagcacacctaccctgccacctttctactactctaacagagatgcagtctccgtcaccactaccaaccgtagccaggcgagccgcggtggccaaggctgcagcctccagcgttgggcacagtccccaccttctcctagatctctagccggtcaagagcagctccagctgccagccaccctcctaccactcaggctgtactcctaccactccagccgccatcttaccactccagccgccatcttactgctccggccgccatcttactgctccagccccactcctaccgctcaggccgccctcctaacactccagctgcgctgccatctctgttgccaccaccatccagagcgagacgagccacggtgttacaggctccagcctccaactcccccttctcctggtcctctaagccgggaacagagcagctcagcgggagataccagagaccctaaactggcgtgaggcctgctcggcatgcacatggggttacgcgcatggtttctggactacatgttctgattgggtgagagaaaatctctaggccttctctgattggactttattttcatactctaattggttgtcctaagactttcatccaatcagaacatgataacaaagtccaatcagagtaggcctccgggctttctcttatccaatcctggaaagtgtagtccacgaaccgcatatgcataacttcagtacataaatggggctgaagaagagtcaggctgttccaggttcttctgtgtctgctcaccgagctgctccgagcccggcttagaggaccaggacagactggaggctgtagcctgctgcaccgtggctggcctccctgcagttggtggcgacagacactgtagtgtggctggaaaggtaggaaggggaaaatagttttgggatagatggaagggtaaagagggtggttagtgccaaaaggaaaaaaggatggcgagccggagaagtcattgcataaagacggtgaggaaaagatgttgggaaaaaaaattggggggtagatggagggggaaaaacagggtggtaaacaggagggagagaaggtttcacagaaagatggtggggaaaaagtttttgggtagatggaagggggtaagagagggtcgtgaggggggaacggggatgagcaggaaggagagaaggtttgcaaaaatatggtggggagagaagaaagggaaagaagactgtgggtaaaaagattttgagtgatggaggggggaaaagggtgacaagtgggaggagaaaagagggtgcagagagggagggggaagagagagtggcgagcaggagggagagaaggttttgtgaaaagacagtgaggagagaagcttttgggtagatggaggggggaaagagggtggccagtgggagaagggtaaagagagtggcgagccggaaagagaaaaggttttgctaaaagacgataggcagaaaagaaagtgtagaaagaaaagacagtggctaaaaagtgtttgggtagacggagggggaaaagagggtggcaagtgggaggagaatagaaagtgtggccagaggaagtggggaaagaggactgggaaaaaggcgatggggaaaatagtttggggtagatggagggcaaaaagagggtggcaagcaggatagaggaaagaagagggcgagcgggaagaggggaaggctttgtgaaaagatggcagggaaaaattggggaggtagatgggttaaaagagcgtggtgagcaggagtagagaagaggctttgcaaaaagacggcaggaaaatgtttttgggtagatggagaagggaaagggtggcaaggaggaagggaaaaaagacgatagggaaacagtttttgggtagacggaaggggaaagagagggtggcgagcagcaggagtggggagaaggctttgggaaaagatgagggaaatgtttttggggagatgaaggagcaaaagaggatgatgagagcgggaggcggaaaaaagggtggccagagagagggagaaaacacggtggggacaagttttggggtagatgggtggggaaaacggaagtgagcggtatagtatagaaggctttgcaaaaagacaatggggaaaaaatggtggggaaaaagttttggggtagatggaggaagaaaaagggtggcgagagagggagccaaagacggtcgggaaaaaaattcctcctgttactgattttttaatactcttccattccggtcagaaaaaataattgatatgatttcagggttttttttgttttggtttagtttggtttggttttttgagatggagtctcgctccgttgcccaggctggagtgcagtggtgtgatcttggctcactgccacctccacctcccgggttcaagccattcttttgcctcagccttctgagtagttgggattacaggcatgcgccacgacgcccagctaattttgcatttttagttctaaatgg

SEQ ID NO: 1562289 - DNA, 4001 bp, Homo sapiens
ttaaagaccagcctggccaacatggagaagccccatatctactaaaaatacaaaaatttgccaagcatggtggtaggcgcgtgtagtcccagctacttggaaggctgaggtaggagaatagcttgaacctaggaagcggaggttgcagtgaaccaagatcgcaccactgcactcaagcctgggcaacagagcaagactgtctcaaaaaaataaataaagaaagaaacaaagcagtaaggagtacaatacagtgcataactgttctcaaccttgacaatgtcaatgttagaaatgacagatgtaagcacataaagggaaaaggaaaggtaaaaagaagagttgcagctgggcatggtggctcacacctataatcccagcactctgggaggctgaggcaggtggatcgcctgaggttgggagttcaagaccagcctgaccaacacagtaaaacctcatctctactaaaaatacaaaattagccgggcatggtggcgcctgcctgtaatcctagctactcgggaggctgagacagaagaatcacttgaacccaggaggcagaggttcaagcaagcagagattgcaccattgcactccagcctgggcaacaagaacgaaactcacagagctgtgccatcttcaggctccaacctccagctcaccacaggggactcctccttcatcagcctggcttggagcagctgggcagacaatgccagaaaaacctacaataggatgcagaaagtggcagtgttagagcctcaccctgtcatgctgcccactgggtggctggggccagtttcagcgaaggcactcacacccaccctccaaagtccagcctctcctcctagaccaagctggcctcctgacctggggtggggactggagacaccacagtgtccgaggctagttggggagcaagaacagcagaaactcagacccagccagtcctccccacccaagtaccagttcccattcctgactcctccacccacaggaccctgagcccccatggtgcccactactccatgcctggggctcccagatggtccccacaacacagagcaagagggcaagggccgggtaaccatggtgggtgtgagggccctgcggtggtcagaggattgccacaaaaactctgtgcaccctccgcgttccaacacgagcagaagttcccctttcctccatggacaatgcaacatttcacagctcccctaaagcacccccgactgcctgccagttggcattgttgctgacattgtagctcatgatagctcacccaacccgccccctgcatcggccagtgtagcagctaataatgcccctaattccccaccaccttccgctggcagtgcacgacggcacacacaacctgcctccaaccccccaccaccttaggcagtgtagactctgatagcgcagcaaacctgccccactgccagcaattcaacacctgatagtgccacccaccagccccccacggcagggagtgcagctccaaaagcacaccaaacccgctcccccaccaccccgcaagcaggcagtgcagccgcagagagcacacctaccctgccacctttctactactctaacagagatgcagtctccgtcaccactaccaaccgtagccaggcgagccgcggtggccaaggctgcagcctccagcgttgggcacagtccccaccttctcctagatctctagccggtcaagagcagctccagctgccagccaccctcctaccactcaggctgtactcctaccactccagccgccatcttaccactccagccgccatcttactgctccggccgccatcttactgctccagccccactcctaccgctcaggccgccctcctaacactccagctgcgctgccatctctgttgccaccaccatccagagcgagacgagccacggtgttacaggctccagcctccaactcccccttctcctggtcctctaagccgggaacagagcagctcagcgggagataccagagaccctaaactggcgtgaggcctgctcggcatgcacatggggttacgcgcatggtttctggactacatgttctgattgggtgagagaaaatctctaggccttctctgattggactttattttcatactctaattggttgtcctaagactttcatccaatcagaacatgataacaaagtccaatcagagtaggcctccgggctttctcttatccaatcctggaaagtgtagtccacgaaccgcatatgcataacttcagtacataaatggggctgaagaagagtcaggctgttccaggttcttctgtgtctgctcaccgagctgctccgagcccggcttagaggaccaggacagactggaggctgtagcctgctgcaccgtggctggcctccctgcagttggtggcgacagacactgtagtgtggctggaaaggtaggaaggggaaaatagttttgggatagatggaagggtaaagagggtggttagtgccaaaaggaaaaaaggatggcgagccggagaagtcattgcataaagacggtgaggaaaagatgttgggaaaaaaaattggggggtagatggagggggaaaaacagggtggtaaacaggagggagagaaggtttcacagaaagatggtggggaaaaagtttttgggtagatggaagggggtaagagagggtcgtgaggggggaacggggatgagcaggaaggagagaaggtttgcaaaaatatggtggggagagaagaaagggaaagaagactgtgggtaaaaagattttgagtgatggaggggggaaaagggtgacaagtgggaggagaaaagagggtgcagagagggagggggaagagagagtggcgagcaggagggagagaaggttttgtgaaaagacagtgaggagagaagcttttgggtagatggaggggggaaagagggtggccagtgggagaagggtaaagagagtggcgagccggaaagagaaaaggttttgctaaaagacgataggcagaaaagaaagtgtagaaagaaaagacagtggctaaaaagtgtttgggtagacggagggggaaaagagggtggcaagtgggaggagaatagaaagtgtggccagaggaagtggggaaagaggactgggaaaaaggcgatggggaaaatagtttggggtagatggagggcaaaaagagggtggcaagcaggatagaggaaagaagagggcgagcgggaagaggggaaggctttgtgaaaagatggcagggaaaaattggggaggtagatgggttaaaagagcgtggtgagcaggagtagagaagaggctttgcaaaaagacggcaggaaaatgtttttgggtagatggagaagggaaagggtggcaaggaggaagggaaaaaagacgatagggaaacagtttttgggtagacggaaggggaaagagagggtggcgagcagcaggagtggggagaaggctttgggaaaagatgagggaaatgtttttggggagatgaaggagcaaaagaggatgatgagagcgggaggcggaaaaaagggtggccagagagagggagaaaacacggtggggacaagttttggggtagatgggtggggaaaacggaagtgagcggtatagtatagaaggctttgcaaaaagacaatggggaaaaaatggtggggaaaaagttttggggtagatggaggaagaaaaagggtggcgagagagggagccaaagacggtcgggaaaaaaattcctcctgttactgattttttaatactcttccattccggtcagaaaaaataattgatatgatttcagggttttttttgttttggtttagtttggtttggttttttgagatggagtctcgctccgttgcccaggctggagtgcagtggtgtgatcttggctcactgccacctccacctcccgggttcaagccattcttttgcctcagccttctgagtagttgggattacaggcatgcgccacgacgcccagctaattttgcattttt

SEQ ID NO: 1562290 - DNA, 4001 bp, Homo sapiens; identical to SEQ ID NO: 1562289

SEQ ID NO: 1562291 - DNA, 4001 bp, Homo sapiens; identical to SEQ ID NO: 1562289

SEQ ID NO: 1562292 - DNA, 4001 bp, Homo sapiens; identical to SEQ ID NO: 1562289

SEQ ID NO: 1562293 - DNA, 4001 bp, Homo sapiens
ggcttcaagtgttaactgttcatggaaataacacatcctctggtctcttctgttgtctaattcaaaaccagtaatcttctaccacttttttttcttcttttcacttgccaccatactctaccactcaagtgttacaggtcttccaactgtggtaaaagatcactcagaagctcttttctttctcaattgttttccttatacaagatgctgaatatggcctggcaattaatgaattcctttatcctaataacgaaacggcaaaaatatattcctgaaaaatgtctccagtaaaaacaaacgaatccctgcaactgctgtaactatagataaaagcaagttatatagaaacattaaccaagttcacaaaagaaatgagactgtaatgcaagattaaccgagctcaaaagaaaagtgcctatttaaagcactttattgtgttatctacaagatcagtgtgaaactcatcaatcaactactgcgttcaacaaatattgtacagtagaaaggagcacaagcactacagtggcatattcatacagctgcaagatttttatgacgctgctgacaaaacaaaaaataaaaagctcaacacaagaacatttctccaccttcagagaccaatgattctattcctagggaacaagtggggggacagacccgggcggggcaagagcagcgaggccaatcagagcgcgagttacaagcgcggtggagcggggaagcgaatgaaaccgcccagttgaatggctggctgcgcacgccacacccccgcagaggcggccgcacctggagccccacccctgccgcaggacctccgcgagtcgcccccaccgctccgccccgcgccgcccccaatgactgtttcctgccaaaacaaacctggccgcctcaaaaacaaaacaaaatcttcagccgggaacgcagctatccccgggccgccccccagtgcgggtcacactttgcaccccacgggccggggtccccgcgaggggaaggggcgggggcggggggcggtgcacggaaaacccggggagcaaacgtgcccaatgctcaccaactcctcgtagctcctgttgtgctcgttgccctcccagtccaatctcttcggcaacaactggaaagacacgaaacgcacacgagtgaccacccctccggcgcggggggggcggggggcggggggccgggggcgggcggcgggcggcgggcggggggcgcgggcgagcatccctcagggcaaggtcggcaggaggaacccgagggagcgcggggacgggcgcgcacagacctggtactgctccagctcctgcaccagcacctgcggccgagagacgcgcggtcaggggtggggtcgggcccggggcgctcccgtttcacccccgcccaccacccgcgacccccggcggcggggacactggggacgccaagtccgcagccgcccgcgggcccgcactcacctgggccgctctccgacacgggcccgccgataggtaccgggcgataaggaagtacagctctgcgggaagacaaggagtcaggtcaagccccggcggggaggggagggggacggggccaggggagccgggggagcccggggagccggggaagccgaagcagccgggagcgccagggcgggggtggcacggcctcgcgtcttacccgactcgatgagaggcaccgggcgtcgggcggacgacggctccgccatggccgggcgcggggcgggaggcgggagcgagcgagcgagcggagcgtgtaggccgcgccgaggcctgaccgggctggcgtcccctcttctcaggcgcgcgccgccgccgccgccgccgccgccataccgtgcgcgccgcctggaccgacgcctccgcgggggaggaagtagttcctccgcgggagacgaaaagtagtccctccgcggggggcgggggtttgcgccaagagaggaccggagctcgtgtcccgcccggggaggcgaacctcgctcagctctctgcctccggggactcgatgaggagaaagtgacgcggaggcaaagacctgggcgccgcagcagcgagtgggggaggggagggcgcgtggtccgaatccctgcgcgcaatgaggcggctgcccgggctttgtgaggcggcagcgcgacgccgggtggcccagcagcgggcgggtgccgggggcggaagcgcggccacaagagggggcgattcaccgccgccccccgtgggacctgggtcctctacgcgggaccgcaggggccccgagtcgcgggttgggcaaggtcgcccgctccgggtcgctcggaagggtcatttcacggaccggtcgtctggggccagtgcgtcttgccccgcacggaagacccctcgcttcgaggacaggaaagcttttaaagtgaggattggctcgccgcgcctcccgcagaggggaacgccgcccggacccgcgctcctggggcgggggcctcgtatgctggcgttgccggagcgtctgcggcgctgaaggctgccgagacccagccacatcccccacaagccagcagcccggcagaaaattacataaaatgcagcgcttcgccgagggggtgcgagtcgggggagcagcgcgcagctgcggctgacggctcggctggatccatccaagcatggacaggaaaacgggactgtggggagagggtggtgcagacgggccgcagaccctccttaggaagagaagccggaaactagggagtcatgtgcagttagaatcctcttggaagactagtaggatgtgaggttggagaggtggacgacgaccagaaaattcccttgtcttgccaggcttctgacctaactatgagtttcctccgcgcatccagcctgccctgctctggcccctaaagtacagcagtaacactcagtggtgtccctgccttcctggaatgcgcgttaacaattctgattcttactcatggcaataacctacacaccacatagacgttaaatgtggttcgggtcagactctagggcaggactcactgcctgcaccttgtcttggctccaccagcttgaccttgagcaagtcacaacctgtgggtctcagtgttccttactagtaaaccgtaggtaattcctcactagtaaacagataatatttgtgcctgtctcaaagttgtgaggatttaatgaatttgtgttcctggtatacagtaagcaccgtgtacaagttggcttttatttacaccaaatagcaaaagcttttatttattttgagacagggtcttgctctcaggctggagtgcagtggcgcgatctcacctcactgcaacctctgcctcccgggttccagcgattcttgtgcctcagcctcccgagtagctggaattgcaggcaagcgccaccacgtccggctaatttttatatttttatatttttagtagggacgggtttcaccatgttggccaggctggtctcgaactcctggcctcaggtgatccacccgccttggcctcccgaagtgctggggattacatgcatgagccactgcgcctggccaaaagcttttatatatatttataaatggacatagatatctgtgaggctgtcgggtatggtggctcacgcctgtagtcccaagcactttgggaggccgaggcaggcggatcacgaggtcaggaaatcaagaccatcctggccaacatagtgaaacccccgtctctactaaaaataaaaaaattagccaggtgtggcagtgcgcgcctctagtcccagctacttgagaggctgaggcaggagaatcgcttgaaccccggaggcggaggctgcagtgaaccgagatcgcgccactgcactccagcctgggcgacaaggcgagactccgtctccaaaaaaaaaaagctatttgtgaggtaacaatctaaatatgtttgagctagtgcaacagtaagttaactccttacatctgttaattcagcaagcactaacaagtgatggagattaaaaaaaaaaaaggaatgagccacagctttgccatcaaag

SEQ ID NO: 1562294 - DNA, 4001 bp, Homo sapiens
tggcagccgcagatagcctgatggaggggaaggcacacaaatcttcctcccagaaccctagaatgagaaattcaccttctacagccagctagcaggcaccgggcatgggtccacacacgagtgtacacgtatacataaccccagcccaccacgactgctgtgcagcctcctcctgaaaaatgtaagccatttccactttgtaaagctacgtttatattccaccacgatacgatggaaaagaaaacccaaggcaatttaatatacgggttgggaagaaagttttgctgatggaactacattagcctccactccagcaaagcaaacaaggaaccacactaaagaaatgtactgaatcttttaactagatctttctcctcattcattacatttgccaactatgtgccacatatctgagttctggatttgtttctgtttgctctgcttcatataaaaaaatagaaaagaaggaaagaaccacttagtggttgcttttggttgtaacacaagatgactcatttggacttttgttttccccgtttgaagaaatgatagctcgaacagctgaaaaataagcccactcccaccagtattctaggagtaccaaaaggtgaaagagggagagttacagtcagggcaagaaccaccagaggcaagcagggccaagaagacctcaggcgtcttgagtaagtaggcgtcctccacccacactcagagcaaaaggctcccattttaaatatcgcacggtgacgtcatcctgggacctcgtcaccgcggcggctgctcctcaagttctactttgttccacaaggctcctctgctcacggctgcgtggataaaacccaaagggaatccagaatcaagctcggcctcgcaggagtttataacttttgtacttttccctcccttgtaacgaaaagctaatcgcaaacgtttctaggaacacatttttctcctgatagacgttcccaaggtggagggcgcgagaagactggcccgtggggtgaggagccccggcccgacctcagcggcgccacaaagccatgaagaggggaaataattttccaaggggctaagagttggactttctgaagccatcgaaacctgctgctaggctctcccgctggggttttgagagaggtaggtgaggagggatcaaacatctccacccgctcttgaaagaaccgccttgagctgcgcccaacttctgcaatcccggttttccccaagttcaaggggaagggccctggcgcccaatgcccagcctccccgacaacatcctcgccagggtgcgcctgccccgcgggtccgctgtccccggcgggcggccctgggttcgaggacccggcttcccggaggcgcgactctccagcaaacaagcggagctccagaaaaaacaccgacgcgaagggggtggacagagggtgggaagccgcggggttgtcgcccacccggaggcggaatgtaacgcgctgtgggaaacgtggcaggagccctgaggcggcgtctttttcctcaggcgcccgccgagggtcccgcggaaagcctcgcgggccgccctcgcggcccgcagccccgctctggcgccgagccggagcccatgcaacctggttccatcccctgcccctcccctgtccccggtgcgccgcccgccagcgagccttcgacgtggccgcaggggcgacgggaccaccctcccccgatacccacagccccgccatgtctgcctttccccggcccggtctcctcaccgccgctgccgccgccgctcttcggccggagattcggcggcccagaccgtgtcctggccgggaactgagggctccgcctcaacgggcccgcgctgggcaacagggagcgcagcgagcctcgtccggcgcgtgcggctcccgcgtcgtcgggcggccaagcgcgcgttgagaggactggcgggcggacgagcgcgcacacgagtgagcgcagccccaaagcggcgcgcagggggctcgcggcccggaagaggggaggggcgatgacccgggaaagggttggcgcgcgcgggatcggctcgcgcgcctgaggggcggtgccgggggcggggcttcgccgcgaggccacccccgagccccgggcctagccgcacgggaggcgacacaccctcgccctaccctgagcctggcgcagaccctcgaccgcgacggcgcggtccgcagaaccgcgggcttccctccccggcaaaaagcggcgctgaaggcctgtgggacccccgcccggccgccctacgtgcgtcagcgccttcgggggtcgcgcgggcttggtcctttcggctgtctcggcctttttgtttccccctcaggtctctccacgctgcacttgacaccctcagggcggaatggcgagttctagacccagctctctagacccggggcttcatgggggacacggactcgacgggaaggggaacttggcatttatggacagatcctcatccttcttgctgtagtcaattacacgcacgttaaccgtgcagccgccctgctgtattttaggcggttgttggcactcctagttgggcccttccctggcccctcacagcagggcctgcctcctgtggacgcttgtgtgctgccctggcaccggccactgtgttttgcataaaggagaggctccaaagatgttggccaaaggaatgaagccttgagagtccaggctttctatttctgagacactctactcaaggacttcccagatgcaaagcttcatctttgagcaaatacaaatatggagagggaacattaactttctgaagaaaagaaggaacatcttttcaaccttttatattgagttaacaccatggtcttagttttgtgaaagcactttaatacatccaactagcgggaggaatacaagatattcctacctttttattattattattaaaagagggctaaaccatgttgtaaactacttaagaactgaatgttcaagttgtacagtatattggccagattccttactgcccactaggcttgggagcatgttttcagctcagttttatgaatgttttaaatttgtattactgatctttgttatagccaattagcaattcaaaatggtaatttttttagcagtaataaatataccatcccccaaacagtacaataaactttatttgtaaaaaaaaaaaattatactcttctaggacttagtctacttactggtacatttaaagaggatatttacaccttggagtcttctaggaggtgtgaaggtgtttttattttaaaatcataacaatctgatgaggttatttttacagataaaggcctttaattctgcagtttcataaaatagctaggtaaccacccacattactcaaaatttgtccagaaatttctatagtttaggattagtattttgtgtagtatttataaatctgtggtccacattttccagtcttagagcagtaccatattcaaaaaatacaggcaagaacctgaaacccaatttcaaaatgacttttaaaaaattctcaggctgggcactgtagctcatgcctgtaatccagtactttgggaggtcaaggagagaggatcatttgactccaggagttcaagaccaacctggccaacatcatgaaacccaatctctacaaaaaatacacaaattagccaggtgtggttgcatgcagctgtagtctcagatactctgaaggctggggtgagaggatcacctgagcccaggaaattgaggctgcagtgagctatgataacatcatggcactccagcctgggtgacagagcaagactctgtctaaaaaaagaaaaaaaaattctcatagctgaacactgtgaaatagacacatagcaaacaatgtctcttaaacactttttctctcatccacttcccttgcacacacagtatttgtttttatgtctctttcaaaacttgccctactcttgtgtgcttcagatgctttgccccagctctctttccttgtgagttggaatcacaaaatcacaaat

SEQ ID NO: 1562295 - DNA, 4001 bp, Homo sapiens
tgtcacccaggctggagtgtagtggacaaccatagctcactgtagtctcaaacttctggctcaagtgatcctcctccctcagcctcccaagtagctaggactatagatgtatgccactcagcccagctatttttaaatatttttgtagagatgaggtcttgctgtgtttcccaggctggtcttgaactcgtgacctcaagcagtcctcctgcctcggcctcccaaagtgctgggattacaggtgtgagccattgtgcccagccataaattattctttttgcactcctcggaatgattacctctgaaatgactgtctgaatgtacataaccaacagtgaattttatgatatgtttaataggggtagtctttttctataaaaatgaaaaagacaaccacagattcttacaacagacatcggcagcagccccaaacctaaatagggaggtgttgtcccagctgcaagtggctcagctacagggtctcgagatgaaactccacggcacagtctaatgacctgctggaattcctggagttggcggggagattggctggataagtggtctctgcagacccccatgcgtgccacccctttgcccaccatagcccacttgaacccaccactgtcataactttccaggtcctaactgggaccacctactccccttggagggtccggatggagtttcccctctgcggctgcctctcactcatcctccaccactttgccgacaaggaaggaaggacaatcgggaggagggagtcttgcttggcgaccatctggacaatatctcgcccatggcaagctggatccctgtggattactttggtgggtggaaacttggcacactatttaatttgggctttttgggggatgactgcacactggttctctttttttctcagacctaaatttcgaccactcaactttcagcctgctcacccctgcttattgccatccacctttgggctgggttagacctaatcctccccttgacaaagccctcaaagtagccttcacaagataagagtcgagacccctaacttaccaacaaattttaatgaaacttctagtaaactcaaagcgctttgccaacatccttaggagcaacccagttctcgcagcaccccatgtgaggtcgctgttgaagtatctttggctgcagtggtgtggaattcatctcaacagagttgacggtaaagaccagacatgtagcagcctcactgcttgttggaggaaccacccttaagaaaatttcccaagatagtagttttcccatctccgtactttgctagttaatgttctccacttgcttgcgtttatcctttcaattcctttgctaattaaattgctgaaaagtatacattggtaagaatagccactgtcaatggactgcaaacaaaactcgtttctgttattgatgataaaccatttcagagaagaccaggctgagtctaaagggttcagataattacaaggggaaggcagagagagtagttcatggccacaggacttggccacctctgggcaacacataatgcttgctaagctaatgactgtagggatatagaactggccctcagcctctctgtcttcctttggcctctgctcttcctgctgccttctctctttgaccacgatgacacactttccataggccttcctcaccacatcacagaactcagagaagaggctgtcttcttgtttgatacacagctcgtctcttaggaacacccgatatttccaaggcacccatccttgactacccgcagcatgcacaatacaccaagttggggtttgtatgaaatatccatcactaatatcttccccagttacgagactttctgggatattggtttccccaaaatatacggtcttaaatccatcatattgcagtgttctcagggttttcagatattggaggcattgcttcctcttgatgccatcaaattgacttctgataatgacatttcttaaaagagggcttgcaaagcgaggcatggtggcttctcaagtgtttttaaaagcttgcacatctgcatctggggagagatggcaagtgggggatgatgacctcataaagggctttcttacagtggtgccagtcccacacatacacttcagatttcaagcatcatggaataaatactcagaacaactccctgctgacccataaaatatgggaattgcagatgctacccataaaaatgctactttgacatcacttctgcaataggtctgagacagaggttggcaatcttttaatagtaatgagcctacccatttggcttaagatggggagaaatgtttacattcattcatccatttcaaaaatatgtactgatcacctgctgtacaccaggcattgtgccaggcaccaggggtatagtcatgacacacccagggagtcctggacttacgtgttgtgtgtctgtgtatgcatagaatttgtgccagttgccttcccatttgcacaactaagagtgattttttccaggtggcagaaggaaggtatggcaaattgcaaaagaaagtcagtctgcacacctagcttccactggcgcttgcaggtctttttttttttttttttttttttttttttctgagagggagtctctctctgttgcccaggctggagtgcagtggcacgatctcggctcactgcaacttccgcctcccgggttcaagtgattctcctgcctcagcctcccgagtagctgggactacaggcaccttccaccatggccggctaattatttgtatttttagtagagatggggtttcaccgtgttagtcaggatggtctcgatctcctgaccttgtgatccgcccgcctcggcctcccaaagtgctgggattacagatgtgagccactgcgcccacccggagcttgcagttattgaactaattcaatacctcatcttgaaagcacttttaattttatatactcaggcaaaatgacagtttgcttcaaactctaaccatctcttcctttgtattttcttgcctctttaatcagagctaaagacatttcataaaatgggcatgaaggattccttcaaatgaagacgtggacaaaatgattggtcaggtcctttgctctactgttgaatggaggaggattttttttttttttccctcacacaggggttttcttggagctcaagtttggatgaccccagacagtaagataatctcatcatggtaaagttaatatgaaatatgtggtctccaaacagcctctcccagaggccaggatcagcaggtttgagtggataattggcttgtggtcattttctcataggatttttcttttagtagtggaaactgtttttcaaatcaaatttggatgccaactatgtggaacagaagtgtggctgctctggtggaagtggcaatggtagtcctagagtctccctgtcagccacaccctttgtctccccctacccaagggaccctgtggcctggaaccgcagtgtgaaatgctatatagtgcaatgaagtcaattcgaagacaagagttctttgcctttctcatctaatttttagttatggatatgagacgcttgttcagaagtatggaaaagtatatataatatgttatcttttagatgtgggtgtaaatatgcttatgtatgcaatatgcttatattttaacgcataaacaacatgaataaagcaaacactctagacttctccaaatgtatcttgttttacagttttcattttggaaaatgtcaacatttttacattaaaaaatattactcagccataaaaaagaatgaaatcacgtctcttgcagcaacatggacagaactggaggccattattctaagtgaaataattcagaaacagaaagtcagatgccacatgttctcacctttaagtgggagctaaataatgtgtacacatgggtacagaatgtaaaataatggacttcgaaagggaggctgagatgggaggaccatttgaggccaggagtttgagacaagcctggccaac

SEQ ID NO: 1562296 - DNA, 4001 bp, Homo sapiens; identical to SEQ ID NO: 1562295

SEQ ID NO: 1562297 - DNA, 4001 bp, Homo sapiens
gggtgtttcatttatagggatgttgacgggaactgcaaaataagcctggcactagagaattgtttttccattagtggttctgcagaatgaaaaccgctaagtgaacaaagtaccaagtgtgggactgaattgataggtgcagttttgtcaacttaaaaattctcttgggaaagaagctacaacatttgggttgaggctatttggagatgatcagtgcaatacttacatctgtgaggcaatacttacatctgtgaggcggctgcccctggggagagaaaagatacatactttaattttgttaaagttgaataaaaaacactgaagacaaaaattccaaaaatcaccgatgactccctacaaaccttaagattctaggattttaatggcatggcaaaaaaggaaggttgcccagataactggcaaaggtgtaaacaattgttttagctgattttcaactaaactgtatgtttgacgttggggtggtactttttagataaggagcagcagggttgctccatttgtaagacacaaaaagatgaactcttcctcatggtccctgagtagcagaaggttcatttctctcactgacagacataaacaagggcgtctttataagaggtcaagttcaaagggtgaacaggcaacttatgaagcaaactttaaaagcctgaaacagggttgttgtttctcccagcttagtgggagtactgaccaccccatgcaaaacaaagaaatgcattattgaaagcaaatgacacgggaattgtagccaaaacaccagatatgccagggcagagagaaaagctttttaattaacagggaagagctcactctgggcagtctgcggacacccctgggaggaagcgtctgctctcgctgacccccacacccgcctgcacggtgaggccagttgacacggcgcggtcactctgctgagtccccagggaaccctggagatcttgcaggcctcaactccaggctccctcttctggaagctcctggtcttccttggctcagtgagactcagcattacctgcctttcagcctgcctgggtcccaccgcacccacgtcccttcctgtcacctgctaggagtaccctgggaacggccgcccccagtactgattaccaacgtgtttcctgactcagtcctggaaagctcagttctctctcctattcgacttggtcccagtgactgctggcaaccccagacaacagacccagcccacagggcacccggggcaaaggcgggccgggaaatgggggggggcccaggcgaccccgacccccggcctcctcccctccctcacccgcggctccttcgccgccctcgcccctgcccctccccccttccactccgcccccgccccgccccgccccggctcctccctccggctccgccctcgtcccgccccggctcctccctccggctccgccctcgtcccgccccggctcctccctccggctccgccctcgtcccgccccggctcctccctccggctccgccctctccccgccccggctccgccctctccccgccccggctccgccctctccccgccccggctcctccctccggctccgccctcgtcccgccccggctcctccctccggctccgccctctccccgccccggctcctccctccggctccgccctcgccccgccccggctcctccccccaccccggggcggccgcggccaggccccgcctcaccagcagttgagcttgcgcacgctgtgcagctccgaggccttggcccgggtcagaaccatcttccgcgtcagcttcatggcggccgcccaggcccgaccggcgggcgcccccggcctcctgatcccgggcgggtgacgactgcgcggcgcgtgtctccaggggcggggcccgcgtcgtcaggggcggatcctgagccgattggcggctcggtgaggagagcggggcgacgcgagcccgctggggccgcttgggcgccgctgacacgttggctctgctcctgctcatgcgcggcctggggcgcccttctctgacgcgattctaacgcgaccccggaagcgcgcagcgagcagagggtgggtgcaggtggcggtccccgagtcggcccagtgagggctgaactgctgctcccaggaaccgagcggggtgggctcggtccgacgcgcatcatggccgagtgcctaggcctgactctgagcgcaggcctagcgtggatggcatgggcgctacacagctccaagttacgcgattcaaactcttggaataaacccagggcagccctggggctgtgttgattccttgtctccctccctcccagcatttacagaaaagacgcatttataggaaagacgcacgggcaggtccagcagagcccttacaagcatttcaaccttttagaaatcagataagaccctctaaacatcgttacatgggccacagttacattaagacaggcgttctgacgttctgaaaccgcctttgcaaaaaattgtatcggtgagagaaggttggccttgaaggagatctggccaacccccatcttgcctttggccttaaaactgcccttaattattcctggataagcaaaggtaactttgggagacatttatagtttaagtgatagcagcccttcctcaaaactaaacagcctttgtaaagctaatgagaccactgaaaccgcctttgcaaaaatcataactgaagaaattatgacaggggaagatctcctcacccaccccatcttcctgctatcctctaagctgcttttgttcattcctgggtgtagaccagactagccttgggaaggaatttagtttatagattaaactgaaacaaaattgataatagccctttcccaaaaaaacccttcttgcctggggaccagtctgcctttgtaggactaacaaattaagctacgagattaaaaattacagtttaggggccatgcaacctctggcggcaagagtctgaacctccccaaattgcttctgggaataacatcactgttgcaaaacttaaggtcagtgcttgaaatattttgtagaccctgcattcagatgcagcagatgacaccacccaaacggataatctggctcaaccatgtgtgtgatcccacccagggacagaagtcagccagaactcattttgaccccctatgatttaatcttcgacctgaccaatcagcactcaccactttctgagcccatacccgccaaattatccttaaaaacacggatccccgaatgcttggggagactgatttgagtgataataaaactctgctctcctgcacagccagctctgtgtgtattactctttctccattgcaattccgttgccttgataaatcggttctgtctaggcagtgggcaaggcgaacccattgggcggttacactaccagcctagaaggatagaggagcatgaattccactaagatgcagatgtaaacattcgtcagccattattctggaggtcacaagataagctacttccccaattactcctgcaggtaacatcactattgtacctttgcaggtttcttgcatgtctcacacggatggatccagctaaatgtcttgccaacagctcctgtggccccacccagaagccatgcagcacaaaaggaccaaaaggacagctagatttcatctcgcacctaaccaatcagcactccccatgccctagccccctgttcaccaaactacctttgaacaacccctaacccatgagccttcaattgtaaccgagcagcttagcagctgtgaatccaaaatatctgagacaggactcaatctgtttagaaagtttattttgtcaaggttaaggacaagcccatgacacagcctcaggaggtcctgatgacatgtgccctgggtggctggggcacagcttgctttcatacatttttagggagacatgagacatcaatcaatatgtgtaagatggaaaaagaagaaaaaatatatgtataagatgtacattaagccgggcgcggtggctcacgcct

SEQ ID NO: 1562298 - DNA, 4001 bp, Homo sapiens
gatgccctcaaaggacatcaggtaaggggaccccaatgtcccctacgcagggatagaaagcaaggaaaggatggaaatcccttcttgataacaggtctaggccaaaaggaagacaggcttgagactggatctcagatcacattggtactgtcaattcaggggtgaggtgcccggggtggtccacaaagcctcacaacctgcaaagctcccacatatgtgagagcccaccatacgccaggcatggcaccagcagctcacagcctggtcagatgcgtcccatgtataagtgactcgtgtctatggacatggtacgtttgtatattcactgctaaacatgcagtatttcagttacagcacaaaacagattacacccagatgccacgtatccaggcttttttttgtctttaagaaaaggtacagttcaaattaaaaaaacaaaggaaaataaagagataaataattgcgctggacatggtggctcatacctgtaattccaatactttgcgaggctgaggcaggtggatcacctgaactcagggggtttgagaccagcctggccgacacagtgaaactccatctctactaaaaagtacaaaaattagccaggcatggtggtgggtgcctgtagtcccagctactcaaaggctgaggcaggaaaattgcttgaacccgggaggcagaggttgcagtgagccaagatcgtgccactgtactccagcctgggcaacagagagagactccgtgtaaaaaaaaaaaaaaaagaaagaaacaattggtatgcgatccctgtgtaagttggggacattttggactgagaaagacaatgagggagagaagaaaaaaatctttcacagacgcacacactcaagttctcccagcagggcttattctctgcctgcctttggggcagcggcaagggggtacaaggctagatgtgaccaagaagagggggtgtagaccttcaacttccccgtaacaaagtaaaacaagccctcctgggattcctttccaggtgagagcaagttccaaactattgctcccctcctctgcgaccaagtgacaaagggtgtttcatttatagggatgttgacgggaactgcaaaataagcctggcactagagaattgtttttccattagtggttctgcagaatgaaaaccgctaagtgaacaaagtaccaagtgtgggactgaattgataggtgcagttttgtcaacttaaaaattctcttgggaaagaagctacaacatttgggttgaggctatttggagatgatcagtgcaatacttacatctgtgaggcaatacttacatctgtgaggcggctgcccctggggagagaaaagatacatactttaattttgttaaagttgaataaaaaacactgaagacaaaaattccaaaaatcaccgatgactccctacaaaccttaagattctaggattttaatggcatggcaaaaaaggaaggttgcccagataactggcaaaggtgtaaacaattgttttagctgattttcaactaaactgtatgtttgacgttggggtggtactttttagataaggagcagcagggttgctccatttgtaagacacaaaaagatgaactcttcctcatggtccctgagtagcagaaggttcatttctctcactgacagacataaacaagggcgtctttataagaggtcaagttcaaagggtgaacaggcaacttatgaagcaaactttaaaagcctgaaacagggttgttgtttctcccagcttagtgggagtactgaccaccccatgcaaaacaaagaaatgcattattgaaagcaaatgacacgggaattgtagccaaaacaccagatatgccagggcagagagaaaagctttttaattaacagggaagagctcactctgggcagtctgcggacacccctgggaggaagcgtctgctctcgctgacccccacacccgcctgcacggtgaggccagttgacacggcgcggtcactctgctgagtccccagggaaccctggagatcttgcaggcctcaactccaggctccctcttctggaagctcctggtcttccttggctcagtgagactcagcattacctgcctttcagcctgcctgggtcccaccgcacccacgtcccttcctgtcacctgctaggagtaccctgggaacggccgcccccagtactgattaccaacgtgtttcctgactcagtcctggaaagctcagttctctctcctattcgacttggtcccagtgactgctggcaaccccagacaacagacccagcccacagggcacccggggcaaaggcgggccgggaaatgggggggggcccaggcgaccccgacccccggcctcctcccctccctcacccgcggctccttcgccgccctcgcccctgcccctccccccttccactccgcccccgccccgccccgccccggctcctccctccggctccgccctcgtcccgccccggctcctccctccggctccgccctcgtcccgccccggctcctccctccggctccgccctcgtcccgccccggctcctccctccggctccgccctctccccgccccggctccgccctctccccgccccggctccgccctctccccgccccggctcctccctccggctccgccctcgtcccgccccggctcctccctccggctccgccctctccccgccccggctcctccctccggctccgccctcgccccgccccggctcctccccccaccccggggcggccgcggccaggccccgcctcaccagcagttgagcttgcgcacgctgtgcagctccgaggccttggcccgggtcagaaccatcttccgcgtcagcttcatggcggccgcccaggcccgaccggcgggcgcccccggcctcctgatcccgggcgggtgacgactgcgcggcgcgtgtctccaggggcggggcccgcgtcgtcaggggcggatcctgagccgattggcggctcggtgaggagagcggggcgacgcgagcccgctggggccgcttgggcgccgctgacacgttggctctgctcctgctcatgcgcggcctggggcgcccttctctgacgcgattctaacgcgaccccggaagcgcgcagcgagcagagggtgggtgcaggtggcggtccccgagtcggcccagtgagggctgaactgctgctcccaggaaccgagcggggtgggctcggtccgacgcgcatcatggccgagtgcctaggcctgactctgagcgcaggcctagcgtggatggcatgggcgctacacagctccaagttacgcgattcaaactcttggaataaacccagggcagccctggggctgtgttgattccttgtctccctccctcccagcatttacagaaaagacgcatttataggaaagacgcacgggcaggtccagcagagcccttacaagcatttcaaccttttagaaatcagataagaccctctaaacatcgttacatgggccacagttacattaagacaggcgttctgacgttctgaaaccgcctttgcaaaaaattgtatcggtgagagaaggttggccttgaaggagatctggccaacccccatcttgcctttggccttaaaactgcccttaattattcctggataagcaaaggtaactttgggagacatttatagtttaagtgatagcagcccttcctcaaaactaaacagcctttgtaaagctaatgagaccactgaaaccgcctttgcaaaaatcataactgaagaaattatgacaggggaagatctcctcacccaccccatcttcctgctatcctctaagctgcttttgttcattcctgggtgtagaccagactagccttgggaaggaatttagtttatagattaaactgaaacaaaattgataatagccctttcccaaaaaaacccttcttgcctggggaccagtctgcctttgtaggactaacaaattaagctacgagattaaaaattacagtttaggggcca

SEQ ID NO: 1562299 - DNA, 4001 bp, Homo sapiens
acagacggtgtgacggggctttcggtcactacttagttcaatttctagtctccctcaactttcccatcacagatggtgggagagacacaagagaccccaggacaacaccacaggccaggcagctccatctccccaagggcaagggcaacagaagctcctcctggggacaacagctgacattatgggggctcacgctggcatccgcaactcccagtgccaacaggagataggtggctaagcccacccacacactaagccctcactgccccttacgtggaggaggaaaccgaggcatgaagtgcagtgacttgccagagggagaggtcagcacctggccctggcacttgggttccgctacccataagaaatccacccagacaccccagacacaagaccctgccgttctgcctgggagggctcaagctattctggggctattttctatcccaccaaggccaaatcatgaaacacatcctggccctttcccccagctcactctgcctagtgccaactccaaccagccaaggtgggccacccacaaagccaccagcctcaggccactctccatggcctgacacccctttcgccaccacccagctctcccctctccagttcaccctgaaccacatgggaactacaggtacctggcacgcgtggtggcctcctgccctactggttcggcctgcagtcatttccagtagcacaggaaatcaggccaccaagcactcagcaacagctgaccagttacgtaaacagtaacctgtctaggacccagaaataccacgcaactgttaaaatgatgttgagaactgaatgaatgggaattacttcccatgcgtcagaaacatttgcaaaacacgggtgagtgtgatctcagtgttttcaaaatgtgtgtgtcctgaaaaacactcaagtgaaatgctaagtcatttctaggctctaggtgacagcataagcgacacttaaaaactgttctttcttagcgtctccctgggttttgcaagtcgtttttgcttttttttagccaagaatagggtatttaaaatacaagctctctcggccgggtgcagtggctcatgcctgtaatcccagcactttgggaggccaaagcgggaggatcacttgaggtcaggagtttgagaccagcctggccaacatggtgaaactccgtatctaccaaaaatacacaaattagttgggtgtggtggtgcatgcttgtagtcccagctactcggaaggctgaggcaggagaatcgcttgaacccaggaggcggaggccgcagtgagccaagatcgcgccattgcactccagactgggcgctgtctcaaaagacaaaaagtaaaaataaaataaaatacatgctttctctaagctgttcaaaaaagagtaaacttcactggtggagaggccttctcgaggcccccggggtggaggaccagctgcccctgaggacttacgccgaggcctcgtggatctcggtcccatcgtagactccgcatccagacagcacctgcgagaggagcgggagctgacccgggggaaaggggccgacctgggcggcgggagttgactggggggaaaggggccgacctgggccgcgggcgctgacccgggaaaatggggccgacctgggccgcaggagctgacttggggtgaaggagccgacgtggggcggcgggagcggacctaggaagaggggccgaccttgggcagagaacagcgaaggctgatctctggaggcgggagctgacctcaccccctccgtccactcaccagcgcgaccctggccgcggggcgcggcacggagaggtgaagggctgcgcgctgggaaggcgtccgaccgccgggggacagggacgtgaatgcagatgccgcagcgagcctcgaggccaccaggaccctcacagccgccattgcggtgaggacagcggggtcggaaggtcacgcagggacagagcgtgcgcacccacccctctacaaacgcgttgctcgtcgggactgcgcctgcgcagccttctgggcggagccaagacccgcccccgtctcagccctatccagtgagttcgccggtgggcgggggccgcgcctgcgcagagcctccgaatagagttccgggaaccctgtcttccttccggtggtggctgagggctcgtgctcgaggctgagggatgctggtgactcccggggtccccagccccgcccccatcggacgcctccacaggcggcgcaccctttccgccatccgcagagcaaggctgcctcggggcggctcagtccggcgcttcttaccttacctccgtctcatccttaactcaccacgagcgtccagggtccacatcctcctaaatggccactcgtcttaatctcggcgtcaggacccacgcggggtcaggactacccctccgcttccatgactgtctcctcgcggctccggctcccacggagcgacccctccgggttttactgaccccgggatgttgtatcctggaaactgcagttccacccaggggcttgatctgggttagtctgggggcaagtgagccgccgattctgtttgggtttttttttttttttttttgagacggagtttccctcttgttgcccgggctggagtgcaatggcgcgaagtcggctcaacgcaacctccgcctcccaggttcaagcgactcttctgcctcagcctcccaagtagctgggactacaggcatgcgccaccacgccaggctaattttgtatttttagtagagacggggtttctccatgttggtctggctggtcttgaactcccgagctcaggtgatctgcccgcctcggactcccaaagtgctgggattacaggcgtgagccaccattcccgggcgctgtttgggtttgtttttttgtttttgttttttacgttcacagcatggacggtcagtgtgaagatcccagctgctcgggtcctagctggaattcttccattaaaaaaatctgtttgttatgcatgggttagttcacagaggaatagctggataagtgctggctttttccccgatttacccattttcaacctaataatgcaggtttttgaaataatgtgaatggttactgctggcggatgttcacagggacacaccggattctacagacacatctgatgatctagccacggctgtcactttccccactgccgcgttgtccatcactaggactttactgccaatccttgcaagatagtggggaactagaataacagacatgggacattaccagttacaaccaaagacaagcttggcacatttgactgtcctcgttcctgctcctccgtgcctggccctcttcaggcttctcagctcctggggagcggccagccagggagcatcagctggtgggagcgatggggttgtgggatggcacaaaaaaacaccaagcgccactcagaaaggaaatgccgaatgcagactctcactcagtcggtgtgggggccaggaccctgtctctaccaagtgtgcgggagctgcccctggccgggagctcccagaccccactgcagagccgcagctccagttgtcccaggggcgactactcaggtgtccatcgccatgcacatgtgacacagaaaagggtgaggcgaggagggggaacgctggaaattgtttcacggaaaagggcgaggcaagggaggggaacactggaacttgtgctttgggtaggcgatagctaaggattctctctcgtctgggtcacggagattgtgcagccacagaacacctggtgtcatcagggcctgagctcctcccttctacaaagacctctggtctgcaggcctgcaggtacagtgctgtgggccacaaggcactgcctgtcgtattcatctccactctctagcacatctggcctcacgccacccccgggaggccggcaggcagatatcagctccacttcccagataagcaagggagccaggtactacccagggtcttgggggccacaccgctggcgagggacaggctgggcctgg

SEQ ID NO: 1562300 - DNA, 4001 bp, Homo sapiens
cagacggtgtgacggggctttcggtcactacttagttcaatttctagtctccctcaactttcccatcacagatggtgggagagacacaagagaccccaggacaacaccacaggccaggcagctccatctccccaagggcaagggcaacagaagctcctcctggggacaacagctgacattatgggggctcacgctggcatccgcaactcccagtgccaacaggagataggtggctaagcccacccacacactaagccctcactgccccttacgtggaggaggaaaccgaggcatgaagtgcagtgacttgccagagggagaggtcagcacctggccctggcacttgggttccgctacccataagaaatccacccagacaccccagacacaagaccctgccgttctgcctgggagagctcaagctattctggggctattttctatcccaccaaggccaaatcatgaaacacatcctggccctttcccccagctcactctgcctagtgccaactccaaccagccaaggtgggccacccacaaagccaccagcctcaggccactctccatggcctgacacccctttcgccaccacccagctctcccctctccagttcaccctgaaccacatgggaactacaggtacctggcacgcgtggtggcctcctgccctactggttcggcctgcagtcatttccagtagcacaggaaatcaggccaccaagcactcagcaacagctgaccagttacgtaaacagtaacctgtctaggacccagaaataccacgcaactgttaaaatgatgttgagaactgaatgaatgggaattacttcccatgcgtcagaaacatttgcaaaacacgggtgagtgtgatctcagtgttttcaaaatgtgtgtgtcctgaaaaacactcaagtgaaatgctaagtcatttctaggctctaggtgacagtataagcgacacttaaaaactgttctttcttagcgtctccctgggttttgcaagtcgtttttgcttttttttagccaagaatagggtatttaaaatacaagctctctcggccgggtgcagtggctcatgcctgtaatcccagcactttgggaggccaaagcgggaggatcacttgaggtcaggagtttgagaccagcctggccaacatggtgaaactccgtatctaccaaaaatacacaaattagttgggtgtggtggtgcatgcttgtagtcccagctactcggaaggctgaggcaggagaatcgcttgaacccaggaggcggaggccgcagtgagccaagatcgcgccattgcactccagactgggcgctgtctcaaaagacaaaaagtaaaaataaaataaaatacatgctttctctaagctgttcaaaaaagagtaaacttcactggtggagaggccttctcgaggcccccggggtggaggaccagctgcccctgaggacttacgccgaggcctcgtggatctcggtcccatcgtagactccgcatccagacagcacctgcgagaggagcgggagctgacccgggggaaaggggccgacctgggcggcgggagttgactggggggaaaggggccgacctgggccgcgggcgctgacccgggaaaatggggccgacctgggccgcaggagctgacttggggtgaaggagccgacgtggggcggcgggagcggacctaggaagaggggccgaccttgggcagagaacagcgaaggctgatctctggaggcgggagctgacctcaccccctccgtccactcaccagcgcgaccctggccgcggggcgcggcacggagaggtgaagggctgcgcgctgggaaggcgtccgaccgccgggggacagggacgtgaatgcagatgccgcagcgagcctcgaggccaccagggccctcacagccgccattgcggtgaggacagcggggtcggaaggtcacgcagggacagagcgtgcgcacccacccctctacaaacgcgttgctcgtcgggactgcgcctgcgcagccttcggggcggagccaagacccgcccccgtctcagccctatccagtgagtgcgccggtgggcgggggccgcgcctgcgcagagcctccgaatagagttccgggaaccctgtcttccttccggtggtggctgagggctcgtgctcgaggctgagggatgctggtgactcccggggtccccagccccgcccccatcggacgcctccacaggcggcgcaccctttccgccatccgcagagcaaggctgcctcggggcggctcagtccggcgcttcttaccttacctccgtctcatccttaactcaccacgagcgtccagggtccacatcctcctaaatggccactcgtcttaatctcggcgtcaggacccacgcggggtcaggactacccctccgcttccatgactgtctcctcgcggctccggctcccacggagcgacccctccgggttttactgaccccgggatgttgtatcctggaaactgcagttccacccaggggcttgatctgggttagtctgggggcaagtgagccgccgattctgtttgggtttttttttttttttttttgagacggagtttccctcttgttgcccgggctggagtgcaatggcgcgaagtcggctcaacgcaacctccgcctcccaggttcaagcgactcttctgcctcagcctcccaagtagctgggactacaggcatgcgccaccacgccaggctaattttgtatttttagtagagacggggtttctccatgttggtctggctggtcttgaactcccgagctcaggtgatctgcccgcctcggactcccaaagtgctgggattacaggcgtgagccaccattcccgggcactgtttgggtttgtttttttgtttttgttttttacgttcacagcatggacggtcagtgtgaagatcccagctgctcgggtcctagctggaattcttccattaaaaaaatctgtttgttatgcatgggttagttcacagaggaatagctggataagtgctggctttttccccgatttacccattttcaacctaataatgcaggtttttgaaataatgtgaatggttactgctggcggatgttcacagggacacaccggattctacagacacatctgatgatctagccacggctgtcactttccccactgccgcgttgtccatcactaggactttactgccaatccttgcaagatagtggggaactagaataacagacatgggacattaccagttacaaccaaagacaagcttggcacatttgactgtcctcgttcctgctcctccgtgcctggccctcttcaggcttctcagctcctggggagcggccagccagggagcatcagctggtgggagcgatggggttgtgggatggcacaaaaaaacaccaagcgccactcagaaaggaaatgccgaatgcagactctcactcagtcggtgtgggggccaggaccctgtctctaccaagtgtgcgggagctgcccctggccgggagctcccagaccccactgcagagccgcagctccagttgtcccaggggcgactactcaggtgtccatcgccatgcacatgtgacacagaaaagggtgaggcgaggagggggaacgctggaaattgtttcacggaaaagggcgaggcaagggaggggaacactggaacttgtgctttgggtaggcgatagctaaggattctctctcgtctgggtcacggagattgtgcagccacagaacacctggtgtcatcagggcctgagctcctcccttctacaaagacctctggtctgcaggcctgcaggtacagtgctgtgggccacaaggcactgcctgtcgtattcatctccactctctagcacatctggcctcacgccacccccgggaggccggcaggcagatatcagctccacttcccagataagcaagggagccaggtactacccagggtcttgggggccacaccgctggcgagggacaggctgggcctggc

SEQ ID NO: 1562301 - DNA, 4001 bp, Homo sapiens
aagcttcgcagagggtgacgcaaaacaggagcgtggtctgcacttggttgggcattaaactccacgttgatgagttagtcaatcccactagcaggcagactgacatgtgggggatgtcagcagcaggggcccagacctgtggacccgaggggcagaggtcagcaccctcctcggtgcagctaacccaggaacttgcctcagtggccaaaattgctctcttgccctcagttctgtaaatggcccatgtccatcagtatctatggttgtgtgcctgtcctgtcttccaacccacatccatgtagggaccctgaagctggaccagtgagtgattgggtgaaggctggctagcccgtaggaggtcaggctcacagaggcagctcatggagatccttggaggggcgcaccttactcctgctggccctggaggggctggattactcctgacgtagagttcaactcaccttaccctggaggccatccaaccagaaatgaagtcagcatgaaaccaggccttaccctccctccagatctgtggagggtgtgggctagggtcacatgacctgcctggtgccacacattcccagatggcagtcaggggtcctcgctggtgctgctggacatgagcagactctggccccatgtttaagatcccagtgccattgggcgttggctcacgcctgtaatctcagtgctttgggaggccaaggcagaaggatcacttgagtccacgagttggagaccagccggcacaacacaacaagaccccatctctataaaaaataataaaaaagggccaggtgcggtggctcatgcctgtaatcccagcacttagggaggctgaggcaggcagatcacgaggtcaggaggtcgagacaacctggccaacatggtgaaaccccgtctctactaaaaatacaaaaaattagccaggcgtcgtggtaggcgcctgtaatcccagctactcgggaggctgaggcaggagaattgcttgaaatcggaaggcagagtttgcagtgacccaagattgcgccacagcactccagcctgggcaacaagagcaaaacctccgtctggaaaaaaaataaaaaaaataaaaaaataaataaacaagataataaaagaacctggctcttgtccacagtcattaacagtgacagtcttgggagacatttaaacagctctgagtgtgcacagaacaaaaaccaggttaatttagttaagcaactgtatagagcacccttgatataagtgacctcatctgagaaaaggactccatcttatgtatttttttttgagatggagttttgctcgttgcccaggctggagtgcagaggtggagccatctcagctcactgcaacctccgcctcccgggttcaagtgattctcctgcctcagcctcccgagtagctgggagtacaggtgcacgccaccacgcccagttaatctttgtatttttggtagagatggggtttcaccatgttggccagactggtctcgaactcctgacctcaagtgatctgccgtcttggcctcccaaagtgctaggattagaggtgtgagccatagcacctggcccctgatgccttttaaattataagatagggccaggcaggcggaagttgcagtgagccaaggtggcaccactactgcactccatcctgggcaacaagagtgtaactccacctcaaaaaaaaaaaaaaaaaaaaaaaaagggtatcaggccaacagggaccagatgtttcctcatcagtagatactgcacccacccagataaagacataaacaagacactcttactatcagtccttaccagagtactctatggccatgaaaagagcagaacaccaccaggtcaaagtggccgttttacagacagtcttgctgtcacttgtgagaagccctccacatctgctgctgcaggctctgcccacatcagagatgcttccttgccagattctccttttcgttgaactggttaactttttttcctctcctctttctcttgatgtggaatgtttataacatttatgcagtggtcaagtatactattatgtatggtttgtaatactgactgacttaaggagagacttgagcctgtgtgcccacagctgtgactgccaagtgaatgggaagcactaagaattgcctcctcgggatctctagtagtatacataacatgctccagagggcatggatttgtcagactttttttttaaatagggtttttaagaacagttttagatttagagtaattgagaagatagtacatggagatcccacataccacatgtgtggcttcccctcttattaacatcttaccttagtgtgctacatatgttatatatatatatattttttttgagacagagtctcgctgcgacgcccaggctagagtgcaatggtgcaatcttggctcactgcaacctctgcttcccagtttcaagcgattcttctgcctcagcctctcgagtagctgggactacaggtacgtgccatcatgcccagctaatttttgagtgaaagccagtgcacctggcccatttgttatgattaatgaaccaatattgagacacaagtaactgaagtccacactttgacagtttccttaggtttgcctcatgtccctaatgtggtatccatcagaacaccccattacattgagttatgtgtctttaggctccttctcagactttcctcgtttttgatgaccttgacagtttcgaagagtactgggcagatattttgaagaatgtccctcaattaaaatgtgtctattatctcctggttagactgggactgcaggttacagaaaggaagcatctaggggtgaagtgccactgtcaccccatcacatcagggacacacactgtcacctcgactataactgtgaggctgacctgcgtcacttggctgaggtggagtctgccagttttctccacaataaagtggctctttccctccttttctttattgcactctttgggaggaagtggctatgtgtggtctacacttaaggagaggggagttacgtttccctccttgagggtgagtatctacaaaatttatctgggcagcttttttttttttttttttttgagttagggtctcagtctgtcacccaggttggagtgcagtggttgcctggccttgacagctttttaatagtttaaaatgaattgaggctgggcgaggttgctcatgcctgtaactccagcactttgagaggccaaggcaggtggatcacttgagcccaggagttcaagaccagcctgggcaacacagtgagaccctgtgtctactaaaaatacaaaaattagctgggcatggtggtgtgcctgtaattccagctgctcaggaggctgacatggagaatcacctgagcccggggaagttgaggctgcaatgagcggtggtctcaccactgcactctagcctgtgtgacagactgagaccctgcctataaaaaagaaaagaaaaaagaactgaaataagacccaagtccaacattagcagaacctctctaggatgtccacagaaacgactctggggttctgaggaacacagtctaggcaaacctgggcacatcccctcagtcccacagttgtaaatgtattgtaacacgtaacagttgtgagattcaggcgcggtctgggtctctgttcctggaaagtgtgatcctgtgggtgcagcccctgctcgcttggctgtgttgcctgcctggcccctgctctaatgagcccactgcccagagtttgctcaaaccacccaattccgagtctgggaaccaggagaccgctggacaccccgctcaccacacagaagactgtggcctgagtcaggagaaggaagtttctggcggtcgagcttccacggcttcctgagggaggttgcagggagccgagatcgcgccattgcgctatagcctgggcgtcgcagcgagactgtctcaaaaaaagaaaaaaaattctgagcgagattccagggcttcctgagggcgcgt

SEQ ID NO: 1562302 - DNA, 4001 bp, Homo sapiens
cgaggtgggtggattacttcaggccgggagtttgagacgagcctggcgaacatggcaaaaccccttctctactaaaaatacaaaagttggccaggcatggtggagcgcacctgtaatctcagctactcgggaggctgaggcacaagaattgtttgaacctcagaggcggaggttgcagtgatctgagattgcaccactgcactccagcctgggcaatagagtgagactccatctcaaaaaaaagaaaaagtctacattccttgggggagggtctacactcaagagaaggctccggaaggtggggggcagggttctggcctcctttcccttaggcacaggggtcctgcccctcacccagcatcacactggagaggggccgttgggaaccctagccagcccttgggggggtccccaaaccctctgccccaggcactggtagccattctattccctcgcactggctctgcagtcaggggacctggtttgggattttctctctgtatttgagactgggctctgcccttggcagctgagcccccacagctcacagcttgccccacgttccaaagaacaagaaatgctcctctggcctcctcagcttctccctggacgtccccgggtaacagtgaggacagcagctcctccccaaccaatggacaagctcagggtctggaaccagagcaactgggtctgatctgggtgcgaccactgccagggtgagcaacctctctgcctccattttctcatctgcaaaatgggaacaatgaaggtgcccctttttggggtttgcagactaaaggtgataaggaatgggggtgtcttcaactctgaatgtaaaggaaaagcgttgaggacaatctcgccggtaccaggagtgggggtgattcccagagttgctgtccccacctccccctggaggtggctccccctggagtggctacacttgcgtctgtctgtgctggttccaagcagcccaggggctctcacctggctcgaggtggaggccctcaggtcccccttccacgttctgccgttcttgctccagcttctgtgaggaagagagaccgtgacagagacggtggctccacgcaaaggccctgtgtgctccaggaatgactaagaggctttctgagtgaaaagaatggtacgtcaggagtaacccagcctctccagggccaacaggcgggagtcaagcccctccgaggatctccctgagctgcctctgtaagcctgacctctagcaaattcatgtgttccatccacaagtctaggggcggatgctctgagtggtcccttcaggcagatttctgaagagcaaccctgggagacacctcactggtgaggcctccaggcttcccagccagtgcatgcctagatcaccccccacctgaaccctgagctgagcagctacctgctgggtgtgtccaggggtgagtccctctcatggcggcctgtgggccaggatgcagggctggcgaaaggtgggcagcaggtccctcaggcagcaggagagggaacaatgcaggcagggggtgcagaggtgcccccaggcaccgaggctccccagaccctgtgctcagtggcctgcgaggacaggcaggtcggtcatgggccacccagaccctcagagaatgtgaagactaagtctgaggatgggtccgctgggctgccagccccaggcctagcccttggggccctgcattctgcacctgcagggctgtctcgaagagtccctccaacgccacagcctgcgagttgttaaaaacaggagcatcccgggctctgcctcacctgtcccaagagcttcagcgtcagtcgggtcacttgctctgctgctgatgagtccagcatggtgggagctgcaggagacgactgtaggggcaggggaggccacagcccacctccctccctggttctgttactcgcaggaaagaactgctcagcaggagcccaagcaccggtgttgcctgcagggcgggccttacctcctggagaccagcctgagggaagagaagagccctgtgggaagatagccacaccctccctggactgcagtgccccagaagccagcgctgggcgccgcgtgacagttgccaggctgccagacacagggaggccccaggttgccaggtttccactgtgcgtcctcaggctaccggtaaacactcatccccaggtgtggccagctgggcttcatgggaaggcaaaaaagtgggcagcagctgaggcagaggggcagaaccctcagacctgggggaagggcagtcgtgaccccctatgcaccaccagcctcaggacccagtccagaagaacctgtgtgtcaggggagggcgccccacctgtgtactgcctccagggtgttaatacctccctcctagggaccctcagagcaagcagggaagacagggtggggagacactgggaggacagggtgaggagactgcctaccaaggagttcaggaaattgcaggcagcagaaggggtaggacagaggaggggttgtgacctgcagaggggctgggctttagcaggaccagagggggtgcccaggggatatgtcccaccttggggctgggggcactgggcagggagtcaagtttgcaggaagcttcgcagagggtgacgcaaaacaggagcgtggtctgcacttggttgggcattaaactccacgttgatgagttagtcaatcccactagcaggcagactgacatgtgggggatgtcagcagcaggggcccagacctgtggacccgaggggcagaggtcagcaccctcctcggtgcagctaacccaggaacttgcctcagtggccaaaattgctctcttgccctcagttctgtaaatggcccatgtccatcagtatctatggttgtgtgcctgtcctgtcttccaacccacatccatgtagggaccctgaagctggaccagtgagtgattgggtgaaggctggctagcccgtaggaggtcaggctcacagaggcagctcatggagatccttggaggggcgcaccttactcctgctggccctggaggggctggattactcctgacgtagagttcaactcaccttaccctggaggccatccaaccagaaatgaagtcagcatgaaaccaggccttaccctccctccagatctgtggagggtgtgggctagggtcacatgacctgcctggtgccacacattcccagatggcagtcaggggtcctcgctggtgctgctggacatgagcagactctggccccatgtttaagatcccagtgccattgggcgttggctcacgcctgtaatctcagtgctttgggaggccaaggcagaaggatcacttgagtccacgagttggagaccagccggcacaacacaacaagaccccatctctataaaaaataataaaaaagggccaggtgcggtggctcatgcctgtaatcccagcacttagggaggctgaggcaggcagatcacgaggtcaggaggtcgagacaacctggccaacatggtgaaaccccgtctctactaaaaatacaaaaaattagccaggcgtcgtggtaggcgcctgtaatcccagctactcgggaggctgaggcaggagaattgcttgaaatcggaaggcagagtttgcagtgacccaagattgcgccacagcactccagcctgggcaacaagagcaaaacctccgtctggaaaaaaaataaaaaaaataaaaaaataaataaacaagataataaaagaacctggctcttgtccacagtcattaacagtgacagtcttgggagacatttaaacagctctgagtgtgcacagaacaaaaaccaggttaatttagttaagcaactgtatagagcacccttgatataagtgacctcatctgagaaaaggactccatcttatgtatttttttttgagatggagttttgctcgttgcccaggctggagtgcagaggtggagccatctcagctcactgcaacctccgcctcccgggttcaagtgattctcctgcctcag

SEQ ID NO: 1562303 - DNA, 4001 bp, Homo sapiens
gcttttttttttttttttttttgagttagggtctcagtctgtcacccaggttggagtgcagtggttgcctggccttgacagctttttaatagtttaaaatgaattgaggctgggcgaggttgctcatgcctgtaactccagcactttgagaggccaaggcaggtggatcacttgagcccaggagttcaagaccagcctgggcaacacagtgagaccctgtgtctactaaaaatacaaaaattagctgggcatggtggtgtgcctgtaattccagctgctcaggaggctgacatggagaatcacctgagcccggggaagttgaggctgcaatgagcggtggtctcaccactgcactctagcctgtgtgacagactgagaccctgcctataaaaaagaaaagaaaaaagaactgaaataagacccaagtccaacattagcagaacctctctaggatgtccacagaaacgactctggggttctgaggaacacagtctaggcaaacctgggcacatcccctcagtcccacagttgtaaatgtattgtaacacgtaacagttgtgagattcaggcgcggtctgggtctctgttcctggaaagtgtgatcctgtgggtgcagcccctgctcgcttggctgtgttgcctgcctggcccctgctctaatgagcccactgcccagagtttgctcaaaccacccaattccgagtctgggaaccaggagaccgctggacaccccgctcaccacacagaagactgtggcctgagtcaggagaaggaagtttctggcggtcgagcttccacggcttcctgagggaggttgcagggagccgagatcgcgccattgcgctatagcctgggcgtcgcagcgagactgtctcaaaaaaagaaaaaaaattctgagcgagattccagggcttcctgagggcgcgtttaagttgcagttgctgaggaggctgcaaggtgagcttgcgtcagcgaggagccactccagcacgctcgggaagggcatcgttactgctgcaaacaagcacacggccctccacgacgaaccttttgcaagtgaaggcgcacgaacaggcccggaggactacaaagaaacccagaaaccagacttggacacatgaaataaaggggttagctgaaggaatactccacagttaaggacggcctgcgcgaggtcaccggccctgtcttggttttttgccacttcgctccagttagtttcccaagttccacctacgcgcgcgccagctgagaaaacgcccaccccggcggtcccgccacaggtcacaggcggtgcggaccccgggactgtgtccgggcttcggtgtccagagagctccaagacacccaaaccttccgtggtttccacctctgcaagcttatgttccgctgagctcaagctgagggacgacgacctcatgcgacgtcagtttccccctgggaccacgaacccacggccccatttctcttctgtctactaaaaaccttttcttttcttttttttttgagacctaagacatcagtgagacacacgagcagacacgggctcggtcgggaaaggcgggagctccaagcggcggggcctgcaggtccaggcggttcgcgggctttctgaccgcattcggccgagttcttctctgaagacccaggacccccggccgagggggcgcattcggcgggctggtggcgtaggattttgtttcgggttcccagggtcccggcaagggtgagggagcccttgcggatcccctgagatccacctcagcagcctcctccgtggtaggcctcaacttcccgcggcggcccacagccaacgactaatgcctgagcgggagaaaacggcctggccctgtccgggtggttgctgagcaccgttcggcgccgcccgcgcctgcagggagcccggcccgctgtcctggtggacacaaagcccaggggccgcccgcgcgggaccagcagcgcgaactttttgccgctcggccagcctggcaggggattttaaaatcggccaatcacagcgggcgccaggcctccgctttccgcttactggtcctgccgtaggaggcgggtacgtgagcgcaccaatctgtggccggcgagcgtaaagggcggggctccgcccaggctgcaccgcccagagcgcgcgtgcgcgagaccggaaacgcagccccctgattggcggcgcgtgtcgggggcggggccgcggctgcgtgacagttgtcgcggggggagggcgagcccaagcgcgggggagggagtgtaaatagagcgaaggctgctctgtgtcagccccgtcaccgccgggcggcccgcgcggagtctgagggagatggaagttgagcaagagcagcggcgcagaaaggtggaggccgggaggacgaaggtaaacattaggggcttcttctctagctgctctggcgtgaagtcctaagggcggctccggtgcccgccaccgccccctgccaggagaggacgcggtccggcggaagccgccgcggaggtctcgctttttcccgccggctccgctggaagccgcctcctggccgccgccatcttgaatccgccgctctccgccaggtcccgcccccgccgcggccacagccaatcagcggccgggacgcgcggcgcctctcgggcgggccggggcggggctgcgcctgcgtcggggggggtggggcgcgggctgggcgcggtgcacgccggggcggggtgtggctgcagggcggggctacaggggcgtggcgtggctgcacggagggggtggggcgcggcaggcgctggaccccaggctggatcttccagtggctcccgcgtcctccgggaccgggtggcctggggcgggcggccggtattcgggtggctgcttggtctagggccagtttcctgcgcggccggggccgggggcgtggcgcgggtggcctgcagcgcctccccagggtgcgccttcgcctcgtccgtcggagatgctttccccgcgcgtttctcgcggcgttgcagtccttactgtgtgaaaggcccccgcggcgctcccggccgccgtcttcttcccgcgcccttgggctcgcgtcctgcccgtccgggcctggcgtacgctgccgggaacccacgcggcgctggcgccgggcgccttcaagggacgcgctcccgtctttctcccgccccgggtttctccgtgaaaaagcgctcggtttgatggccactgtcctaggtttcgtgggaataaagcgcgcagagcccatgactcgggggcaggagaaagggagtcccgaaagcgcgaggcggaaccgcgggagcaggccggcctctgcgaggtgcgcgccgctcccccccaggatgttctggctggggtgctggggaagagcggggctcccgggcacggcggacaggggacgcggggctaggccggggaagggctgaggcgggcaggaggggaaggggagcccggagcctgcagggagctgcgaacaggagcagagctcccaggagggtggaggggggagggagggacaagacgccgcctgtagggcgacgcaggccgcagaccaggtctgtgctatatcccgacatggataggtgtggtggaggaggacatgaaaataaacgacatgaggttgactttgaaggaaatatttccttgagagaccattttcttgtgtaaatggccttgtgtaatttttctgggtccatgagcttgtgtacttgtgttatcatttacacaaatgtgtgttccatgcgtttgtttttgtggccacagttgtcttttgagggaacagatgtctccccgtgaaaggctgatgtgggatcgatcgcatacctcttgagtaagacgttagcgggagatgaggctcgcacatagtctcaaactctcggatttgaggactgagcagagctaggctgtgccttctgatgggcgatgctctgtggatgtccctggtgctttggtgagctgtgtcatgaaaaatagaacatctgattccataaaggaagatgtgagattgacc

SEQ ID NO: 1562304 - DNA, 4001 bp, Homo sapiens
ttccctccttgagggtgagtatctacaaaatttatctgggcagcttttttttttttttttttttgagttagggtctcagtctgtcacccaggttggagtgcagtggttgcctggccttgacagctttttaatagtttaaaatgaattgaggctgggcgaggttgctcatgcctgtaactccagcactttgagaggccaaggcaggtggatcacttgagcccaggagttcaagaccagcctgggcaacacagtgagaccctgtgtctactaaaaatacaaaaattagctgggcatggtggtgtgcctgtaattccagctgctcaggaggctgacatggagaatcacctgagcccggggaagttgaggctgcaatgagcggtggtctcaccactgcactctagcctgtgtgacagactgagaccctgcctataaaaaagaaaagaaaaaagaactgaaataagacccaagtccaacattagcagaacctctctaggatgtccacagaaacgactctggggttctgaggaacacagtctaggcaaacctgggcacatcccctcagtcccacagttgtaaatgtattgtaacacgtaacagttgtgagattcaggcgcggtctgggtctctgttcctggaaagtgtgatcctgtgggtgcagcccctgctcgcttggctgtgttgcctgcctggcccctgctctaatgagcccactgcccagagtttgctcaaaccacccaattccgagtctgggaaccaggagaccgctggacaccccgctcaccacacagaagactgtggcctgagtcaggagaaggaagtttctggcggtcgagcttccacggcttcctgagggaggttgcagggagccgagatcgcgccattgcgctatagcctgggcgtcgcagcgagactgtctcaaaaaaagaaaaaaaattctgagcgagattccagggcttcctgagggcgcgtttaagttgcagttgctgaggaggctgcaaggtgagcttgcgtcagcgaggagccactccagcacgctcgggaagggcatcgttactgctgcaaacaagcacacggccctccacgacgaaccttttgcaagtgaaggcgcacgaacaggcccggaggactacaaagaaacccagaaaccagacttggacacatgaaataaaggggttagctgaaggaatactccacagttaaggacggcctgcgcgaggtcaccggccctgtcttggttttttgccacttcgctccagttagtttcccaagttccacctacgcgcgcgccagctgagaaaacgcccaccccggcggtcccgccacaggtcacaggcggtgcggaccccgggactgtgtccgggcttcggtgtccagagagctccaagacacccaaaccttccgtggtttccacctctgcaagcttatgttccgctgagctcaagctgagggacgacgacctcatgcgacgtcagtttccccctgggaccacgaacccacggccccatttctcttctgtctactaaaaaccttttcttttcttttttttttgagacctaagacatcagtgagacacacgagcagacacgggctcggtcgggaaaggcgggagctccaagcggcggggcctgcaggtccaggcggttcgcgggctttctgaccgcattcggccgagttcttctctgaagacccaggacccccggccgagggggcgcattcggcgggctggtggcgtaggattttgtttcgggttcccagggtcccggcaagggtgagggagcccttgcggatcccctgagatccacctcagcagcctcctccgtggtaggcctcaacttcccgcggcggcccacagccaacgactaatgcctgagcgggagaaaacggcctggccctgtccgggtggttgctgagcaccgttcggcgccgcccgcgcctgcagggagcccggcccgctgtcctggtggacacaaagcccaggggccgcccgcgcgggaccagcagcgcgaactttttgccgctcggccagcctggcaggggattttaaaatcggccaatcacagcgggcgccaggcctccgctttccgcttactggtcctgccgtaggaggcgggtacgtgagcgcaccaatctgtggccggcgagcgtaaagggcggggctccgcccaggctgcaccgcccagagcgcgcgtgcgcgagaccggaaacgcagccccctgattggcggcgcgtgtcgggggcggggccgcggctgcgtgacagttgtcgcggggggagggcgagcccaagcgcgggggagggagtgtaaatagagcgaaggctgctctgtgtcagccccgtcaccgccgggcggcccgcgcggagtctgagggagatggaagttgagcaagagcagcggcgcagaaaggtggaggccgggaggacgaaggtaaacattaggggcttcttctctagctgctctggcgtgaagtcctaagggcggctccggtgcccgccaccgccccctgccaggagaggacgcggtccggcggaagccgccgcggaggtctcgctttttcccgccggctccgctggaagccgcctcctggccgccgccatcttgaatccgccgctctccgccaggtcccgcccccgccgcggccacagccaatcagcggccgggacgcgcggcgcctctcgggcgggccggggcggggctgcgcctgcgtcggggggggtggggcgcgggctgggcgcggtgcacgccggggcggggtgtggctgcagggcggggctacaggggcgtggcgtggctgcacggagggggtggggcgcggcaggcgctggaccccaggctggatcttccagtggctcccgcgtcctccgggaccgggtggcctggggcgggcggccggtattcgggtggctgcttggtctagggccagtttcctgcgcggccggggccgggggcgtggcgcgggtggcctgcagcgcctccccagggtgcgccttcgcctcgtccgtcggagatgctttccccgcgcgtttctcgcggcgttgcagtccttactgtgtgaaaggcccccgcggcgctcccggccgccgtcttcttcccgcgcccttgggctcgcgtcctgcccgtccgggcctggcgtacgctgccgggaacccacgcggcgctggcgccgggcgccttcaagggacgcgctcccgtctttctcccgccccgggtttctccgtgaaaaagcgctcggtttgatggccactgtcctaggtttcgtgggaataaagcgcgcagagcccatgactcgggggcaggagaaagggagtcccgaaagcgcgaggcggaaccgcgggagcaggccggcctctgcgaggtgcgcgccgctcccccccaggatgttctggctggggtgctggggaagagcggggctcccgggcacggcggacaggggacgcggggctaggccggggaagggctgaggcgggcaggaggggaaggggagcccggagcctgcagggagctgcgaacaggagcagagctcccaggagggtggaggggggagggagggacaagacgccgcctgtagggcgacgcaggccgcagaccaggtctgtgctatatcccgacatggataggtgtggtggaggaggacatgaaaataaacgacatgaggttgactttgaaggaaatatttccttgagagaccattttcttgtgtaaatggccttgtgtaatttttctgggtccatgagcttgtgtacttgtgttatcatttacacaaatgtgtgttccatgcgtttgtttttgtggccacagttgtcttttgagggaacagatgtctccccgtgaaaggctgatgtgggatcgatcgcatacctcttgagtaagacgttagcgggagatgaggctcgcacatagtctcaaactctcggatttgaggactgagcagagctaggctgtgccttctgatgggcgatgctctgtggatgtccctggtgctttggtgagctgtgtcatgaaa

SEQ ID NO: 1562305 - DNA, 4001 bp, Homo sapiens
ttataggaaaagaagatgaattccttttctcctcaaatgctttaacttaaaaataacatttaatattgagtttgtgttggaacctcaattaagaaactacacataagtttcatgaaaagaaccatgaccctcaggaatttctccacggtgcaaaactcacatattcatataatgtaatcaatacatttcataataaatcacatattcatgcaatttaataaatcacataaatgaatatactatttattgcaaatagttacgtttgtatattctatatatacacgatagttatataaacagtaatatcctagaccacatcaggaagtatcatcccgtcaagttcaaaaactatgctgtctaatgcggcagctactcgctccacttggcgatttaaatttatttaaattaaaatgacccagacgcgatggatcacacttgtaatcctagcactttgggaggcggaggcaggcggatcacctgaggtcaggcgttcgagaccagcctggccaacatgatgaaaccccgtgtccactaaagatacaaatattagctgggcgtggtggtgggcgcctgtaatctcagatacttgggaggctgaggcaggagaatagcttgaacccgggaggcgaaggttgcagtgagcagagatcgcgccactgcactccagcctgggcaacagtaagaccctgtctctcacacacacacataccatatatatatatatatatataatttatttatatttatatatacatatatataatttatttatattcatatatactatatatatggtatttatttatatttatatatatttaattaattaaaatgcaaatgtaaaattcggttgcctggccgcactagccacattccaaatgctctacggccacaagtggccggcagctgcccaatggacagcacagatgggggcccttccaccgccggaaagttctgcggcaaagcgggtgccctggaacctgcgcggggtagggagacggcgccgcaacgcaacaggccgtttccagggcggggaaagatcaccaaggcttcctcaactgtaaggggccgtcccaaagccaggtggctcgctgctttacattgggcgactaaaaatagtaaattcagcttttaaaagcccacctagttctcatctcacccctcacacgtgattaattgcactaagtctgctgttcagcccggcctttcggctccctcctccctccccagcccatttccacttattcgcagcaccccaaatcctggctccgagaggcacctgggcccacctcccagcccggggtgtcagacaggccggatcttctccggttccttattcatctccggttaaccctagtgtcccgtttcaaccccggctgctgcaaatctcttcaataatcttcacaaacctgacccctcggcccaccctgcccctctttctccatcccacgccggtctctcgatctgtccgggatgggcccacccgcgagccgcacctgagcagaggcgctgcaccttgagccgcccattatagacccgggccacctgcaccgtgagctcctccagctcggtactcccaggcgcctgcagcaggaactggctctcgtcgccccgcttcacgtgcagcagaaccatggcggtcccgccgaggtactgaggcgttgagaaggccccggctgcgtggcccgcgggtcctgccggccgagggtcgccggatcgccagcagctgcgacgcactaacagccgctcacagtccggaatcccacgctccctagcccgcggtgagcgggggaaacggcactcgctcccggaagtggatgttgccaagagcaacagtgaagcagagttaaagagccgccagctcaagctcagaacccgagtgggggaggctggggtgcaccgaggcccagcaatccaagcccgtacggagctgcggccggggaaaccacccacacagtctgagaggacagctgattctgagcggaccgacggaaggagattcgcagagccccttcccggaagtgactgttgtcgcggcaactgccaaaacacagaccaagtcgctgaaggggagggcggacctcccaatcgactggtctggggcccgagatttccactcagggagatacgtgggctgagatgggagttactagatggggaacgggaaatacggcgggaaccacaatcgcgcagttccgcagctgccgccccacaaccgctccacattccagcgtcccttccgccgctttcagtctccacttccggcaacgtttccacgctgtttccggcctgggaaagttcggcggcagcgacccagaactgagtcttgctgttcgctgctgtttgcgcgggtcagcttttcaggacggaggggccagggcgagtgtccgcacttcttcgttcaggttgatttggatggcgttgctggggtagctccagcggcccctgccagagcgaccctcccagaaatatccagccatcctccagcggactcttgctgaaggcagtcggcgtcagtcgctgtttattccgggccccacagatccagagtcactgctctcatggagcttatattttagtgtgacaaaaagaaaacaaaaataaatggacaggccaggagcggtggctcacgcgtgtaatcccaacacttagggaggccgaggagggcggatcacctgaggtcaggagttcgaaagcagcctggccaacatggtgaaaccccttctctactaaaaatacaaaaattagccgaacgtagtggcgcgtgccagtaattccagctactagggagcctgaggtgggagaattgcttgaacccgggaggcggaggttgcagtgagcctagatcgcgccactaccctccagccttggcgacagagtgagactgtgtctcaaaaataataaataaacaaacggacaacacaaattcaaatacagatctaaagaaaactaaacaggttgatggacttcttatgtttgatggtcagggaatgtacaccttctgcgatattgggagtaatattatcgtctcccgccctgaatatttagaaaaatatcacagtggggtgtacacccctgcgatattgagagtaatgtcatcctctccacccaggaaattactaacaaggtcacggaggggtgtactccccctgtgatattgggagtaatgttttcctccccaaacctggatgttagcaacaagataacagagggggtgtacacaccctgcgatattggaagtaatatgatcctctcccccccggatactgggaaaaatatcacagcgcgggtatacatttccttcgctgttgggagtaatatcattcttttcctctctggatatcaggaacaatatcacaggggtggtgtacatttccttcgatatggggagtaatatcatcctctccccgttgggatactaggaacaatatcccaggggggtgtccaccctctgcgatattgggagtaatatcatcctctgtttccccggatattagacacaatatcacaaaaaagtgtacaccccctgcgatattgggagtaatatcatactctccttccctggatattagaaaacaatatcatcaggggtgagcaccccctgcgataatggaagtaatattttctctttttttcttttcttttttttttttttttttttttaacagagtttcactcttgctgcccaggctggagtgtaatggcatgatctcggctcactgcagcctctgcctcccgtattcaagcgattctcctgtttcagccttccaagtagctgggattacaggcatgcgctaccatgcccggcaattttttttttttttttttttttttgtatttttagtagagacagtgtttctccatattggtcaggctggtcttgaactcccgacctcaggtgatccgcctgattcagcctcccaaagtgctgagattacaggcgtgagcgatcgcgcccagccaccacttagcattttcattttacatttgttgaagttaca

SEQ ID NO: 1562306 - DNA, 4001 bp, Homo sapiens
caacagtgttgagaagtgggagctttaaggggtgacctttaagagggcggtgccctcatgaatggattaatgctgttattgaggagtgggttggtcaccatgggaataggtttcaaataaaaggatgaatttgaccccctttctctctgtctctcttatgtgtgtgcacatgttctcttgccctttcaccttccaccatggaatgaaacagcaagaatgcccttgccagatgcaggccccttgaccttggaattcccagtctccagaaccataagaaagaaatttctgttcttaagttcataatcagaatagaggacaatatgagcagagtgctgcttctgctaacataggtatggaatgtgggacaaagaattctcagagagtgagccactgggaagtcctaactaaaatatgtggctaccgtacttttctacttgacacagtccttgagagagtgaattaggcaatgagtgcaaatccttcaggctttccccttgagtgacttggtagacactcagttaattgcatcactggggttcacatccacagctttgcacagctgccccttggtcccacgcccacagaactgtgaggcctgcctgttcttcccactggggcctattgacctattagctcccacagacacagacacaagccactgggcactgaattttaaaagctgataatgtggcagctttaagcagtgaaaaatattagtgtggaaaagaaagatgagaaatccaagtcagctcttgaaaagcactcatttccataaatactttattgaaactgttattttcagaaaatgcccaatttctgtcagaaaaaaaagtaatgaaaagtctttttttttccttccaaacatattgcattatttagactaaaaaaaagcaaaaaacttctcaaggatggctcttttcggtaaaaaattttcaaacaaatgaagtcttttttttggtattttttaagggtgggttttttataaatattatgcacaatgtttttgaaacatttcctgtcctcagtatacaccaacatactttttgctaaaagctttccaaaaatatgcttattaaacaaagaaataaatgcaagactgtatatgttctactcattttgaattaaaacattcccctcttcatcttgccttttgctacattatttatcatgctttttcacttttgaataaaagaccaattttttaaaaacacgaactatccaatccaaatgttaatgctcatcttagcttactttcttttctttgttttctaatcagcaaactctataaagcctggtgtgtaaataggcagtaaatataatattattaaaagataaaacagagcaaagaaacagtatcagccggtgttttgggagttctcacttttctttgtttgtgatcacaataaggaaaagagatatcatatctcttttccttaattgttatttagcattgaagactaatggaaaagtctagccagatgttttaaaatagagacaagatttcaaggagctatctgttatattagctttaagtgagtttatctttttagggtttaaatgagaagaccatgtcattctttgcttaatgcactgaaaatctttcattttaaaggcagaatctcagtaaagaggaattcatatgcctggaagcctaaaaaagtgtttcatagtgaaagccactcatacatgtacattatgttcaggaaatgcaaatgcaacaagaaggtgaccctgacaatggttcttccaaccgtcacagttcctgccatgcagcagaaattctgaagctctgaaaaactgtcagactagacatgctttttaaaaaagaagaacacagaaattacttacatctgagagttccaccgtgaggcctcgcctctccactccacagacctctgcctggccacggatccttcaccctggcttgacagctggtttaatctgcaagccagggtggaatgcgtggtcttgcacttgctgttcttttccgtcttcggagggccagcagcctggtcatttccatggcaaccaggaggaagctgctggcctaccagtctcattaactacacgcaggagagaacctgccttggtgactgctgaccactcttttggggttctaaactgggaagtttctagaagaaactgaggagactgttgctgtaggctgatcccaaaggattgacacaaatggaagaaattctactttagcaggaaattgaatggattaaatgtagagtacggagactccttgatacttttactttcatgatttattccaccttttttggtctgatgaattgttacttatggtaaatgcctgcactactgtataaagtgtcctatcgtagttgttccaaagaaaaaaaactcatttgaactccaaagatagacattattctctgtcttttttaaaattcatttaaaaaaatattagaagccacaaaaccaataaataggtaacaattattctatgtacattaactgatagtccatgtgggcttctataacaaaataccattagttgggtaacttacaaacaacatatttatttctgtaggctgggaaggccaagatcaaggcagatttgttttctggtgagggtctgcttcctggttcatagatggcaccttctagctgagtccttacatggtggaagggaaactgtggtttcttcagcttcttacaagggcactaatcccattcataagggctccaccctcatgacctaatcacattccaacatctccacctcctatgctatcacattaaggattaggtttcaatatatgtattttaagggaagataaatacctgggccttaacaactgatgaagtctcactaaatatgggaaaaaaagataaggcaggggtccccgatctccaggccacggactggtaccagtccatgctacagtaggagttgagcagtgggtgagcaagagaagaagcttcatctgtatttacagccgctccctatcaatcacattaccacctgagctctgccttctgtcagatcagcagtggcattagattctcataggattgaattgagaatgctattctattgtgaactattgtgaactgtgtatgcgagggatctaggttgcatgctccatatgagaatctaatgcctgatgatctgtcactgtctcccatcacccctagatgggacagtctagttgcaagaaaacaagctcagggctctcactgattctacattatggtgagtggtataagtatttcattatatattataatgcaataataatacaaagtgcacaataaatgtaatcgcttgaatcatccccaaaccacctcctacccctgcctgtctgtggaaaaattatcttccatgaaactggtctctagtgccaagaaggggactgctgagataaagaaaaatcttgctaattaaaagcactaggagtctggagcaattgatttgtaattacccagatacagattctccaatatgttaaagaagagagcacctcagtagggaaatttattcattcatttatttattattcatctactgaatccttaccacacacatgcactgtgccaggagatttaaggggcacagagatcaatgtcatggttcttgtctttaaggaagttatactataggaggggcaattatgtaagttgcatctgggaaatgtttgaagggagatacagacacaatgcaggggaatcccagtgaaggtcggcctttgccagggagactggtgaagtccttggggagaggtagttttggatctaggccttaagggatggctgagatctgcatggtcagatgtgggggaaaggacaacgatctctcatggagtgattatttgatgaactgcggatccaagctgatggatatatccttcctcctttctgcacccagagagcctggcacaaatggcttctcggtggcccacaggataaaggaactcaagtaattaagaaaattgctggagcaaaggtttggaggtggaagagtcccaggccta

SEQ ID NO: 1562307 - DNA, 4001 bp, Homo sapiens
aaagaactattttgaaactgtccaaaatctagaggtttaataaagtctctctactgatatgttacaactcaaaactcaaattacaggccaaattttttttgcaggaatattaaggttttttttagtatgactcataaatatctaaaccaaaaatcaattgtaatatgacaacactaactgcaccaacccaaataaatccttccaatagggcttttttttggggtttctttttggatttggagaatttttcttcatatatcttagggacattattaaaaaaattttaaaaaccttttcaggttttaaaaattaccaacagtgtgtgtgatcactgaaaagaggttaatctaaaaattttaaagtatttttccagataataagatcatactggtgagaaaagagttcgggctcatctcactcaaatacttgcataataggctcgaaagaataaaaaaattgttatgttacttcttaatataaaaaacacacaggtctgttaaaatctgacaattcaataagctctcaaaccagaaaacacgtttcccagtcaacactcatacttatttctgtattaggaaaaatggggttgttgcaggggtctttaaaaaaaaaagatttctcttaaattcgtaactctgttaactgcaccttcatttccagaaaccttatctttaacaaatctctacactattcatacttagcacaatttccaatcattgaagacattttagttttaccttacaatcagtacaaagcagctgtgttaaattcattccataagatcaaaactatactgtgtccttaccctcaatatttagctcaaaacaaatgtggcagaaggagagtgtttctttgtctgttcccagtttacaaacactgcaaatgttgtcatcattcaaatcaatgtttacaaactgctcctcttcgttcatagtgcccctattaagaaacagaaaaggaaagttacacaatttcatgaacctgcctttggggtagttccctttactgggaacttctaggaaataaggatgctgttcagctcatttaaagcaaaagctccatcaaacaagcatcgccatacttgcactccaacattgcacttttcctgtggaaagacacaaagctagtaaaacttaaagccaggccataggtgacactatgtccgtgtcttttttgtcctatagttgattgggttagtggcacctgaaggaaagagatttgccggcattctagtcctcctccttcgtcccccaacctcgaataatcagagggcttagcagcgaggccttttcagctaccaggttctgtcaacctagttaacgctgtgagaaacaggaaaaacgacctgcacgggacactgctttgctaacttcattgggggaacctcagatgcgcctcgcgaactcggagttgcgaagcttcgcatcgaacggagatcggcggcagcaaaatgcacgtgggtaccgaatacccggggagggcgtcccgccgtgtccggggcaactacaccgaaggccgagcggcggcttcacggtaccggccgggcaccgccggaggggcccaagccggagctgggagagccgcggcatcctggagcccggcgggcgggagagcctcgtcccatcgctccgggattcctcccagagggaagaaagcgtccgagggccacggcggccggtccgcccagcctcagcgtctcggggagccgggtcctggcccggccttcggcgttgggggcgcgcggccgcccccagggagtcgcggacccaagtccgtctttccgtcggtctgtccgtcggggcgcctggcgcgcagcagcgcgaggggccacggggctcggaactcgaaggaggcggaacgatgggactgggggtcggggctcaggtgggatgggagcagggctgcggggtctttaccgtccggctccgcgggccaccaccgccgttccgtgcggctcgggttcctccactattgtttccggccgcagcagaggcggccgccgcgcgcctggccccgccctctcccgccggctccatcccgtaaaggctgcggggagggtggcgcggccgcgggcacacctgcgcgctcgccgggctgctgtgggtccgcccctccgctcctgcaccgacgccgcaccttcgcctcgagttctcctgtgatcccgtgtttcctggccggagtttcttaccgttctctggaacgtagctcctcacacacccctcctcgaggtgcgtagatagacgaatccgttccacctctcccttcagcctagtgcaaactactgccccggggcgggggccgcaggcggcgggggtaggaaagccgcgggtggatggcagaacgggagaggtgcgtgggtggcactttgacttcaggagaaagaagcagaatactgtcactgaacttatagttaagtgccagttgaagtatctaacgaaggaaaagttcatattcaggtgtcatgatagaggcataatttcaaatacagaatcttttcaaatacattatttgttgtggggcgcccctgcccccaatatggtacatccctcaacgcccacgggaaaaatcccgaagccccacctcttatttttaggtcctgcttggttctcaaattctttgcttgacttttgtttaagctattctgttttttttagggtatggttcttgcagtactttcacttacattttccattgtagtcctcacagtaacctacagaggagaaacaggaactgttctctcatgttgcagcctacgagtaattgacccaggttatcacagttggttagaaaaaggctgggacttgaaccgaaggctactgacctaagatcaatgttattttctacagcatcatatgtatgtgttctggttgcactcacatagaaagagggctagcctgtcaatctacatgtaggcattcttgaactgatggttaggaatggactgtctagatcttggaaacttctgggccaaattagcactccagttatggcatttgtgcctcgcaggagcgatctgtgtccttgccacctaaattgtagtagatgaacaaacaacattgacattacttggtttcctgttagaaatgtagaatctcaggccccactcgagatttcctaaatcaatacttgcactttaacaagaccgccaggagattcctatgttcatcgaagtttgagatgcactaattgaaatgaaaagcctgtgctttttctcttcgaatttctcattctaggtaactacgactaagataccttgcatgttggattctacccatcttttcaataaaaagcattcttttaaaaaggactcttttaaagtgattcaataaaagtgttctaaaatcactaaaatttaaaaattgaaacaagttattttcacttctcagaattgtcttccttcctatggcatttcacattgtttacttgctattcttaaaactcttctctcttgttgttggctttttaaaaaaaatcaaggaataatttacagaaataaaatgcttccattttaaaagcattatttgatgagttttggcaaatacatacacttgagtaaccaccaccccagtgaggatacagaacatttccacagccccgacatttctttctgttcctttctggtcaagctccttcaacatgggatctaatttatatgacgaagtgttttagttttgtctgttataggaattcatatacatagaattaagcagtgtgtgttcatttgtgattggctattgtcatgcagcatgtttttgagattcacgatggtattttgtaacagtggtttcttttcactgctcgtcttagtcagtttgtgttcctataaaggaatacccaaggctggataatttatatagaaaacaggtttatttggctcatggttctggaggctgtacaagaagcatggtgccagcatctgtttctggtgatggcctcaggctgattccattcatgataggaggcaaaggagagccagtatgtgcagagatcatgtggcctga

SEQ ID NO: 1562308 - DNA, 4001 bp, Homo sapiens
acttaaaggtcattcacccaacacttgcctgcctcctacaaaggacacagatgagactggtgcccaatcaagccaccagcctggaggggactcagcctcagaagccttgattccaggtcagtcaggggtcagtgatggcagcttcctggggaaatacctgcatttgctcctggatgtgaggccaacaggggtggagggctcccacaagagacagctggtttccctgagacactctccagctctggacagctgaggcacagattctgggcaccaggacaaaagtcagtcaactgaccctgaagcctttttcctccaaaaagtacagtcatttatgttctttttcaagagttcaaaacaaggtctcttgatttgttggatggctgctaactgatagtcaaagcttttttgttttttaattccatggccatgtcttccaaggccatgcacaaggaccaggcacagggcccgccatggaatattttgaaggttgatggggccggacattgaaaatgagcaattctgctatttccacagcgaatgaccactgagctgcacaggcatgtgcaggaaactgtggcctggaagggcggagcagcggccaagactaggggtgcctccccaaacccacccaggctccaacttctcctgtgaaatgcctaagaatagtacatgccaggagcttgtcgttatactaagatgtcttaaaagcaaaaataagtcaacgagtaatcagcgactacagaaacacccacaggactgtgaggcagcagaggtaagacacgaggcccttagcttgcaggccagggcagctggattcacatgccagctctgccgcccacgagctgtgtggcactgggcaggctgcttgccctctccgggccttggtttcctcatctgtaaaacagtgataacacccctgtcccgggagttgtgaggattcagagatggcagacgcaccgaaagcctcggtaggatgtctgcccagcggctggccctcagcaaacggtcactatttttatatgccaagaaatgcaagtctttggagataaattcttggtgaaattcagctctatgagaggcggaagcacattggggtcacagctattcatgtatcatgtgcaagctcagtaagtgtccgatcgggcacgggaattcgccccgggactccaggcaaggcaggtactggctggcgcggatgagcacttctgacggtccctccaactgccagcctgtccctcgcggagcccagggcctggagcacctgccgtttggagaataaaatcaatcactttgtcttgtctctccgtcaaggggcctcgctcccccgtctctctcctaactctcgaggatggtctgcgctggggggaggactcccttagcctgggtcaggggctgcagcgacgcctccaggaaagacctcggcccggaccgcccgccccggcatctgccgccccccggcccgcagtcccggaaactcacccctttcctctcggcctcctcgttcagggcggtcacccaggccgcctgccactggctcctccagctgcccagcgtcaggatccaggagagcagcgcgtcggaccccgggcgcggcccctctccaggctccaccgcccgccgctggggctggggtcgcgccctggccagcgcccactgcgccaggtacaggcctaccgtggccagggccgcgacgaagagcgacaccagcgcgagccactgcgcctccccgagccacgagcccagccgggccatggccatggcgcatccccggcccgcctcgccccaacttccccggcagccccgggccggaacggcggactcaggacacgcgctggctgcggccacagcgcgctgggggcgtggagggggcgcggcggggtcggagcccggcgaggagcgtggccgggggcctctgggcgggcaagcggggaggaaacgcgcggcggccgcggcccgggctgggcgcaagccccgcacacctgcggaacaggggcgcgagcggaccccgcggcccgcgctcccgactcggcgtctgggaagttcctgggccgctgcgggccgcgcttcctcctgcgcgcgccgccccgggcgtcccgcccgcggcccagcggtggccggaggaggctctggccgcggggcggggcggggcgggggcggtgcccgagggagggggcgcggccgggcctgcgggggccgcagtcctcccccctgctcccaacgcggcgtgcccccgcccccctaaaggcccggccttcccggccccgccacgtgcgcgcgtcgcccgcccctccggcgcctgcccgcgggccgcgaggtgacccgggcctccggattcatcagcccaaccccggcggctgctgtgcggctgcttggcttggctcgtgtgcgcgcttgcacaagtgcgtgtgtgtgcacatgtgtgagtgtgcgtgtgcacagcgcgcagtcagggtgatttcgaggactgccatttgctcgccagcgagacaggatccaggctcagtcctcggaaagtccctggaaatccgtggctgcccctggagccaggggctgggcctgccttagggggcgtgcttctcagaggcaaggaggggctcagcaccaggcccaggccctgccttctgtgtggctgtgtcattcattcagtgtgcgggtggggcgggggtgcatgtggtgtgatgtgtgtggcgcatgtggtgtgatgtgttgtgggtgtggtgtgtggtgcacaggatggtgtgagtgtgtatgtgtggtgcatgggtgtggtgtgtgtgtaagcgtggtgcatgtggtgtggtatgtgtgttgcgtgccagtgtggtgcatgtggtgtgtgtgatgtgtaagcgtggtgcatgtggtgtggtgcgtgtgtggtgtgtcggtgtggtgcatgggtgtgtgtacgtgtgatgtgtaagtgcacagcatgtggtgtatgtgtgtggtgtgtggtgcacaggatggtgcgagtgtgtatggtggtgcatgggtgtgtatgtgtgatgtataagtgcagtgtgtgtggtgtgtgtgtgtggtgtgtgtgtgtgatgtgtaagcgtggtgcatgtggtgtggtgcgtgtgtggtgtcggtgtggtgcatgggtgtgtgtacgtgtgatgtgtaagtgcacagcatgtggtgtgtgtgtgtggtgcatgtggtgtgtgtggtgtgtatgtgtgatgtggtgtggtgtatgtatgtggtgtgtcagtgtggtgcgtgtgtgtgtggtgcacagggtgatgtgagcgtgtgtgtgtggcacatgggtgtggtgtggtgctgtgtgtatatgtattgtgtaagtgcgttgcatgtggtgtggtttgtgtgtgtggtgaacacggtggtgtgtgtatgtgtggtacatggatgtggagtgtgtgtatgtgtaatgtgtgagtgcggtgcatgtggcgtggtgtgtgggtggtgtgtcagtgtggtgcatgtggtatggtgtgtgtgtgtgtggtgtggtgtgtgggacatgcccctgtgccctcctcttgcagagtggacgcggtccttagggagtgccatagaaacatactagcctgagattctccggggcctaaaacaggcctaaaccataaaaaagtgattcccctgttattttctgcagctgtattaaggggacttgaccttgaaaggaattagatagactgagcatttggccttctcttccctagccaggagtctgctgcggggccagtggatggtccatcagaggggattctggccctgaatccgtgggcccggattttcttcaggaaagaggaaggaatggcacagcagctggacggagagcctttgtggggaacaggataggacgctgtcagggaggtgaaattagacggggattgcccaggtgagctggggatggacccttgcgagccaggtctgttatcagaaagtggaaataagaatgagactatccatcctggctaacatggtgaaaccccgtctctattaaaaacacacac

SEQ ID NO: 1562309 - DNA, 4001 bp, Homo sapiens
aagtaaaaaataaaaaataaaaataaatttaaaaacccaaccctgactctgagcactgcataattcctctggagccttctctactaagctaatcagcattgtaccaagaaaacagactcagagcctcaacccgagcaagaaagaatttcattttctttcgtatccagttctgcagaaagcttcccaccacgcactccctgatacacagagaaccaagcacttgattaaaagcaagcaaataaataagtaaatagataaaaagactttaaaacttctagaatgcgggactccaaagctcataagtaatcactgaagccccatcactaaggtaatgtaatctctacattctactctaggacagaatgtgtgatgtcttttcatagtaaccccctggcgtgtcttccccaaccctagggcttcgctaccctctaaataaaacctacagtgcagaccaagcctttcttagcctcccctcagaatttggctagaaaagttaattaaagaaacaatttaggccgagtgtggtggctcacgcctgtaatcccagtgctttgggaggctgaggcaggaggactgcttgagtccaggagttcaagactagcctgggcaacatagcaagactccatctcttaaaaaaaaaaaaattagccaagcatggtggtgtgcacctgtagtcccagctactcagaagggtaaagtgagaggatcacttgagcccaagggtttgaggctgcagtgagccgtgattgtgccactgcgttccagcagaaagaaacattctgaacctgcctcaaatttttacatggccaaacaaaatactgctcctgctccacttggagggataaacattagggccaagtcctcttccagcgccagcccctgcctctgccaccctaacaaataatgccccatttgccaaatggacggggacaaaatggagaggagattttaaaaacaagtaatcttcttttagtgtattaaggtgttatccacaatggggattaaattctcccaacccatgccaacagtggcagggcccccacgggctgaaaggggttcctcgcatcacagcagaagtcaggatcgcctgacacaggtaagcagctcctcctctctagttagccttcctaagtggccagatgtcaagggttaacatctacctaaatacccacgagtgggtagagaccctgattttgaccctagatcctccctcccacaatcagccatggtcatgagagcctcttcttagctttccaagtgagctcttcggggaattccagttctattcaattgacagactgggccctgagtgtttccctctgaaacagtctgctattaatacaggattttaaaaagttaaatagaagcaattatttggcataggcggcagtgacagtgaactcctcagaggacaggagtgaacccccagccccagggaagaactccacagagcccaggtctgcatctgcaggagcgagctccctcgacaacaaccaaccatcccccaacctgcatttttttgacattttttttccccaaaacaagcaaagattatttacataaagcatttgaaaatcaagcaacagaagggtgaactttgtattccaaataaacagcttcctctctgtataagtgacagagtgtttttcggagtggggggctattcacggtaagtcagggtctccacatggaaaggccaaggggggactcacggttggcaggtgagggtttgggtcggggagccctgggcagcagatggaagcaccacggggaggggaaaacaagactgaaggctgaagagcaggctgagcggggaggccttcattcaccttctcggtgctctctccagcctcaacaccttgacctcatgtagtcacatacctatgcaaacagcgcttatctggaaactattcctttgtttagacttggggccaaaaaattccaggcacagttactccagattttgctactgttcaccaacaagagagcccctgagtcttcagatctcactgtgccctttcactttccttttcaattaagcttcctgtacagctgcctcggctccttctcttagaacactctagagaactggaaatcatgtaattacttttgtctccaaagaaactagcaatgcagctgaggaaatgtatacaaaaggtttagatactcgaataattttcactttcatcacattctgtaacacccaaggaaagaactcccaaataaaaggaaggcaaagacccttcagtaatcatctggatttcctagtcagatgtctttccccactctgcaagcgagtctcacctctgtaaatatcctttaagacagtatgaactggatataaaatactatttctactctggaactgggactcaatttaaaaagtaaactccattagagctaaagattatcccaacatctacaacatttaatcctgtttgcccactaattcaaaataaacggctaaagatgtatttttatttatttatttttgagatggagtctcactctgtcccctaagctgaagtgcagtggcacaatcttggctcactgcagcctccgcctcctgggtttaagcaattctcctgccttagcctcctaagtagctgggaatacgagtgtgcagcaccatgcccagctaatttctgtatttttagtagagacagggtttcaccatgttggccaggctggtctcaaactcctgacctgagcctgcctcaggctctcaaagtgctgggattacaggcgggaaccaccgcaccgggcttaaaactgtatttatttattttttgttttttgagacagagtctcactctgttgcccaggctggagtgtggtggcaggatctcggctcaccaaaacctctgcttcctggattcaagcgattctcctgcctcagcctcccgagtagttgggactacaggcacgtgccaccacacctggctaacttttgtatttttagtagagacggggtttcactatgttggccaggctggtcccgaactcctgacctcatgatccacccaccttggcctcccaatttgctgggattataggtgtgagccactgtgcccggccaaagatgtatttttataagaaattctcgcaggggattgagatgaaaagggttggaaacaagatggtggccaaccccaagagctgctgtttatcctcttttgggggaagcctccaccacgtggggctcctgcgtcaacctgactccaaccccgcccccagcaacactctcctcccttttcttgttacatactttaaacaagaaagcctttcagtaatgctgcactgcaaggaggtgttgttaatgcatcacacggtttaatgtggccattctacacagaaagatctgtttgtgaatgtgttgtctttcatcaagtttacactaaaagacaaaatcaagacagttcctttaacatgaagagcagaagggaagtaggtcttctccaggctggcagctagtgcttcctgacagggccaggccacttggccacaccaacctcctacgccccatgctctgtattccgaccaaccgacgaaacctcggggccaccacaggtctttcactctgtttcctccaggccaaagtcgggctgcacctgcaggctggctcggcccagaattccatacaccatcatccagacgaacaggtggcctcgtgggagtcgcattcaggggcagtatctgccctggatctcagaggacggggtctccaatgaggaacctccaccacccgccctaggaaagaccctcattcaaaacaatttcacaacctgttagcattttagcataaattccaggttaatggaatacctggaatttcaaatcatgtaaagcaaagcaaaaaaaaaaaaaaaaaaaaaaaagacaactgagccgagcttcctgtttacagttagctagagtgacaaatgtggacaattttaaatcatggtgcccataccaaacaggcagccccctgagttatggacagagcaggggaccgcccc

SEQ ID NO: 1562310 - DNA, 4001 bp, Homo sapiens
agttaagcagcggcagattatggacatctctgtgaaccatgctaagggcttggactttcctcctgaaggattttgggagaggcatgaccatgcagacagtacgcaggatgctgggaaaggaaaagaggaaaagactcaagaccagaggtgccttgtgagggtttgcaattgtccagagggacaggtgagggcctgctgtagagctgcaatgagacggattcaggaggaactcagtgggcacaactcctaggacctagtaaatgattatgaggggtggggcatggtgacctgcaggatcctggtgggtgggtggtggggtctgtgtcccaaacgacttagggaaaaggatagggatcctctggaaatatcttagattgtggggaaaggcatcaggaagagatggaaaggcagcaagacaaccatgtggttgggagcttaaggagtgtttcagacaggtgacaggtattagaagggcctaatgaactggtggtagtaaagcctccaccagcctgaataagatctctctgaaagagcagagaaagggtacaggatggactcccacgcagaggggaatggagcaaataaagagcatctctcaggagacgtttgagctaagacctgaaggatgagagtcagccaggtgtgcaaagaccagtgcgacagggaggacgaatggccatgggagtgggagaagtgaggacaaagtcctgaggcaaaatggcacatatcagctggcaggagaaaaagcacagaggtcagtgcacgtgcagcatggagaggaagcaggagcctgcaggagaaatcccaggcaagcaggggccaaatcaagccccaaagagaaggtgcgctgtttcccatcagactcaccttggggttttattagagggagtaattctgtgcacacatctcgggtaccaaagaaatttgttttcatcgtcacttcagcttgaatatgaaagggtgtgggatcagcaacttttaggagagaaagagaacatagttaatacattgtacccatggggtaaaattctatacaatgatactaaaaaaaaaaaaaaaaaaaaaaaaaaacttagtgccctctgcctaaagtaagtctgtatctggttacagtattgtgccaatgtcaatctcctggtttgatcatgttctagtatttttgtaagatggcaccattgggggaaggaggatgaagggtgcacacactggatcttggcataaccattttttctttttgcaatttgtcgtttattttaaaatcagttcaaaatccatccagttgccttaaagctcaattcagaaaaactgcagaaaacctgaaaaagatccccaagagtcccagccagggaaacacaaagttccctttggctggaaaactctcactttctccaaggtttctgcactccctgcatctcctagctcctccctctcctccctagggaggcgttatggaccccgcagacgccaggagccccagtgcatcggttcttcttcggggaggccacgtcccctccccatacccttgaaggcgatgcccgcgttgttgaccagcacgtccaggcccccgtactccttgcgcaggaagtcgcgcagggcgcggatgctctgcagatcgtcgatgtccagctggtggaagcgcgggctcaggccctccgcctgcagctgctgtacggccgcctggccccgcgtcacgtcccgcgccgtgagcaccacgtcccccgagaacagccggcacaggtcgcgcacgatggccaagccgatgcccttgttgcctccagtcaccagcgctacatggatgccggacgacatggctgaacggggcgcgcggaacacctgcgtggagaacagacctggctcaggcccgggagccccgcagcgtgttccagagactgctcgagtctggcggtcgtgggcgcgcacccgtgggttacacgcccggccgctgagcgcgcaggcgcaggccccgccctagcggggcggggctgaaccatccctacccctccccaccggaacctcgccggggtgcggagcaggcggagagccagctagcctgactttgcagaacccgcaggccgaagaccgaggctggtctctagctactggctgttggctgcccacgtggcagtgaagaaccattcctagtggccatgtgcctagatctgaactcactgcttgcccttggttctctgaggggttttcttcatattctcccagctgttcaatcattcctagttgtgtttgaagaaatagtacatttgcatggtttttttttctttttttcctggtgttctaaaaaaaaaaatactgcaggaactgcagtctttggagctagagttgcagaagaaactggaaggaaataacagggcatcaagtttttgttgattttccccctaagtatatgaaaacaaagctactgacttagccagattttccaataatggtgggaaacattcactaaatctttataaggttacttctctgggcatttgcagggccatcagtttatctgtgcataggtgtagggggtttcacagccctattttacacggacaataacactctaggatgtaccttttaatccccatcttaaaatgaagaaacagggatccatcctcagaatttataacttagttcagtggtgggaaattgttagagaaatgccaggagtttggtctaggtctggtggttcacagcacagaaagccagtcactgagaccccattattgtcagggaagaaggcattatttgggtgctacagcctaggggggagagatcagtctcaaatccatcttctcaactgattaaaattaggatatagcagggaagaaatgtaactgcatgtgggaaaatagcaggagttagggagagatgaagaggagtgggtcaacaggcatcaggcaattgttgcaggtgaggggtctggtgtctgattttccagatgtggtgatccgataagtttcagttccttggtgctatctgggaggactgatggctagttccctgagaaaggaactcagataagacaaatgtaaatttctcaagtttttagactgggagggtcaatttgtttattcaaaagagaccaggcctggcgcggtggctcacgcctgtaatctcagcactttgggaggctgaggtgggtggatcatgaggtcaggagttcaagaccagcctggccaagatggtgaaaccccatctctactaaaaaaaaaaaaaaaaaaaaaaaatacaaaaattagctgggtgtggtggcaggcgcctgtaatcccagctacttgggaggctgaagcagagaattgcttgcttgaaccccagaggcggaggttgcagcgagccgagatcatgccactgcactccagcctgggcaacagagtgactccctctcaaaaaaaaaaaaaaggaaaaaaaaagagaccataaacatctgtcctatgggacaattgcatggtttcaaagtgagtgttcctccttcctacttacaagggaattgggaataaggtcaagtttcatttctgtgctgtcccataggttgccactatcacaggtggccatttaaacataaattcaaattaagcaaaatttgtaattcagttttttagttgcactagccacatctccagtgctcaatatgtgcatgtgttagtggtcactgtattgggcagtacagatttaggatatttccatccttgcagaaaggtctgttgaacaccactgctttaaatagattgcaattacattgcaatttcaaggtaggtttccaatcagttgctttaaaacaagttaataatcaaggaaagacccttgctttttttcaactgaaatttttgtcgagctaattatagagtcacatgcagttgtaagaaataatacagagattccttaccctttactcagtttcactcaatagtaacatattgcaaaagtatagtacaacatcacagtgaagatattgacaacaaaacagtccaccaatcatactcagatttccccagtttgatgtg

SEQ ID NO: 1562311 - DNA, 4001 bp, Homo sapiens
acctctgcctcctgggttcaagcggttcttgtgcctgagcctcccgagtagctgggattacaggagtgagccaccatgcccagctaatttttgtatttttagtagagttggtgtttcaccatgtttcccgggctggtcttgaactcctgacctcaggttatctgcctgcctcagcctcccaaagtgctgggattacaggcatgagccaccgcgcccagcggaaacgcagattttgattcagcaggtgtggggcaaggcgggagattctgccttgccatgagcgcccaggtttgcagctgctggtggtccattccccataccttgaaaggcaaggggaagtccctccgcctgtcgtccaggaagccgggtatttatccaccaatctctcagcccatggctgagggctgcattagggggtgttaatccccactcctgcaccccagctctcagaaagccggcaggctgagttgcccgtgcgggtcaaagaaagtctcaggtccccatgcacaacaatgcggagtgcctagggccaaagggaggggtggagacttctgctcccccatccttcatttcactccctcttaggctttttttccccactaggttggaggtgaagccggcctgtttatttctccgtagtaacttttttttttttttcatacggagtctcgctctgtctcccagtctggagtgcagtggcgcgatctcggctcactgcctcccaggttcaagcgtttctcctgcctcggcctcccaaagtgctggcattacaggcgtgagccactgcgccctcctgtaattttcttcagtagtagttagaataagcaatctcttgatccccgcccctctccttaaggaagatgcttttaagaccacacgcacgtattttataacaaacataagctccccgggcgggggtgggggaacgagaaggctcgcttcctttttgccagagcctatcaaagctctgcattacacaaattgtcaagtccaccaagggcaagcgcgcgctaatcctgttttagcgattcatttcctttcccgagcaaatgcctccgggcatctatgaatgcgccctttcaaggaaagcgaaagcccaaagcgagcggagaccgtttctttgcagagaaaatgtttctcgcgttggaaggaaagctgatgaactctagcagggcgttgccccctcccaggaggccagttttcctgcacacaacagcggctgacagttcggggagggccccgggccgcgcacaggccctcacaggccggcgggcggggcgcgctgtttgtcgcccgggcccgcctggggctcagcgaatcacggaaagcgaaaaccgcctcgcgggaggcgtgggctgagcgcatccctaggggtcggcgccaccctcctcggtcactcaagtggacgggtggggagcctgcggctggccacctccgcaccctcggagcgctccagggggccccaacccaagccctgcacctactcttgaaggcgacggccgcgttgttgaccagtacgttgagccccccgtactccttgcgcaggaagtcgcgcagggcgcggatgctctgcaagtcgtcgatgtccagttggtggaagcgcgggctcaggccctccgcctgcagctgctgcacggccgcctggccccgcgccacgtcccgcgcggtgagcaccacatccccagagaactgtcggcacagttcgcgcgcgatggccaagccgatgcccctgttggccccggtcaccagcgccacgcggctgcaggacgacatggctgagcggggagcgcggggcacctgcgtggagggcggaccgggcttcggaccacctggggcgcgccccgaggagcccagctagtgtcaatgccgccgcgcagactaagttctgggatccagtgctgcgagtcttaaagaaaaaggccccggctccggtccctcccctccgaggaggggccgtctgtgccctctgttccaactcccgggcccgccccctgcccacgctgcgcccttcaggatccgggctctgagccgcggggtgatctgcgaggtgtccgaagccaaatcggaccttgatgggtcagtcgggggctccagattcttggcaactggactgaagaaattattttgggaaaaccccaaagtgagaaaaacaagtgctgagtaattttcttgggtgtgcgcccatcatgcactgcaaaatgcgaatgtttgctttttcctaagatgcagtgacttacttagacacagtaactgcttctctggacataggttgccttgcttgcttaaaaggaactcaagagagggaactagatgccctgtgagcgcacttagcaggtgtgggcaggcgacatcgctctgggattcccagtgaatgtgcccccaagtgggagggaatgtttttatttaatcctacctaactcctacgggtgctaaaagtgtctgcatttaggtttgtccagggaggatatagatctataaagatctggattgatcatatgttctcacagatctgtgtaccggcaaagaaagttaaaccaaattcccaaaggtgtgtcaagctgtgggcacaaaattagagtctcatccatcgtcttcagtgtaaactgagttgtttgatcagtgactttgagatttggggagaaccatgacatcatcacgactcagccttttccatgcagagctggctaacccgcctgtgtctctgttactctgactctaccttctctctcaagtccttacttgaggttccggaggtgggcccctgctgtgatctcctactgtgcctcccccagtatttccttcttttttctcctaaagatcatttggtccgggcgcggtggctcacacctgtaatcccagcactttgggaggctgaggcgggtggattacgcggtcaggagttcaagaccagcctgaccaacatggtgaaacccccatctctactaaaaatacaaaaattacctgggtgtggtggcacgtgcctgtaatcccagctacttaggaggctgaggcaggagaactgcttgaacccgggaggcggaggttgcagtaaaccgagattgcaccactgcactccaacctgtgcaacagagtgagacttttcaaaaaaaaaaaaaaagatcatttggaaccttgttttaaggatatggggctatttaggctttctatttctgttttttttttttttttttttttttttaatagggtcttctctgtcgcccaggctggagtgcagtgctgcagtcgtggctcactgtagcgtcagtctcctgagctcaggtgatcctcccctttagcctccctagtagctgggactacaagtgtgccacagtcatgcctggataattttttttttttttttttttttgagacggagttttgctctgtcacccaggctggagtgcagtggcacgatcttggctcactgcaacctccgaatcctgggttccaacgattctcctgcctcaggctcctgagtagctgggattacaggcgctgccactacacccagctaatttttgtatttttagtagatacagggtttcaccatgttggccaggctggtctcgaactcctgacctcgtgatccacccgccttggcctcccaaagtgctgggattacaggcgtgagccaccacacccggcctgcctggataattttttattttattttatttttatttgtttttagagatgggagtctcactgtgttgctcagactggttgaactcctgggctacatcgattctccctccttggcctctcaaagtgctggtattacaggcttgtgtcaccgtgcctggcctagttcttcttgagtgaccttaatttctgtttttcataattttatttttttaaataaagcattgatcctgttttatcatttggcaggaaaactagacaatccaccagcccaggaggggacaagcaggcttattcctcctcctcgtcatctctggctccagccccaccctggcccttgctggcattcttcctcttca

SEQ ID NO: 1562312 - DNA, 4001 bp, Homo sapiens
gcgatctcggctcactgcaacctccacctcccgggttcaagcagttctcctgtctcagcctcctgagtaggattacagacgcccgccaccacatccggctaatttttgtatttttagtagagacgaagtttcaccatgttggccaggctggtctcgaactcctgacctcaggtgattcgcccgcctagcctctcaaagtgctgggattataggagtgagccaccccgcccggcctaaaactgctttttttttaaaaagcctattaaaaaagaaaaagttgcggaagccggctgcctttggaagcccttggagtatgctgttcaggtggtctctgcgcacaggccctacccaggcctcagcttggcctcctggacttcccagcctcccctccacctttgcaattcaccagactgggggccaaagcggcttcaaacgaccctggagggtggtgctttcaaggtcttgggaccacggacttgtctgaaaatccgaaggcgttggatcttctcttccccagaaaaatgcacccgctttcagaggttcgtgtcccacgcttttctttctatcccaaccttgtaagaagccgccgccgtgagcggagcagcaccttcctccgcgggtcgcgggagtcacctacgggaagggactctccgtctggcacaggccctgtctggcctggggcgcgcatgctccgccgccgaatcttccagaaagccgtggacccgaggccccggcagacgcaggcggcccagcgccttgcttttggcccctcgcctcgccctggagccctctctcgcaaggtaagggactgccgggaacgcagatcgcaagccgtcggggctctgtagaactcagaggcgctcggcggaaagctcgccaggcgacccagacccgaacccgcgggctccccaagacaacagcgccgggcggccggatgcacgtgcgtcccgggaaggcgggttcagctggcatcgcctggccggttccgttcgctccttaaaccacaagacccccttggggtcacgacgttcccggggcacccctgcactcgcgcgccagcactcccggaggggcctggggaaggccacgcgcacggagagcgggaaactcctctaggtttccaggtgggagatccagaccctactgagacccggaaaccgccggccactccgcctccggaagcgacactttgggacaaagctggggacaagtaagcccagaagatcctcgggaagccgagaatttcgcgctccgctctcccacccacgctccgcctcccgcttgcatcctacagctcagctgcggtctcgcctggggctcagggaagtgaggtcccaggaaaacctccatcccccgaacgcaacctgggcagagccccgcgtccctcccccagcgggcacccacctcgcgtgccgcccgcgcaacgacagcgtttaccgccaccccacacggtccgccaaaaagggcgatttgcaaacagccatttcccatccacaatgcagcgaactcaatgctgggcaccgaaacgtgcatctcccccggattcccaccccgcgtccctgctccacgctccaggactcgccgccagtggggtccactccgccggcgcgggggctggggtgggagcccggggccacgtgcacggccagcccccatcttctgggcggtcaagaccgcaggcgtgggcgccggtggggcgggggtcttgggagaccctgtctcgccgcctttcggtgcagatgatgcaactctgggcggaggcgcggagagggaaaccgggacccagttgagatcctctgtccagagaggggagcgagtctcggtggggccggatctcacctggacggatacatggaaaagaggggcgagcggctgccccgactgcggcgaggcggagacggcgaccccggggtggcggcctcgcggggacccacggcgaggggagcaggcgggcggtgattggcggagaggcgggggcggaggccggcgccggccaatgtctcgtggcagagcacccgcccccccagcccctcctccaccccacccagcccgggcccctcccccccaccccttccccaccccgccgcagcctgggaccctccggcctgcccgacccccgccctccccgggaccccggcatgcccccaccccagtccgcccgccccattcccacgccctgttgattcaaccgcagacccgggtcgccgccccctcccccgccttcctcttcgcctgagcccgcccgccccgggttccagccacccccacccgcggaccccggtggtgtcttctacctggtgttccgatgctgttttacttggttaacttcttgcccttcgggaatttaaggaacctttactgatgagcttgaaacgtgcgtcctggtgggtggggggccctgcgcgtcctcgaggaccgaccccgagggcgtgtgtcgcgggcccgggagggggcgccgcgccggggcgggactcgatggccgcgctctgtggccgccggacgccgtgcgcagcgccccgcgtgaccgcgcccagagccgggtccgaaccccgagccgaggcgcagaacagtcgccttgcgcggctccggtgcggcccacggccaggggctgccgggcgctctcggggacggggccgactccgcgcagggtggtagcaggggcgccccgcggggctccttcgccaggtcccggaggccgcgggcggggccgtttcccaaacatcgtgctctggactttcagaggctgaacctgatccccccgccctatggctaaatgggggatcccaggcccccgagtctccccccggacctgcagcgaaagacacggacggtgcccatcagctctgggcagaggaacgtgctgcgcctccgcagcgtccccggctcaggtcagagcgatgctccgcagcctcctccggcccgcgcagctccgccgcggtctctgccacgtggggctcacagtaggggagggagtgagacgtgaattagaattaaatgtccactggcaggaactgacacgaagaacaataaagccggcgatgtggggaggggacagggatggagttacatcatgaaggctctggaaggtggcattggaggccgggatcgcgccactgtcctccagcctgtgcgactgagcgagactgtctccagaaaaaaaaaaaaaaaaaaaaaaaaaaaaaaaaatcctgtccagtctttataagaagagagacgtggacacagacacgcggagagaaaaaggccatgtggagatggcggcagagatgagatgtgctgccaccagacgagaaatggcagggatggctggcggcctccacagggctgggaaaggtggccagggcctccctcagagccttcagccagcctgcgggagagaaagatgataaacggtgttgtttttgttgttgttgtttgagacagagtctgtgtcacacaggctggagtgcaatggtgagatcttggctcactgcagcctcagcctcccgggttcaagcgattctcctgcctcagccacccgagtagctgggattacaggcacgcaccaccatgccaggctaatttttgtatttttagtagagacggggtttcatcatgttgaccaagctggtctcgaacccctaacatcaggtgatccatccgcctcggcctcccaaaagtgctaggctcacaggagtgagccaccgcgcccagcccaatgtgtgttgttttaaaccactcaagtttgcagtaatttgttacacagcccaaatactttttaattttttagaaattttaacgtaattttagattagaaaagtggcaagaaccatacagaatgtcatattccctcatccagattttccaaatattaattttttttgcttctattatcagaaactcattgttatttcaaatgttaagtttttactacatttgctccctctctgtctctccacacacacacacacacacacacacacacacacacgtgtgcaggtgtgtatgaatctgtcactcag

SEQ ID NO: 1562313 - DNA, 4001 bp, Homo sapiens
gcgatctcggctcactgcaacctccacctcccgggttcaagcagttctcctgtctcagcctcctgagtaggattacagacgcccgccaccacatccggctaatttttgtatttttagtagagacgaagtttcaccatgttggccaggctggtctcgaactcctgacctcaggtgattcgcccgcctagcctctcaaagtgctgggattataggagtgagccaccccgcccggcctaaaactgctttttttttaaaaagcctattaaaaaagaaaaagttgcggaagccggctgcctttggaagcccttggagtatgctgttcaggtggtctctgcgcacaggccctacccaggcctcagcttggcctcctggacttcccagcctcccctccacctttgcaattcaccagactgggggccaaagcggcttcaaacgaccctggagggtggtgctttcaaggtcttgggaccacggacttgtctgaaaatccgaaggcgttggatcttctcttccccagaaaaatgcacccgctttcagaggttcgtgtcccacgcttttctttctatcccaaccttgtaagaagccgccgccgtgagcggagcagcaccttcctccgcgggtcgcgggagtcacctacgggaagggactctccgtctggcacaggccctgtctggcctggggcgcgcatgctccgccgccgaatcttccagaaagccgtggacccgaggccccggcagacgcaggcggcccagcgccttgcttttggcccctcgcctcgccctggagccctctctcgcaaggtaagggactgccgggaacgcagatcgcaagccgtcggggctctgtagaactcagaggcgctcggcggaaagctcgccaggcgacccagacccgaacccgcgggctccccaagacaacagcgccgggcggccggatgcacgtgcgtcccgggaaggcgggttcagctggcatcgcctggccggttccgttcgctccttaaaccacaagacccccttggggtcacgacgttcccggggcacccctgcactcgcgcgccagcactcccggaggggcctggggaaggccacgcgcacggagagcgggaaactcctctaggtttccaggtgggagatccagaccctactgagacccggaaaccgccggccactccgcctccggaagcgacactttgggacaaagctggggacaagtaagcccagaagatcctcgggaagccgagaatttcgcgctccgctctcccacccacgctccgcctcccgcttgcatcctacagctcagctgcggtctcgcctggggctcagggaagtgaggtcccaggaaaacctccatcccccgaacgcaacctgggcagagccccgcgtccctcccccagcgggcacccacctcgcgtgccgcccgcgcaacgacagcgtttaccgccaccccacacggtccgccaaaaagggcgatttgcaaacagccatttcccatccacaatgcagcgaactcaatgctgggcaccgaaacgtgcatctcccccggattcccaccccgcgtccctgctccacgctccaggactcgccgccagtggggtccactccgccggcgcgggggctggggtgggagcccggggccacgtgcacggccagcccccatcttctgggcggtcaagaccgcaggcgtgggcgccggtggggcgggggtcttgggagaccctgtctcgccgcctttcggtgcagatgatgcaactctgggcggaggcgcggagagggaaaccgggacccagttgagatcctctgtccagagaggggagcgagtctcggtggggccggatctcacctggacggatacatggaaaagaggggcgagcggctgccccgactgcggcgaggcggagacggcgaccccggggtggcggcctcgcggggacccacggcgaggggagcaggcgggcggtgattggcggagaggcgggggcggaggccggcgccggccaatgtctcgtggcagagcacccgcccgcccagcccctcctccaccccacccagcccgggcccctcccccccaccccttccccaccccgccgcagcctgggaccctccggcctgcccgacccccgccctccccgggaccccggcatgcccccaccccagtccgcccgccccattcccacgccctgttgattcaaccgcagacccgggtcgccgccccctcccccgccttcctcttcgcctgagcccgcccgccccgggttccagccacccccacccgcggaccccggtggtgtcttctacctggtgttccgatgctgttttacttggttaacttcttgcccttcgggaatttaaggaacctttactgatgagcttgaaacgtgcgtcctggtgggtggggggccctgcgcgtcctcgaggaccgaccccgagggcgtgtgtcgcgggcccgggagggggcgccgcgccggggcgggactcgatggccgcgctctgtggccgccggacgccgtgcgcagcgccccgcgtgaccgcgcccagagccgggtccgaaccccgagccgaggcgcagaacagtcgccttgcgcggctccggtgcggcccacggccaggggctgccgggcgctctcggggacggggccgactccgcgcagggtggtagcaggggcgccccgcggggctccttcgccaggtcccggaggccgcgggcggggccgtttcccaaacatcgtgctctggactttcagaggctgaacctgatccccccgccctatggctaaatgggggatcccaggcccccgagtctccccccggacctgcagcgaaagacacggacggtgcccatcagctctgggcagaggaacgtgctgcgcctccgcagcgtccccggctcaggtcagagcgatgttccgcagcctcctccggcccgcgcagctccgccgcggtctctgccacgtggggctcacagtaggggagggagtgagacgtgaattagaattaaatgtccactggcaggaactgacacgaagaacaataaagccggcgatgtggggaggggacagggatggagttacatcatgaaggctctggaaggtggcattggaggccgggatcgcgccactgtcctccagcctgtgcgactgagcgagactgtctccagaaaaaaaaaaaaaaaaaaaaaaatcctgtccagtctttataagaagagagacgtggacacagacacgcggagagaaaaaggccatgtggagatggcggcagagatgagatgtgctgccaccagacgagaaatggcagggatggctggcggcctccacagggctgggaaaggtggccagggcctccctcagagccttcagccagcctgcgggagagaaagatgataaacggtgttgtttttgttgttgttgtttgagacagagtctgtgtcacacaggctggagtgcaatggtgagatcttggctcactgcagcctcagcctcccgggttcaagcgattctcctgcctcagccacccgagtagctgggattacaggcacgcaccaccatgccaggctaatttttgtatttttagtagagacggggtttcatcatgttgaccaagctggtctcgaacccctaacatcaggtgatccatccgcctcggcctcccaaaagtgctaggctcacaggagtgagccaccgcgcccagcccaatgtgtgttgttttaaaccactcaagtttgcagtaatttgttacacagcccaaatactttttaattttttagaaattttaacgtaattttagattagaaaagtggcaagaaccatacagaatgtcatattccctcatccagattttccaaatattaattttttttgcttctattatcagaaactcattgttatttcaaatgttaagtttttactacatttgctccctctctgtctctccacacacacacacacacacacacacacacacacgtgtgcaggtgtgtatgaatctgtcactcagtctatctggttt

SEQ ID NO: 1562314 - DNA, 4001 bp, Homo sapiens
acgaccctggagggtggtgctttcaaggtcttgggaccacggacttgtctgaaaatccgaaggcgttggatcttctcttccccagaaaaatgcacccgctttcagaggttcgtgtcccacgcttttctttctatcccaaccttgtaagaagccgccgccgtgagcggagcagcaccttcctccgcgggtcgcgggagtcacctacgggaagggactctccgtctggcacaggccctgtctggcctggggcgcgcatgctccgccgccgaatcttccagaaagccgtggacccgaggccccggcagacgcaggcggcccagcgccttgcttttggcccctcgcctcgccctggagccctctctcgcaaggtaagggactgccgggaacgcagatcgcaagccgtcggggctctgtagaactcagaggcgctcggcggaaagctcgccaggcgacccagacccgaacccgcgggctccccaagacaacagcgccgggcggccggatgcacgtgcgtcccgggaaggcgggttcagctggcatcgcctggccggttccgttcgctccttaaaccacaagacccccttggggtcacgacgttcccggggcacccctgcactcgcgcgccagcactcccggaggggcctggggaaggccacgcgcacggagagcgggaaactcctctaggtttccaggtgggagatccagaccctactgagacccggaaaccgccggccactccgcctccggaagcgacactttgggacaaagctggggacaagtaagcccagaagatcctcgggaagccgagaatttcgcgctccgctctcccacccacgctccgcctcccgcttgcatcctacagctcagctgcggtctcgcctggggctcagggaagtgaggtcccaggaaaacctccatcccccgaacgcaacctgggcagagccccgcgtccctcccccagcgggcacccacctcgcgtgccgcccgcgcaacgacagcgtttaccgccaccccacacggtccgccaaaaagggcgatttgcaaacagccatttcccatccacaatgcagcgaactcaatgctgggcaccgaaacgtgcatctcccccggattcccaccccgcgtccctgctccacgctccaggactcgccgccagtggggtccactccgccggcgcgggggctggggtgggagcccggggccacgtgcacggccagcccccatcttctgggcggtcaagaccgcaggcgtgggcgccggtggggcgggggtcttgggagaccctgtctcgccgcctttcggtgcagatgatgcaactctgggcggaggcgcggagagggaaaccgggacccagttgagatcctctgtccagagaggggagcgagtctcggtggggccggatctcacctggacggatacatggaaaagaggggcgagcggctgccccgactgcggcgaggcggagacggcgaccccggggtggcggcctcgcggggacccacggcgaggggagcaggcgggcggtgattggcggagaggcgggggcggaggccggcgccggccaatgtctcgtggcagagcacccgcccccccagcccctcctccaccccacccagcccgggcccctcccccccaccccttccccaccccgccgcagcctgggaccctccggcctgcccgacccccgccctccccgggaccccggcatgcccccaccccagtccgcccgccccattcccacgccctgttgattcaaccgcagacccgggtcgccgccccctcccccgccttcctcttcgcctgagcccgcccgccccgggttccagccacccccacccgcggaccccggtggtgtcttctacctggtgttccgatgctgttttacttggttaacttcttgcccttcgggaatttaaggaacctttactgatgagcttgaaacgtgcgtcctggtgggtggggggccctgcgcgtcctcgaggaccgaccccgagggcgtgtgtcgcgggcccgggagggggcgccgcgccggggcgggactcgatggccgcgctctgtggccgccggacgccgtgcgcagcgccccgcgtgaccgcgcccagagccgggtccgaaccccgagccgaggcgcagaacagtcgccttgcgcggctccggtgcggcccacggccaggggctgccgggcgctctcggggacggggccgactccgcgcagggtggtagcaggggcgccccgcggggctccttcgccaggtcccggaggccgcgggcggggccgtttcccaaacatcgtgctctggactttcagaggctgaacctgatccccccgccctatggctaaatgggggatcccaggcccccgagtctccccccggacctgcagcgaaagacacggacggtgcccatcagctctgggcagaggaacgtgctgcgcctccgcagcgtccccggctcaggtcagagcgatgctccgcagcctcctccggcccgcgcagctccgccgcggtctctgccacgtggggctcacagtaggggagggagtgagacgtgaattagaattaaatgtccactggcaggaactgacacgaagaacaataaagccggcgatgtggggaggggacagggatggagttacatcatgaaggctctggaaggtggcattggaggccgggatcgcgccactgtcctccagcctgtgcgactgagcgagactgtctccagaaaaaaaaaaaaaaaaaaaaaaaaaaaaaaaaatcctgtccagtctttataagaagagagacgtggacacagacacgcggagagaaaaaggccatgtggagatggcggcagagatgagatgtgctgccaccagacgagaaatggcagggatggctggcggcctccacagggctgggaaaggtggccagggcctccctcagagccttcagccagcctgcgggagagaaagatgataaacggtgttgtttttgttgttgttgtttgagacagagtctgtgtcacacaggctggagtgcaatggtgagatcttggctcactgcagcctcagcctcccgggttcaagcgattctcctgcctcagccacccgagtagctgggattacaggcacgcaccaccatgccaggctaatttttgtatttttagtagagacggggtttcatcatgttgaccaagctggtctcgaacccctaacatcaggtgatccatccgcctcggcctcccaaaagtgctaggctcacaggagtgagccaccgcgcccagcccaatgtgtgttgttttaaaccactcaagtttgcagtaatttgttacacagcccaaatactttttaattttttagaaattttaacgtaattttagattagaaaagtggcaagaaccatacagaatgtcatattccctcatccagattttccaaatattaattttttttgcttctattatcagaaactcattgttatttcaaatgttaagtttttactacatttgctccctctctgtctctccacacacacacacacacacacacacacacacacacgtgtgcaggtgtgtatgaatctgtcactcagtctatctggtttctctaacttgttattttgttttgttttgtttctttttgagacagaatctttctctgtcacccacgctggagtgcagtggtgtgatttcagctcactgcaacctcccccccacgctggagtgcagtggtgtgatttcggctcactgcaacctccctctcccgggttcaagcgattcttctgcctcagcctcccaagtagctgggattacgggtgcctgccaccacacctggctattttttgtatttttttttaagtagagacggggtttcaccatgttggacaggctggtctcgaactcgtggcctcaggtgatccacctgcctcggcctcccaaagtgctgggattacaggggtaagccactgcagccagcccactctctagttttaacacttactgatgattttgtctgaattgatttt

SEQ ID NO: 1562315 - DNA, 4001 bp, Homo sapiens
acgaccctggagggtggtgctttcaaggtcttgggaccacggacttgtctgaaaatccgaaggcgttggatcttctcttccccagaaaaatgcacccgctttcagaggttcgtgtcccacgcttttctttctatcccaaccttgtaagaagccgccgccgtgagcggagcagcaccttcctccgcgggtcgcgggagtcacctacgggaagggactctccgtctggcacaggccctgtctggcctggggcgcgcatgctccgccgccgaatcttccagaaagccgtggacccgaggccccggcagacgcaggcggcccagcgccttgcttttggcccctcgcctcgccctggagccctctctcgcaaggtaagggactgccgggaacgcagatcgcaagccgtcggggctctgtagaactcagaggcgctcggcggaaagctcgccaggcgacccagacccgaacccgcgggctccccaagacaacagcgccgggcggccggatgcacgtgcgtcccgggaaggcgggttcagctggcatcgcctggccggttccgttcgctccttaaaccacaagacccccttggggtcacgacgttcccggggcacccctgcactcgcgcgccagcactcccggaggggcctggggaaggccacgcgcacggagagcgggaaactcctctaggtttccaggtgggagatccagaccctactgagacccggaaaccgccggccactccgcctccggaagcgacactttgggacaaagctggggacaagtaagcccagaagatcctcgggaagccgagaatttcgcgctccgctctcccacccacgctccgcctcccgcttgcatcctacagctcagctgcggtctcgcctggggctcagggaagtgaggtcccaggaaaacctccatcccccgaacgcaacctgggcagagccccgcgtccctcccccagcgggcacccacctcgcgtgccgcccgcgcaacgacagcgtttaccgccaccccacacggtccgccaaaaagggcgatttgcaaacagccatttcccatccacaatgcagcgaactcaatgctgggcaccgaaacgtgcatctcccccggattcccaccccgcgtccctgctccacgctccaggactcgccgccagtggggtccactccgccggcgcgggggctggggtgggagcccggggccacgtgcacggccagcccccatcttctgggcggtcaagaccgcaggcgtgggcgccggtggggcgggggtcttgggagaccctgtctcgccgcctttcggtgcagatgatgcaactctgggcggaggcgcggagagggaaaccgggacccagttgagatcctctgtccagagaggggagcgagtctcggtggggccggatctcacctggacggatacatggaaaagaggggcgagcggctgccccgactgcggcgaggcggagacggcgaccccggggtggcggcctcgcggggacccacggcgaggggagcaggcgggcggtgattggcggagaggcgggggcggaggccggcgccggccaatgtctcgtggcagagcacccgcccgcccagcccctcctccaccccacccagcccgggcccctcccccccaccccttccccaccccgccgcagcctgggaccctccggcctgcccgacccccgccctccccgggaccccggcatgcccccaccccagtccgcccgccccattcccacgccctgttgattcaaccgcagacccgggtcgccgccccctcccccgccttcctcttcgcctgagcccgcccgccccgggttccagccacccccacccgcggaccccggtggtgtcttctacctggtgttccgatgctgttttacttggttaacttcttgcccttcgggaatttaaggaacctttactgatgagcttgaaacgtgcgtcctggtgggtggggggccctgcgcgtcctcgaggaccgaccccgagggcgtgtgtcgcgggcccgggagggggcgccgcgccggggcgggactcgatggccgcgctctgtggccgccggacgccgtgcgcagcgccccgcgtgaccgcgcccagagccgggtccgaaccccgagccgaggcgcagaacagtcgccttgcgcggctccggtgcggcccacggccaggggctgccgggcgctctcggggacggggccgactccgcgcagggtggtagcaggggcgccccgcggggctccttcgccaggtcccggaggccgcgggcggggccgtttcccaaacatcgtgctctggactttcagaggctgaacctgatccccccgccctatggctaaatgggggatcccaggcccccgagtctccccccggacctgcagcgaaagacacggacggtgcccatcagctctgggcagaggaacgtgctgcgcctccgcagcgtccccggctcaggtcagagcgatgttccgcagcctcctccggcccgcgcagctccgccgcggtctctgccacgtggggctcacagtaggggagggagtgagacgtgaattagaattaaatgtccactggcaggaactgacacgaagaacaataaagccggcgatgtggggaggggacagggatggagttacatcatgaaggctctggaaggtggcattggaggccgggatcgcgccactgtcctccagcctgtgcgactgagcgagactgtctccagaaaaaaaaaaaaaaaaaaaaaaatcctgtccagtctttataagaagagagacgtggacacagacacgcggagagaaaaaggccatgtggagatggcggcagagatgagatgtgctgccaccagacgagaaatggcagggatggctggcggcctccacagggctgggaaaggtggccagggcctccctcagagccttcagccagcctgcgggagagaaagatgataaacggtgttgtttttgttgttgttgtttgagacagagtctgtgtcacacaggctggagtgcaatggtgagatcttggctcactgcagcctcagcctcccgggttcaagcgattctcctgcctcagccacccgagtagctgggattacaggcacgcaccaccatgccaggctaatttttgtatttttagtagagacggggtttcatcatgttgaccaagctggtctcgaacccctaacatcaggtgatccatccgcctcggcctcccaaaagtgctaggctcacaggagtgagccaccgcgcccagcccaatgtgtgttgttttaaaccactcaagtttgcagtaatttgttacacagcccaaatactttttaattttttagaaattttaacgtaattttagattagaaaagtggcaagaaccatacagaatgtcatattccctcatccagattttccaaatattaattttttttgcttctattatcagaaactcattgttatttcaaatgttaagtttttactacatttgctccctctctgtctctccacacacacacacacacacacacacacacacacgtgtgcaggtgtgtatgaatctgtcactcagtctatctggtttctctaacttgttattttgttttgttttgtttctttttgagacagaatctttctctgtcacccacgctggagtgcagtggtgtgatttcagctcactgcaacctcccccccacgctggagtgcagtggtgtgatttcggctcactgcaacctccctctcccgggttcaagcgattcttctgcctcagcctcccaagtagctgggattacgggtgcctgccaccacacctggctattttttgtatttttttttaagtagagacggggtttcaccatgttggacaggctggtctcgaactcgtggcctcaggtgatccacctgcctcggcctcccaaagtgctgggattacaggggtaagccactgcagccagcccactctctagttttaacacttactgatgattttgtctgaattgatttttattaaaatggt

SEQ ID NO: 1562316 - DNA, 4001 bp, Homo sapiens
tgtgagaaactaccatttgatcagatcccctcattcccatacttaagacccttcaatggtttcccaaccagcttaggataaaatgcaaatcccttttcaaggaaacaaggccctacgtatcccggcccttgtatggctcctcctctgaacttaccattcttcctttctttggtaagcttcagccctacaacctgttgttgttgttgttgttttaaaaaaaaaacaggtcaaaatcattccttcctcagggtctttgtactagttagtccctgagcctggcatttccccctaagtaagaggtcgggggaaacagcccaggctcaggggcttctctcactaagcactgagctaagagttcttccctaaacgtctaagtgttctgtctattcctgatccttcttttacagacatttttacctcctgtcatcctctactatagtgcagtttctttcatcattatttggaattctccttttatttaatcattatttctgccttagaaggacataaactctacgacaaatgggacttttgtctttcactgcagttccttcagtacctatttattgaaagaaatagctcagtgttctgtaaaaaactactagcactggaatgacaaataatgttttgtgatacacgagttttccaaaactgtattagtgaaaaaaacccaaattggaagctattatctcagcctgattttttcaagggaatcagcccatatcattttcaaaagattattccaccaacatttaccttgaaccctgacatttacttactataccgacattatttgaaaagtgcatcctacaaacatgaacctagttctattaaactgttaatgctccccgtacctcgcataaaaccttaaattcaaccacactgatctatttcttgaattaacaaaatctggaggacacacagaggaatgcaatttgaatagcacaagagacaaatttatcaatagtgcagtaagatattttttaaaactatgctaccgaactaacgttcaagaaaaggccattaaacaaaagtgttatctgcacccctctatcacttatcctgcagattacacagaactcaaagacaccacctcttggtccaatctccataatttaaagacgaaggaaacaaaacccaagaaagttacattttagattaagccagctaacataagttgggaccggaactcatttggctacaacgcatggcttctgtcaactaagctgaaagccgtatgtttctcactgggaagcaagcaaccaagacccggccctttttcccactctcttctctggatcggctagttctcgttcttccccatcctacaactcgcgagctatgtgataatcgacgtcgcagttctcaagacaatttcatctacgttattcaatttcaccctcacaacctcctttaagggtgacgggccttagccccatttacggatggaggcaaaacgcacgcgcggcttcacatccgtccaccttcaaggtgtacaatgtcgatcgtgccgccgatccctcggccttctcccggtcgcggaagaagagaagtgcccgcaggctccggtggccgagcccttccaaaatcacctccctttctggaatcttctcttcccccggccgctgagccagggcagcacgctcagcccgttagtaggccctcctacttcgccgcggccgccgcagccctatgctgacgctcccacctcattcctttccttcagcccttactttcgctccctccttgagcatctgggcaaagcccggagccttgggaacgtgaagcgccatggccagcctgcaggaagcagttcacgcgaccgctcggaagaccgcggaggaagcgaggagcacgcacagccttctgggaaagcagcgtggggccgcctcacgctcttcctggctctccaattagcccaccctttccctgccgccaggtctgaagcatcgcgagaagagcaacctctgtggccagaaccaagctgacgatccccgatcgggtcgatcgatagggcgggcccagggagcccctcgggtttctggctcacgcacgcgcagacagcccaggccgtgagaggttgctccagtctgtgctctctgaccgtagtcagtagtcacggcgttagatttttgcggtttttgatctggaagccacacatccttagcttaatttccacgtatcttccagacccagccaccaacgtcagggcaggtgtgctttttttttcccgaggcagagcatctgccccatcccccaaaattgtctctaggcgtccgctctgtgttgggcaccataggaagcgctgggaatgcgcacgataattaaagtcgtcactaagagtaatgtagtacacatcaagtgctcaagtgtgccatattctgtgtgatctgctttacatgcagtatctctgttaatggtcagtcttaaaaattaatgaattgtcggttaaaataccatttagttttccttccataaaatggagacgataccattaaaaattaaaaattaaatggtactgtctctattttgtagaagggaaactgaagttcacaaactgtaaataattttcccaagatcacagagctagtaaatattaaagctagaattcctatctagatcagacttattgcaaaatgccggttcttaaccactatctatattcctcttttctacttcttcctgggaatataaatcccttttactcttttaagatcagatataaatacatatttatttatctgatttatatatataatatacacattttatataaatatatctgatttatatatgaatttatagataaatataaatccctttggcttggtggcatgcacctgtagtctcagctgcttgggaggctaaggttggaggatctgcttgagcctgggaggttgaggcagcagtgagctgagatcatgccactgcactccagcctgggcaagagtgaggccctgtctcaaaaaaaaaaaaaaattgcaaaaatgtaaatgccactgatatggtttggatttttgcaaaaatgtaaatgccactgatatgtttgaattgcctgcccaaatatgatgtggaattataatccccagctgttcttgtgatagtgagtgacttctcataagacctggttgtttaaaagtgtgtggcacctccccactctgtctcttcctcctcctccagccttgtaggatgtgtctgcttccccttcaccttccaccttgattgtcagcttcctgaggcttccccagccatgcttcctgtaccgcctgtggaactgtgagccaattaaacctcttttctttataaattacccagtctcaggtagttctttatagcgattcgagaacggactaatacagccacccttttcattcttggaaaatagagatattttaaataaaaacatacatattatcatgtgataggattattattttttaaataacgttaaaaatttatcagttttaatttctaatatagcaaatattcatacctataacccacataaacaaaagacctttggggaagttaatttttaagagtctaaaggtgttctgagactgatacgttagagaactactgtaatgatcagtcccgaacaacagaacaatccaagatttttcctggattagctaagaaataaacaaaagcacattcctctgactcagagataatattacttataaaaatagctaacacaaaataaaattgaaataaaactgaaaggagctaaaatgacacctgattaacatattaatatatattaatctatatttaaagtgactttgaggcctaggttctggtccttgtctcactggtatcttctccatttggcattaatgtcttgtattctggccccagtacctggaatagttcgtgctgtctgctttaccacttctgcctcagggtctttgcctctgctgttcttcctacctaaaatgctcttctattcccttatggctgaattaattctacctcagtatgcagacactttcattaga

SEQ ID NO: 1562317 - DNA, 4001 bp, Homo sapiens
aaaattagccaagtgtgatggcacatgcctgtagttccagttatgcgggaggcttaagagggaggatcacttgagccccgggtcggggctgcactgagccaagatcaggccactgcactccagcctgggcgacagagtaagaccctgtctcaaaaaaaaaaaaaaaacaaaactatgcttattttcagaaagaaaacttagtttttcttttgaaacataaaatcaaagaactccctatctaaaacataaatgtctactgtccccctccgccttctttctagagcaacttgttacccagtaggaaccaggatcaggatcccaaaacaatgaacgtccagttacaataatctagggaaaatgaatcaaataagaaagcagagccgggcatggtggctcaggcctgtaatcccagcactttgggaggccaaggtgggtggatcacctgaggtcaggagtttgagaccagcctggccaacatggtaaaaccccatctctactaaaaatacaaaaattagccaggtgtggtgatgagcggctgtagtcccagttatttgggaggctgaggcaggagaatagcttgaacctgggagacagaggttgcagtaagtcgagattgcaccactgcactcccacctgggcaacagagcaagactccgtctcaaaaaaaaaaaaaagaaagcagctctcttttgctttcattgttcaccgcaggccctggaaatttagcattctgggctagatgacaaagtagtttagtttgttgacatacgttaattcattcattcatttacttaagagaagggtctggctctgtcacccaggctggagtgcagtggagtgatcgttgcttgcttcaaactcctaggctcaagcgatcctctcacttcaacttcccaagtagctgggcctacagctgcacactgccacgtcccgctactttttcatgtctggctgttgcccaggctggtgtcgaactcctggactcaagcgatcctctcacctcagcctcccaaagcactgggattacaggcgtaagccaccgcgcccagccgacactggttttaagtaaaagaatgaaaactattgcttcaagcagtgttcccggatgtctatctctgccccagtttaccctgacattggtgtccacgccggcagacgccagtctgtggatcctcccagccgtcccatgctggaagtccaggctgtacacgggctccttgttgtgccaggctatttcacaagtgatgactttcatcctcctgagtctcgaaggggaaaaacgtttctcgggcaccgttctacttcttcaagacaggagaaagctgcaaaatgctggtgatggattaaacaacagtgttaacagcagcaaagggttattgagcgctgaataggggccaggagccatttaaaatgcacactgcattgggaaaggatgttaacgttgccatctgacaataacaccttgctagctccacctaaaatgcttcgctgggtcctgacatccacaagtttatgatacgccgctacatccagaaaagcaaaacgaaacacccaggtaaaggctacctaggggccccggccgtctgcacggcctgtccccgcttagtaggggctaggggcgcgccctgagagcccggggaggggcccgccccgggaggagcctcccggaagagggggccaaacggggtaggggaccggggcggcggggcgagaggagaaccccgcctttcccagggaccgggcgctgggcccgggaagctgggactgaggccgccgggaggaggccgcgcggggccgggggtggacggggccccgccgccccaacgcgcgccgctccggagctatcccggggcccaggggcccgccctcggcgagggcctctggcccggaccgacgcgaccaaaagagccgcggagctgcccgggccagggaagccgtacctggagggacccggacagtcagaggcaccgtcacctcccgcgcagcgcgcgccgcttcccgcgcgccgcaggccccgcccccgcatgggcgggacctcatagacgccccgcccctccagcggccctcaggtcccgcccgacgtgggcggtaccccagggaagccccgcccactcatagacgccaaggcgagtcctgctctggccctggggtcggaatcccggccggaatttatgcctgccagacccacgaccgaaggaagaatggattcattattatttattattattatccattacttattccttgttgattcgctcttttagcaaaggtttacagagcctgggctgtgtgttagacagaccctatgctggcgctgggcacttggagggctaacacaaccggttctcttgccccttctgcaaacaaaaactgagatttttgggttttctgtattggcttctagaacattttggagagttcaaagctatgaaattgttcagtacctagcgcaaggttgcttacattttattattatagtagatgcagttataaaccctttttaagaacagactaacattttaaagtgaggctgtaaatcagtcggtaggcagagatagatacctcaggcttttcgaaatgggacgtttccaaatgagacctaatttatctgtgggcttcgcagaaggccaggaaacaagtacctctggatgcgctgcttttactggataaaagaaacacacagggttatctgaggagccaactgctctaggatttttggaaaaaaagaacagacatggattcttatataaataccggctgatgcttttagccagctttatgaaaggtacagaaattgcctacaaatccgtgtctcatgttgatgagaatggctgtatgctccttgaagcctgatttctacaggaagctagaataacataatccggatatgcagtttttagatttttctcttcaggatttacagagcttggactgggaatgactatatactttagataatatggctgttctaaaagtacagattcctggccctactcagccccatgattccgaatatccagcagaggcccgtgctccaggggcttgcattttcataaactccccggtgggtgtgatcatcagtctgttttggaaagctctggattcttcgtgtctctcaaacataaaatttctccaaatttctcataaatgctgttcattcacaaatgaataatctgcccacctcttgaagtgtcacgactctgaactgtggatttaaaagataaaaacacatgctttaagtattaaaagtacatgaaggagttggctttcttggcgaacattttagagatccgacttcagtgccaacttgatgagccaacacgggcaggggatgcggctctagagagaggccctgggctgtcaaatattttctcaaaaaaaaaaaaaaaagtatttgttcaaaacctcaaagtttgcaccacaaatgttggactaaagaattcctgccggtcgcggtagctcacgcctgtaatcccagcactttaggaggccgaggtgggcggatcatgaggtcaggagatcgaggccatcctggctaacatggtgaaaccccatctctacaaaaattacaaaaaattagtcgggcgtggcggcgggcgcctgtagtcccagctactcgggaggctgaggcaagacaatggcgtgaacccgggaagcggggcttgcagtgagccgagatcgtgccactgcactccagcctgggcgagagagcgagactctgtctcaaaaaaaaaaaaaaaaaaaaaaaagggaattcctataacgcaattctaactagattcctcaacaaccactgttgttcagcttgggccccaagcatccattttgagcagaactgcctcaatttaaggggaccaatgttatttggttcctgagaactttttaataatgaaaattgatataaagggactaactcttaactcagcttcgaaaaaaaacttctcaaggcattttaatttccatttgtaagtgtgaacattctaaaatcaaaatctgagccg

SEQ ID NO: 1562318 - DNA, 4001 bp, Homo sapiens
tttgtcctaaagaagacatcactactcaccagtcacttcacaaaattaaatgattgcagctcccatagatattctctacacatctgtgtgtagtaagaaatcagtacaggtctaagctcctaaaggtagtttccaaattagcatcataaattcaataaataggctttgattactatcatcatatcacatcttgttttgcatattcgtacatcaaaataatcatgaccactgacctagaaaaaatactttcttattactactagatgccactaaatctcatgggtcagattacgatgacgaagttgtttgaaatgtcatttcttgctaaaatatatccactttatttttaggtaatgctctaaactttagaaaaggtgatgtatttaaaagtattggaaagtaccttattgaatattttaaggtattaaatataatttatgtggagaattattttgtgagtgtctatttttctgcggtcagtgattatttgagtatcctacatagaaattataaattgttgtactgaaatttaacaaatagaaatatattccatacgttgcaagtatgttcctaataacagccccaaagaggctcttactcttcaataaagatttggtgaatggtcccaagtggcacgaaaaattgatgcaccaattcaaaacttacattgaccaggtagacaatagatccattagaaactattgctacaaaaatgtcaggcttcaggctgctctgttctctggccattgtggtcaaaatatatctttttaagaaattagtcttcaaataataaaagtcacaaatcaatttatagatggttaaatttcaatgtgaattttatgaccaaagacaattgaattattcataaggaaaacataactaattattttaatatcaaataaacatcatcatttatgctaaatcaaatagatcatgttcagttaattagaaattttccagatgtcacctacaagatgcctataaatgcttaataagaaaacctaacaaaagatttggaaaaaattatgtactcatagaacgcaaaatacacctcttcaacaattttttaagctctgtttttactttagatattatttttcctccctttaaaatgttgaggcctaggaacaagagcatatctaaaggatattatttaggtcaatgagtaaaaaacatcttatgttcaaagcatggtctctgcttttcattcagttgcatgaataattctgataaatacaaagacagataagtaattcacaaaatcagatgagtctatataatgaattttttctttgcagctaacttagggaggaaaaggatctaatgtcacagattctgaaaattctgaaaaaagtgtagagtgatcggtaactacacatgtaagaactatattctgaagctgtagaacatcacaaattgctaaggggaagatcagtgacaattaagcttaatatgccaatgtctaaaggtctggcttcacagctgaattacttgctgtcatctgtcatctatttctacatctagtgacacctgttgtataggtgtacaaaagtgaaaagggctatttgtgctttttatgttttaaaaaaacttttcaccctcaaaacacatatatccaacaaatacttattgcaatgtttcaatgagcatagtaagagatttcaataaagtgtagctatgatcagcctttatgtaaggccctaagcacattcaccctaggttgtcgagaatctgtatccttttgaagagaccgtcccaaaaagtaagggagagtaattgcaatataaatcgctcaacgacaggacagtgagagtcaaaaaaagaaaaatcaaagacaacctgggaagcttgccaattttgatcgatttcccatgcactgactcgaccgacttaattgtgcacctactgtgtgccgaacctgcagtcattaccaagtatacctcggcccaactccagctgacttcattttctgggaagtccccaacttggaacgcagtgtgcaaaggaaaggcatctacacgcaatgaccacacttcagttccttgccagtagtcctgctgagaacaaagaccgaatgcccaggcatccggaggcgacccacagcgaactgatctggtcacagaaagcatccgagtgaacacggtgctgggaccaaagtccagtcagagcgacagagggtggcatttctgcggtggctcttctgtctctgggttccctctgcctccgccctaccccacccctttggcaggtgctgagcccggccgtgtggtcaactctctcacaaagaaagtggaaatcactcctgaaaaaggctatgccgctcgtaatgaagcagaggctcgctccgcagctacgtaagcaagcgcttcacaaaaatttaaacttttctgcgtgtgtgttagagaagagagggaggagaacagcacaatcaatttctccccgcctcctcccgggtccttacaccatgcaggtttccaacgccccggagagcctccgcccgagaacaggctgcccgccgcgccccgtggtcccctctccccgctcgttcttcggggagacggcccctgactcaccgctgaccacgcggcggcagaaggctccgtggccgcagagcagcgcggcgcccagcagcagcgagaccacgcggctcatcgcggcgcggtggcagcagcaggtgttgcgtggagcgagggcggcctctgcccagggcgcagcccgcgactctgactctgcagcctccctgcctccctgccgggccctactcccgccgcccgagcccagctgcccgaccccctgcgcgcatcgccttcggccgggacctgccgcctgccgcgcctgtgccgcgcgtggatgtgcggggctggagttcaagacttcgagggtgcgcgtttgggggactgaagttagggggtcccgtgtatgtcctagaggcgaagcagaagccccggcttggaccacaccgttgcgctttgcttctcttccccggcctctgacaagtgagaggctgagccggtgcgccctggtcctggatcacagcagcagcagccgctctgcgctcaggcaccgtcttatatacccacgtcccgaggttccggccccctccctagtaataatttttaactacttcgtctctccagccatgtggagcatcccagcacctcccctaaacacgggagcccctttgaaaacagtccagtcagcagcccgcctcctctggtcccctcctccctgtcccctctttccattcgctagcggactggatactctttgtgtaaaatgtgacagctttgctattaaactctggcaaaaagttggatccgtttagttttctcaaagataaatgtctacggggttgccaagttgtgtggcctttctctttctgtgctaaattgcttaatcatatgtattgctagatgcagggcactagccactatttaagatggattggtgaagtgagagccaaaacctgctcagtgaattatataatgtggcaggtttgtccccacctaggttctgcaaatagattatctccaagcaggttgtttgacgaaaactgccacaagagcaaattgaaaggaatatttgaagcatggttttcgaaactgatttcactctcagtgtttgcaactccagagaaaaccgtcaacacaaagtaggcattctgaattcttgggaatttcctggaggtaaaatgaaatgtatgtatttctttgcaatcatctatcagtgatctacgatatacattagaagtaaagctcattggaaaacctgcatttttcataacctgacctgctctctttattaaaacagtctacccaaggactgtgatacctagtttccaggaatactggagagaagttcttaagaatttaatgtatatcaagtccatagtatgaactctgaaaatgttctcataatgagcttcagtagaattggtattttctcattatgttgctttaaatgcatgagaatttgttaaataacattacttgtcttatagg

SEQ ID NO: 1562319 - DNA, 4001 bp, Homo sapiens
tatggaaatgcctggatgcccgggcagaagtttgctgcaggggcagagtgctcatggagaacctctgctagggcagtacagaagggaaatgtggggtcagagctccaacacagagtccctatgggggcaccacctagtgcagctgtgagaagagggccatcatcctccagaccccagaatggtagatccactgacagcttgcactgcgcacctgtaaaagccgcagacactcaacaccagcccatgaaggcagccaggagcgggactttaccctgcaaagccacaggggcagagctgcccaaggggatgggagcccacctctcacatcagcatgacctgggtgtgaggcatggagttaaaggagatcattttggggccttaagatttgactgccctgctggatttctgatttgcacggggcctgtagccccttcgttttggtcaatttcacccatttggaatggctgcatttacccaattcctgtaccgccattgtatctaggaagtaactaacctgcttttgattttacaggctcgtaggcagaagtgacttgccttaccgcagataagacttaggactgtagacttctgagttaatgctgaaatgagttaagcctttgggggactgttgggaaggcatgattggttttaaaatgtgaggacatgagatttgggaggggctggggtagaatgatatgctttgtctgtgtccccacccatatctcatcttaaattgcaactcccacaattcccatgtgtcctaggaggaacccggggggaagtgattaaattatgggggcagttctgaatctcaagacatttgatgtttttaaaaatgggagtttccctacacaagctctttctttgcctgctgccatccatgtaagacatgacttgctccttcttgccttccaccatgattgtgagcccctcaaccccccgccatgtgaaactgtaagtccattaaatctctttcttttgtaaattggccagtctcacacatgtctttatcagcagtgtgaaaacggactaatacagtataataactactttacagatggaaaattgtggcacagaaaagttaggtaattcacccaaggtcagagagcaagtaaacagtaaaaaataaaatatatgaaataaaatatttcaacccctcatcaaacttgaaaacccccctcacccccagtttctctttgccataccccaccagtatcagcctcttcatctgcctaacaccttccttatcctcaggatatctatttaaacctgtcttgtttcaggagccatttatgactccacagacttcacaaggtttacctactaaaactttcatgagatcttttatttcccatatagtagcacatttattataactacttgtctaattgttcatcacctcctttagagtttagcttcaagaacggcagaactacacacacacacacatacacacacacacacgcatatcagagagagacaacagaagacttcatttttacactgttaacaaaaagataaaacatgcagtgtgctaaatatcattcatttacctcctgtagatctactctttactcttctctgtgtcccagcagatagacatttgtgaaccacatcaatggtcacctttcttctctggcttctgttgggtttggccaatagaaggcactgccaggtaatcagatggcaagagaagagtgaggtcagggtgtgtccttccctgggttgtctgcatccctctacagatggccccaccttgggtagggcatgaatctcttccaagtgtcccctccagagtctggtacactccttccaccttcttgttactctctgtggtcgctagccccaggttattttactgctgtgttcttcagggtttttcagagaaacagaacaaatagtataaggatatagatataaatacgtgagaggggacttaccagggaattggctcactcaattatggaggctgagaagtcccacgatctgccatcttcaagctggagaaccaggaaagccagtgaagtagctcagtctgagtccaaaggcctgagagcctgggcaggattcctggtgcaagtctcagagtcccaagaccagagaacctggggtcctgatgtcctatggcaggaaaagaaagttgtttcagctccagaagagagagagtgaatctgattttcttctgcctttttgttctatctgggccctcagctgattggatggtgctcgctcacattcagtgagagtggatcttccttacgtagtctgctggctcaaatgtcaatcttttccaaaatcgccctcatagacccagaaataatgctttaccggctctctggatattacttaatgcagtcaagtgtacacctaaaattagcctttacactgtcccttgttgagtctccttaaccctttcctcacctttgaaaataatcccttcatcaaactcccctccattagcccattggaatatttgctatacctttcttgctgggactctgacttatacacaggaaacctaataagaaatgtgcaaaatgtatgtgaagaaactatgtaacactagtaatgaacaacaacaacaaaaataggtatgaacgaataaaaaaagcataccatgtttctgaataggaaaaatcaacatgataaagctggaaacctccattaattcataactttaaattgattctagtaaaaatactagcaataatttgaactactgaagctaatcttaaagtttctataaaaatatgagcaaaaataattttaaaaaatctaaaaaaaaaacagtaacaaggaggaagtagctctacaagtcataaaatatattataaagctacaacattaagaaaatacagtgcctgttcaaaaatagataaataattcactgggatagaaaagaaagcccaaatatagacctaaatatataaaataatttttagtatatcatgtgatgttgttttcaatcagttgaaaaaaagatgaatttgtaataaatgacttggagacaatctggatataaactggaaaaaaataaggttctttttcttaatctcggttaatctgggctcccttgccactttcctctgaggttgcatttaagttctggggctatttgcggtatccaagcatcagaaggagaccatctggctctgtgtgtaatctgagcctggggacacacactggtatacccattgcctcctctgaaggagacatgcctcatccctgtctgcatggctccttcaggtccaacacaatctctgctgcttctgggagactactggcgattaagactcactctacattcataccatgctgggggtacagaacatctgtatgattgtctaaggtgtaccaggtacctagacatgccatgcggtcatttattgccaaatatgacacttaaggagaatggttaagcgttcttaatagtcctatataccggaatgtatatctctaatgactgaagcattgttaggttataggcttataagctcaaagacaggcagcacagcgggtaagtcaagattcatccaggcgacagaggcagatgggatcttctcatctctccagtgttattcctagggagcaaggcacagatcactttactcacaaatttcacaaattcatctgaatttttctctctgcctggaaaagctttaacctcctcaaaacctcagctctggctttttattctctttgaggcttagcattctggaaaagaaaagcctgagaaagaatggaaacatatatgttttcaccaaaccttcatgctccacattcctctataggaaatgaccacaaacagcacagcttcttgaagagaggaaagggaaaaaggatgaaggcaaatatcaggacagaaaaagttgagatttcaaaaatctataaagtaccatatttaccacgtaaaaagatcacttaaacagacattttatgtcacaacaaaaccaactagagaatcaactggtccacttgataataatacataagcatatcca

SEQ ID NO: 1562320 - DNA, 4001 bp, Homo sapiens
aaaatacacctcttcaacaattttttaagctctgtttttactttagatattatttttcctccctttaaaatgttgaggcctaggaacaagagcatatctaaaggatattatttaggtcaatgagtaaaaaacatcttatgttcaaagcatggtctctgcttttcattcagttgcatgaataattctgataaatacaaagacagataagtaattcacaaaatcagatgagtctatataatgaattttttctttgcagctaacttagggaggaaaaggatctaatgtcacagattctgaaaattctgaaaaaagtgtagagtgatcggtaactacacatgtaagaactatattctgaagctgtagaacatcacaaattgctaaggggaagatcagtgacaattaagcttaatatgccaatgtctaaaggtctggcttcacagctgaattacttgctgtcatctgtcatctatttctacatctagtgacacctgttgtataggtgtacaaaagtgaaaagggctatttgtgctttttatgttttaaaaaaacttttcaccctcaaaacacatatatccaacaaatacttattgcaatgtttcaatgagcatagtaagagatttcaataaagtgtagctatgatcagcctttatgtaaggccctaagcacattcaccctaggttgtcgagaatctgtatccttttgaagagaccgtcccaaaaagtaagggagagtaattgcaatataaatcgctcaacgacaggacagtgagagtcaaaaaaagaaaaatcaaagacaacctgggaagcttgccaattttgatcgatttcccatgcactgactcgaccgacttaattgtgcacctactgtgtgccgaacctgcagtcattaccaagtatacctcggcccaactccagctgacttcattttctgggaagtccccaacttggaacgcagtgtgcaaaggaaaggcatctacacgcaatgaccacacttcagttccttgccagtagtcctgctgagaacaaagaccgaatgcccaggcatccggaggcgacccacagcgaactgatctggtcacagaaagcatccgagtgaacacggtgctgggaccaaagtccagtcagagcgacagagggtggcatttctgcggtggctcttctgtctctgggttccctctgcctccgccctaccccacccctttggcaggtgctgagcccggccgtgtggtcaactctctcacaaagaaagtggaaatcactcctgaaaaaggctatgccgctcgtaatgaagcagaggctcgctccgcagctacgtaagcaagcgcttcacaaaaatttaaacttttctgcgtgtgtgttagagaagagagggaggagaacagcacaatcaatttctccccgcctcctcccgggtccttacaccatgcaggtttccaacgccccggagagcctccgcccgagaacaggctgcccgccgcgccccgtggtcccctctccccgctcgttcttcggggagacggcccctgactcaccgctgaccacgcggcggcagaaggctccgtggccgcagagcagcgcggcgcccagcagcagcgagaccacgcggctcatcgcggcgcggtggcagcagcaggtgttgcgtggagcgagggcggcctctgcccagggcgcagcccgcgactctgactctgcagcctccctgcctccctgccgggccctactcccgccgcccgagcccagctgcccgaccccctgcgcgcatcgccttcggccgggacctgccgcctgccgcgcctgtgccgcgcgtggatgtgcggggctggagttcaagacttcgagggtgcgcgtttgggggactgaagttagggggtcccgtgtatgtcctagaggcgaagcagaagccccggcttggaccacaccgttgcgctttgcttctcttccccggcctctgacaagtgagaggctgagccggtgcgccctggtcctggatcacagcagcagcagccgctctgcgctcaggcaccgtcttatatacccacgtcccgaggttccggccccctccctagtaataatttttaactacttcgtctctccagccatgtggagcatcccagcacctcccctaaacacgggagcccctttgaaaacagtccagtcagcagcccgcctcctctggtcccctcctccctgtcccctctttccattcgctagcggactggatactctttgtgtaaaatgtgacagctttgctattaaactctggcaaaaagttggatccgtttagttttctcaaagataaatgtctacggggttgccaagttgtgtggcctttctctttctgtgctaaattgcttaatcatatgtattgctagatgcagggcactagccactatttaagatggattggtgaagtgagagccaaaacctgctcagtgaattatataatgtggcaggtttgtccccacctaggttctgcaaatagattatctccaagcaggttgtttgacgaaaactgccacaagagcaaattgaaaggaatatttgaagcatggttttcgaaactgatttcactctcagtgtttgcaactccagagaaaaccgtcaacacaaagtaggcattctgaattcttgggaatttcctggaggtaaaatgaaatgtatgtatttctttgcaatcatctatcagtgatctacgatatacattagaagtaaagctcattggaaaacctgcatttttcataacctgacctgctctctttattaaaacagtctacccaaggactgtgatacctagtttccaggaatactggagagaagttcttaagaatttaatgtatatcaagtccatagtatgaactctgaaaatgttctcataatgagcttcagtagaattggtattttctcattatgttgctttaaatgcatgagaatttgttaaataacattacttgtcttataggaagtacactttcctctaacttcctcctgtctttggtttcataagccacgggtacactgtaagcatctgttggactgttttattggaaaaaggaagtaaatactgatacaataaggacaaatcttccagaatcagaaattttagcacttggaaagaccttaaagattattaaatgcaccctactcgtgacagtagaattctagctccgtctggagtcccagctattccagaggctgaggtaggagtttgacgctgcagtgagctacaatccagccactgcattccagttttggggacatgcaaaatcctgtctcaaaaaaaaaaaaaatagaattctaaaataactacaataatgtctattctatcacttcctttttcttatattccctttaaaaacactaattcattgcagaatcatgggcagttaataaatttgcaccttgtagaggctatggattctgtgactttcacactagctaattattcacgagaaacagacactgctgggattctgaatgaaaaatggaaaactgatacgcctccaggcaacagagctatagctcagccccggaaaccatgtcaaagagcatcactgggcatagccatggtaggagagctgtcctccaggggctcagagtccagtgtagagaaagaaataaaataataactctgtgtataaatgctgtaatggaaggatgaatcaagtgtcatggctagcatagataagaaattcatttggaggcatatttgcaggaattctttagcagcagtcaaggttgatggtggtgatacccatggcttctccaaatacctgtagaactagggttctgaaggggatctcctttcccctttcatgccaccctactctcagttactcatgcccagagctactgtaaacaggtccttctttgggaaagaataccagtaaattacaacataagcactagatagatattcctatatatcagtaggcccaaatgtctctcatgcctacaaagctagcaagaatgaaggcattttttgtcaggaaggatcttcatggt

SEQ ID NO: 1562321 - DNA, 4001 bp, Homo sapiens
aagggctcaagggaactttctggtgtgttcaaaaatgttttatatcttgttttgattggtggttaccaaagtagatacaattctgaaagattgttgaactgaacccccggtagctgtgtattttatttatgttacttatacctaaattaatttttttaagtaagaaataaaaattccttagaggaggaaatgtggtagaataatttcccaccacagagaaccatcttttccatttatcctaaatgacaaagctttgattgaattattttacatccctgttacatttctctaggatccaggccatgaaagtccttaaagctatcaaaccagtttccaatgcttccttccctccaccccaccctgtcccctgcatctttagatactggcagagatgattttaagaaacaaaattgcatttagcagtaaaaatcaaactgaaaaacagacacacttgtctctccctaagaataaaaatggatagagccacctcactgcattatcttcttaaagaattctcctctattctctttttatggaattgaagtttctacttttgcaaatgaatcctgattaccaacgccggtcatgctgtttgctgtctcatctgccgtcatgcagtgtgcaggaccccttggtttactcctggcttctctcttggttctatcggctctaacttaccctgaggcttaggggtgccaaactgtgatactcagcaaatgatagctaataacatgaattgagcccttcctacatgccaggttctatcctatatcatttacttatattagctgaattgtatctccacaattctcctaagaggtaggaccatcattattcccattttacagatgaggaaacagaggcacaggagggtgaagtaacttctatcgagtatgtgtcagggttagggttttgactctagatagcttatctcagaatccatgtctttgtcgcaatgtcatgcaacctcactaatgctttagccaaagggaacaaaaaaaaccacaagcaagtgccactgctgtgcactgtgtctgataatgaagacagtcttggcaataggtacagtgctcgcatgaaacatggacaatgtttatcagcataagtaggcactcacaaatgtagttctgatttcatagaagcttatggtgttgaattttattacattgcagctgttgatgtcattcctctggatttatacctggtttcactgaactacctagaggaagaagccttcttgcttttggggcataaataagagcatcacccgccttccagggagatgagctcatagaccctgtatacgacctctttagagtttgttaatggagactgtaacgacatttctgcagtgactcccgaagaccctcgcaccatccagaaacgcattgaattttatcttttctttggaaatcgatcttgctattaatctacttgaaggcaaagtctgtgtaacccaaaattatcccatttccatgtactcagtaattaaaaaccaaccaaccatcccctcttaacaaagtgaggtaagaatagaagtatgttttgctgacattctctcaagcccagatatataaacctgcctagattctaggcagtcagggtcacttaaaacaagctggtgaactaatcattgacacccaatctactcattacaacacatagaagtttctctctctttccttacttccatctttctttctttccttgaactccttgcccaccctacacctaactcacctgcctgctctaattatttaaccttccatggttggcagaaactcaagccttgaaataaaactaagccgagatgtaatttacaagttgtgagtgccactcaccgtgctgctgtgtcctcagccaagtccagtgctatatctgaaagttcttccggagctcctcttgaacatcttactccctctcttggcaggtgcctggctcgtgacttctgcctggctgggctgcctgcctctctcagcttttcccagcttgccctccccaccaatcagaccccctgctttagctgggcctcagggtgctcgtccttcctggactcccggcgggtgcccagcccgcgcctgcatcagatatctctcaggccttccccagatcccaggcctgtggcacacctagtttcagctatcaacactgccctctcagtacgtgccattcctactctgtccactctgaaaagggaccagtgtctctctcggtctccactcacagagtccctattctctcaacaaaaggccaatcaaataccaagatggtttcactgacgtctagcccagctcaaatgaccggttttcttaggcctcattgttgctggcgactgctggtgcctcttggtgttcaaattcagaagaaagcccggactgagagtggcattaggagacaggaaaatctctagagggaaagcaagggcttgaagaggggcccatggaagagacatgcatggcaggagggtcagtgtggaggccccagttgcacgccccagttggacagaaaagaacagggaagtggtgaatgatgggtgaatccacccaggcggccaagagagatatacacagatggtgggtgtggtggctcacgcctgtaatccctgcactttgggaggccgaggcgggcagatcacttgaggtcaggagttcaagaccagcctggccaacatgacgaaccccatccctactgaaaatacaaaaaattagctgggcgtggtggtgcacgcctgtaatcccagctactagagaggctgagggtggagaattgattgagcctgggagatggaggttccagtgagccgagatcatgccactgcactccagcctggcgacagagggagactttgccttaaaaaaaaaaaagaaaagaaaaaaaagaaagagagacacacaggaaatgacttattaagcaaaggggaagtccaaggaaagacaagaatattctttaaaaagaaagtgagatagtggaacttgaagaggaggactgaaactgttttgttgtgtaggaaaggtgaaggaaaaagaaatgtcttccctctgtgtgttttctgcccctgtaatttttctaagcttgtccgcctccatttccccacaggggcctggggaatggacaggttagctgtcttgctcactggaggagcccacattattctagagctggacctaaagcaccccgtgctcacccttgttcattgtttgttcttccctggcaaagtctatcttctgattcaagtttaatcaacaatatcatatgtactggggcttctggtgtctcagcctctgtcctaagcaccagggcaattcagcatggtgaaccaggaagcaaaccagacttggagatgggcgggctggggttatttgttgttgctgtttttattgagccagggtttgagtctcagctctgttacttactacttgtgtagtcttggatgagcaccacatgctctctgagtttttgttttgattattaaattgcggttaggaatactggcagaatcaagtagtagaagaggtgttaagtacctagcacagcactcttcactcactgattataaatgcccccaatgccccctgtttcctgcatccatgcccttgcaatgtgacatggcagacctcccatcagaaggcagggctaatgctccatctgatctgggcttgaccatatgacttactttggccaatgagacattagaaaatgtgacacaagcagggatctgaatggtgcaggcactggggcttgccttctcctgcagctaagaatcctttacacaccatggaacaagtgaaagctagcttcctgggggatgagagaccatgtggagagaggctccaaccatccagacttccacctgagttccagacattaaagagaggccatcctagaccacccagccctaacagagctgacttagacccgaattgattacctagctcacagaatcatgagatgcaatagatgtttattattttaagtcattcagtttggaggtctttggcttt

SEQ ID NO: 1562322 - DNA, 4001 bp, Homo sapiens
tgttgtaagcagtggatggacatgaggtgacttgggttttaaaaggccactatggtgactctgtagcaagctgattggaggtgggcaagagtagaaggtattttcacagtccaagtgagatatcagttccttaaacaaggacagtggctgtggagggggagaggagtggactgattccacatacactttgcaggtagaattgacaggctttgctaatgggttggatgttagagttgagaaaagaggagaaaccaaggataacttccaggtttctggtttaagccagtggtggtgccaattccagagagaggacttgatgtggacgggctggtggggagaacatggaagtcaacagtaagagttcttcatcttctgcaggatacctcctacctttccgtcagtcagtttatcaatcgggtacttgttgagggcttatcatgtattaagctctgtgcatttaccttgacatatttttaaagatgatttgaaatgacttctaataaaactcacaggtacaagaaaactactgaaaaggtgcataggtgaaagaacaagagccaagtaacaaaaggatgaaaagaatcatatctaagtcctaatcctaaaagagactgctgcaactacaagcaaaaaaccttaactctgagttccccaggaaccaaagcaaaaagggaaagttgagttttataaagccgattgtctaataaaaagaagcatgctggcttactcagagaaataaaatttcgcccttattttcaacttcgaaagcatttttcttactacctaccttctgtaagggccaatgatcaatatagtggaattgttatattgtcaataacaattttacacaaaatacaaaagatttctgtataaaacctaaaaaactggtgtcccaaatgcccggtagaatggactatcaagggcactggccaggggcacaggtctgtagcaagggaatactttggcttgtgtcttactgtcttaggttttaatagtgtctttgtgacgagtaccttgctacccactgacttaattacagtttcttttgtcttagaatgtaaatttcttttgttacccccccccaatcatgtgtgtgcatgtatgtgtgggtgtgtgtgaaccactggagttggctgtagactttcttttacttttgcagccagagtctccctctgtcgcccaggctggagtgcagtggtgtgatctccgctcactgcatcctttgcttcccaggttcaagggattctcctgcctcagcctcccaagtagctgtgattacaggcactcacgcaccaccaccatgtccggctaatttttgtatttttagtagagacggggtttcaccatcttggtcaggctggtcttgaactactgacctcatgatccgcccgcctcgacctcctaaagtgctgggattacaggcgtgagccaccgctcctggccggcaatagactttctaaaacatttaaataaacttcgcaccccttctcacgctgcccggaaaattctgacttccctcaccttgggagagcaaggctcatatagcagacgttgcagaccttgtttaggtcacacttaagataaaggaagatgcaaactcctttttttctgatcagctgatcccctgtgactgacggccggggagcccctatggcaccagtctgtaggctacagcctgagccagattccatgctaaaagtcccgaggctggcagtgaaagaaaccccccggggctggaaactcacccctcctgggcggctgcacaccagctcatggccgctctggggtctgtgagggcccggcgcccgttctccccagggagccgcgtgactctccttgatccggcctcccctcgagcgacaggcctcccagaggccccccagcagcccccgagcagtccccggagcgctgggggactctgcagcgcgcaggtgaccacgcagagacagccccagcgcgatgaataattgaggcgcagagtggaattacctctgtgggctccgagtccctcccgcagcccgcacctgcccctgcccctgtccctgcctctgccccaaggactactgctcttttcagaaatgacgccagtaccagcacgtgcaaaatgccttgcagccttgctgggaacacatttgcatactcagtttcaggtttaaatgcctgcgcataaaacaggattaaatagcacaacctggcgggggcaggggggagcacaagggtctcccttccacctggccggaggtgggtgaaaatcccagcagatttcaacaacccgcctcccaccctacaccgcaagtaggtgcgcggagggactcaactgctggggcaggggctgccctctggggtagagggacccccagtttccaaagtgagggctcagagagcacccaacttctccgttctctccttttttcattcatttttcctccaacagatatttattgaacacctactatgtgccagcactgtgaagggggacagtagggtctatagcagtgaacaaaaaatgtccctgctctttgagttgggggagacagacaattagaaaaagattcaaagaaataacatagttcccgtatgaagataagagcaacgaccagggagaggcaaacaaaagagagtgatagggaagtttctcaggatgttcaggagggcctttctgtcctgctgtgcttagattctgcctataacttaataagtatgttatcatttgatagtaatacttaccaaacacttctcatgttctgggcactataataagtgctttagcactttggctttacataatcgttgtaactacctaatgacatggatctctaattgtgcccattttacaaaagagtacaattgaggcaatgggtcctgaggccagtagctgaagaatggcggagctgcgacttgaacccaggcatctagttctaggaccccactctgaaatactgcactgtaatttacatatattcatttcccctcgtttccaaatgtgggacacggccaaaagcaagcaaatatgcataaggagcttctgacacgtaaacagccacccccatactgtggcatttctcctgttcttgcctacagttctagttgattcctaaagtgggagagagcgtgcatgatgatagggactgtttacttagcaaagaaactgagtcagctcaggatccccaaggctgcagccagggaagcctgtgtcatggattcaaccgtctgtgctgagccgcacctgcactggctgaattgctagcagccgggtttcaatttggggacccaatgggtgacacccaggaacccagaagccacaccagcccttggctccctccaacccaggtttccattaccatggtgctgcctgccagcttggcaggatcacactacaccttgggcaggtccttgccctgggccccctctgctgccatccatccctctccctgaaaaaggtggtgggaaggacaatggccttttcttggctgaggagtgccagggaaccaagcctctcagtacagaaggagggagcagccgaggctgtctgacatccagaccccatcacagggtaggcctgctggattgtgggtgtcttacatttgctcatcctccaagactagaacaaagttctcccaggcctcagacagtcatccctgcctgcagctattgactgtttgcataggaggggatggagttgggatttaggaaggagaggcaaatttgaggctggggagaatttgaattttcctgtgcactaaccacaggcatcccctcctccagagcacactcactctcagacgcccagggagctaagcaaaatttctctgtattttatccaaatatgccgtggactttgaaatgaactctttacacctccttcctgctgacccgactgcaaatcagcttttgatgggattggacagcttggagagatgggcagcgatcacgctgaaatatgatgacaggggcaagactgcaaggacatccgcgaagtaagacatgtgcacagagcaacc

SEQ ID NO: 1562323 - DNA, 4001 bp, Homo sapiens
acatattccattttattgatctttacctaaaaactaaaaactaactggaaaacaggaaatatttaatagtgacattttcatagcaccaaaggaagaatctacgtgtcttcctttttatagatttttctgtagatgtcttaagaagcattgaaccctttatacagatgggtaaataaaacacagtaagcttgagatatgcaaatcagattggagccagataaggatgggggctggcgctggcttcaattctgactaatcttgggcaagctgctcagcctattactcactgtctacacaggaatgactgtctacataggaatagctcctctgcagagacatctagaagatgctgagataatatatgtaaaaactgacaagccctttgggacagataccagcaaatgcaaggcgtatgctatggaagttttatcatcctaacagataagcccgtccccaactccagtgagtgactgagagacacgggcatgaacgctgagctcagatgacagcatcttttcacagcagacctgggcccagcccctggaagcacacgatgatgaactgtcctctggtttcccaagacttcaaaaatgaaacccagtgatcaagagatgtttggctttgaacactgcgggaattaaagccagcacccagttaaagccagtgaggacagcactccaaggtttggggacggtctcaggacactaatcctggttccttttctattttgcctgggtccctcctgcccatcctgggaagccgtggcagctgttggggatgtggggccccaggtaactgaaggattaactcacgtctcaaattgcatggcatttctcctcttcagcaccattttttaccctcattgagagagatctatcacttccccccctctcctgccatgccaatatgtgtctgtgttggagggcaggggtgtatttagggagcaggagaatgttcccaagtctggaaactcggaacagtctgcctggccctctttgcagaaaaacgagggagtcccagcagacagaagggggcagtggcgctgagctccccgagctgagctgtggcctcaaaacactgaacagattcagtccttcctcccaaacaggcctggtaagcgatgaaaagagttctgcccaaacactcaggaactggattattgtcgttcctggctcattaggagcctggctgccctcatgccagctgcgtggggtcctctggaggccacccagaccagcctgcagcttcctttcctgtaggggccagcacggtcccttcctctggagaacgctcggacccctggctgcatgcacatctaaccggcagggcctaagggcttccaaaacagatgactgtcaaccccagcccgcccaccccacatccacagcttcaccccaaactcacatgcagaaaacctcgagtctcatcttcctgttcaggtcccttgccagccggagccgctctggagcctggctggactccagctcccatgtgcaagaggactcagccgggacgctgccaccctcctgccttccctcttctgccaaccagacgcttccaggacggagtatttgagagaaaattgtctagacaattacagtgttccttagaatggcctgcgtgggcacacgtgccacttggttagctagcatgagaggaggtggcttggccagagcagacattcaagaccaaccagaaatgtcatttctgcactgtggaaaaaaaatgcacgatacacctgaacctgggcatctccttcctaacacgcgctcaggatcaagcctccccttcccagcctggcagggttgcagggcgtccatagtccagcctacgcctgcccaggctctcggctccgggtccattggctgttcacactcacttccctgtgtcctggaactgcctgattgttgtagattactaaaaatccacagctcattccctcctgcgccctgaccacctgcccacagcgactgtgtcctcctctgagccaccacctggcggttgtcctcacactgctttggacttttctgctattgagtaactcagcttctcagcctttaggctgctatgggccctagatgcatgctggtcgattctgatcaacgagcaactgcttttgtttgtttgcttttttctacagctgcagctgtgggtgattcggatggtctgttggtggaatgtggagctggacgggtcaaggagcacagtgtggaaagagggacaatttgctacaagttggagataagagacatggcatactgtgaaaccagtgctgacggaagaaggtgactttcttggaaggtcaagacacttgcttgacagcgatgtccaggagggctagggagagttctgctggaagtgaaggcagcacctgagggtggctgagggaactggtcagggctgggaacgcctccagccctttgaggaatgattcgctgattaagagatgtttggccttgaaaattgcaagaatgaaatctcttggtgggaatgtgtagccaaaagccagcaccctgagtggctccaaggtttggggaccctctcaaggcacaaatcccagttccttttcaattttgaaaatcgttgtgggcgattctggaattgagaagtgtgctgagagccatggatttaacatgacaagaatttccgccccttcgtcactgagcacaccgcaaatgctccagggccagggacttacttgggcttctgcgtgtcttccacagtgtgcatcaatccgccgggctctggttggtgtttaaaaaaaaagatgcagcgaaggaatctggtgtggacaaacgccctgggcatggaccaaaagcctggcccttgtgtccctggcaatgggacggtgaaggacagaaagacagcacatccagtagtgtcaggagcttggagcaggcattcggaagcatctgttaaatgttattgatggaggattgacataacccacatctgcatagcttttttggtctgtttttggaagtgaacagtcacaaacaaaaacaactttggttcaggtcatttataggcccagatcctctatccttagaggtttcccaccagatatactatttcactatctatgccaggaaagttacgtaaaaccacgcagaattttacctgacaacgaaatagaccttttcgttagatcctccaccccacctaaagcagttacacaggctgaaatgaaactgttaaaggaatgaactaacttggagatagaatcatcgcctttgctgaacaccattttaagaatattggaatatataggggtaccagcataatagtaaaatgtgcccatattatctataattttatgctgggcactttttagaaattattttttataactttgtctttgagatgatttggctacaagttcattacatttagtttacaactggctttgatttcttggcattcgttgtgtattattaggaaaccccgcagagagaaaatgtaaactccaaattgctttaaaatattatgatagtttttagggatattacactgtgacagtgaatgaaatggacgtaacgttctgttttgtagatattttgtgaaatctttattagtcttgattttctttggaacaagtcattcctgttctgggctgaagcctgaaaattccctgacctgtgaccctggcccaaggctcctcttggataaaacagtgtttcctggaccagagggcaaagtcacagaaacatgatgtgacgaaatctaaatagaaaggtattgatttgttcttcgttcatcaaatagttattggactccagcacgtatgagtagcagggagcctggctagcactacaccttcccctcctgcctctcagggtcagggccacaggcacacacagagcgagggaaaatgagggggtagagaggctggtcccgagtctccagcccttctctcccaatcctctccctgagtgggcagggaactcttctcttggctcctccaacttccatcaacgtctgcccttgggtctggttttaaa

SEQ ID NO: 1562324 - DNA, 4001 bp, Homo sapiens
ccacacgcactatgcacgatgctggctttgcacaaagcctctcttccctccactcagcaagcactcactctgtccaggggctagggacgccatcacagtccctgctggccagagaaggaccggggccggctgtcctatgctcactgccctgggggaggtgctggcaacaaggccaaggtggccaccctgataggcacagccagagggggtgccagcggacccaccctgcaccctgagcacaccgatggcaccagctgactgagcctgagcatggtttgaacactgacacatttcctagtttattcccaacaacctaatgtggcagtgactgttaccatcccctttttacacatggggaaacgagaggagcagaggatgaaagttctgtgcctggcctggctagtgttctccttgctgtcatttcccctttaagaaacactacctgcttcaatgacataggactgaagttagtgtaagggctgagggatggtgtgagcaacagattctccttcccacagagatctcagaacaatggccttgccccttttgcagtggtttgggcagccagggcaaccaactgccctgctttgctagggactgaggggttgcccaggacagggaccttcagggctgaaactaagacagtcccaaggaaaccaggaccagaggctcctccaggtgcccagatctccgaatggcctctgagatctcttcctgccctgctttgaggctgcctcaaggctgacggccacacagggtgtccctggtccaagcataatggggcttcttgcagctctcactgtcaaggtcaataattaagtatacagaccctaaagaatgtggcataaaagccaagcccattaggctaggcaagtggaccagaggtttattggaggtctaaatatttatggagagcaatgatggctaattttagaaaccattaggttgctatttttaaacgtgtgctataaggatttgctaatttaagaagtgagtgttaatgagcccccaactcccagacacaagctccccaacctgctttccttcttccttaccagcagctgctactggcattaggtaataattcaacttccccgcaactacttttcactttggggcctttcaagggaaaaacaactttaactgaacgcatctccctggaagccacataaaattcctccgtgatgctccggaagcgccctgccctgcagggctgtttgtataggaaggaactagcccaagcctggcctcccagggggagcagcccatgcagggctgaactggtgttcacctgtgggctaccattttcctgcagccacgtgtgtgcatgtgggaagatttgctagagagatacggatccaaaacaaatagggttccaagcatcaagctctagaaagccctcgacaggctgagtagtggtgggaaggcagaatctaacaagatgtgttagaggatcagtactgggtcctgcatttgggttcacaaaaccccaaaagtacaatcctgggtggggagtatgtggcttagctgcacctgagagcaggatttagggctgagtttcccaacgacagcatcttggaatgctgcatttgcaggatgtcttgtgtggaggacacaaatgtcaaatatgtttaagaaaacctgcgtgactgtaggacttctcatagctggaaacgtgtcaatgtgcatcgtgactctcccaggaaatgtctcatgggcagcatccgctaaacttatttgactagagacacccccctgcaccccctttaccaaagaacaatttgcaatgaaatcactttggcacaataacttggacttggcaatggtgagatagagtgggttgctgtattagtttgttctcatgctgctatgaagaactgcccgagacgggtaatttataaaggaaagaggtttaattgactcacagttccgcaggactggggaggcctcaggaaacttacaatcctggcagaaggtgaagcaaacacatcctctttacatggcagcaggaaggagaagaatgagggctgagccgagggtgaggccccttataaaaccatcagatctcatgagaacttactcactatcatgagaatagcatggtggaaaccaccgacatgattcaattacctcccactgggtccctccccacgacacgtggggattatgggaactacaattcaagatgagatttggatggggacacagacaaaccatatcattctgccctggcccctctcaaatctcatgtcctcacatttcaaaacacaatcatgtccttccaacagtcccccaaggacttaactcattccagcattaactcaaaagtccaagtccaaagtctcgtttgagacaaggcaagtcccttctgcctatgaatctacaacatcaaaagcaaattagttacttcctagatagaatgggggtacaggcattaggtaaatacccctattccaaatgagagaaattgaccaaaacaaagaggctacaggccccatgcaagttcgaaatccaatagggcagtcattaaaccttagagttttggtcgacttcatccccagcagagagagtatcagaaaacgacagagcggtaaagaattttgaaaatctgtgaaaggcaattgtgaaatgctagagctgctataggcccttccaactggctctggtttcaggatcaccagctctgaagggagggggtttttctgtgtgtgtccatataaacttttatgttgtctccctctgttttctctgagctatgtttttctttaaaaaagcagggttctggagcacacagtagggtgccctcattttgctcacctcctggcccacctggaccccagctgcgtcaactttggctccaaattaatcatcatttcaacagcagtggccatggggatcgcctggccaggactgaggggtggacgtgttgtttaccagcctgcgtcttgactgcctggggtccctccctgggcatgtctgtttcatccttcactttgtcctatcttcagaagtcctttctctagttcttcagggtgtgtgctggggcctctgtcagtccaggcttcttggaggggtgcgggggtgggacgaggccaccctatctcaccattggtccaagtgactgtgccaaagtgattttactgcaagttcttctttggtaaaggcggtggtggggggtgtctctagtcaaataagtttaatggatgctgcatatgagaccaggcttcttggaggggtgcagggatgggatgggtggggtgtttgagtcccttactctccttaaccctcagcagtctcacctgctactgtcacctcatcccttgcaaaatcagcccctgtgatgaaagctttcctatggacacacattgctccgtggcccttgtctacccaccttggtgaaagaaatgtcagccccagatgggaggggtggaggacatcagcggggagctggggcacaagccaggtgtgtggtggaagtttctttacccagaactgccctgagccctactgtgcaggtagagaattggaggatgtggccaccagtgccttttgcctgccatgtggtctgaatggctctcgagatgtttgggaacgagccattatatatgtttgccctcaaatgctctgacatgatgttgggtccattatagaaacagcgtaaaacttgatttgctttctgtaaacttattagagaaaaatgaagtgccaccttcaaatgaacatagtcattggcccttcaacgttgatgttcagccacttcagaaaatgtctggttcaaaaacctgaatgtcctcactgtcaccccaaccaaatggcctcttcattactgtttagctatttcataaatgctttaggctggagatggtggctcacacttgtaatcccagcattttgggaggctgaggtgggcagatcacctgaggtcgggagtttgagaccagcctggccaacatgatgaaaccccgtctctactaaaaatacaaaaattagccgggtgtggt

SEQ ID NO: 1562325 - DNA, 4001 bp, Homo sapiens
atttttggtgagcaaattcaagcttctcattgcaattatatactcaaaattaaatacatttttattacaaaataagcacaatatttgaagagttaaaactgaacatgtaagcactgattgattcacaagatctaaaagctattcagaagcaacccataggggtgatcttgcctcataaacactccccactcactctcaccccacatgacccaccacacttttaaccctgatattgatatgggaaatgaagaactgagaaaatcatgtgtgtaattcaagcaaaacaaaaaaaccttcaccatacctatttgtttagtagagaatacaaaaaaggtatttatcttagcctgactaattgtctgaatcattaccttgattcttcgaattgcttagcatgtttatacctgtgcaatgactaaagaataaaacaaagaaaagaaaccattcccttcaatgcccaaactgcaattttctatttgggaccatataacctctagataagaattgagtgttaatagcctcccattgatgtgtcttatcaagatagatgcttctgtttgcttgacgtgcagatggtaggctatgaaaaatgttagttttcatttataaattattttcctttaaacagtaattctaggcaagtttaactgtataaattagagaccttaaaatctgtcttcttaattgtcctaagagaaatcagagctctcttttcactaaagtgtctaatttttattgtgtgagttcctaaaggaacaaagcctttcattagatggacattttcgtctaattcaactaacgattattgtttgatatctacaattttccatgataatctttttaaaaaggtcaccatttagttgttagtatgtagtacaagaaacaatgtagaggaaaaataataggttacattttagaataggtatatgttttattgttatagaatatcaatttcaactttagattcttatcagataatacatgatggtcaaaaagtaataagtagtccatcattgtacacttgctaatgattatgggtatacttgaatttagaatatgaaaattggagcagcgattgggtccaacaatagtcaatgcatttaatacacctgaagtcagaatgtccaagtaagtcattttcattcctaccaccagtaacaaattgaaactttcgtatcaatgtaaatctagacataaagcaagttctcctgcctcacatacttacagtttctagcaggactttataaaaaacattgaccatagtccatacttggagccaaaaggaggcattagacataactggtggaggtcttactaagcattgtcgtatttcttcgcttatctgtgtgtggcacacggtagccaggcactggatatctgtacccttgcttctttctgttgcagcagcaaaatccacaaagcagaccccctccaatgaagaggacagcagcgcttgcccagccaaggaaaagtgctgctcccagctctcgtttctgacctatgtggatggctgggttgtagaaatctctgatgattatattggctgtccagctcaccggaatcagaacgaagatgcccgtcaggatgaagaggactcctgaagttcccagaaggtatgctttggccctctcgttagagcctgtgcactggacctgcttcatgccacagatgccaataagcagggcgatcaaggagagagcaacagccacacacatgagggcccgggctgtttccagggcaggcgggagagccaacaaggagctatagaacttgcattgcaaccggaccctggcttgtcggatgcaattcatccagagcccttcccagagcctctcaaagacaataatgttgctgccaacaaaagctgatactctccactgaggcagaagggttgtggcaagagtccccaccatgccaaggaacccaagaaccagcccagcaatttgcaagggataaaatgccattgcctttactttgaagactggttcaattcggagtggtagaagatgctcaagatgtagaacgtggaagccttttgagtctagagaagtctttgatgatgttctccttggctgctgcccataacgttttagtccaaatcagtagctgtgactgaacttggcctaactagaagtacctgttgtaaatgcatgttgccttttttcatacacattcatttcagtatggattatttactagtcatatataattgtttcccagccaataagaaggtagctaggggtgtgtcaagaaatactgcattcaagtttaggatttctcatattattattgccttagcaatgctgtaattaagtgtcaaagtttctattgtggattgctaattacagagctgaaacttcctgtgtaaaaatcactctgatataaaagtataaatacatgtgtcaagacacagctgaagacaatgccaaaatgttgtaagtttattggggagtaattaaaaaacattttggactttattactttattctagtgtaagtaagccacttttccttaagatggtaatcaattctggctttaataaagatgcctcaatagggagaaatatttaggtattagtttcaagacacacgaaaactgttgatacttagcaggagccctaagcaagaaattaacatttcatagtttattcttaagatccagaaaagaagaaaatagagaagtactccttataattaatttgaatgaactgttaattattacattagctgttaaggaacacctctctctctattgaagtaatgtttaatatggaaactttcattcaatgtttcttcaatggcagcttgaaatagatcacatttattaaagccaaacacatacctttcatttttatggaacaatataaaagtggcccttgaaataagctatgcagtcacttaaaatttagacgctagagaacaatttagtgctggaagtttatcttcaaggccatcaaacttaagacccttatttgccagatgaacgggaggtgtgcaaagtgtttgactgagacaagccatgtggtaactgatccaggaacaagcccagccctgtaactcactatgcttacctcctctgtctggtccgattcaaaaataggaaggaaagatgctttttcgaatcttttcatataagtgggactaaacccagtagaaatttaacactatcctttctatagtttttcaaatggttttcaaaggaagaaaaattcaactgagattatttcaaaattcgagtcaagttgtagcttttgactgccgctttcttgccactccctagaggcagtggggggcttcatgtgggagaagtggacccttttcctttttcttttacatcccactggcaagggatctattctaaggatgaaaatgtctccaaagcaagcacgccaaccacactccaggtgggaggcattacaatttgcaaaatgtcctccatttcagtcaattaccggccaaagatttaatggctggtccaatgacatccagatttaaagagtccactcactgaattaatgaatgtgaaaatcactgagttttcaaaatgattggtctgagaactccctctctaaggaatgtgaatcattgagcaaacagatgacttctgtgtcgttaacagtttcccaacaccggattggatgaagggtttctttggccctttgttcatggttactgagacataggcttaaccattccctccctgacaggattttccagcattactctgatttgttacttctgggtcctcttccttgttctagttcctcttcctcattctacttcagttttattcctatgttcattttgtcctggaagtttccagtgtttttttccaattatttgctttctcatcagctagagcatattatctgtattataagtgagaacacatgtttgtttaagatatggagatacctcctaaatataaaaataatctgaggctgggtacagtggttcacatctataatcccaacactctgagaggctgaggcaggaggattt

SEQ ID NO: 1562326 - DNA, 4001 bp, Homo sapiens
atttacagattttagtaaaactaaacagaaatggtacaagaaggaaatttatttttcacagaacaaaaatgacaattttgactcaggtacccacataggagcaggtgaagttctcaaaggacaactttttttgttgttgtttttttggtaagcaaatgaaaaccaagacatatttttctgctcttttatttatattgatgaaacctcaaagtctgtactcaaatacttattaaaatatatccatacatatatgatttcttgtcaaaatgcatcattcttcttcaaatacaaaaacaaaaatattttcactttcctaaaaccatcactttttcttagatcacacttttatctttcttctgagtatagccctggaaaagcagtttgaatgcaaagccccttgacaaaatatctgctttttaaaaatgttaatttaatacacaagaaaaaaaaagcctctgggagaagaggataaagaagttaggatttctaactcctaggctaaaaaacagcatatcagaaagccattcaatttcctttacaatgctgattaaagccttcattttaatcttcattataaatggaggacattaatccctaagctgtttttaaacaattaatagtaaccttcttcaaccctatccatgatttccctgaaaagcaatagttgagttctatttattcagtgtaatggactggcatttcattttaaataaaaccatataagcatgtctctatgtgagatataaatgttacactcatctatgtacataatgctatgtcgtggagaaattacagtagtaaaataatgcagtctttagcaatgtcattttgaagtaaatgataaaaagagtagatgcttgaaccaccttagaaaacaaattactatactttctagaacaatcaaagcattgggtttaatatctcattctgctgaaatagcttatagaatcataaatagctgatgcacagttcctgtaattaagattaggcagttaagaacagtaaatcaaagtttctttggggtccattttgagaaagtaatatagatttttgtcatttgcatggctttatagtaaagttaaaaaaacatacacaactacacatactgacttctggagtagacgctcggtgacttctttccggtgtgataacttttttgggttgtgcgatgggaaggtatcgagtatctgtagctactgctcttttcgttgcaacaaaaaacgcagcagaacagagctcctccaacaatcagcaccagtgccgtggtccatcctaagtagagagcttctccaagctcacgtttttgggcaacattcactattgagttatagaaatctctgatgatggcattggcaacccagctcacagggatgagcaccaccatgcccgtgatgatgaagatgattccagccgtcagcagaatgtgagccttcaccttctcattgtcccccgtgcacctggtgcatttcatgccaaggatggccatcatgaaagccaagaaggacatcacggaagcagcacacatcagtcctctggctgcctgtaggtccggagaaagagccagcagggaatcatagattttgcactgcatcctgatgttagcctgcctcacgcaattcatccacagtccttcccagaagttttcaaaaaccacgatgttgttttcaatgaaggccgacactctccactgaggcatgacagtgacagccactgtgcccaccattccaacaccaccaagaaacagcccagcgatttctaaggcatgggttgccattatcctctgggatgagttttagccagctggactccggaactgctacttctgctttgaagcagggttctctgtgccacagaagagaacagtttttcctgtagtaatgaactcggaacccagtggtttttcaaataagagctgctttgctacttctggccagatagtatccagtgctggctggctgagatggccctgctattggctgcaacaggtaaacttacaaatcaggtgtggcaactttctcagccaataaaaggtggatggtaatccaggtgtgtctaaaccaacacttgggtacttggaacagctagacctgcacataaacattctttatacttctcggtcttccaagaagacagcagtatgtttacctgtaggcatagttataagtggttgcataagcatcaagaaatgagccgatcccttgtaatgtgaaaggtgcaccttgtacaggcaattctgaaactcttaataagagctgctgggaccaagggataaaataaattatctgccgaagaattctgcaacgctgttgaaatgccaaagtgaaacgagagtaggggattgaaagattgcttttacctgggaagccacattctttgggacacatgtgatccaagtgattgatttaatttttctacaacttcaaagcaagctctactgtggtgaaatcagggaacagatcatgccagaggacaaaataagctaaagtaattaaatacacaaggctgtccttctccttggcactgaaaacatattggagttctttaagccagaaaaaatactcattgacacttttctgataatcttcacttataaaaacattttttgccaaaataaaaatcaccagatgattatcttatgtatccagcactatagcattaaaataagcttatgagcttattttgtggtgttattcttgctgctttgaattcctgggctgaaggaactagaattctgaagatgacacaagacccttgggcctatacaaatggctgatatttcaaaataagatatttacaagacaagggaactatatttaccaaactgtattatattaggtattaaccaaatatgttttcctaccttttaatattatgtctgcagtaggacatagaaacccctaaacgcaagacaatttgaactttcttctcaaaataatgatgctctaacagtagtgctatactaagcataaatgtttatctgagaaaattcgactagcaattttcttctggagatcaccttaagctctctgtctgatctttccaaagtttaagctgccacttcattttcttttcttcttaacatcataaaaaatgattttctctttacagttttactttctctctgtttcattggactaccttaaatccaaatatgggagaaaatcgtttctgctcactgattaaactttgagagtttcatggttcaaaaaatctgagtcatttgtggatattattaaaacaaaaactatatggtagaaagggcaaaaggaggatcaagtagactgtcttctaaaaaagaggcaggacagacgcacagtagtatgagttgttataattttgttaaacagacgttataaaccttataaaaagttaaaacttaatatttacagaaatattctcatttgttgacctgtgaggtgccaaacttcagggtgtcccttaggctgatgcagaaaatatgcagcatttggccggggcggtggctcacgcctgtaatcccagcactttgggaggccgagacgggcagatcaagaggtcaagagatcgagaccatcctggctaacacggtgaaaccccgtctctactaaaaatacaaaaaattagcctggcatggtggcgggcgcctgcagtcccagctactcgggaggctgaggcaggagaatggcatgaacccaggaggcagatcttgcagtgagccgagatcgcgccactgcactccagcctgggtgacagagcaagactctgtctcaaaaaaaaaaaaaaaaaagaaaagaaaatatatgacattttcttcatcaagtttctatcagttacagatttgtggtggagggagacttagattaatcttgggaaaataagattttaaaagttgagattttaaactttcaaagtttaagaagtgagcagaaaacattttctcccatatttggatttaaggtagcccgatgaagcagagagaaagtaaaatttcaaagaaaggatcatttttatgatgtgaagaa

SEQ ID NO: 1562327 - DNA, 4001 bp, Homo sapiens
gttcaaaaaacattatgtcaataaggctccattcccccctaaacgtacattgttgattctaccaaaatggaatacctttttggagttgaaaacattgaccagctctgggtctccgagattgagtctggaaggcacctcccacattgaacctacctgtctgcgttttttggcttcaagtattaaagcttcctttggcagaaatccctttgaacaccaatagggtgcgttgcttttcttcttcttcttctttttttttttttttttttttaactttttagttaattcgttaataacctcctgactaggagggctggttaggatgttcaggtcaaaggacagtgggatgctgaacccacaaccccacatcctcattggcccccatcgcactccccgtcgcccccacccccaaagtctttgcttccaaaccattgagtcctcccgcaaatgccctggaaactcttctccgggaaatcccggctgtcccgcctaccgcccgcgcatggaagcgcctgatgacaatcaggataccaccaagggttcctccctgcgcgtccctctgggatctgagatgaccaagacctcgaatggaagggggtcgtcctaagaattgagggaagcgagctttaccttgacgaagagggtgatgtcgtgctcctgccccagggcccggggctcggacgcctctccgtcctcccggcggccgttcacgcgcgcggcctcgccgctaccctcggcggggccctcctcggccaggtggttgctgagctgggcctcaggctccgcggcgcccctggaggcctccccatgtgggctgctgtcgggggattcctcttcgccccccgctgcttcctcctcccttggcccctccgggctccgctctcgtctctcttcgtcctcccccggctcctgctgtggcccatcccctaccctgtcctcgccagcgtctgcccttgcgtccccgggggccgcttcttcggacccctttacccccgggacctccgcctcctccgctgcgtcccaggcgagctcaccggggctgcgccccgcactctccccggctgcgacctcaattgcctcggcctggggcgagaggctgccgtcccccgattgctgcggctcacccgagacccggcgcgcccttcctgccggaccctcggcgtccatgctgtcccccgccgggccttcggcttctacgctgtcccccgccgggacccccgcttctacgccgtcccccgccgggtcccccgcctctacgctgtcccccacccggccctccgcgtctacgctgtcccccgccggaccttccgcgtctacgctgtcccccacccggccctccgcgtctacgctgtcccccgccgggccctcggcttgtatgttgtcccccagcgggccctccgcgtctacgctgtcccccgccggaccttccgcgtctacgctgtcccccacccggccctccgcctctacgctgtcgcccgccgggccctccgcttctatgttgtcccccagcgggccctccgcgtctacgctgtcccccgcctccccggacgcgctaccttccgggacctcaggcctctgctccgcctcctcctgcctctcgggggccgcagagtcctcgggctccctctgagcctccccgcggggctcgccctgcgcgccgcgtcccgggctcgccccctccacctgctgcgcgccgcttgtctcctcccctccttggggcacctcggcaccctccggggctccctcctcggcctcagtctcgccgtgcgcccccctcgtgccccgcgcctcggcctccgggcccctgtctggcccgccgcctcctgcctccttcacagcggcggcgcccctcggcgcctcctctgcgccctcgctcccctccggcccttctgcctccccgcccgcggctcctggctctccgggtctctcagccagaggcgcggggacctccggcggcccctggggacccggggcaaccccctccggctccgcggcctcggccatggccgcagatccctgtccttgatcgggactccttccttgacgctgcttaagggtcggtggcgctgggcaaggggcgtgctacggggccctctgtgctccttgaaggacgccggctccgggatcctgcggcaaaggtttagccggggcactggggccttgcgcaggacccgcagggcaaactccgcttggccccaagcctctgcgccccttctgcccagctgaaactccctggactcttcctccactgctggagcttctccccgattgcgcgtctgcttcccaccgggaccccaatctcgcccgcgggccgcggaggtgcagtgcacggctggagagggctgcttcgctcctgcgcctttggaagtgcccggcccgctgtccgctgtcctggggttgaccagaagtccttggtgccaactccatcccctggggcttgggcggggtttgtcttcccctcctccctcctttgtttgggtagcctaggagcttggccaatgacagcctttctcgtgacccttgtggatgttgatgaaaagattctggttctcctggccgcttgggtgttgttctctagaatggcttcaagttccagagtcacttaaatcaccccctccaaacacacaccccgacacccaaacacctaatccccaccttaccccaggagtgaagcatcaagctcccccggtacccaactgaagatgtccacattgtgcctgatgtccaagagcaagggtgtaaatccctgagagaagaagctggggaggctacgctggccgccttcccatgtctgcagggcccccggagaggttccagaggcccctcatatagacgcacaaggagccagtcgagtttctctgaccagagatgggcgctgttgtccatgagggtccgcttctccgggcctgtctggaggatcgtgggagccctgcgctggaaaaaggttacaccttcatctcccgggtctcttaagactgtaagagtctgtgtatcttgctgattctcctagatttctaaactcaccaccagtgcttctgcctccaagttaagagcttgggaatctggaggtggagaaaagaaaatccaagatgtgaaagaggggagctatggaattccctgggttagggttctcccaggatcacagacccaatacctactttaaaaaggaagttattatggtgaaaagtatgtcgtaagtttattataagccaggctacttctagtgggttaccaagaaactgggttacccaaggtggcactatgtaaatgtggtggaacggggatcccagctcaagactgacttgattcatcaggctttatatggctttgatattggcctaagatacatgagcccctcatgcccacagaaggttgttttcgttgaaagagctgggtgtgcctttgatgtggcttggggtcacacctttggccatgaacataatgtgtctccttctacttcccattgctcatcactgatggatgacaggacaggagcccagagacactcagcttcatgctacctttctccaaggctgtgctctgtctgggtaggtacaggccagaagcttcatcaccacaaagtggcatctagtcaaagcatgacactcacacaggtgagccagagatgcacgtgagccgtaaaagctctaggcacctagaaaaggaatcctgctgcattcaccggggcaaggtagcagccatcacccttatcttgtaaagaaagatgaagccagcacgttcagcccggaacagcaaacacagtacaggtttacagtgctttatgcaaatcccatgagcccggatgtgtttcagaaaacagaattgttagaaagatgattgagtgattttactgtatattacataacacagaacatcactttgtgatcaaacacattaatatttctgcagtaagacaggcatcacatttggtgagatatggtaaaatcatacaagcttcaggccccccacccccagtttaggttcacctccagctgagttcaagc

SEQ ID NO: 1562328 - DNA, 4001 bp, Homo sapiens
atggggcaacgtcccctgggcccagaagcggcccccactgtggcagggaggctgtgtgcttcaggatggggagggggacatgaaaggctccctctcaggacgggccctgcagacctccctggtccccacgctggtagggtctctgcactgcccacgcggcagcacccttggcccgagcacgctggggctcccaggaagcgcatcgaaccgtgcagcttagtgaccggagcaaggtcgatgcagccacacctgagcgggaatctcggctccctggggtgagtcacgccactgccccacgcctcagtttcccctctgtgactcggggcatggcagggtatctcgggaccgtgctgaggactaaatgcgctaaaatgctcagggagctccaggcccaggtggcacctggacacatcggctgcggttcatccagccctcttcctgtccagacgccggcctcctccccacacaggaggcctcactcccagctctcccacctcccgagggccacgggcccctgaacgtagagattcgatgtggggggaacctgtaccaggctcacgtcagccccgcccacacttacctggcaaggcaaaaaggaaagggtggggagatcggggccggccagttacctgcagccggcccaatgagcacacagtacccatcctcctgggtcgggagcgaggcacaggcgacgggcagccggcccccgcccaggcggctccaacacgcatcctgcagggcctcgcagaactggcagcagggtggcggggcgggcggcgggacgctgccgcatggggggaccagcagcaggcagaagaaccaggcgaggaaggggtggcagtgcgtctgcagcaggcccccccacgcccgtgccccggcccgcacctgctcgccgctctcgtggtggaggtggttgggcagccagaagcgtgagatgcccaggtggccgcagactggcagggagggtggcaggggcaggcagcgaccggcgggggcctcggggtcagccccgagcagggcagagttattagcaagacccggccccacagagttagccacgtgggagacccaagcaccgctgtccctggttaaagtggtgactgcgacctgagacagtgcgcccgggagcccagaggagaaggcggagggggccgcgtgcttgcccagggagcccatcaccagggggtgcagaagtggcgtgcgcaggcggacgtcagggcgttggagctgctggctgggagcggctgcggcgggcgagagtccttggctgtctgggtcctgcaggcttccccagggaggggccccgcccagcaaggaggagagagaagctctacctgaagatggtggtggcactgagggccccgtgagtggtgcccagggcctgcccagggagggaggcgatggggtgggtgcaggcaaggtgccagcctcggttgtgtgggcgcccggagagctaggaatgccacggctgggccagagagtggtcccattctcctggggggtgctggaaggcccagcgagggcaagggggcccacaggagtctccaggaccagggtttccgccctggccaagctctcagtggggacagtgtcattccacagctggacgaagctccggatgcctttggccacgttcaggatctcggctccgacaccggcaatgttctcctctggcgcgtccgggctctcggcagaagtgggggtgtcctggccatcttccagcagctctgagggtggctcagggctgccaggggctgtcgctggctctgtggaaccattccggggggtcacgtgtgtggtggtatctgctgtgggctgcacaggcaggggcccctggggctcagggatcgtggtagctgcatggctggtgtcctcattattgaaccaaagccagttcaggttcagcaggttggcccgggcagccgccaggcagcagaagagcagcagcaggatgtggcagccacaggggtagggagccatcggggcagtgcggctggagctgcgggcggcgggagggcctctgtgcctggaggtggggctagccaggctcacgccctcctgccctcccctgtgcaggcttcccagcctctggccggctgtcttccaccccccactcttgcagaaggaaagaaggcaccagccttggaatcaaggtgcccagcacccgggggttccagcacccaaggatttataacttctttcccacggccctgcagcagccccaggctccgtgaggacagagggtgctgtgtgcagtgtccacagggttcccaacgtgctccgctaggctctgccggggcagggctgctgagtctctggattggggctccaagccaggaccccatcccagaagcactgaggcagcggcccccagcccctgctccccctctgacctggaacgcccagaggcgcctggcctggagccattgtgttgtgggaaacttggaaccgaaaaaatgctcagcttgctgcagtgccaattccactgttgcaatggctgcccaagtcgttaaacatcccggggagggtctcgaggggctcagaccctctcagagctgctgtgcctcccctcaaagctggggctttacctgccttggactgtgtccctctcagcccttcctgaccttctgcccaggagacccagcagagacggagcccgggaccagggcaggaatgcatactccttcccggcctcagtctccccgtccacaaaaggatccggttagactggaacattccaggcagccggtaacccacagggatgtgagtggcatgtgagtggctgctgtgcccccccgccagctgcccaggcacagcagtgggtgctgagtgtgccttatgccctctgaggacctgtgtgcagcctggccatcggcccatttcacagatgaagaaaactgaggcatgagcctggtgaccccgctcaagatcacggagcccatcagaggtggagccaggcagtttacacaggcgtgctcactcacacacacgttcacacatgtgcatcctcacacgcacacacccaggtttcaccccacaatccacccaccccctcagtgctctgcacgccagctcccccagctggagtccctcgtcaccctgcctcctccaggctgtgcggctggggttgcagccaccctcccccagggctggggtcagttaatgtgacagcagctgtgacgaaacagccccacaacctgtccccagctgtccccaggtcaggacatgctgtagccatcggtcgattgctgtccacagggcagggctgggctgcttgggacccagccttgtttcaagcagctgagtgccacctccttctcgagggcaggcgcaggcattccacaagcaaacatctgcatgtcagtgaggccgtgctcccaaaacgaatccccacactgctcaaactcgtctcagagatgcccagagaagtctctttgcttgaaaactgactgctgctgctgtgattttatgtctgaacacgcctccggaaagtctccaaacagaaattccagagactgccccctcctccaccagcgcatctcaggaagggaactctgttgtgggggacacccccagccccatcccgaaggctctgtgctcagagggtcactggccagctgggctggccctacattcatgccccccaatatacacctcctgggcagagccaggcacaaggaactgattacgcctagcaatggagggagagcagctccggccctcggggccacacttggaggatggtggcagccccatggcactgagcacccaccctgccatctgcagggtgcccagctccctccacccttcccctgcccactccattcctgaccccacccttcctgcccactgtccaggactcctccacctctaagtgctttgagagcttcctgtccaccattggggttccctcacctccaagcacctccacagcatcgcacgtttaacctcctggaaatcctagtgcggctctgccacggctccacagctcagcccccggg

SEQ ID NO: 1562329 - DNA, 4001 bp, Homo sapiens
cgactgttttcccatttcagggggacttggtcctgcaaggactggaacccgggctgcgggtggcctggagcctgagttctctccgggctgggggaggggtgtgtgggcagcatgcagacccctctctgggcctgcttccgcttcagcctcctggccacccgccttccacattccattagacacctccaaggggccttcctgccccagagtgcttgaggctggggcaggcccgggacagaagaggaacgcacagcccatttggccaaccgtaactttccctgctgaggcctgcactgactttacaccccactcttagatctcaagattgcatctcaccaaagctcgcgttaacagtttttgttttttctattcaaaggcaaaaaaaccatcaccttttacatctcctccttgataacgtttcataagctcgggcttgggccccagcgtctttcctttcctttgtccctgtgcgatttaaaacatcccgcccagggagccctggtctgggccctgtgggcgctggcggcccggctcagagggcagctctgcggcctgattaatggccccgagtgaccctgggccgctgtggggatggagccgcgtgagctcacagccgctctccgcccgtgtttcaccccctagagttcacacagtaaatgaggaattgtctacgactcaacaagcaggtgttttcaatacatctacttataagctagctacttttttgaaaggtctatgctactatttaacctggtgactaagtcgattggaaacaatgaaacaaattattacaggaatccagacgacatccctccctccccctttcctgcttcctcacccgctgtagcaagcaggtgtggagtcgagtcggaggcaggcgctggctgcgtggacccccgggtgggattccacccgcgacaaggcacccaggccctttgggcggggctcccctggggtccgcgtccccgccgcctcccccgggcctctgctgggctggctggaggcaggaggccccggttagcaggtggtggggaactgggtcccggggttggaggcaggaaggtccccacgggccccgcgcaccgtttgccgcgcacgggaagcggcgaggccggcggggcagcggcttctgggcattgttctcggaccgcgcggcgctcggttggcatcaaaggggaccgcgcaacccgacaccacggcgggcgcggggacagaggcctgagggcggcggggacagaggcgcacaaggcccggcccgcggcgaggagcctcaacaggttggaaacgcggagacgacgccccgcgctccgccgccttccgcccgcggtcagtcccgggacccggcgctgcggggacgaggccgtgacggcgacagaggccgcgtctcccgagaccccgcggccccgccccgagccctcccggcaccgacgaccccgccggccgcggaggttcggtccccgcgcggggactccggccgctcgcaccgcgcacccctcccggcccggaccccgcggggagaatgaatgggcgggactccggccaccccgccccgctccgtccggctccggcgcctcctgcgcgcgtgggcagggccggggctgaacccagagcggccggggcgggggtgagggagccgggcggggaccccagccagggcggcgaggccggcgggcaccggcgcgaaccttcccgtcccgcccgggtcttacctggctccgcggaggccgcgcggaccccgagcagcaggaccaggggcgcgagcacgtccaggaggcgccgccgccgcggccatggccaggggcacctgcgcgggacaggcacgggtcagaccccgcaggacccccgcgacccccgcaggacccggccgagccccgcgacccccgcgacccccgcagccgcatcttggcgtcccccaacccctgcccgcagccccggcctcacctcggcgccatgctctccccaggaccgtcagcgccgcgggatgctgcctcctccgccgcggtgcacccgctcggaccgccgcgctgcagccgccgccgctgggaggccgggcagggggcgggcaggggccgggcaggggccgggcagggggcggggcgggcgcgggcagggggcgggcgcggggcggggccgggcaggggccgggcagggggcggagcgacgagcagggcaaggcccggggaggggagaggggggcgggcgccgcagcggacctgcggctgcgaggacggggcgggccgggacccgggggcggcggggacgggcgaggacggacggggacacgtcccgccccgagggaaccgcccgaggctgcgacccagcacagggcccgggggctgccccgcgaggaagcccaggtttatgcggaaggtgaacaccgctgcccgccgggctacgaccccagcccctgagtccggtggggcagcgggaaggggggagatttgaatagagtcaccgcgggggggacgggacggaggaggaagccggcacctccggcccgcaaggcccctgcagggtcctgccccggctgcacggagggacggacgcgagacaggaggggcgtgcgagggccagatctgtccccaggtccccctgttcccagggcgcggcccagcagagcctcttcctccccagttcccaggctcctcctccctcccaggtgaaaaccctgtttctatttcttcagggccagcatcctgagccccacctgcaggccctgggcgctttcctcctggcagctgtgcccccacccgaccggaccgctccctgcaaccagagagccctcacaccagcaacaccccccagcctgctccctcctcgtgtgcgcgaaactcatggcactggcttgacggctttctctgaaaccctctgattccgcctggcccatccacactgtcccttcccggccagggctcatctcctatgcctggaccaaacagcgtagtctccagtctccctgatctccccacacgtggccccacccatcctctgaagcagccccaggaggcagcagtgacttcacacttctagtgcccggccctcccggccctcctctctgggcttgcttgccagggtcctcccaacctgactgctgcctcccacctcctctccgcccctggagctctccagccgcagccgcggggcctgcttgggattctcctctgctggcatcatccctgcctgcctcagccttcccaggcccaatcctgcccgatctcacctcttcccgcccagccacctggtcgggtcccgaccagcatctgccttcaaacctggagtccttccctgagtgcttgcggtgcactgtgaggaaggaaatcaatgtaaaggattatgacccacattttttaaaaataaaaagattaaggagaacagcatagagtagaagtggtcatcgcacacttctgcaaaacttttgtttctcaggtggatggaggagtgagtctgtgtgtgtctatcagggtttggtggtgtctctgcagtgcagtgggtgtgtctgtgtgtctgctgtgtgtgtgtctgtgaccgtaccttgtgtgcatgtgtgtgcatgtctctctgtgctgtgtgtgtgcatgtgtgtgtttctgtaactatgtacagtgtgtgcatgtgtgtcagcctgtgtgcgtgtgagtgtgtgtcaggggtgttcatgtgtcctgggtcctggtggcttctcctcccgaggctcctggtctgtctggcccctgtccattaaccctgcagtgcaggtctctttcacctcttccatctcacctgccctggggcaccacttccacccaacccaacccattcctaagtcttccgtcagggcaggtgcctgctgccaggggaagcaggtctctgcaggtgtggcctgatgcactgccctgggggcctgtctgcggctcccaggagggaggggctggggcagggcgggtgccagcccacctgtggcctgagttggcctacctctctcctgccccactctccacctttggggactatgggggtgtgat

SEQ ID NO: 1562330 - DNA, 4001 bp, Homo sapiens
gagactgagtaaaggcaacaagggcgactcgggggacgctgggccacgcggccgcccctccccggtgccatccacagccagacccccccccaaacactgccgcacgggcctggccatgtccactaagctcagggttcctggtaccaatggctcctgctgggcacggtgtgggctggaaggtccaccctgctgttaccggcagcctctgactgtgccccttctggtggcgggaggctccggcccagcggccagtcagcagggtcaaggaggacgggggttcctacgccggctaagctgtgtccccactgccaggacccgtctcagtgggggagccccgttctacatgcccccccctcagcggccctgtgcacccacaggaccgactcccctctccccccggtctgtcctcagccacacgcacagatggaggaacgtggagcagagggtgccgtgtcccaagcccagaaccaagcctgggggccctggggctgcagagcgacacccctcctggctcccgagtcggggaccttcagaacgtgggatccaggacccaggtagaggctctcactgcccacggaacaaaccagggtccaggtggttagtgaggggctcccgcgcaccaggcaggactgcgtgtctgggccagtgcgctgagccctctcggtcagcctgcgggagcctctcttccctacatctcagcctcactgtcacctcggccctgctgaacaggtgccacccccgcgagcagggtctcaaaccagctcactctggaaggcgctgggagaggctcagaccagctcactctggagggcgccggaaagggccccggcctcactctggagggcgccgggaggggccccggtcagggcaacgctcgcccaaccttaggaggttgaggccgtcgcacccgtgttcccctgggcccccacccctccctccaagaggcccagaagcacaggaggaaggtcacggggcgtccctcctacctgtccctcaggttgtcgatgaagcgcttggtgaaggacttgactttgtccacgagggccccgtagggcttcagcctcagggccacgctctcagaggtgtccagcacaaagaacaggtccacggggcagtctggccgaagatggaggagaggggccttcaagctctcgccccattccccgagtctctgctgggcctgccctcccggccagcccagcgcctgcagcacagagccccgggcccggagaggctctcccgggaaaaggcagcaggacgtccctcggtggggacggtggggagggggtggagtgagagaccccaaaccgctcctgtgcctcgaggggagtcagaaaccttcacaacctcccccgaagggcagggcgtccccggcacgggaccggacaagtgagacctcacgggaaggtttctcgctggattcagaaccagcagcgcacgacttcttctagaacgggggtcgggggggccgtgcgtctggactcactgccaggtgaggggtcaaacggattcacggggcgccgagacagccccgcaccagctccccctcgccagggagcccctcccgagctgcctgcggtccggccccgctgagaatgctgaatgctgagcctctaggggccccggccaaggcccggtggggcagagctgggcgctgcagccgccccgagcggggagtggggttcaggggctccaggcccccagtctgcagttccacgcgtgggaggggaccccgcgcatctggccctggccggcagcaaagagcggggggtctggagcctgcaccccaagccaccactcaccctggaaggccacggccctcggggtctccggctcatcctgcgcggctgtccagcaggcctgcagcagcaggggcagcagagcacgggccgccctcatgtctggggcctgcggtcaccacacagcgcggccagggcagagtgggccgccgccgccgcccagagaccgaggctgccttctgctcccagccagagtgagagcggagggcaaggaggggaggggcggggcgagaggggcgggaggggaggggaggggcgggaggggaggggaggggcggggcgggaggagaggggaggggaggggaggggcgggaggagaggggaggggcgggaggggaggggcggggcgggaggggaggggcggggcggggcggggaggagcggcccatgagtcaccacctccttgctggggtctctccctccagaaccggcagcagctccgagcccagggagaaggcggtttccctggctggctcgccgcggcctgcagttcagttcccgtgtcagggaggaggaaactgcagcagctgaatcaaacgtctgaaaaccagcgtgtcacccagggagagttccttgaaacatctttcggtagtttccaatccagacgtctccatgcgggacgcacgggcaggctcactcgcctcttcccaccaaccgcctcctgcagaggacctcgccgtgagctgaattgttgctttatcagatctccgcgttcttttttcacgtcaatatttcttcacagtatagtcggatacgtatttgccaaagatatttcagtttgtaccgtgggaagacaaagttgctcacaatatagttgttatatatgctgtgtgtggagacagagagacagagacagagagacagagagagacagtgagagagagacagagagacagagacagagagacagacagagacacagacagaggagagacagagacagagagagagacagagacagagagagacagagagacagaaagacagagagagacacagagagacagaggagagacagagacagagagacagagacagagagacacagagagacagagagacagagagacagagacagagagagagacagtgagagacagagacagagagacacagagacagagagacagagagagacagagacagtgagagagagacagaaagacagagacagagagacagacacagagagacagaggagagacagagacagacagagagagacagagacagagagagacagagagacagacagagagagacagagagagagacagagacagagacacagagagaggagagacagagagagacaaagacagagacagagagacagagacagagagagacagagaggagagacagacagagacggagagacagagacagagagacagagacagagagacagaaagagagacagagagaggagagaggggctgtccctgatatcacctgggggtgggctccagatgtggccagatgcatccctggcccacagaaggtcccagaagagctttcccaaagctggagctgctgagacttgcctaacaccagcctaaatgtcttataattttaaaacgtacacaaattgttcataccaaaaaccatgttaaagaaacatttgaaaaaacctttaaaattgatacttaattccacaactccacagtgactgtttttggattgccttcaatattttccccacacctacgttacagaagttgtaaagtacttctccttcttttcctcctcctcctcctcctcctcctccttattattattattattatctaaggggctcactctgtcatccaggctggaacgtagtggcctcatcacagctcactgcagcctcagtctcctgggttcaggtgatccctccacctcagcctcccgagtagctgggatcacaggcatgtgccaccatacccagctaattttgtatgttttgtagagatgggggtctcacgatgttgcccaggctggtctcgaactcctggactcaagtggtcctcctgcctcggcctccgaaagtgctgggattacaggcatgagccaccgtgcctggccttgtacacttactgtacagtcaatttacctgccactgatgtcatccacactgtggctgtgggtgctgaggtttggtgctgcctgcttggagctgtggcaccagcctctgggctcctgactcaagcacagggg

SEQ ID NO: 1562331 - DNA, 4001 bp, Homo sapiens
tctcaaaaaacaaacaaacaaacaaaaaaccaaaaaaacccaaaaagcgaacatccattaggaacatggggacatcacaaccaggcaatgcacatcactacacacggtcagtgatcaaacagcccaaatagccttgtactgcacaaaaaccaaagacatgcagaacaaaccccccaacaaggcatcattccttatctatgaaatgagaaaaaaaaaaaaaaaaaaaaaaagacagtgctgctatccattgtggagacaggttccccgccacttctgggatgggcatctgacgtttctgacctctggacccagatgccgcccttctaagagcaggcgccctgtgagctgggattcccaccacccctgcccattacagcctccactgcaggccaggaagggccgctgggcggggctgggtgtttggatcctgggcggacctgggcagccccgtcccagccagtgccccgcgggctgggtagggccccttccatgagcagcaccaggacccctgcttgtggcgggtgagccccgcatcaggcgcccgactttgcataaacgtgaaataggccacaggaggcagcaactcaacgtgcagggccgtgtttaagagaaagcatctcaccgggcctttctttcctttttttttttttttttttttttttttgagacagtctcgctccctcacccaggctggagtgcagtggcgcgatctcagctcactgcagcctccgcctcccaggttcaagtgattttctcctgcctcagcctcccgattagctgggattacaggtgcctgccaccacgcccggctaatttttttttgtatttttagtagagacggggtttcaccctgttggccaggctggtctcgaactcctgacctcaggtgatctgcccgcctcggcctccccaagtgttgggattacaggcgtgagccaccgtgcccggtctggcctttcttgaaataatcaccagagtcgaagtgcaagggggcctccaagccagagctgtgttatcccaagaacaaggagctccgcggatcgcaggcccctcctttctgggttccgaccccaaagggaaggtcccttctccaggggcgtcctaggcgcgggcaccggggttctgctggcacagcccggatgggcgccgctcgcccgcacacctgcggctccacagagggccgatccgttcggttgccagcagtggagacccaggcccagcggttccaccagcgccccggcggagtcccagggcgggtgtgggcggcccggcaggggctgcgggtcgctgtcagcccgggtcccgccgccctggggagccgcctccgtctgcagcttctcctgggcctggcggggccctggtgggctccaggccgggaggggcgcagcgatggggcgtcggggccacccgcgtcccctccccgcccagtcccgccctcgggcaccgaaagcccctcctccccccgccccgccgccccttccgtccggcccggggagaggccctgcgcccccggaggtcccagccagccggggcgtcttccccgcgggccggagccggacccgaaccgctcgcagacgcggggcctggcggggcgtgcggtgccggggtcgtctcgggagcgggggtcccagcaccgagctcgggcgcagacagggacccccccaccccgcccaggccggctccgccccagaggaggccgcggggaggtggccccaagtcgcgcgcccgagggtcggacccagagacgcggagccacaggggcaggcgcggccccagccccgcgaggaggagccccgaacccgccgagccccccgccgtccctggggctggagtcccccttcccggggacccgagggacggagccgccgccgccgccttcccaggactcggggtcaccccccgcgggccgagcggcttccagggtgcggggtccgggaggcgctcacctggtcccgaggaggctccgctcccgacggcccgaggcgcgggcgccgagtaagcagcagggagggaaccgcggccggcgccgccccctttataccccgccccgccggcctgacccgccccgccgccaggaagcgctgcggccccgcggatgggaggagggggccgggggcacgggagggggatgggagggaagcggggaccctcgagggcgggaggctggaggaggtggagagggtggggacccccctgcagcccgggccgagctcccccgccagcccctgcccgctgctgctcggacttcgcgtcccgggcccggccgcccgtcgcccccgccccatttcccggacgacctggctggggctgtgtccgcctccggggccctgggtgttggggaccgcgccccgcacgcagggccgacgggggccctgggactcgccccttggtagcagctgccctggggggtgcagggttccccccatcagccccccgacccctcccctaccccgtgtcctgtgtccggcttgctcaggcctcccgcgagaggccccgggtcaggagctcctgcagaaactgccgctcctggggcctgagggtggggagccgggagggcagggacagcagagcctgggcgcggaggttggggcagagcctgggcatgcggcgagccacccctgccacccctttcccgctggaaaccacaggtgggcttggtgctgggccctgggaccaccgtgaggtccccacctgagcccagccggggacagagtgacaggggtccctggtagggctctgtctggggtccccactccccaccctggtcacagtcccccagccagggccggggttcctccttgaggtgaggcgcagccgggttggggagaggtccctgggctccgggacagggctcccttcagagctgtcctggaaggtggcggagcggctgggggcgaggtccctcttctgatgagcaggtttgcaaatgtggtgtgtgtgtgtgtctgagactgagtgtgtgtggtgtgtgcatctgagtgtgtggtgtgtgtctgtgtctgagactgagtttgagtctgtggtgtgtgtatctgtgtgtggtgtgtgtctgtgtctgagactgtgtgcatctgtgagtgtgtggtgtgtgtctgcgtctgaggttgagtgtgaatgtgtgtgtctaagtgtgcctgagtgtgagtgtatgtgcctaagtgtgcctgagtgtggcagccacatggtagccatgagtccagggctcctgcctgctgctcctgagcacagctgacggcgggcaccgtgtgccactcccctgggtccatgccgaactctcacctgggcaatgcctcctgcttccaagccagcagctcccagggggaagccaggcccctcctcacaagaccagaatcctttaggggttaccttggctccagaagttctccctcggcctggccagcactgtctaggggcacgtgctggccaaggctccccgtatctccttcacaggggtctcacctgtggtctgaggcttccgtcctctttggccacccccccagcatccttcacagacattgcactgataaatctccagtcacgtcagagcttccatggcacctgcctcttggaagaccccaattaacacaagtggtgcaggaggggcctgagactcagctggtgcggtggccgtttcccggccaacaccgaggacaccattctggttgatgtggggatatgggtaatctttggcacaaagttagggccccaattgttaaatgttttcaccaagagtgatctgggacgttttcctggtggaaggggaggccttgtgggtgtggcagtttccccctttcagtgcatggggggagtggggttgatgctccacagagggatgaatggagattgcgacgttacccacggttgcccatcaggcttggtgtgagaacaaagggcctctctggttgctgaaaaggagtcccatgtttggcagaggtagaaccagtatggctgaggagccgacagtgactgtggggaccacctagctctaggcatgttttgat

SEQ ID NO: 1562332 - DNA, 4001 bp, Homo sapiens
ctaggaggcggccacccggggcactcccacttcctggggttctttctaagaccaccctggcatccaggtgacagggatggagctggcgacggctgggtgcagcccgggaagggaccctaacctggatccctgagccacattagctcgggaatggtgacctctgtcaccgggaggggctggctgtgctcaggtgggcacggcccctcccttggggaaaagccaggcctgattcggggtcccctggagagcgtccctctcccagggttgaaggcatggtgcaggtgtgcaggcccggtcgtgcccgccgtgacccccttgtcctcgcgcccaactcgcccccctctcccacctctcagtgcctgggctcacctggcgctcgttgtgctttccgtggatctccacaaagtcgtcctgcaccttcacggtgaggtcctccggggagaagtgcttcacatcgaggaagatgacgaacttgtcccggtcggatcgaacctgaaatccaaacgtgccatgtggagctgcccagagggtgccgtccctgctggggttggcagagacagggcgggtcccggttatcagaacagagatgcttcggtcacctgccggcctcttctcccacacaccaagtggggcagagctttcgggggcctgtgactgtctcctggacagacaggcatgaccctcgacctgtctccaaaccctcagggccagctgaggggctgaatgctactggtgggccggctggttgtttggctatggtcaggtggctggttatagataagttggctggttatgggctggctggctactggttatggtaggaggggtcgttacgggttggttggtccgttagggtcaatcgtctggctggtgatgcttggctggctggctggactcagcctgtggaatgaggtcactgcccttggtgtcatgctgtctatagaagcggccggagcctgctgacagcctgcgcagctgcctctccaaaacgcacttccacatgctccttctcactcccctggctcagccttggctccctgaggcattttgcaccctggcgttgatgcctactgcagcagccctggggaggaccctgtttatgaggtgctgggtgggactcaggccctccagaacagcagaacctgcaccgctcacccgtggctcagagaggaggcctgtggttgggtgggggggggggcgtccattgcctgtccttttagccttggcagggcacctaagtaaacttgccaagagctttgctagccgtgggcaggccgagctcattggaggaggtgctaggaacgccctgctctctggctttcaggactatgacccccacctgctcccaggtctccgggactcaggagaccagaggaacccgggagctggcattcgccaccacgcatgcctggatgggctgctcttggggtttccagtatgtggctggtgccttacaaagcacacatgggtcatgagctgatggaggaaagcaaaggtggattcaggctgctcccttgtccaccctctccccagtgccaggggaagctctgccacgtggctgcagtggggacacaggctctcgcccagcctctgcaaggggatgaagtgggacgaggccacctgcctgacggagcaagaccagagtccatcgctctccacccaccgaggccaccaccctctgagcagcgaggagaggccagcaccacgggccacgtcttacctcagagatgccggagtccagcacggtgcggaagagggactggcggtagtaggggctgatggtggacgacaggaagggcagcaggtcatactcaaaaaggccctcgccgaaaaactggtcgaacagccggctggggtagaagggccccagggtgcgcttgaaccaggggtgctggatggtcacgtccatgttcagctttggtaccacggggacctggaggctggcaggagtcagcggggcctctgggcagcgcagtgtggagccaaggccgagccctccctatatatgccaccagcagaatggaggcattaagggatttctctggaaaggcgtgagctcatgaagaaggctgctcagtcagcagaaacgtggctgggacaagtgcccgcccccagccccaggaggggctgcacggactgtccccgaggcctggactcagctgaggcccgcctgggcaccctggggctcccgggagggcagacaacccaaggaggcgcctgtgccccatactcgcctggggcgacaatggagcttctcatctgccagtcactgggcaggggctacgtgccagggaccatgctagttctctgcacaccttgtcctgccggggtggtcctcatggtcgccagaggagggagagcacacacccccgttagacacagaggttagacacatcgtcctcagagtctcaccgggcctgggcaagagtgcactggtttccaaagcggagtgcatctgtgaacctccgttacactcaccacttacaaaagtacgcatgcttgttaaaactcgtggagaagaagctgcaaggtgccataattccagcacctgggggagccctatggcgtttcatgcttgtcctccaggggtcacatgcctccaacaggaagacgggctgggctgtgggcagatgagagcaccacgtggtgagcttccctctgcggcccaccctggacgcccagccccatggccatcgtcccctcgatgtaacgcctcgagcgttacatctcgtaatgatgtaatgccttgatgtaacatccccacgtaacgcctcgagcctccgtggcatgacctgccgtggctgttgagttgggctgctcctgtcagggtggcgacatgtccccacgtccctgtcacccatgcggacccaccacccacatgatcctgttatccacaagtcctggtgattattttgctcctcgacccatggcccctgtccagttctcactaagtgtccaggcactcccggttttgtttgtttgtttttgagatggagtcttgctgtgtcacccagagtggcgcccagatcatatagtggcgcgatctcagctcactgcaacctctgcctcccaggttcaaacaattctcccacctcagcctcctgagtagctgagactgcaggtgcctgccaccacacctggctaattattattattattattattattattatttttgtatttttagtagagacagggtttcaccgtgttggccaggctggtctcaaactcttgacctcaggtgacccacctgccttggcctctcaaagtgtaggattacaggcgtgagccactgcacctggctcactcctagttttaagtcttttgatattttggtattttgatattttggtaaactggccctggggagcatggtcctcccccacatcccccctgccagcctgggaagaggccatgccccctctcccaggctagcttttctagtgtacggtccaggctgtgggaagttgcctggttctctttggcctcctagttcctactcagcctctaacagattcgtgcgtgtggagtgaacacacacccaggacactcccgggctttgcaaattcatctccagcccatgggctcagaaggccatgaaatgtcagatgccccagtgtatgcggatcagacctgacacatcccagatgggatcagggatgaaagggggggctccgaggcgtgctccacggggcacctccatcatgagcagcacccatgagcagcacccttcctcctacatttacagcactgtccggggacacaggatcccaaaaaatcttgaaatgatagcttttgccctgcaaggttacaattccagaggagcgattccctggggtgccaaattaaggtgcagataggaaacgctgggagagtgatgggtgcttcccccgaaagcctacaccagacctctctgcctgtgggtcctcagagccaccctgtgaagcaggtcccagcatcattcccgcttcatagaccaggaaatgggagcttagaaggtt

SEQ ID NO: 1562333 - DNA, 4001 bp, Homo sapiens
taggaggcggccacccggggcactcccacttcctggggttctttctaagaccaccctggcatccaggtgacagggatggagctggcgacggctgggtgcagcccgggaagggaccctaacctggatccctgagccacattagctcgggaatggtgacctctgtcaccgggaggggctggctgtgctcaggtgggcacggcccctcccttggggaaaagccaggcctgattcggggtcccctggagagcgtccctctcccagggttgaaggcatggtgcaggtgtgcaggcccggtcgtgcccgccgtgacccccttgtcctcgcgcccaactcgcccccctctcccacctctcagtgcctgggctcacctggcgctcgttgtgctttccgtggatctccacaaagtcgtcctgcaccttcacggtgaggtcctccggggagaagtgcttcacatcgaggaagatgacgaacttgtcccggtcggatcgaacctgaaatccaaacgtgccatgtggagctgcccagagggtgccgtccctgctggggttggcagagacagggcgggtcccggttatcagaacagagatgcttcggtcacctgccggcctcttctcccacacaccaagtggggcagagctttcgggggcctgtgactgtctcctggacagacaggcatgaccctcgacctgtctccaaaccctcagggccagctgaggggctgaatgctactggtgggccggctggttgtttggctatggtcaggtggctggttatagataagttggctggttatgggctggctggctactggttatggtaggaggggtcgttacgggttggttggtccgttagggtcaatcgtctggctggtgatgcttggctggctggctggactcagcctgtggaatgaggtcactgcccttggtgtcatgctgtctatagaagcggccggagcctgctgacagcctgcgcagctgcctctccaaaacgcacttccacatgctccttctcactcccctggctcagccttggctccctgaggcattttgcaccctggcattgatgcctactgcagcagccctggggaggaccctgtttatgaggtgctgggtgggactcaggccctccagaacagcagaacctgcaccgctcacccgtggctcagagaggaggcctgtggttgggtggggggggggggcgtccattgcctgtccttttagccttggcagggcacctaagtaaacttgccaagagctttgctagccgtgggcaggccgagctcattggaggaggtgctaggaacgccctgctctctggctttcaggactatgacccccacctgctcccaggtctccgggactcaggagaccagaggaacccgggagctggcattcgccaccacgcatgcctggatgggctgctcttggggtttccagtatgtggctggtgccttacaaagcacacatgggtcatgagctgatggaggaaagcaaaggtggattcaggctgctcccttgtccaccctctccccagtgccaggggaagctctaccacgtggctgcagtggggacacaggctctcgcccagcctctgcaaggggatgaagtgggacgaggccacctgcctgacggagcaagaccagagtccatcgctctccacccaccgaggccaccaccctctgagcagcgaggagaggccagcaccacgggccacgtcttacctcagagatgccggagtccagcacggtgcggaagagggactggcggtagtaggggctgatggtggacgacaggaagggcagcaggtcatactcaaaaaggccctcgccgaaaaactggtcgaacagccggctggggtagaagggccccagggtgcgcttgaaccaggggtgctggatggtcacatccatgttcagctttggtaccacggggacctggaggctggcaggagtcagcggggcctctgggcagcgcagtgtggagccaaggccgagccctccctatatatgccaccagcagaatggaggcattaagggatttctctggaaaggcgtgagctcatgaagaaggctgctcagtcagcagaaacgtggctgggacaagtgcccgcccccagccccaggaggggctgcacggactgtccccgaggcctggactcagctgaggcccgcctgggcaccctggggctcccgggagggcagacaacccaaggaggcgcctgtgccccatactcgcctggggcgacaatggagcttctcatctgccagtcactgggcaggggctacgtgccagggaccatgctagttctctgcacaccttgtcctgccggggtggtcctcatggtcgccagaggagggagagcccacacccccgttagacacagaggttagacacatcgtcgtcagagtctcaccgggcctgggcaagagtgcactggtttccaaagcggagtgcatctgtgaacctccgttacactcaccacttacaaaagtacgcatgcttgttaaaactcgtggagaagaagctgcaaggtgccataattccagcacctgggggagccctatggcgtttcatgcttgtcctccaggggtcacatgcctccaacaggaagacgggctgggctgtgggcagatgagagcaccacgtggtgagcttccctctgcggcccaccctggacgcccagccccatggccatcatcccctcgatgtaacgcctcgagcgttacatctcgtaatgatgtaatgccttgatgtaacatccccacgtaacgcctcgagcctccgtggcatgacctgccgtggctgttgagttgggctgctcctgtcagggtggcgacatgtccccacgtccctgtcacccatgcggacccaccacccacatgatcctgttatccacaagtcctggtgattattttgctcctcgacccatggcccctgtccagttctcactaagtgtccaggcactcccggttttgtttgtttgtttttgagatggagtcttgctgtgtcacccagagtggcgcccagatcatatagtggcgcgatctcagctcactgcaacctctgcctcccaggttcaaacaattctcccacctcagcctcctgagtagctgagactgcaggtgcctgccaccacacctggctaattattattattattattattattattatttttgtatttttagtagagacagggtttcaccgtgttggccaggctggtctcaaactcttgacctcaggtgacccacctgccttggcctctcaaagtgtaggattacaggcgtgagccactgcacctggctcactcctagttttaagtcttttgatattttggtattttgatattttggtaaactggccctggggagcatggtcctcccccacatcccccctgccagcctgggaagaggccatgccccctctcccaggctagcttttctagtgtacggtccaggctgtgggaagttgcctggttctctttggcctcctagttcctactcagcctctaacagattcgtgcgtgtggagtgaacacacacccaggacactcccgggctttgcaaattcatctccagcccatgggctcagaaggccatgaaatgtcagatgccccagtgtatgcggatcagacctgacacatcccagatgggatcagggatgaaagggggggctccgaggcgtgctccacggggcacctccatcatgagcagcacccatgagcagcacccttcctcctacatttacagcactgtccggggacacaggatcccaaaaaatcttgaaatgatagcttttgccctgcaaggttacaattccagaggagcgattccctggggtgccaaattaaggtgcagataggaaacgctgggagagtgatgggtgcttcccccgaaagcctacaccagacctctctgcctgtgggtcctcagagccaccctgtgaagcaggtcccagcatcattcccgcttcatagaccaggaaatgggagcttagaaggtt

SEQ ID NO: 1562334 - DNA, 4001 bp, Homo sapiens
cactctgttgcccaggctagagtgtggtggtcgtgatcttggctcactgtaacctccgcctcccgggttcaagcaattctcctgcctcagcctcctgagtagctggaattacaggcgtgcaccaccatgcccggctaatttctgtatttttagtagacacggggtttcaccatgttggccaggctggtctcgaactcctggcctcaagtgatccacccgcctaggcctcccaaagtgctgggattacaggcgtgagccaccacgctcggccaatatgtgtatttttgctcttctgctcataaaactctcctgagctcaatgtagttcattgggtctacaaaaagagcatagttaatcttagaaatatttcattgcacaaggctggcagctttatcttgtatggcgaactacctcactttcaaatctaaacgtcttatcccctgctgtaagctggaacagaggcatcgataagggaaattagtgataaaaggtagtaattatacactgcaatggctgcgggatctgatttagaagtcataactgacccgagtttgaatcggggctttcctacttattagcggtatgactttgggctacttaattttaacctttctgggcctgagatcccatatcttagataataatagcagttatctcagagggttgccataaggattaaataatacctgcaaagcactcagcgcaacatcatactttcagaaatgttggctattttgactattatttctgtaaattgggcacatctcaattacagagaatctctaaagtagttctgaatcccatctcatagagttgcaaagggtttggtcaatgcaaccttatttttcccaccttttaatttctgcagtaggctactgtagcagccactagcacaggtggctattgagcactccaactgtgtctagtcggaattgagatgcgctgttaagtggaaaatacacatcagattttgaagatttaattttgaagaattaattttttaatttaattttgaagatttaatacgaagaaaagaacgtaaaatctcaatttttaaatatttgtttaagcgttgaaatgataatgtctcagatatactaggctaaatgaaacatataattaaaattaatttcacgtgtttcttttcactttttaaatgtagctaccccaaaattaaaatgacataagggactcgcattatatttgtactggacagagttcaggtaaaacctttctactcataacgtggacagcagcacctgggagcttcttagaaacgcagatgttcggccccgacccagacctatcccaaggcgatgcttacatctcgctccagatgattccgccgtttagcataatgaagagggccgatctggctcaaaagccacatacagcgaataactactaactgctttccgaaaacagcaaagtgatgaggaagaaagaagtggctgagaagaagtaacagagaaagaaaaagacactcaaattctaggaacaagaagcagaggagaaaaacccaacctgggagattaagtggaagggcactcccagacctctgcctccataaaagtagagggagatgcaaactgagataagacctacaatcaaaacccgtcaaggtccaggaaactgtccctcaaatctagtcttacccacccctcagcggcctcagctaagctaggcctgggcccgaacaagtcccaggttagggttcgacgcgaaccaccatcctccccagggctgcacggttctgtggggcatctctccacctttcgcttaaaggcccgtttcccaagacacaggacgcgtttcccggggctcacctgcctctgagccgccccaacggcctgcaccttcaccaccgccaccttccagtccttcgtcagagagcccgccccctgctcccattggtcaggccgctcgtcactcctgaagggcggggtcggactcgcgaggctgtccagaacgccatggcaaccggtctcggaactacatctcccgtcatgttccgctcgggggcggagaaagaggcgaggccccgccccaaggactaccaataaatgggcgaagttggaatcgcccggatgggttccgttttatgcaaattttagccgaagaccacacccttcctcattccaaccataggcccggccaacccctttgggttgtgcttcgcctttttcctttccacattattctctccttgaaaacctccaataattaagtcaattaagtgcatcctatctagtgtctctcacggcaacgagcagatgcaccgaaatcgtgcaacaaaatctccataaaccacgataggcaacctcagaccataaatctcctgttacgcctacatggggaggagggggagagtgctaatcctgcccccacacagcccctgctgattggctcattcggcttgtcactctgttgtcttacatttctttggctcaccctctttgggttcgcacggtgggcggggccagtggtagggggtggtgagaaggtgcgggccccttcttccaattggctggcggtttccccacccacttatgggcggagatggatggtggatggggggcgggggaggcagcggagggagatgaggagataggcgggagcgagggagcgagggagggagcgaaggaggtagagaagagtggaggcgccaggggagggagcgtagcttggttgctccgtagtacggcggctcgcgaggaagaatcccgagcgggctccgggacggacagagaggcgggcggggatggtgtgcggggctgcggctcctgcgtccctcccagcggcgcgtgagcggcactgatttgtccctggggcggcagcgcggacccgcccggagatgaggtgaggagagggctgcaaggcggcggcctggaccacgggcggctgcagcgggggcgggggtcggcgcgggggtctgcgcgatggctgcccggggcatccgtcccgcgcccggcgcttgtctccccggccgcccttagcccctcgccgcgcgcccgagagacggcagcggctgcccctctgccttgtccttcccgtcctcgggggtggcggcggagtggcgggcggacccgcactgggaggccgggggccgcggtgggccgtggggtggcggccgcgggacgggcgtggggatgaatgggcgccgcggccccgccgccgagcgggctccctcctctcgcggggaccccgggcggccgctccttcccgggctgacctcgctgccctcggccgccggcgaggggcggcccggcctcgcctcccgccggcctcccggggacccgcgttggcgggagcggcgccgcctctgcctggagccccggctccttcctcggcccctcgctcgcaagcctgcagaatcctgggtcagtgaagggcaggcaatgccgttcggccccagggcgcgccgcggggccgcccctgaaggcatttaaaggggagcgtcttccgcgccctgtgagcgcgtccccgggtccgccgcgtcccttcccttcttacgcaccgacacggttttgtggtgtggacccaagacacaattgcagtcccttgcttgcacgaatgcaatccgaattcccaaaaaaaggaaaccggcgaggaatcggccgcaccttcctgcgcttctgcttgccttgggattagaaaacaacttcggagattacatttcctatgggcaatcttttgttgtgattcagactcaagaaggctttgctttggaagaaatagattagcggcttctctgtggagttggaggctatagagatttttatagcctcttcaatatgaaagtttcctctagaactttgccatcatcagtgctattctgagggcagcagcaacctggaaatttagatacatgcaggctccggccagatgcgtttctttgtgcttgtctgttggcattcttctcttgctgctcctcttgatcaaaacgtacagataataaaggcaaggccaatgaagagggtagataataacagcaaatccca

SEQ ID NO: 1562335 - DNA, 4001 bp, Homo sapiens
ttgctgcgcccctccaggtcattagcagccagctgaagacaatcttgtcttctcctgcatgtgcaggggatgcctcacatcccacacttgtttccttggggttcttagctccccagaagccctagtcctcctgaaaggccgatggacacacacagtaggatgcttatctcagggggcagccacagggcgccccagcacctaagaccacacagcccgggcctgcacaggcggtttcctaccagcacccgttcggggcaggccctcctgaggcccacactctaccttgatgaagtagtttgtccccgcgaccacctggctcttgaatgacacggccttaaacacagggaacttcttgttttctttctcttcaagctgggacctcacctagacagaagggacagaatgaggatgtctcagtggcttcttggattccctcctgctagagtaacttgcacgcatgtgagcacacacacgattctgacactggctcttcacacaattgtctcttacaactgaagggacatttaaactgtcagcctaataataaagtagaaaaaaacagttccagctgggtacggtggctcaaggatgtaatcccagaactttgggaggctgaggtgggcggatcacttgaggtcaggagtttgagaccagcctagccaaatggcaaaaccccgtttctactaaaaatacaaaaattagctgggcgtggtggcgagcacctgcaatcccagctactcgggaggctaaggcaggagaatcccttgaacctgggaagcggaggttgcagtgggccgagattgtgccactgcactccaccctgggcaagagtgagactgagtctcaaaaacaaaaaaaaaaaacacaggcctcagcatcgcctggacctgttcttgcttggggcatcccgtcggtcaccaaccatgacagcgaggcgggcctggcctgtgctccaccggagggggcttcttgcacagatgacctgctcatttcagcccctccagaatcttctggcaggcgcagagcaacaggacgtccattttacagacgaggaaaccgagacacagggaaggttgccatctgcaacccagcccggtttttatcttgtttttctgtgttttaactttttatttagacttacagtttgaaacagtgctagaatcggaagcatgtaaagaaacctgtggaccttttatgcagatacacttaagtttttaacccatgtgccttatcactggggacctcttgcactctctctcatgatttttttcccgaactagatgaggatattgacaaagattcttgcttggccaaactgtagtcgggctcctgaagcgcctaggccacctgcgcacttccttgtaaaatccacttttagcaagaagcctggctaagtcagtttagccagacccttcccacccgcttgctatcggatcaccgtggagatcggagccggctgctcacctgcgccatcgccggcgacgcccgatcaccctgcctgcctgaaaccagaagcgcctcatccctggggtttcctctcagagactgtccatgcagggaccgcaccctgctccgggctatcaattcccactcgcccttgctgtattcagcggagcccaatgtctccccagcggcgccccaggcgcggccccccgctgctcactcgcgcgcagcgcccgagcggagggaggcctctcacggccacagcccgggccagcccaggggtgcgcagcggggccaaagcggcttctttcgctccaggagccgcggccgcgccctgaggctaaggcaggactccgggccggccccgtccccgcggcccacccacctggtcggcgatgtgctgggtctcggcggtggccggctgcgtggcggagggcgccccgcacatcatcttggcggcgacggagggaatctggcgaggggactcggcgaggggacgcggcggctcctcagcccaagtaggcgctggggtcacgtgacgcgcgggcggaaccaaggggcggggaggaggcactttggcttcggagtcccctgcggggtcgcggtggccccgcaagaagggacgcgcggggcggggcgcggggcggggcgcggggcggggaacctggccaccactcgccgcaggctgggtctccgcgcccagcgctggtgtcgggagggagcgcccccctcccggggctggtatcgtctttccgggcgccgagtcacacggaccggggcgggggcgcggccgggtgtcgccggtgggttgggcgcgcagggtgggacgatagggaaggggcagtcggagtaggcgcaatcctgcagggtggcggggtccgggccgcgcacgagggagggcggggcgcagcgctgcaggggtcaggggtcaggggtcccggccccgcgggagcaggtgtgcgggctgcagtggacatcaccgcttgtgaccgagaacactgaaggctgaagggggtggacagaggggcccagggagggggagacggcgcccacgcgctccaggctgggtgggggcagggggtagatcagagggatgagaagaaggcagggttctctggtggaatttgcgttttaggatttcttttctttctttccttttcttttctttttttttttttttttttttttttgagacggagtctcgctctgtctcccaggctggagtgcagtggcgcgatctcggcttactgcaggctccgcctcccgggttcacgccattctcctgcctcagcctcccgagtagctgggactacaggcgcccgccaccacacctggctaatttttgtatttttagtagagacggggtttcactgtgttagccaggatggtctcgatctcctgaccttgtgatccacccgccttggcctcccaaagtgctgggattacaggtgtgagccactgcgcccggcctttttttttttttttttgagacggagtctggatctgtcgcctaggctggagtgcagtggcgcaatctcggctcactgcaagctccgcctccggggttcacaccattctcctgcctcggcctcccgagtagctgggactacaggcgcgcgccttcatgcgcagctaatttttgtgtttttagtagagacggggtttcaccatattggccaggctggtctcgaactcctgacctcgtgatccacctgcctcgggctcccaaagtgctggaattacaggcgtgagccaccgtacctgacctcttttctttctttcttttttttttttttgacagagtcttgctctgttggccaggctggggtgcagtggcctgatcacaactcattgcagcctggacctcctgggctcaagcgatcttcccacctcagctgctatagtagctgggaccacaggcccaccctaccacacacatatatagagacagagagtttcaccatgttacccaggctggtctggaacttctgagcgatctgtccacctcggcctcccaaagtgctgggattattggcataaaccactgcacccctaatttttttaaaaagtgtttttgtagagatggagtctcactatattgcccaggctggtcttgaactcctaggctaaaatcgatccatcccccaaagtgctgggatgacaggcttgagccaccacacagtccctttggtttagggtttctgttagactggaccacctgcggaagggaagggtcgcttgccttatttggggtgggggtggggcctgtgctaggcacctgttggtgtgattgactcctcaaaatgacccagagcccccacccaagggctgtccctcagggggactggtccgctcctgcatgcaaggccccagctggagcggcccatgaatgggttgtggggtcctttctcttacctgccagggcacagcctggtctgtcacttcagggaagggcccaaaggggtgggcagtcaggtgtggttgaagcctggggggagcggggcagagccccccatcattgttgaatgagtgaaggcagagttgaccccacgaaaatg

SEQ ID NO: 1562336 - DNA, 4001 bp, Homo sapiens
cacgcttgtaatcccaggactctgggaggctgagggaggcggatcacctgaggtcgggagtttgagaccagcctgaccaacatggtttctactaaaaataaaaaagttagccgggcatggtggggggtgcctgtaatcccagctactcaggaggctgaggcaggagaatcgcttaaacgcggggggcggaggttgtggtgagccaagatcacgccattgcactccagcctgtgcaacaagagcgaaactccatttaaaaaaaaaaaaaagttcctccacataatttatgttcttccacttttctgctttagatgtggtctaaaactattttttttttttttcccagagaacacactgtgttctcaacttcatcttcaggttcggcctagacaaaaaaaagaaaaaaaagaaagaaaggtgggaatgtacctgtaaactggttctatgacccttcatcttctccggaaggcttactttggacatttcagcccgccaagtctaaatgatatatatcaaaaaggtggaggtagtgctataggctcagatcgaagattagacttgctaatagaatgttgatcccatgagtaatgctcacagctgtggcatccaacaatggaattaacatttcaacaggaagcagagagccatcccaacagaaagggccactagatcctgcttcagagcacctaacaacaaaaaattacccttccagaggctatactaagtgcgcctcctaggatcccacctacggatttttaaaaatgaattatttggttataaaacgcagcaagtgcttagtttgacaaacaagatcagttggttaaaacaccgacatggaaaatccgttttttaaagtgtcaaaatgattacgcctcctaatggtccacgcatttttcacatgccttttttcccctcccagagaaaggagcagtcgacaaacgcacttggcaaatcctctagcaattaccctgtacaactcagcccgtcttatctccaaaatgaacgactcattacaaactcaaaaacgaggtcactgaattctcctttgcacttcgcccaaggactgcagaaaccaatgctacatttttgcaggaacccacttttgattttccacggtctccttcacaatgcgcgtctggttagcagctcctgcctgggcgagctgcttccaggagactaacaccgtccaggctggcgttcgctcagcgcctctttcctagaggtagcctggccgatccgaggcaccgggcagctccatgtccattgaataatggcgtttgcaattcagcctccccgcctgggcgactcgacacctgaaaactcgccgcccaaggtttttgaaatcgggtaacgctggagagaaccgacacgaaggctgacaagggagacggcgagagcaaagaaaggcaagcccgcaccggggcagagaatgctatgggagagctgcgaggcgcacccgacacgccgcgcccgagcccctccgcctccaccccccgccgagggctccgtccccgggcactccgcgcgccctgcgcggctccctacgggacggctccaggagcgcccggcccagcaaaagcgcccctgtgcaattctgcccgccccgccgcccctgcagcagcgcccccaaatcgcgcccgccccctcccccacgccccattgttcctgggtggccgcgggcagcgagcgcccccgggctgggcgggtgctgaggaccccatggcccctactcacccactactccgcacaggagcacgaagcacagcaggagcgccatggtggctgccgtgccgtgggcggcggctgcaggtaggcggctctcgctcctggtcccaggctccccgcgcctcgcgcgctcccgactggctcgcggcggcggcggcacctctgcaccctccgcccctcctcccagcccccgctcggcaggtgaactcgcgtcacttccggcagcggcccgggccgggctgcgagcgccggcttctccagccgcgtggggttgccttggcaaccgggcgaggcgctcttctgtccccgggaccctcccggcgccgaactctcagcctcccggcgcgcggcgtcgtaggtcgcgggcggccgcctcccacgccgcaagcctgcgcaggggtccccgcctccatcccttaagctaaaccagggttttgcgcgcgggggtggggcagcccgtctcccacatactgaaattgcgttggcgccctcctttaaggcgaggcacgggacactcccaggggccgccactagggcggctcctaccctccgccccgcctgcacccacccgtcccacccctcgcggtttgccccaggggcaggttctctgacctcatgctcacgggatgcgacctgtgcagcccctggccttcgctctcttaacgagccgctctggctgacataaaaagcgcgagagggcttttctccatctctggtagggatagagcccctctgcagctaccgatttgggaaatacctgaggttttttccacttgcacagaaaggctattctagccctgaagctggctagtaagacgctatagtcccagctactccggaggctgaggtaggcagacaactattatccaatattagtgagtgagctttgaaagtggggctcagtagttgtggttgaaggcgtcagttggagtgtggggtcggggaattggagatcttgaaagttgttgtcggctgctcttccagataacgtttatttataactacatagagactttgtagtgccgcgacagttccataacagaaatgaattgaagaagaggagcggtgggtaagagcttattccgcggagtggggcagtaactgggcaggtttcatagaaatggcacctacttcggggttgctatgaaagttaaatgagataatgcacaaaaaatgcttggcaccctgcctggcacgtagttttaattagcttccacttactgagttcttgcttacagggttcctgcttatgtagtctataagcttacatagtttgtaagttcctgcttactatctagactaagcaggaacccccgtaagcagaattcagtaagtggaagctaataaaactaatattggaaaattcttattatgcattgaaccagaaaagagaaggggcaaagaaatcaggtatcaagaagaccagaattgcgcaactgcagtttagcctggtgagttgcaattctggctgcacatgaaaattacttggagaatgttttaaaaatactagtgcctggctgggcgcggtgactcacgcctgtaatcccagcactttgggggcccaggcgggcggatcatgaggtcaggagatcgagaccatcctggctaacacggtgaaaccctgtctctactaaaaatacaaaaaattagccaggcgtggttgcaggcgcctgtagtcccagcgactcgggaggctgaggcaggagaatggcgtgaaccccgggagggggagcttgcagtgagccgagattgcgccactgcactccagcctgggcgacacagcgagactccgtctcaaaaaaaaaaaaaatatatctatctatctatctatctatatatgtatatatatactagtacctgagccttactcaagtgattccaatttaatttgatttaaggggaatcctgctttacggcagcccaataaatgacagatgaccagtggtagtaagaggaagtggctttgcaaaatcataccatctgattgtaaagttctgccaaagcttttacaaactaataagagttcaatacagacgtaagacaacatgagtaacggctagggacttcccatttgagcaaacaggaattctactggatataattgcgtgtaaataatatttggaatttaaatttttactcaccacactaaatgaaatcaagcagagaagagcaagtattgaagttgttcatctgtttaacagtgttctacgagaacttttctatactcgctctgtcgcccaggctggagttcagtgaccccatctcggctcactgca

SEQ ID NO: 1562337 - DNA, 4001 bp, Homo sapiens
attagctaaacacttcttagcaaagatagtaagtcaacttagcactggcttacaactactttgtagcttatgatagagggattccaaagaagagaaatgaatggactgaaaactttctaaactaaccacccttgttgctggccagcttcgctgatttcctgagccctgaggagctgggcacctagcactggggaaacaggaggagggggcagatgtgtaaagcagaagctttcagtttaccacagggaatataataaacaaacaaacaaacaaacaaaattgtggttcaatggagtggttgaataagtgtgagtgaaagtattaaatattgtcgagcagaggaagtgaaaagcataattacttcgaaagaactaataaagagattttttcaatagaaaatgaatattaatgcagttgactctgttaatccctcaaattctgaaaaccttatacaaatttaataaaagaaataaatgttgtaaacagattaaatgtaattctcttcattaaatacgaagaacttatcctacttttatgaattttcatattagaaggtcagcatttttcctgccataaaacatctttaaaatggtaactcctagacagccactaatttgcatttcaataaacaggctaaaaatgtctacagaagttatggtgactcttttctagcaaggttgaatgagaaattcaattcttttaatactcaggtgcaacactgaagaacatcatttcagttgcaatatctttttgagtatcaaaggtaaatttcagtgctatatatacatttcgtattggaggctcaggggtgagcctgcgatttttgtcataggacgttagagacacaaaaacattttacaaagaactttgcttttagcttgcattgttttgtgaatatgaactgatgcaaagaccacgtgtgtaagacactttatacctgaataaccaatgaaaggccatttggggctccatattaatcacaaacaagaaaacccactttgcttcgttaattattagcagttcttactacgaataattagaagggaaaccagatgcccttctcttataaacaagtgtctatctaaatcaacgaacctgtacagattagaccctgggtgaattcatgcttctcaaaaaccttgtgtttgacttcagtccaatagctcagtctaccacacttgtgaatctcccaaagaacgaaaacaaagctctaagttttttttattcacaagagggaaaaccaggactatttagaaagcagaagatggagaggccactgcctagcctatccagataagtttatttggatatagtttactctatccagagagtcaaatcccctaaacacgagactgctatttccaaggtggaaagggaaagaaaagaaatgcaaaaggtaaaagttaaaggaaaaggaacaaaacaaaaccgcgtgcggctggaagtgcgcgggtttctgccgtcgcctcgcggaaaaggcagaagcgtctgcaaaggtccttctgcaaaggtcccggtccgtccagctcaacccacgttagcccggaccgtgacccaagggcagccccgagcctctgaccctctccgccgccctccgtcactgacctgcgtagacaaagagcaggaccaacttcggaagcaagacccctggacgcacgggtagcctcggagcgtccatccaagccggtggcctgaggcttggagcgaagggagagcccggaaccggagggaatggggaggatggagggcgatcagatggagagagcagcgctcctgagagccgggtggagcagagacccggccattgcctagggagccttccaagggagcccgggccgggcgcgtcccgggccagcgactgcgggactccgcggagctggggcgcccgtggcccgagacgggctgcgctgggggcccaggtctctttgtctcgccccactgcgctcaggcgcggggaaggcggccactccggcgtccttggccacccaggctcacatttcatctccgcgggtggcaacgactgcgggcagggggcgggggtggccccgactcctccccaagcccgggttcttccttctaaagagtgactaggggaccaagaaacttttcctaaccccttgctttggcgattgctatggagttcagcctgctcctttttaaccttgcctccactacaatttttcctttctaagcaatggatgaacaactttgctttttatctttaaacaaagggaaggaattttcagggttgaaggtattcgacaaagagtgacagtgaagaaaactcaggattgggaagtacagaaagtgtatggcatctctgctgaaagctgataaaatgtttattattttttcctgtaaattcagaaaaaaaaaacacaacagtgcacactgtcgttatgattttgacgttttggagttactggcctatgcaattaaacaagagaaagaaaaagatttatgaaaaatgaaagctaaattgtcattagcaaatgaaatacgtgtatacatggaaaatcaaagttaatcaactataaagctcttgtttagcaaaccaatagttttctttcctgcaaacaaaaatcagaaagttctcaatgttatgcatgaaggaaaaaaaatgatacgaataagtaaagagatacttttttcactaagaaaatttagtaggataaagacaacaagattccccaaattattatatacatttggaaataaaattgatcccaatttttaaaataacatgatttttttcaaaccaatctgattctaaagtttatatggaaaataaatatgtaagaatatctatttaaaacaagagtaatgaatgggaataatgaatgggatattacatataatatcacaataattaaaacagtttagattaacattggaatagataggcttagtgaaagagaaaaggtaacccaaaagtagacatgagtatgtacagcaatttaatttatggtttaaagaaatatcaatgtaaagtagtaggggaaatgatgagttactcagtgaaaagtgttgaggccgtaaatagccatctgtggagccttatctttttacatcaaaatcagttctatatgaattacatatttaagatacaactatgaaaatattagattaaaaaataagaggataacattcaaataattgtggaatagggaagccttttctaagcattataaaaaactcagaaaccataaaacaaaatattgaccaacttgactaaataagaattaatacttccagttggcagacatttaactggcaaaaatatttgcaatgcaaagtcctaatctcattattatactgagcttaaaaaaatcaataggaaaaacaaccaagagataactgaggaaggatattaatagacacttcatacaaaacaaataaatataaatatagaaataaaattgacagtgagacatcacttttcatgtatcaaaccaaccaaatacaaaaccaaatgaactcttaagggaaacggtgtggttatatgtacgaaaattcaaatacacatgtacttaatttagtcagttctcttccaggaattttttcctgtaaatgcagtgctgcaagggaatacgagagtgggaggaaacatcacccccaaaataaacataagctaagctctttactgtgttttacacgttggtgaaggcccaaccatccaccatgttctaaagaaggctgatcagttccaccttttttctcatcctcgctggccaatctatcaccaagttcacctaatctgtccacctgaacaccacccaaacgcattttaaattatcatctatttctgtcctaatctagacttttatagtcttgattatattcagcctccctgccttcagagatgtttgccagactgaagctggaatatttcttcttaaactacagatttcatcatgttcactcactcagtagcatcctgttgcccttaggttaaaattcaaacatttaatccagggtgttcaagaacttgttcactaggt

SEQ ID NO: 1562338 - DNA, 4001 bp, Homo sapiens
ggccgaggcaggcggaccacctgaggtcaggagtttgagaccagcctggtcaacatggtgataccttgcctctactaaaaatacgaaaattagctgggcgtggtggcaagcccctgtaatcccagctactcgggaggctgaggcagaagaatcatttctacctgggaggcagaggttgcagtgagccgagatcacgccattgcactccagcctgggcaacagagcaagactccgtctcaaaaaaaaaaaatgtgccacatgtcacaacattgttaaaaatctgaatgctgaattcaaaatagttgcaagtacatgttgtattatatgtaaaacaagatcacaacagcatctacctccctaaggttggcaaggattaaatgacttactgtatgctagtgcatattatttagatgttttgagaaataactaccccagacccagcaaaatcttatcaatctgaaacttaaattaaggataataagattatttaaaaaatggattctaaaagctgaaaatgcatttagatctcaaaaacagagtaagaatcaattacatgcttttcttcaaggactgcaagtcctttctgacactggagaagaacttaactctttcccaaagacagccaaaaggaatatcaggacacaggccttgaaagggataacatccaaatgggaaatgccacccaccacctctgaagccagattactccagtctatttttatcaaccaaccatttatacgactttttttttttactttaaaaaattccatgagggggctaacaactcctaagtgttatgtgctttgcatatattaaggtattttagcctcataacaatccaaaatggaaagtgctggtataaccccactttatagataataaaatgaggcacagggtgcagctcctagagtatgaggcgcgcggcaagggctcccagctccaagggaagtagctgcctgcggacaacgggcgcagtcatcctggtgaagcccagaccaagcccagacctacagccttgagaaaagcggggctcacagcttggggcaaaagtggtcattcctctcaagattctcacacctgtccaaacgacctagtcaaagccagtccttggggtcggatcccattgggggagcagctggggatagggaaaggtctccagaagtttggcaggcgtcccggggtgaggagtaagggtcccaggtgtgaagggcctggggggaggagtccttgtatgggggaggggtccttgtatgagaggcggggcagtggtccctggtttgaggggccgcgcgggtgtcccggggctgagggtcgggagtccggaggggcagcgcggggctcccagggtgaagggcggggtccccggggtgaggggccgcgcggggttccgggggtgaggggcaggaggtcccgggggtgaggggcgggagttcccgggggtaaggggccggggtctcggggcgaggggtcgtgctggggtcccacatgaggggcggggtcctagggttgaggaacggtgtctccggggcgaggggcgggttccagggtagaggaaccggggtcccgttgaggggcagaggtcccaggggcgaggccgcgtgggggtcccgggggtgaagggcgggggtcctggagtgaggggccgcgcgggggtcccggagtgaggggctgcgcgggggaccgggctgagggcgggtcgcgggggttgagggcggggtccggctcaccttccgacagctccagctccagctcagccaggctctcccgcacctcggcaggcagcggcgccgcctccagcgggcacccgcggtcagccatggccaggccggctagcgtccgggcagaggctggaaccggaccgggcctggcggcggcagcgcaaacctcggctacgtagctcccctcaggccaacaacctacatccgccaggcgaggagcgggaggcggcgggacaggggcgcggccaggacagcaacgcacccgcgcgggcacgagcgcggatggctccgccgcgccgccgctgccccgcgcgctcctgagcgcccggccggccctacacgggagcgcgtgcgcggcgggaagggcgggtagcgagcgcgcgtgcgcagtgggtctcgggcccgcgcagccctcccggccccgcccagcaacaccagagcctcgcttccattggccccgaagacgcgtcgatgccgctccgggctcccattgggagaggcgggagagcgccgctcccgacaggctctgcgctgggcctgcttgagggtggcgggcttgaggcgggcaggctgcttagttgcggcccgaggcgcctaagtggggatgaccaacccgtgggcgttggcgctgacccctaggcgccgctggtggccccgcgcgcggccctccggccagccccgcccctctcggggctcctccttggtccccgcgccatggcgcgtccgcgttgaccgctgtcttccctttcgggctgtgctgatcgcgaacgctgcgcagtccgtggtggcgtcgaggcacctttctcgtgcctttacctgtgttcactcctttgctttaaaaaacagccctagaagtacacatcgttggccccgaaggagccccagcagccatgtcggaccgcgaggtgaccttggagggcgggaggacggacgaggggcctggcggagctagactgagagggcgccgccggcgtcctgaaggccctgctccccgaatgtgtgggagtgtgtctgacggtgcgagggtggctgtggcggggcctgagcagcgtgtccgtgtcccgatgccgcccgcctgttactgagttaggcaggagtgcccgagtctggcgaacttcagcagttctcgttccagagctccacacgaggttggccaaagctttgcgggacttacatacccttcttcctccgcccagtcctgcttccttccccttcctttcacgggtgttgataccatgtcaacatcctcgtaccccaaactcagtcgcagcgtctgcttctggagaaaccattctgcagcattaaagctggtgagaagatgggattcgaggctgcatcactcaccagtggtgaagtaggagggtgaactagtgaaatggaatccacgagtgggtgaagtatcagacatttcatatatggtgaacgtagtagataaaaggaaggaaagggggattggatagctattgcttagtgccaaccgagactcttaagaatagtggtcagctgaaggcaagcaacaaacagttgtaagccagtgaatctgtcccgttacatatagagaagcttcatttactgcagcaggtcaaagacaagaaccaggcccaggaattaacatccctgtttgactgaactccaaaaatagcaaaacacccaaacaaggcaatactcttccactaagtttggatccctgctaagaaaagatgaggctgggcacagtggctcacacctgtaatcccagcactttgggaggccaaggcgggaagattgcttgagttcaggagttcaagaccagcttgggcaacatgacaaaaccccatctctactgaaaacacaaaaaattagccgggcatggtggccacggctgtggtcccagctgcttgggaggctaaggtgggtggatcacctgagccctggaagtcagggctgtagtgagctgtgactgcactccagcctgggcaacaggagtgagactctgtcttttaaaaaaaaaaaagaaagaaaagaaaagcccgtcatacatgggttggagatacctgggtagatgccttcaaaggttttgactccccaaactgccttaaacctttttttcgtagacagtgtctcactctgttgcccaggctggagtgcagttgctggatcatggcccactgtagcctcaacttcctgggctcaaacgatcctcccacctgagcctcctaagtaactgggactacaggtatgtgtcaccacacctggatacattttttattacttgtagaggcaaggtcttgctatgttgcccgg

SEQ ID NO: 1562339 - DNA, 4001 bp, Homo sapiens
tggttatctgcccgcctcggcctcccaaagtgctgggattacaggtatgagccactgcgctcagccttttttttttttttttttgtctgagacagggtcttgctctgttgcccatgctggagtgcagtggcacaatcgtggctcactgcagcatcaacctcctgggctgaagtgatcctcccacctctgcctctcatgttgctaggactacaggcgtgcaccaccacacctggctaatttctgtatttttgtagggatggggtttcgtcatgttgcccaccctggtctccaactcctgagctcaaacgatctgccagtttctgcctcccaaagtgctgggattataggggtgagccactgtgcccagccacattcttttttcttttcttttcttttcttttttttttttttgagacagagtctcacccaggctggagtgcaatggcatgatctcggctcactgcaacctctgcctcccgggttcaagcgattctcctgcctcagcctcccaagtagctgggattacaggtgcacgacaccactcctggctaatttttgtatttttagtagagacggcgtttcaccgtgttagccaggatggtctcgatctcctgaccctgtgatctgcccgcctcgacctcccaaagtgctgggattacaggcgtgagccaccgcacccagccccaccagctgcattcttatagctatatttcactgatgtgggcagaaaagtggaagctgatgaagtttagtgttaacatattgtggggccaggcacggtggcacacgcctgtaatcccagtactttaggaggccgaggtgggtggatcacctgaggtcaggagttcgagatcagcctggctaacatggcaaaaccctgtctctactaaaaatacaaaaattaactggaggttgcagtcccagctactcgggaggctgaggcaagagaatcgcttgaacccgggaggtggaggttgcagtgaaccgagatcgtgccactgcactccagcctgggcaacagagtgagactctgtctcaaaaaaatatagatagatagaatctggattctacccctcactaactaaccgtatattttacaagtggaaagttcttagagatcatctaatccaatcttctcatttaatgagaaaacgtaggtccggaaggttaagcaatttaaccaagtcccataacaaggtgtaagcaaaatggttaggggtgggcacagtaaaaaaggaggcttgcttaactgtctatacctccagccgattataaactgcacgagagtctgcatcatctcaagaagtcttctcataagacgacttatggacaaggtacgtacctggtctgatactggattgaatagaatcaagtgtccaaaagactttaagctccacagctcgctaggaaggagctatctgccagaggccagaaaaaccatgatgaattgtgaggcctcccaacacgtttgctgctattgcaataacatggtctcgaagaggaggaagacttgtacactgacaatggccaaaaaatactggaagtggcttaattggaattgggatatataaacgctaaaacggagctcctgagaccccctattttctaggcaatcggtgccaacggtctgggagccggctgcgaaggtggttatcatggcaagggaggtcggtcctgccccgccccctcctcacctgcgcagacctggggtaggggttccgcggctcccgcccccctgccgcgcctctgcgcatgcgtgcgcggtccgcccttcactgcgggtgtccctcccaccgcctccagctggtgcctccgccgggctagaccatttgccactttacactgaggggctcgggggtacggaaggcagaatcgtacctgattgggacaggtgaccttaccaggaaaacggacaatcttccgccaaacgaactttaccccggaggacccaggcagggcacctcgggagccttcgtcccgaccggggaccaccagctccacctccgtccccgccccgagcggaggtggtccggccgattgggattgtgggagatgtagttcgctagaaggggcgatgtgcgcctgcgcctctcgggagggacttagggggcgtcgaaaatgatgtaaagaccgagttggcggcgtggggagttgtggctcggagggcgagggtaactttctgggggcaggggaaggcaaggctgtttccccggaacgggaccggaacaggtttattcggggtcacagaaggagtcacctgcgcagatacatgaggcttaaaacctgcccttttattaattcaagtactgttgaggggctggcgacaggccagaggacaaaatcaaaatagggatcttctggcttggagttcaaccactgacgtggggactgagcatttcccctctctgtacaggaagcaagttttttaacaaggaaaaagaaaaaggataaaaagaaaaaggcagaggcttgggagttttcagatctgggttgaaaatcctgtttcttctgcttgcaccttaggcaagatacctgcaaaatgagagttgcaataaatagtaaactatagtaaatagtatgccattgtgctaagtgctttatgtatattctcatttacttttttttttttttttttgagacagagtctcgctctgtcgcccaggctggagtgtggtggcgcgatctcggctcgctgcaacctccacctcccgggtttaagctattctcctgcctcagcctcccgagtagctggaattacaggcgcgcaccaccatgcccagctaatttttttgtatttttagtggagaccaggtttcaccatgttggccaggctggtctcgaacccctgagctaaggtgatctgcctgcctcggcctttcaaagtgctgggattacaggcattcatttaatctttacaacagccctctgagataaatgctgttattttccctattttacatataatgaaataataattgtatcaacttcattgacttttttagggggagaattacacaatgtatgtaaaccacttggcactgtgcctcgcacattaagcaatattttttgttatgactgtgtctcctaaaaggagccagaaataggtattagcctcctcagcttctacatcataaacattagaatcatttattgccatctatgtaggaacacagaaaaagatacagtataaactctgattctgagggctttagttataagcaaacaatcaacaaaataactcatgtgaaagaaaataggatttctggccgggcgcggtgctcacgcctgtaatcccagcactttgggaggccgaggcgggcggatcacgaggtcaggagatcgagaccatcctggctaacacggtgaaaccccgtctctactaaaaatacaaaaaattagccaggtgtggtggcgggcgcctgtagtcccacctgctcgggagtctgaggcaggagaatggcgtgaacccgggaggcggagcttgcagtgagcctagatcgtgccactgcactccagcctgggcgacagagccagactccgtctaaaaaaaaaaagacctggccactaaaaaatttttaaaaagaaaaataaggccagacgcagtgctcacgcctgtaatctcagcactttgggaggctgaggcaggtggataacctgaggtcgggagtttgagaccagcctgaccaacacggaaaacccccatctctctaaaaatacaaaaaattagatgggcgtggtggcgcatgcctgtaatcccagctactcgggaggctgaggcaggagaatcgtttgaaccctggaggtggaggttgcagtgagctgagattgcgccactgcactccagcccaggtgacagtgcgagacactgtctcaaaaaaaaaaaaagccaccaagcaaaacttcctaaaagttgccagtagccatccccctcttctgcttccaggcccagtaaggtgccttatatctctcaatctcatccttctcccagccttgcttctaaa

SEQ ID NO: 1562340 - DNA, 4001 bp, Homo sapiens
ttcagcaataaggtaaaagatacagcatgaatttataagtacaacaaggggcagttcttttgaatgctgctgtcaactttttccttttttttttttttttgagacagagtctcgctctgtcacccaggctggagtgcagtggtgcctccacctccagagccacgcctagctaatttttttgtatttttagtagagaaggggtttcaccatatcgcccaggctggtctggatatcctgacatggttatctgcccgcctcggcctcccaaagtgctgggattacaggtatgagccactgcgctcagccttttttttttttttttttgtctgagacagggtcttgctctgttgcccatgctggagtgcagtggcacaatcgtggctcactgcagcatcaacctcctgggctgaagtgatcctcccacctctgcctctcatgttgctaggactacaggcgtgcaccaccacacctggctaatttctgtatttttgtagggatggggtttcgtcatgttgcccaccctggtctccaactcctgagctcaaacgatctgccagtttctgcctcccaaagtgctgggattataggggtgagccactgtgcccagccacattcttttttcttttcttttcttttcttttttttttttttgagacagagtctcacccaggctggagtgcaatggcatgatctcggctcactgcaacctctgcctcccgggttcaagcgattctcctgcctcagcctcccaagtagctgggattacaggtgcacgacaccactcctggctaatttttgtatttttagtagagacggcgtttcaccgtgttagccaggatggtctcgatctcctgaccctgtgatctgcccgcctcgacctcccaaagtgctgggattacaggcgtgagccaccgcacccagccccaccagctgcattcttatagctatatttcactgatgtgggcagaaaagtggaagctgatgaagtttagtgttaacatattgtggggccaggcacggtggcacacgcctgtaatcccagtactttaggaggccgaggtgggtggatcacctgaggtcaggagttcgagatcagcctggctaacatggcaaaaccctgtctctactaaaaatacaaaaattaactggaggttgcagtcccagctactcgggaggctgaggcaagagaatcgcttgaacccgggaggtggaggttgcagtgaaccgagatcgtgccactgcactccagcctgggcaacagagtgagactctgtctcaaaaaaatatagatagatagaatctggattctacccctcactaactaaccgtatattttacaagtggaaagttcttagagatcatctaatccaatcttctcatttaatgagaaaacgtaggtccggaaggttaagcaatttaaccaagtcccataacaaggtgtaagcaaaatggttaggggtgggcacagtaaaaaaggaggcttgcttaactgtctatacctccagccgattataaactgcacgagagtctgcatcatctcaagaagtcttctcataagacgacttatggacaaggtacgtacctggtctgatactggattgaatagaatcaagtgtccaaaagactttaagctccacagctcgctaggaaggagctatctgccagaggccagaaaaaccatgatgaattgtgaggcctcccaacacgtttgctgctattgcaataacatggtctcgaagaggaggaagacttgtacactgacaatggccaaaaaatactggaagtggcttaattggaattgggatatataaacgctaaaacggagctcctgagaccccctattttctaggcaatcggtgccaacggtctgggagccggctgcgaaggtggttatcatggcaagggaggtcggtcctgccccgccccctcctcacctgcgcagacctggggtaggggttccgcggctcccgcccccctgccgcgcctctgcgcatgcgtgcgcggtccgcccttcactgcgggtgtccctcccaccgcctccagctggtgcctccgccgggctagaccatttgccactttacactgaggggctcgggggtacggaaggcagaatcgtacctgattgggacaggtgaccttaccaggaaaacggacaatcttccgccaaacgaactttaccccggaggacccaggcagggcacctcgggagccttcgtcccgaccggggaccaccagctccacctccgtccccgccccgagcggaggtggtccggccgattgggattgtgggagatgtagttcgctagaaggggcgatgtgcgcctgcgcctctcgggagggacttagggggcgtcgaaaatgatgtaaagaccgagttggcggcgtggggagttgtggctcggagggcgagggtaactttctgggggcaggggaaggcaaggctgtttccccggaacgggaccggaacaggtttattcggggtcacagaaggagtcacctgcgcagatacatgaggcttaaaacctgcccttttattaattcaagtactgttgaggggctggcgacaggccagaggacaaaatcaaaatagggatcttctggcttggagttcaaccactgacgtggggactgagcatttcccctctctgtacaggaagcaagttttttaacaaggaaaaagaaaaaggataaaaagaaaaaggcagaggcttgggagttttcagatctgggttgaaaatcctgtttcttctgcttgcaccttaggcaagatacctgcaaaatgagagttgcaataaatagtaaactatagtaaatagtatgccattgtgctaagtgctttatgtatattctcatttacttttttttttttttttttgagacagagtctcgctctgtcgcccaggctggagtgtggtggcgcgatctcggctcgctgcaacctccacctcccgggtttaagctattctcctgcctcagcctcccgagtagctggaattacaggcgcgcaccaccatgcccagctaatttttttgtatttttagtggagaccaggtttcaccatgttggccaggctggtctcgaacccctgagctaaggtgatctgcctgcctcggcctttcaaagtgctgggattacaggcattcatttaatctttacaacagccctctgagataaatgctgttattttccctattttacatataatgaaataataattgtatcaacttcattgacttttttagggggagaattacacaatgtatgtaaaccacttggcactgtgcctcgcacattaagcaatattttttgttatgactgtgtctcctaaaaggagccagaaataggtattagcctcctcagcttctacatcataaacattagaatcatttattgccatctatgtaggaacacagaaaaagatacagtataaactctgattctgagggctttagttataagcaaacaatcaacaaaataactcatgtgaaagaaaataggatttctggccgggcgcggtgctcacgcctgtaatcccagcactttgggaggccgaggcgggcggatcacgaggtcaggagatcgagaccatcctggctaacacggtgaaaccccgtctctactaaaaatacaaaaaattagccaggtgtggtggcgggcgcctgtagtcccacctgctcgggagtctgaggcaggagaatggcgtgaacccgggaggcggagcttgcagtgagcctagatcgtgccactgcactccagcctgggcgacagagccagactccgtctaaaaaaaaaaagacctggccactaaaaaatttttaaaaagaaaaataaggccagacgcagtgctcacgcctgtaatctcagcactttgggaggctgaggcaggtggataacctgaggtcgggagtttgagaccagcctgaccaacacggaaaacccccatctctctaaaaatacaaaaaattagatgggcgtggtggcgcatgcctgtaatcccagct

SEQ ID NO: 1562341 - DNA, 4001 bp, Homo sapiens
ccacgttgagagaaagtcgaggagtggttgcctagagttaaaagaagggaagcaagaagggggaatttggagtgactgttactagacatgggttttcttttcagggtgatgaaaaccttctaaaattagatggtgatgatggttgctgactctgtaaataaactaaaatacattaaactatatgctttaaatgaagctacaggggccttgggagggggagaagggatacacgtggcacagtggtgtccactgcctccttccaggatctcaccgtcacccaggctggagtgcagtggtgttatcatagctcactgcagcctcgacctccccagctcaagcaatcctcccaactcagcctcctgagtagctgggactacaggtgcatgccaccatgcctggttaatttttatttttatttttttgtagagacagagtctcactatgttgcctaggctggtctcaaactcctgggctcaaatgatcctcccacattggtctcccaaagtgctgggattataggtgtgagccactgtgccccgtctcttttgtctggtgtgggccagtatgcaaacactcaccttctatatttcgctggttagccttgacttcatatgcaataagatctggaaaggaagataagaagtagcccctttcttcttcctctgatctcttaatttaaattcggccaggaagtgagcatcacaattcgttttccaaagtcacaggagcctgaggtcccctgccatcccgccctcacaccttatcttggtgtgttaaacgcccatacctgggggaagactgtgggtggggaacctcctgccccagcccgggtgcctgaataatgcatgaatactccagaagcctggaactccagacctcatccaggcctgggatcagcatcctaagtgactggtccaataagcagatgagccctcacctctgcctgtcccgggtgaaacggagcttgagagctcactggatcccaccaaaatcacgtccatgctgggctcggcctctgggtccagggctgggatggccgccatggggatgctgtgtcaggacacacggacacagatgtgagaaagccgtcagcccctgctcagatccctgatgcaccccagcacgggaagcagcttgctgagcagaccttgactagttcaggccacctgaacccccgcggtgacacccacctgcccaacccagggatgaggggcaggacagccaaggccagtgccagccctgagaggggctcaagggtcccctgaggcgtgccccccacctgcctggccctgttacaacatggaagatggggcaaaaaggggagggcagggccctcatgaggacctggggccaatggccgctgcagcccctgctttcctctgggcccagccttcgacccctcagggactcccatgccccagcctcctacagtgtccctcaggcccagcagggacccctggggatggtcttggccagccgcacccttgaaggcagcatggtcagggagtaggaaagagactcacagggctgctgccacggctccgggtacagccagctggtgggttcaaggttccagtggtccggggcttccaggctcagggtccccggggaggactgggccatggaacgagggacggcgcaggcaaagaatgagctggaaggatccaggcccacctgggacagcgggtggccagaggtcaccaggctatgggggcaaagaatctgggcgtgtcccgcgggggcggggaggggcgggggcggggcagcccttcagtgccggtttgcagtgggaggggcgaggagctgcggggggtcacttggggtggggagctaggaagctgggggacgggcagggaaagggaaccctcaggtggggagggttaagagctcagtggggctgggggattggggttcagaggatggggccctcagggtggagtgaggggtggggtttggggacctcagtggggagtggggttcaggggaggggtggagatgggaggactggggatggggcagatgaggggggtttcagtagaggggggcccttggggtggggtgggggataggggtggctgtggggtaggggcagggcgctcagaggtggggtttaggaaggtcataggggtgggcttcagggcaagggtgaagaaagggatgagggtggagggtggaggggtggaggggtggagggtggagggtggagggtggaggtagggcagggcggggggttaggtggagttggccccctgggtggagatgggtgaggattagtggaggtggccctcagggcagggtgggtgggtggagggcggggcttagggagatctgttgggggattagggagtgggggtgggggtggatgctgagttggagatgggggccttcaggggaggtggtcctttggcgggatgggggtgatgatagggtgagggtgggcactccggggcagggctcagtggcgggggtcggggctcagggcaagggtagagacggggtgaaagtaggaatgggggtgtgaggccgaggatgggggtttcaggggaggtggcctttagggcaggataggggtgagaatggggtggggatgggcctcagggatctcagggtcggttgggatgggagtgggggtgggggtagatggtgaggaggagatgggggtgttcaggggaggtggtcctctggcgggatagagggaggggcgttcaggagccgggcttgggagctcagtctggagccccaggtttggggggcagctgtgggggagagaaggaaacagggaaggccctggaggatggggtaaggggtgttgggtggggaatgtcagggcaggtggggggttggggagctgggaggggtaggttcagggtgggggtggaacgtggaagcagggaagggagcaggaaggtggggtgggcagaggggcagtgtgggaggtgcggggtgggttgggaagggggactttgttggagggaggttaggggcttcagagcagggggcggaggaccgccgggcagggctggagccacaggacaattgtgctggtcgaaagtgggagaagacccttgcgggaggtaacccccctgaagtgtgggctgggcctggtgacttccttctgcaagtactgcatgaggggtgaccacacaggggcagcctgatgaccccttggcccctggcccaggccagcgtctcggggaggattcgcctgggtgggtgccccgcaccggggctttctccccccacccacagcccagcctctccaggagtgaactgggtcggagcagaggcggcccagtgcctgagccctcctcactggggcagtcaggccgcccagcgggagagtctgaaaaacagcggggcagggggcggggggaccctgaggcactgcgacaatgaagtgtcacatgggatcccgggacagagaggggcggtagggagtgggaaatctgaataaaatgtggctccttggctctaagttggtgtgtctgcaggtttgttcatgtaaccacagtgtccatgggggcctgagggctgggtgggggttgcggcagttctggactagcgcctcaaggtttgtataactttaaagctgttctaacatagttactttttttaatgaaaaaaagtgaagggagagaatactgaggatgacagtgagatcacttccctgtgtttgagtaaaatgatcttgttttctcctccttttattccaaagagctttgtttttcaggagctcacgggattgaaagtgattagaaggagacagcgggagcagcaggcccatctgtcccctgaccccagccccacacccaacctcccctgccctgcagggctgttcccaccagcacaagtggaaaggggagaattcctgggggctggttttggctccaaggaggggcagttttcttttttctttttctttttttttttttttttgagatggaatctcgctctgtcgcacaggctggagtgcagtggcgccatctcggctcaccgcaagc

SEQ ID NO: 1562342 - DNA, 4001 bp, Homo sapiens
gtaccaacctctgccgcctaggatcaagcgattctcgtgcctcgtcctcccgagtacctgggactacaggcgtgccccaccacgcctggctaatttttttgtatttttagtcgagacgggggtttcgtcatattggccaggctgttcgcgaactcctgacctcaggtgtgatccgcctgcttcagcctctcaaagtgttgggattacagacatgagccactgtgcccggccaagcattcttttatatcacaataaaatatcagagaagggggaactatcttggatagaccataagaaggtcacttatttacaagagaaactgggtcttggagaactcttctagcctgttcccattaggacaaaccgcatttatcaaactacacagcacaatggtagtagttggggaatggaaacgtgtgtgtgttaggggagaggagcaacgaggttcagtgctatgccacaacctgtggaggtgggccaggagggctggctctgagtgatgaactggagaagtcaactgcccaaagaagagtggtaaaaactgttagagagtaaaagaaaacccccacgtctatcaggcctattttagcgctggctatctttacagtcatcattactgtatcaaaccaactcctttaccttggctgatgcggtattttcatccctggttgagatgatcaagcctctctgtaaaactactttccaagcaaaatgcttctgagaagtataaatgtatttttaaaaataggctcaaatcctatgaaaaaaaagtttatacaaatacacattctaatgatatttaaaaagtattacctgaggtaattcagtaacagttgttctttcaggaaacttctcttcccatagcaaatcattttcttgattagaatctaaaaactgaggttaaatatattctcctttaaaatttaaaggatgctgaagtttgcgttaaatatgtacagagcctcacctggcatacatgtttctcaataaacgcaagtacacctaaattcagaggcaccccatccaatctatgagtttcaacacttcagttttgtgtctgaactttagtatcaaaattgaggggaacagggaccggcgtttcaaaccgaaagatccaaaaggctttgggtaagacagatgctagtgaattctgaccccacgaatcctcgacattcccccatctccagaataatttggagtgcgtgagagaagggaggccctaaatcacgggggaagcagggcttgtcacctgccccatcgaacagcgtccttgcaagatgggggctctcagggtttttcgagctcttttccaagtcacctctaagtcctctccaaggggctcctcgctgccctctggggccccctcactttcctcgggaacgcgtcccgtgagcacagcccgcagcggggtagccaggggagcgctcttcccacaaacccggccttgccagaatcgcggctcccagggcggggtaccctaaggccacgggcggccgaagtcttcgcgcccatttccttgcctcgaacgcgaggactttccatcccccattcacagctggctcaacccacgaaagacaagagccccttggcggccaggctacaagacactcaccgggaccggggcctccggctgctcgcgggccggcccgtcggggggctccgcggcgacccgcggtcggttgtccaggcgggcgaaggggttcctccgagcagcggccgggccgccgccgctgccaccgcctctgccccccgcagcagggaaagggcgaagaggcagccccgccaccagggcggctcggcgggccgccggctccgtcagctcacggggcggggaggcggcagctccacggctccgggcccttttccgtcggagccgcactacctcgggcggctttcggaagcccggtgagtagccgggcaccgaaagggccatgacgcgcggcggctgagggtagccggccgccctacagagacttcccgcgcgcgccgggcccgcccctgacgtggcgcctcgccgagctcccgcccccgacgcggccccgcctccgcccccgccggttccgagcggagcatgcgcagtgggcagcccgcgagacgcagcccgcagcggcgatcccgggtggccgtcaacgcccactgtcccagcggtgaccctgccctggcgcttctgccaggtcctcggccagagtccagtcgccaggttcagcgacgcttctggaaagtatgcgatccagggcgctgatgtgcactaccctgtggggcaccgaaatagcttaactctatttaagcccgcagcagggatgtgatcagcccggggtttggcgcctggatgaaaaggaaacaaacttgagctgcggcgatgggctgctgcttccataaacttaagagagggcagtggctactgctctcaagaggcgaggagaggggactaggccaccttcctcaacccccagagaactcagataagacgtcagcacgcttcctatgccagcgcagcctaccgacatccctcccttccccgttcccagtgcctggtcatctcagacttccaggcagctgccactggcaagttaatgggatcttctttgatcctggggaaagccggagtgaatgaatagttgaaaacacaaaatttaagtgcctatgggctaagtcttttaagacttcaaaatatactcaaatgcttaaattatgacagcaaagacttaaggaaggtgttgagaacggagttgatacaaaattaatacgttactttgatagcttagcaaaggcctgcaacagcttttatcaagagtagtgtgacttttgctgaaagcagcagttttcttcatggaaggaattttatagcaggggcaaaatatatagaaacaatgaaaaggtttttagaaaaattcccttaagatgttaattatagaattatcttgatcatttgcacaagaatttttcaaacacttttcaaatgtgtcaactgagcatcttgtcttagcagagaaacgtgcttaaaaatgcaacttgttttatcttccttggtttttctcaacaatttccaaagaaaattctggcttcaaatactggaatatgttcatccgactgaggtctgagaaagaagaaaattaaaattgaacaacttgcttttttcttccttgatttttctgaacagcttccatggaaacttttgcctcatacagtggaatgggttcatccaactgaggtctgagaaggaatgaaattagaaatgtcaggtctagttaaagataagtagaacaaacagggtggtatatgacaaatgctagtgctcaaatctattagtgtattaattaattttttgagacagagtctggctctctcatccaggctggagtgcagtggcacgatctcagctcactgcaacctccggctcccgggttcaagcaattctcatacttcagcctcctgagtagctgggattacaggcatgcaccatcaagcctggctaatttttgtatttttagtagagatgggtttcaccatgttggccaggctggtcttgaactcctagcctcaagtgatccacccaccttagcctcccaaagtgctgggattacaggcatgagccactgcacccggcctcaaatctattactttaagtaattcaaacaaattcgtccattagtgtttccaatgttaaaagtggttaagttttgaaggaaaaaaattatctactttatttactccctctttttttctgagacggagtttctcttgttgcccaggctggagtgcaatggtgtgatctcggctcactgcaaccttcacctcccaggttcaagcaattctcctgccccagcctcccagtagctgggattatgggcgttcgccaccacgctcagcgaatttttctattttttagtagagacagtgttttgccatgttggccaggctggtctcgaactcctgatctcaggtgattcacccacttcagcctcccaaagtgctgggattacaggcgtgagccaccacgc

SEQ ID NO: 1562343 - DNA, 4001 bp, Homo sapiens
gggaaaatataatgctcccatctatatgtcacttatatagagatgtggttcccaacctttttggcaccagggaccagtttcgtggaagacaatttttttttttttgagacggagtcttgctctgtcacccaggatggagggcagtggtgcaatctcagctcactgcaagctccgcctccctggttcacgccattctcctgcctcagcctcctgagaagctgggactacaggtgctcgccaccacgcccggctaatttttttgtatttttagtagagacagggtttcaccgcgttagccaggatggtctcgatctcctgattttgtgatccgccactcaccttggcctcccaaagtgctgggattacaggtgtgagccaccacgtctggccacgtggaagacaatttctccacagatggggtggcagatgggtgggagggcgcatggttggtttcaggatgaaactgtagatctgctgttgtaccacctcagatcatcaggtattagttagattctcataaagagtggccaggtgtggtggctcacgcctgtgaccccagcactttgggaggccgaggtgggtggatcacttgaggtcaggagttcgagaccagcctggccaacatggtgaaacccagtctctactaaaaatacaaaaattagccaggtgtggtggcacgtgcctgtaatcccaactacttgggtggctgaggcaggagtaatcgcttgaacctgggaggtggaggttgcagtcagccaaggttgcgccattgcactccaacctgggcaacagagtgagactgtctcaaaaaaaaaaaaaaaaagattctcctaaagagcatgcaacctagatccctcacatgtgcagttcacgatagggtttatgctccagtgagaacccagtgccaccactaatctgacaggaggcagagcccaagcagtaatgctcgctcgcaccgctcacctcctgctgtgcgtcccggttcctaataggccacggactggtaccggtcagcggcctgggggttggggacccctgatatagagtacaaggtcaagcccacgtgtgaccagttttggttttcctagatctgaccccatacacacacatgcacacacgtatgcacacacatgcacacacacacacaagttttgggcagatttcaatatttatttcaacttttattcttctaggagttaccagacagcagtaaaaggatcaaaaaagtagatcaaagaagaaaaataaataaaaatcctaaggagtatacaaagaacagtctttgaatacctaatttgaccattttaaattttatcttgtctagacattaacattgttaagaaaaagacttcaactatacgaacactatatatatttttatgctcagaaaaagctggaaggaggtacatacattgataggttaacagtgggtaacactggaggacagaattatgagtggtttttttcttttctatattttctaattattgtaatcatcattgtatatataatggtatttccttgaaataatataaagattatactgtataatatgtaatgatataaagattataaaatacaaataatataatcatgtaatttcttataataataaaaagacaattacgtccccacctccatgcaatccaaataggatacaccctacataccttgttgagtttgccaagtgaagatatgagatccgcccattcactcgaggactcaaaatttctcaaagccttttcaatcactgaagagtagcttctgtatctgtaatcatttaagagctcctgctcttctggatccatcttacattctcacagcagaaaagtatctaaaagcaaatcaaaaaataaccaaatgagagagccatttggggatacaaatcattcccaacccagagctacagaagacacgtgtccacaaacacaactgtgcacaaactcactgggcaatcctgttcaaatatttagcaaggcttctgggccaggcactgtgggagatgaaagataaatagttcccgccctcgtggattctgggggagaacaggaaacaggagcagacagcatagaagtgctagggctccaagtaactgacaaaattaattccaggatcaaagctccaaagctgctagactatatgttgttgccagccggtaattttaaatgagcacagcccctcccatcatatggcatttctaaactttttatgtttttttggaggcagggtcttactctgccacccaggctgcagtgcagtggcacgatcacgggtcactgcagccttgacctcctaagctcaagtgatccttccttccacctcagcctcccaagtagctgggactattgggatgtatcaccatgcctggctgttttatttaaagtgtggcaggcatctacccaacatgccttgttctccttttctgtactaaaggagcactggttttgttcatggtaacactgtaattcccagactcccttgcatctaggtggccatgtgacagctcttgacaatgagatgtcagtagaagctgtgggtcaaaaggctgttggaaaggaggcagacttcctggcataagccttttgtcctcctttcttcctctttctgcctagaacaaaggcatgatgttggagtgaagctacatcttgcacctgtcatgaaacatgcacgaaagtcacaaactaacgatggctgagtggaacgacagagcccctgcagccccagatggcatgatgaaggcaccacatgccaaccccggatgctgtaatgtctggtgtatgttttctgcacataacagctaatttgtttaagccactgttctatcaggttttctgttatagccaaccacaatcctaattgatatatgaggacaaatagtatttcaccagtactgctcagtctgaaaggaaagacaaatacagagcaatgctatatagttaaacgtgagtgaacgcggttagctgggtagattgctaaacaagttggatgtagtcaatcaaataaaaaggcaaatatggtaaatggaagaaactgaactgaaggtacaacacgttctttaagcttgagtctttcatttacaggccagtacagttataaaaatttcatgaaatctcatacttcaatttccgatcactccagacccaatccaatcttcaccaggccaccactactttctttctttctttttttttttttttgagacagagtctcactcttgttgaccaagctggagtgcggtggcgcaatcttggctcactgcaacctctgcttcctgggttcaagcgattctcctgcctcagcctcccaaatagctggggctacaggcacgtgccaccatgtccagctaatttttgtatttttagtagagacggggtttcacgtgttggtcaggctggtcttgaactcctgacctcgtgatctgcccacctcagcctcccaaagtgccgggattacaggcgtgagccaccgcgcctggcaaccaccactactttcaagtcaccaatggcagaggtcctttctgtttcctcactttacctctcagtagcactctgcggcagaccacttctttaagcagcctagcagcctccacttggcccacacactcctctggcccctccagcaccagagcttgtttcccatctacctctctgaacttctttcctcctcctctaccaactgctaaatacattccctggcggctgggcatggtgactcacacctgtaatctcagcacttttgagaggccaaggcgggcagatcacttgaggtcagatgtttgagaccagcctggccaacatcgtgaaaacccatctctaccaaaaaataaacataaaaaatagctgggcatggtggcacacacctgtcccagctactcgggaggatgaggcatgagcattgcttgaacccaggagccatggaggttgcagtgaggtgagactgcgccactgtaccccagcctgggtaacagaacaagactccatctcaaaaaaaaaagaaagtga

SEQ ID NO: 1562344 - DNA, 4001 bp, Homo sapiens
cccaggaggacacaggacaggtatggtgccctctgggaaagatgggtgtcttgtcagaacttgttgcaattctttcctgctaggaaatctcaaaatgaaagtttcaaacactttgctttaggttatactggagagcaaagtatcattttcatgttcattttgatagtaccttctttcaactctaccttttcttagtcaccgtttttttaaaaaattgacaatgctcatgcatttcttctggcctgttggtatgctgattctttaggcactgtctaggtaggcaaagaaaatgcactgccttgcagccaacacacagagcttccctgtgtgtcttccaggaaaatcttagagcctcccctttgcttctcgtattttctcacaagggccagatttcctctcttctcttcttttaccttctcttcttctcctctctctctctctctctctctctctctctgtctctgtgtctgtctcgctctctctccctcctctctttctctctctctctctcctctcttctggctaggggattctgcttaatggtttaatttcaactgtcagtaggttatacattttatgcagatgtgtgttccaaaatttgaaatgggaatttaagccgtagctactcccaggcgatgtcaaatgatgacaatttcctctggttcccacaagagaggaagccattcatacatgtaagttcatatttatgcggtgacaggcagcctaaggtgcagtcacacttactaattgggtctgactcagtcaagagcaatagctttctaaatacccaggaagaaatcatttcaaaatataatattggctgggcatgaggaaatgtatgctatttacaatattcactgatttcatttttacaactatacaggtgtttttttttttttaatttgtcaacatttcagatgatgtaatgcttatcagtgcatatttttacataaacgactgtgaggagcatgaagcagcacggggtgcatagaaggacagaacattcttaaagccctccttggtgctggagatacattgtactagcatgaaattacgtgtttgaaaaatctcaaaaagcattgaatctgaagggagatgttcctcattgacccctccacttgcgtgcacttggaatgtcacatccctttccaggttgtaatattcaaagtggcaatcttcctgtctctccttctgtcaccaaacctggtttattctgaatgaggcagctctctagtactggagttaggctctgagctgtcacttggctaggtaagcgccttccaatgattacagagcaatttctcccgggcctctccattgccacctcttctcccccaaaaaataaatatgatatttaaaaaataaataaaagcacgaaattttaaacacagatgaagcggaaaaagaaagaagactttacccatgcatccaatgccaccccccacccccccgcccccccggtcaatgataaggaaacgaaattcatcacaaaccgaaaggctcaccattcgcgaagctctggaacaaggagagagccagtatccacatgcccctgccgctccccggcctcccgcgagcgacgcgccggcctcgccccccgcgctccgcccggcccggctccgctcgccgctcggcacctgcccgggggccgccgcccgcccgccgcccgccgccgccgccgccgctgcctagccgcccgggcacgcggcgcggccgggctccggagcgagggctgcgctcgccgcgcgctgcgctcctgcacacctgctcccgggcgccgcgccccacgctgcggccggagcccaggtgcgccgtcagctcagtgggcccccggcaggtcggcaggtggagagagccgcagacgcgggcgtgagctcatcccgggcactcggcgcccagaatgcgcagccagcggcctcccgtgcgccagccctcaccctccgcatccaggcagcaggcgggcgggcaggctcatctttgccgtgctccggcctcagtcacatggatccctctgccaaccttccctgcctgcgagccgggcgagtgaagccgagcgcggaggcgagcagggacccctcccctgcctctggccgctggggcgctctgcagtcttaaagcagcagcagagacgtgcagccgaactgaggcaggaccggggagagcgcagccaccgcacagtcacgcacagtcatcaggaggaatttcttagaggcttaaataatcatttcaacagctgcttatttttagttattttcctgccggttgctaataagggatggccggggtgactattgcggaaggtggccagccacggagaggtgaacatgaaatgctcgtagttttaataaaatgtgcagctggattccgattccgtatttactctcagaaaagtccagttcatttgcttagagggaaatgctccttccaaatccttgctgctactgtaaagatctctatgatttcacgggctaatttttaattatcttgaatacatggtagaatgcaaacacaagcacttctaattttgctctctgaatggcgcataaaaaagctgattgaaattgctgataatttgagtaatcccaaacatatagcccctttcacgtttctgtgaaaagtcaatatgttaacatttcctgaatgttctgtatgattcttgaagtcatgataatatttaaattaaagctctcacaagggcgtacatctatccatcactttgcaatataatgaccgacagggctggaatgcaccccagtgtagaagccaggatggaatgctcacagtcaggacaatcaggactgaaaaaaagcattcggtgggggtcaagggagacattttcaagggaaattgagtaggctttttcctaggcactaggtatcctaactgggctccatgtccccctccaaatacagaagaatgatgcacatctcagacagctcacaaaacacaggagaagcaaatggtgaggcagaaacaaaatggtgctttaccagggttgggcacaagatggccaggccctgtgtaccaggaagggtcagctgagccggtgatgctgcctggctcaccacggctctgcagctgcaggtgatcacgtgctgccgcccactcaggctgcgcaggcccagcccccagtaccacgcaccagaaccagcatcctctggctttgcaaatgctgggtgctcagtccctggtccttcccaaatgcaacccaggaaggcaggggatgggcctgattctgtccctgcatctggctggttgacctattcattaattcttacttgcacactagccacctgcaagggtgcccaggcactggggtcagggaaacccagggtcgaattgcagctcctccactaccccgatgtggggcttctgcatgtgactcgagcctcaatttcctcatatgcagactggaaattatcacagttcttaactcacagaggtgtgaagatctttccatccgttgacagcacatggtcactgtagttagcgatggctgtggttaactgttactgagtttgggagcagggctggaaacatgatttgtggggtccactataaaatgaaaatggagagctcctttctcaaaatgaaaaagaagcaccataacaagtgctaaaacagaacacttcctcctttcttcctgcctctctcaaccagtcatggtgttttctgctacatgctgctcttccttgggcgtgggaatgcacccctgtacagaccccacagaccttccaggtgactcagtgcagtacaagaggcttccacttgccagttgcttccctgcccttggctgcacccacatgctgtggccagccacagttagggggtggggaagccactgtctctctcccacagcccactgtcccaatgtacagtggacaggagatccctcagggattgcaacctccatgctgggaagctctgggtatctggattggaggtgggcacaagcctctggccacttgtggaatgtgccctggcactgccagcctgctgag

SEQ ID NO: 1562345 - DNA, 4001 bp, Homo sapiens
tagtccatagtcgaatttatattttatcagaaattaagcattctatttggttctcatgtccctttagtcttatagtctagaaaaattatctcgcctttattttttgacactgatatttccgaagaatccacgctacttgtttcacagaatgcccttcaatttggatattccttattgtttccttatgaactgatacggattaaacatttttggcaggaatactacataggtgagttgtggccttctctgtgcatcatgccaaggggtaccgaatgtcagtcgtctcattagttgtgatggtgaagtggtgttcattgttgtgcttggctagaggagtgtgactaccagatttctccattataaaggtagctttttctctttttttttttttttttttttttttgagacggggtctcactctgttgcccaggctggagtgcagtggcacaatctcgtctcactgcagcctccgcctcccgggttccagcgatttttctgcctcagcctccctggtagcttggattagaggcgtccgccaccacgcccggttaatttttgtatttttagtagagaccaggtttcaccatgttggccaggctggtctcgaactcctgacctcaggtgatccgcccgcctcggcctcccaaagtgctggtaatacaagcgtgagccaccgcgcgggccagatttttccctttgtaattaaccatcaaggggatgaccatttgagcttgtgtaaataagagcaggcttccctagttgtcttttgcccaaaagttttagcatccatccaagacctttgtctgaaattctgtcccttttgagattactttgcattaatatgaccaaccactgcgatcaattttattccaaagagtgttggggctgtgatttcaaccctagctgcacatatatcaccggtatcgctgggagtggaacccaagcaatcatattttaaaattctccaggatgactgattctgatgtagagtaagggttgagattccccgagttagaggaaccttacaacaccctcatttgcaaataaggacactgaggcccaaggaggttaaatgactggccaatgtcacaaaacctgttaatggcatagtcaagattttacttttttatacttgcattttaatagccattcctttgtgtcagtcgaagaataaaaccagaaaaagcagtaactttcgtagtatgttagtatgttgttaaaagtgactaccatctaatatatgctgccgccagacatacccatttctgcttccaaggtttgttttagctttcgttcattagacctttgcggtcaccttaggagagagggaaaggggagtttggtcgtcaactcctccgccctcagcgctcactgagggagctcaagcctgagaacccaacaccgccgggtgttcaaggggccagatgggaagagcgcagccccggagctgggcgcctgccctgcacgtcccgcagatgcggcggcggcgcctgccctggggcctcctcgcagggcagccagcctcgcgcgggaagcacctggcggggacgcacctggcgggaacgcacccaccttggcggagacgcacctggcgggacagccctgccccgcctagggacgcgggacgtgcgcagagcgatggagacagcggaacctgcagacccgcccaaccccacctccatccccacccccagcccccacttaccccggcgtgataaactttattcgctcttttaatcttgatgtccagggcggtccccatctccaattctccgcagcagccgccacttccggctgcgcgtgaccccagggaaacaaggggcgcctccccgcttcgttctgggccccgcccctttccctctctgccggcagtggctcacgtgacctcgcagcggcgtcgcacacactccctagctccgaggggcgaatgcccacgccttcctccttccggcacaagagccggccttagtgcgggccgaagcgctgtcacggttcaccccgccccctctgggcgtgaaagacggggccaagctagccccaccccttccgtagggacagtcttacgccggaaatgctcctttgctgtccgggttagcggagggagggaggaacggctctccccgcgtgccccgcggctggaggcggagccgagcctgtctgtcggttgcagcctgcgcaggaaggatgacgctcccgtcaggctgtgcggcgcagacggtcgcccaatggagttgtctttcaggaggttttaacttggtaatgcctgccctcctcaaatgtccttagtctcctcaactctagccctccaccgctttctccctggggttctgaagagccggcgcccccttgtctgtctgcggccaggcgccgcaccctgcccttcccgcgggagcggttccggtcaccctcaggggtgcggcccctgcgtgctagtcctgcaaagcgctgattggccggcggctcggttgcctcgcgtcccagcgccagctgggcctagggccaaggtctcgggaagcgccgggtgacctcgctcctctcggagccgcgggcgctgggtcacccgccagccgggctccgcgggccgcgagggattgtgggtgttccccaggcgcgtgtcctggaaccgggtgttaaatattcagatccgtgcgccccgcgtgaagggtggaaaggcacggcccccaggctctggggcttggagattggttgcaaatgaaagactgaaagctggagtgaatctgcctattatttttattcccagcaacagctgaccccagatacagtttgtgggggtggggggcgttactgcagggcagggcagtgcactgttaacgtacttcgtttattgagttaaaatctcttgtaaatgttataaatgaggattttgccaataagcagaaggtcaaatttcattttgacaaatgatttaattaaataatgcggtgaaaagtgctttttgtttaaattctttgctttttgtttaaattctttgattctgatcattattttttaaagtgcattgcttttgggataacatcagaaactatctgtaaaaagaattagtatcacgaatgcctccctcttaagaatataaaatgttttacaggccagcagtgatggtgctgcagctacaattgcatttgaaggttaataaatggtattttcaaatattcaggtcttggtttgcagctcctctctgccctcagggctttggtctctgtcttcaatgttttcctggcaattcaaaactcagcgattttagaacaattcattagggacttgaaaatcacagtctagtctatttgaattcaagaagtggatccctttccgctagactcacccatcattttcaagtggtaaaaaatcaatctcagtagacactgcagagaaacaggaaaagaaacacatgtatcaacattgtatacttggtttttttgttttgttttgttgttgagacggagtctcgctctgtcgcccaggctggagtgcagtggtgctatcttggttcactgcaacctccgcctcccaggttcaagcgattctcctgcctcagcctcccgagcagttgggactacaggcatgcgccaccattcccagctaatttttgtattagtagagatggggtttcaccatgttggccatgctggtctcgaactcctgacctcatgatccacccgtctcggcttcccaaagtgctgggactacaggggtgagccactgcgcccagcctccaatcgctatccttttaaatcttttccatccctcactcacaccttagatgataccttaactttctggtccatttgagttaccaaaaatcagaccgtgttaaagtgtcgatctcatgtctcaagtgggaccctaaatcccttagtgtgagtgggaaggtgcaaagcgtggttctggcatgcagacacttctcaacgtacctctgcaaggcctggcttctgtgttgagataaggaagaggagagaaaatgagacaaatatctcttaactagc

SEQ ID NO: 1562346 - DNA, 4001 bp, Homo sapiens
aaagtgctgagattacaggtgtgagccaccctgcccggccagtaagcggaatattcaattggattccagagtttatgcttttagctatcaagctatactctttctcactatatttccctgagctttggtttccttatctataaaactggaaccgcactgcctgtttgcctttagagctataggtaataaatgttatgcatttattatggtaaataacatgtagtagagcaaagcatggaaattcaggaagtaacaaagagcagtcataagaatgtctatgtggtaaatctagataaaaattacttgtatacacatttacagtagcgcctttaaaacacacaccgatagcactttagtaagtcaagaatgcatgttgcaccaattagagaaaacaccaattttttaaaaaaacatataaataacaagctaatagaagaagaaatgtaattagaaaaatttaaataagcccaaaaactttaaggaaggacaaaaaaaatcatagaacagagaaaataggaatcaatggtaagatggtagatttaaccttgaattacagtaaatataaacagactaaatattgaaattgaaatataaagctcatcagagaaggtaataatatcaagcaaagctaaacaagctgcttactttaaatataaagatatcgacaggttgaaagtaagtaagggatggtaaaactactatgcaaagcaaaagttacaaaaccaaagcaaagactggctcgtttcagaataatcaacgtttcaggtttaatatgaaataatcgtaaatttgtttatacctaataacatagccataaaataaaaattgacagataaacaatcatgttaagagcctgtataagccagatttctccagaaaaacagaatcaaaaggatatatacattaagaattatattaagaaatttattttagcatattggcttacatgattgtggggctggcaagtccagaatccgtaggagaagctggcaggctgaaactcaggcaggaaacgatgttgcagactttaggcagaattttttcttctctaggaaaattcagtttttgctcttaaggcttctgattgtataaggcccattcacagtatgaaaagtaagatttatgtaaagccaactgattgtagatgttaactacatctacaaaatacctttgcagcactacctagattagtgtttgattaaataaatgggcagtaaaggccgggtgcagtggctcacgcctgtaatcccagcactttgggaggccgaggcaggaagatcacttgaggtcaggagttcaagaccagcctggccaacatggtgaaaccccatccgtactaaaaatacaaaaattagcctggcttggtggcgggcacctgtaatcccagctacttgggaggctgaagcaggagaatcacttgaacccaggaggttgtagtgaaccgagatcgcgccactgcattccagtctgggtgacaagagcaaaactctgtctcaccacaaaaaaaaaaaaaaaaaaaaaaaaaaaaaggcactaaagcctggcccccatgatgacacaggaaactaatcgtcatggagactttatccacacttttgaatatatgttacatttcaacattaaaacacacacacacacacaaaatcataaagcaatcaacaaaattaagctgaatgcttcgtaattgctggattccctgggaagctgactctgagatggagattagcgtgcaggacatttcttacgggttgttcttgggatcaatacctgtggagaggagaagctgaggcaggatcaggaagcggggaagtagagtgcaatgctggtgaagcggcatcactgtctggggtaaatatccggggttcatcatctctcgtcaagatgattaacgacatggacacacatgggtgagttaagaagcggaaagtttaataggcggaagaaaagagtgaggagaccagctctcagacatccttaagggaaaggctggcccgtgactgacggcagcaggttttacgggcaggcttgaggaggcggtgtctgatttacgtggagcccagagattggttcgaccaggggtgacgtttacgtagcgcgcagggaaggctggtcaccccaccctaatcttgttatgcaaataggcttcccacttggcaggggccgtcttgtccactcgtttctgtaaacatgggtggcaaaaagagaagatggagctgccatttagaacatgcctaatcccaggtagtgttttttgttgttgttgttgctgctgttgtcgctttttgagtcggagtttcgctcttgttgcccaggctggagtgcaatggcgccatcttggctcaccacagcctccgcctcctaagttcaggcgattctcctgcctcagcctcctgagtagctgggattacaggcgtgagccacagcgccggccccaggtagtatatttttattggcacaactgccggtatttgcctgtgcaagctttcagcttgcttgtctgtgtctgcagctcgattttccaggttgctttttgttagaaaagaaaatgatttgggggctgcttttcattaaaaggaagaccttactgaggactcccataccttcactatctgcctaagtactttcttcttaactcctatatcactgggtcagcagcaaccccagtcaaacctcaagggagacgggaagatgggacgatctgtcagaggtatgctgagttgaggcaagagagctgacctttatggattgccaatcagtgactcattggaagtggggcaacctggaaggaaatgtggccttaggtgaggcagctgtcttcagaggaggcaatttctttgtatctggaggggcaattgttagtgttcccctggactgaagggtgaattatggagaatggaatagaacgatttgttactatgatttggttgatgacttatttcctgtttccttagcttcatcttgctgagcaaaaatgaaggagcctggacccaactttgttactgtgagaaagggtcttcattcattcaagatggcatttgttaagcacctactgtgagtagatgatctcctgtcaaagacagttaacaaatcctcggaatattgcttcatgtacagttattggagatgagtaacttacattctcttaattgtaatggttccttggaaagtcatcgtggaaaatgaaggctggctcatacattttcccagacaggaatttggctgccaacagggaattctaaacaactaaaaactccagatgatgaatgcacaacataatgatggttaaattaaaaaaaaaaaagagcacggtaataaaatttccatgaaatattttgtgtaagcgcagataatcagtcattttctttatagaattcttattcgtaaataatttagaatactttgttctttataatatatgatgggcaactatagtatgattcttctgagtgactcagttcttttttttttttcacatttaatgactttgtttctcctaagtgaatgcacagatagtatattaatcagggttctctggaaaaaccagaaccaatttattatcaggtactggttcatgtgattgtggaggctgagaagccccatgatctgctctctgcaagctggagacccaggaaagctgatgaaagtcaaaggcctaagagctggagggccgatggtatagattgcagcccaggtctaaaggcctgagaaccagaagcacagagggcagaagatcaatattccagctcaatcaggcaaagagaaaaagtcctcccttcctctccgtttttcttctattctgaccctggatggactggatgaggcccagccacattgaggagagccatctgctttaatcagtccaccaactcagatcctgatctcttccagaaacaccttcacagatacacccagaaataacattcaacctgttaggagtatcccatggctcagtcaagttgacacacaaaactaaccatcacagatacacatcaaagttaaat

SEQ ID NO: 1562347 - DNA, 4001 bp, Homo sapiens
gttcaaaaacaattgttaactttcaaactattagaaagggaatacaccaacagctaatatatttattagacagctagatcttctttcctgggttttttcctctgtaagccaataaatgctgacaatttttaaagaatacaaggctgaataagagattggattttatcataaatctaatctgtagaattttcttgtgttctagcattcataaaattaactagataactataaactgtatttactcattagttatttcattccattgagaccataagcctttcaagaaaaagagctatttggaaaccctccatgtcttgtgaggataaatagaaactttgtaactccaaaatttcacgagagaaaatctccaaaatcagtaatattcatagataaatctatgagataccccaaaaatactttgttcctctactgacctcagtcgaaagtgagcatctacttggtatagccaatgtgcagtatagcgcccaaggagcaatccaggagctgacaatgctgagaaatagttcctgcaccaaaaggtcaaacttataaaatctgacaacaaaaaaatgtgcataaaattctaaaaatgtttctgtaaatatgcctatttgtttttctatgatggtgatattcagcttcagcatcacgttgcttttaacaatcagcgagcaactcagccagaatgtgtacctggcatacttctaatatgtacaggcaaacatacatgtgcaagcctgtgtgcatgcatgatagatgcgtaacagagatgattgctcaatcacctttgacgtaaacaagaattaacatcggtcttaaaatggtgacttctacatgaacgtgaagtattatatactctctaatttaatttataaatatattcaagcacatttcttcatacaaaatagtacaccgaaacaattttttaaaatcttaaaatcataaaatgatgatttttcccctagacaaaacccagatcgccaaaaataaaaaccaatcacaaaaactacaccaatgatataattaggcatctgttaggtatcaattcaaaatttatataaatatttcttttccagttagcaatcacattttcaaacagtttataaatataatcaaataaggctctctgacagagtttcaaatgttaagtcacttagttcaacaaaatgccttataatatgcctaatttaagaacatttaagttcaaaagttattaacactttatacattagctgcactacattttcagaaatttgaacatagccatgtgtggaatagcctccagtttcccatgtaaaagatcacctcaattaattatagagcaatcaaaaaatattctttcaaaaatgccttcacactgcttcttctgtataaaaatacaaatgacaaaaggataagagggggagggtgggaagaaaggaaatgggaggcagggatattgggaacaaggaaaaaataaacaaaatcccagagcatatctttttaagaaaccgtatgtatgggtataatatccttaacttgtcagtctttttgatgatatcctactaacatctactcccataaaagatctgccatattctaatagagttctgggggagacatgcattcaaccataaaggtgactgtgttatttacattaacagaattattccaattcccaccaaaatattagctcttgaaaagcctaagtgctagcatttactatgctgtatttgtaataacaccactataaatcactgattatcaatctgagttcaaaagtaagtttaacaaatagcccaactacctttgcatttactgatctacaattccccccactaactgctatttatcagaaacctcccccattcaaaatagaccatcgattcccacattctcttagccagagttttactgtatttcaaaacttgagtcacctgtatgcatcgtcttctttcaagtctcatatcatcctgatggggtgggggaagggagggaagagtccagcggcaaaactataacactgtgtgaagaaaaacagattatgataagagataatgatgcaagacaattaccccaactgaggaatatctaacataactacaatcccaaaacataaagaataaaattacttcaaatttgcaaaattcattttctaacattcaaacttaaattttccttagtcttcaataatcaaaatcaactatatataaaatatattcaattgtcagagaaaaaaaaaacagtttcaaaatgtgcctattaccacggaaaatttcaggtattttctaggtatcaaataaacctgaatattccaccatttactttatctggggaaaaaactccacattttgtaattttcatcagttcacaaatcaagaggaacacgaattcactttcatagtagtttactattaagacagaggtaaagttactttataggaaagacaacatgtcaatctaccaatgttatttgtaaattaagttctgagacatttctcacaaccgctcccccaagtccacaagccctcttgctctccaagtggtttctcttattttattgtaattcttttacagtacttcctacttattgcttccactgataactcatggttgaccagaaaaattcataatgacttacaggaaaatgaaagtaatctcagtgttgtcaactgataatcagcagaagaggtaaagacaagtacaagctaaaatctaacttctaaaggagttgagtgaaaactttatgttttaaattgatactatcgaatttaattcaaggaatattttaaatagaacaatgttgcatatgttggccaagttcctaggtcagcctcatgaaaactactgactccaagagatgttcctggtcaagggcactggggccgctgcagaagaaataccaaaacttcttcaattctacatcctccagacaaattctaaaataagctgttttcctttgttagcaccctctcaattcccaatgcctccaattcctaaatttcacatgatgtcatcccaatcatcctgcttaataatccttttccctaagttgttttacactcctaaattactatacaaagctcctattgcctcagtatagttcatttcaggtaagagaaagaaagaaaccaactggactaaaataattcacactaagatttgcaatttccaacaaccattatagtttgcccaaataaatctcttattggtagaattccaagtggtgctacaagtgggtcataatatagatttgagtctatacttattgcctcaaaatatttctgcttttcatttatttctccttatacttttgaactcccaggttctttaaaagctccaactttgtactccaaatagcagcaatactaaacacttcactggaaaagaacctcagagacaatatgagttatttttaaattaggaattgtctctgaaatctttgcctatattccagattccattcctgaagaactaccattccaattcaaatgcctgttacggtattacattaaacactagacctacaactagctggtatcatattgtggggggtgtatgactagatggatgaacactagagtgctgcatcagaatagttttatttgtaaaaataattgaatcaagattatctttactcaaaggacatcattttctaataatttttcccctaaaatggtcagtctttaaaattatgacatgaactatggggaaagaaaacataaattcaatctctagctatgaactatataatcaaatcctttaggctctcaacatcatattcttcacccagaaaatgttacaatgctacttacacctcgccagtttcgatagaagtagatattactgacacaaaagttctttgtaagacagtagaatcaattatcagtattctttattaaaaattgttagaaattagatttcattactattttaaaaatctaaaggtaagacacatcaaaatttctgacacctttttgaaacattatccattaatcattactcatatgaaaggccaccta

SEQ ID NO: 1562348 - DNA, 4001 bp, Homo sapiens
tgtagacattgacagaaatccttaactttctggcatggtttgaagtataaataaatttggacagctaccataaacaccactgctataccagggaaaatcctccaaagtactgggatacctgaagtatgcgtaaaaaatcttgactataatcaagtaagcttttttcataaccagtttctttgaaatgatcttctgcagcttaaaaccttaacacatgaaactttagttctggtctcacatttttaaaagtctacttgaaaacaatattatcctaaagtaactgatcaagacatgagaaattaaacaacacaaaagctaaaggtaattcccctgagttattaaaacacctcaaaatcaaaatgctaaatatattcattaatactttggacacataaactataaaagggtcacagaggaacccttaagcattcaaagaataactaaaaataactttacacaaaactttcttatgactcatcaatactcaaaaaatgactataatcaaaattgtttgaagtacaaaacacatcaaggaatatctttaattcctttcattcaaaaattgactacatagttttcttggggggggaaaggcctgaaaagtttattaacaggcctcatcaccattaccttaccttttggcctcggcaagccacaaaggtaattccacgctaaaaaccttacggggacacatctctaggttagaaccctgagtcattaaacacgaatcactccaaaatttgccagtatttctaataatgagttacaccctaatgattcacaactccagactggctacagccttctggctcctggagtcccagctgtatgaccttagaccagtcagtgcccctctccagactcactctcctcatctataaaatgggaacagttcctaccggctgggcaagctggtcgatccactgaaaaccctaaaaacagagcctggcacttgtgaaaacaacgttctaaggcgtattttctgacaatttgggcggaattcaagaaccaaatggtgctagcattcctgcgctgtgcccagattatgggattcgtgtcacctagggttgggcgaaaggcacaggcaagtaaccagagtcactgactcactaattttaccatttttaactatttcagattagggaggagcctttcgccaagtactgagctactcagcagctttggtggctccgaagcgagagtgggtttgtgcctataaatagactggtgaagttttgtggcgatacacaggtatctattctaattcacctctcctcagccaccaactcccccggctgccgggcaggtcatccctccaccccgagccgccggggacactcgcgctccccgcccaacttcggaggccagtgagtgcccctcgctccagcgcggacccccagggccgccgaggcagcggctcccgaccttcgccggcgcccggcccggcccggccccgccgtcctcgcccacccggcagccggccccattttcttaacccgtgcattgtccttgcgaatcaccccggcggttcccacactggtggggaccgagaggagggacgagggaggagctgggggaagaggatgaggaggaagaggaggaggaggaggaggaagacaacctccaccccttcgctcgggcggccagtgaaggtctggcgctgtctacggccccccaggccccggctcccgggaggccgcggcccccgctcccaccctccgcaactttccctccgctcgcgcccgccgctcctccgggacccggcctgaggctccctcccccggcggccggccctgggcccgcggcgcctcctcctaaaatggcaggtccctccctccgcccggccggcctcggctccggcccggctgcgggccgccgggggagccgagcgccaggccgggcggggccgcggccgggccggacactcaccgggacgatggcggggcgctcgcgccgcttcctccggtgagtctcagcctcgggctcccgcgccgcgctcccgccgcggcctccgcagccagcgccgccccggcagcctctctccgcccccggcgctccggctcctggccgcgccgcagcctgctcagtctctcctcggctcgcggttccagcggcgcccggggccggggaggcgacagccccctccccggcaaataccgcagtccccgggccccgattccaggcggcggggccgcacggccggcccggcgcagagggcggcgtcggcgaggccgggcgccgagcggcggctgctgccggcggcttcttcccgaggaggattttgtaaatctcacaaaatggcgcgcgctccgaacctgcgcagcgagaagcgccggggcccgggcggcggcggcggctcctccgccaggagagcccgaaccgcccgcccccgagtccccgcacagacagacagacactcgcacacacccgcacactcgcgcgcacaatcgccctcgcacacgctccctcgcacacacactcgcactcacaccggtcccgcctgctcgccggcggcggcagcggcaccaacagcagcagcaggaacagcagcagcagaagcggcggcggcggcgcccgcaccccccgctcggggtgtccgctctctgaggccgacctgggccgcgatcagcagcagcgacagcagcagtctccccggatacccccgccgcggttgccgccgccacccccgcctcactccaatggggctttttattattattcgggcgggaagcgaaagggtttaaaaaaaaaccaaccaacaaaatggcgacggaccgacccggtcgctatagcaactgtcaatcaaaacgcaaaaccccggctgacgtgctgacgtcctcctcccgccccccagccccgagccggcgggcggggcctgttgctcaggtaacggcagattccgttccctcctttccgtctccccctctgtccccagccaaccacccaaccccctcaggtcacgtgaaggataaattcggagctcgggtccgctacgagtgtcagaggagggcgcgtgattcgcccgggggaggggagaggagggggacggctaggccgagggagggtaggggctggggaagggggggcgaggcggcggccaggcctgtgcgcgatcgcccgccgcctcccggccgccccgccccgccccgcgcccgcgccgactgcggcccggggagcgcgcgcggcctcccgcgccgccgcccccgcagccctagcgccccgcgcttccgcgtcggcgcccgcagccccgcccgcgccggggggaggggcgggctgccccgggcgggggagggggaggaggaggggcgccgcggccttcgggcggggacccgggaagcccaccccgcgcgcccgggcctggagggctctcaccgcggtccgggcgccgcgctcgcctctctccccgggaagcgcggcggccgcgaccgtccgcgcgtggagccggttcttcgaagggctggcgggcctcctagccggaaaatgccggcggaggccgtggtgggggcggggaggagccaccgccgcgccccagacatcgcaggaattccggacgctgcgccgggcccggcggccctgaggctggcacctggctccggtcgggccgcccaggttttgtggcgcccgagaccagcgttgggaaattaggctggagccatcatgaaaactttttcaggcagtgcacgctcgcctgtgcctgcccatctgcttccaacctctccccacctttcggggcgcagcctgcctgctccatcggaatgccctttagatgaatccccttgtgctgttactgtgtccttgtcgtccagctctctggttttcttttctatacaccttctcggtttccagagtcttaattcgcctgcttgtccttaaccatcaaaactctttattaatatcctggctttcgctgatttttattctccctaccccttctccctagctatgtattgctgggtgagctcccgaggcttgaaaacccaagtatgctgtgctggctgcgt

SEQ ID NO: 1562349 - DNA, 4001 bp, Homo sapiens
aagagggggagggtgggaagaaaggaaatgggaggcagggatattgggaacaaggaaaaaataaacaaaatcccagagcatatctttttaagaaaccgtatgtatgggtataatatccttaacttgtcagtctttttgatgatatcctactaacatctactcccataaaagatctgccatattctaatagagttctgggggagacatgcattcaaccataaaggtgactgtgttatttacattaacagaattattccaattcccaccaaaatattagctcttgaaaagcctaagtgctagcatttactatgctgtatttgtaataacaccactataaatcactgattatcaatctgagttcaaaagtaagtttaacaaatagcccaactacctttgcatttactgatctacaattccccccactaactgctatttatcagaaacctcccccattcaaaatagaccatcgattcccacattctcttagccagagttttactgtatttcaaaacttgagtcacctgtatgcatcgtcttctttcaagtctcatatcatcctgatggggtgggggaagggagggaagagtccagcggcaaaactataacactgtgtgaagaaaaacagattatgataagagataatgatgcaagacaattaccccaactgaggaatatctaacataactacaatcccaaaacataaagaataaaattacttcaaatttgcaaaattcattttctaacattcaaacttaaattttccttagtcttcaataatcaaaatcaactatatataaaatatattcaattgtcagagaaaaaaaaaacagtttcaaaatgtgcctattaccacggaaaatttcaggtattttctaggtatcaaataaacctgaatattccaccatttactttatctggggaaaaaactccacattttgtaattttcatcagttcacaaatcaagaggaacacgaattcactttcatagtagtttactattaagacagaggtaaagttactttataggaaagacaacatgtcaatctaccaatgttatttgtaaattaagttctgagacatttctcacaaccgctcccccaagtccacaagccctcttgctctccaagtggtttctcttattttattgtaattcttttacagtacttcctacttattgcttccactgataactcatggttgaccagaaaaattcataatgacttacaggaaaatgaaagtaatctcagtgttgtcaactgataatcagcagaagaggtaaagacaagtacaagctaaaatctaacttctaaaggagttgagtgaaaactttatgttttaaattgatactatcgaatttaattcaaggaatattttaaatagaacaatgttgcatatgttggccaagttcctaggtcagcctcatgaaaactactgactccaagagatgttcctggtcaagggcactggggccgctgcagaagaaataccaaaacttcttcaattctacatcctccagacaaattctaaaataagctgttttcctttgttagcaccctctcaattcccaatgcctccaattcctaaatttcacatgatgtcatcccaatcatcctgcttaataatccttttccctaagttgttttacactcctaaattactatacaaagctcctattgcctcagtatagttcatttcaggtaagagaaagaaagaaaccaactggactaaaataattcacactaagatttgcaatttccaacaaccattatagtttgcccaaataaatctcttattggtagaattccaagtggtgctacaagtgggtcataatatagatttgagtctatacttattgcctcaaaatatttctgcttttcatttatttctccttatacttttgaactcccaggttctttaaaagctccaactttgtactccaaatagcagcaatactaaacacttcactggaaaagaacctcagagacaatatgagttatttttaaattaggaattgtctctgaaatctttgcctatattccagattccattcctgaagaactaccattccaattcaaatgcctgttacggtattacattaaacactagacctacaactagctggtatcatattgtggggggtgtatgactagatggatgaacactagagtgctgcatcagaatagttttatttgtaaaaataattgaatcaagattatctttactcaaaggacatcattttctaataatttttcccctaaaatggtcagtctttaaaattatgacatgaactatggggaaagaaaacataaattcaatctctagctatgaactatataatcaaatcctttaggctctcaacatcatattcttcacccagaaaatgttacaatgctacttacacctcgccagtttcgatagaagtagatattactgacacaaaagttctttgtaagacagtagaatcaattatcagtattctttattaaaaattgttagaaattagatttcattactattttaaaaatctaaaggtaagacacatcaaaatttctgacacctttttgaaacattatccattaatcattactcatatgaaaggccacctaaagtatctctgagttacataattttctgctgacttatacagcaaccaaaccatcatatgctaagtaacaataaactccagaaatcttcaccttggattactttaaataaggactctagtgattattccatatatccttccttcaggctagccacttttcaaaaacaaaaatgttaatacaaggtcagagtttttatatgacaataagcagataattccacacaccaaatgtgctttgcagataagctacagatacgattttcttcttaaagaagcttaaaaatctagacagtcatattttcatttttttgagaaaaatatagagtatatttttcatcatctgccccacaaatggagccattcacaaactatggagtaacaatcaaatgctaatgacaaacatctctctttaccacaggaacctctcatgaccctcaaatcttctacagtatgttctagctcagtttgccaaaggcaatgtgaaggtctacgaacaatccaggaaccgagcttacatggttttttgaagttaaacttacaaaccattttttttagttgtcttaaaatcactgcataaaattaatctacagcgtatcttcagggacaggacagtttccacaggctgttaaacacacggtatgctcagataggtactgagcttagtctcttggtgtctgtattccacaggcaggggttggggagaaatcaagtcacctaataaaaagcactgatacaccaagatttgtaaaaaaaaaaaaaaaaaaaaaaaaagaaaaagaaaaagaaaaagaaaagaaaaataaaaaatacaaggccgggagcagtggctctgtaatcccagcactttgggaggccgaggtgggcgtatcacctgaggttgggagttcaagaccagcctgatcaacatggagaaaccccatctccactaaaaatacaaaaaaaattagctgggcgtggtggcgcatccctgtaatcccagctactcaggaggctgaggcagaagaattgcttgaaatcaggaggcggaggctgcagtgaaccgagatcatgccattgcactccagcctgggcaacaagagggaaactctgtctccaaaaatatatatatatacactaataaacagagatccagaatgtaagactgggactgaaatgaatgcatcagcatgacaggcaagttcagactaacccaggagctaataaactaaatggcaggtgcaatatgttctctaatgtgacagtgttttgtaatgacaccaaactaaaaattatatctaatttcaaaataactaaagtagtatgaagtattacaagtagcagatgaaaaaaaatcagtatgatacaaggagcttcaaaagtactagttaagtactacctcatttcttaagctggaaga

SEQ ID NO: 1562350 - DNA, 4001 bp, Homo sapiens
ttcaaaaacaattgttaactttcaaactattagaaagggaatacaccaacagctaatatatttattagacagctagatcttctttcctgggttttttcctctgtaagccaataaatgctgacaatttttaaagaatacaaggctgaataagagattggattttatcataaatctaatctgtagaattttcttgtgttctagcattcataaaattaactagataactataaactgtatttactcattagttatttcattccattgagaccataagcctttcaagaaaaagagctatttggaaaccctccatgtcttgtgaggataaatagaaactttgtaactccaaaatttcacgagagaaaatctccaaaatcagtaatattcatagataaatctatgagataccccaaaaatactttgttcctctactgacctcagtcgaaagtgagcatctacttggtatagccaatgtgcagtatagcgcccaaggagcaatccaggagctgacaatgctgagaaatagttcctgcaccaaaaggtcaaacttataaaatctgacaacaaaaaaatgtgcataaaattctaaaaatgtttctgtaaatatgcctatttgtttttctatgatggtgatattcagcttcagcatcacgttgcttttaacaatcagcgagcaactcagccagaatgtgtacctggcatacttctaatatgtacaggcaaacatacatgtgcaagcctgtgtgcatgcatgatagatgcgtaacagagatgattgctcaatcacctttgacgtaaacaagaattaacatcggtcttaaaatggtgacttctacatgaacgtgaagtattatatactctctaatttaatttataaatatattcaagcacatttcttcatacaaaatagtacaccgaaacaattttttaaaatcttaaaatcataaaatgatgatttttcccctagacaaaacccagatcgccaaaaataaaaaccaatcacaaaaactacaccaatgatataattaggcatctgttaggtatcaattcaaaatttatataaatatttcttttccagttagcaatcacattttcaaacagtttataaatataatcaaataaggctctctgacagagtttcaaatgttaagtcacttagttcaacaaaatgccttataatatgcctaatttaagaacatttaagttcaaaagttattaacactttatacattagctgcactacattttcagaaatttgaacatagccatgtgtggaatagcctccagtttcccatgtaaaagatcacctcaattaattatagagcaatcaaaaaatattctttcaaaaatgccttcacactgcttcttctgtataaaaatacaaatgacaaaaggataagagggggagggtgggaagaaaggaaatgggaggcagggatattgggaacaaggaaaaaataaacaaaatcccagagcatatctttttaagaaaccgtatgtatgggtataatatccttaacttgtcagtctttttgatgatatcctactaacatctactcccataaaagatctgccatattctaatagagttctgggggagacatgcattcaaccataaaggtgactgtgttatttacattaacagaattattccaattcccaccaaaatattagctcttgaaaagcctaagtgctagcatttactatgctgtatttgtaataacaccactataaatcactgattatcaatctgagttcaaaagtaagtttaacaaatagcccaactacctttgcatttactgatctacaattccccccactaactgctatttatcagaaacctcccccattcaaaatagaccatcgattcccacattctcttagccagagttttactgtatttcaaaacttgagtcacctgtatgcatcgtcttctttcaagtctcatatcatcctgatggggtgggggaagggagggaagagtccagcggcaaaactataacactgtgtgaagaaaaacagattatgataagagataatgatgcaagacaattaccccaactgaggaatatctaacataactacaatcccaaaacataaagaataaaattacttcaaatttgcaaaattcattttctaacattcaaacttaaattttccttagtcttcaataatcaaaatcaactatatataaaatatattcaattgtcagagaaaaaaaaaacagtttcaaaatgtgcctattaccacggaaaatttcaggtattttctaggtatcaaataaacctgaatattccaccatttactttatctggggaaaaaactccacattttgtaattttcatcagttcacaaatcaagaggaacacgaattcactttcatagtagtttactattaagacagaggtaaagttactttataggaaagacaacatgtcaatctaccaatgttatttgtaaattaagttctgagacatttctcacaaccgctcccccaagtccacaagccctcttgctctccaagtggtttctcttattttattgtaattcttttacagtacttcctacttattgcttccactgataactcatggttgaccagaaaaattcataatgacttacaggaaaatgaaagtaatctcagtgttgtcaactgataatcagcagaagaggtaaagacaagtacaagctaaaatctaacttctaaaggagttgagtgaaaactttatgttttaaattgatactatcgaatttaattcaaggaatattttaaatagaacaatgttgcatatgttggccaagttcctaggtcagcctcatgaaaactactgactccaagagatgttcctggtcaagggcactggggccgctgcagaagaaataccaaaacttcttcaattctacatcctccagacaaattctaaaataagctgttttcctttgttagcaccctctcaattcccaatgcctccaattcctaaatttcacatgatgtcatcccaatcatcctgcttaataatccttttccctaagttgttttacactcctaaattactatacaaagctcctattgcctcagtatagttcatttcaggtaagagaaagaaagaaaccaactggactaaaataattcacactaagatttgcaatttccaacaaccattatagtttgcccaaataaatctcttattggtagaattccaagtggtgctacaagtgggtcataatatagatttgagtctatacttattgcctcaaaatatttctgcttttcatttatttctccttatacttttgaactcccaggttctttaaaagctccaactttgtactccaaatagcagcaatactaaacacttcactggaaaagaacctcagagacaatatgagttatttttaaattaggaattgtctctgaaatctttgcctatattccagattccattcctgaagaactaccattccaattcaaatgcctgttacggtattacattaaacactagacctacaactagctggtatcatattgtggggggtgtatgactagatggatgaacactagagtgctgcatcagaatagttttatttgtaaaaataattgaatcaagattatctttactcaaaggacatcattttctaataatttttcccctaaaatggtcagtctttaaaattatgacatgaactatggggaaagaaaacataaattcaatctctagctatgaactatataatcaaatcctttaggctctcaacatcatattcttcacccagaaaatgttacaatgctacttacacctcgccagtttcgatagaagtagatattactgacacaaaagttctttgtaagacagtagaatcaattatcagtattctttattaaaaattgttagaaattagatttcattactattttaaaaatctaaaggtaagacacatcaaaatttctgacacctttttgaaacattatccattaatcattactcatatgaaaggccacctaa

SEQ ID NO: 1562351 - DNA, 4001 bp, Homo sapiens
ctgctattaataacagaatttgtcctgtacttaaaagataattaatgcctctatgcatctatgcaacataccatagcaataaacggacgatgtatttcagacagaaaccaggtaaggctagctgataaaatacagactatattttttttaacatgccaagttttgcaattagggtggtaaactggaggcaaataaacttaacagctgcaggctgaagaatggaaaggtgaaaagactgagactgagagtgggaaaggaaagggaccgctcctggcgctgagagctggtcccagagccggtgttgcggggtgtgcgggaaggcgccgtcgggggtcattccaccatcaggacccagcggacagtgacaacccagcctcaaacctggtccctactttaggccaagcgtcagcttttttagttcaaccctgatttccactccagacaaggacaaataacctcttggtcggggccccagatgaagtccccgcggtgtgctctcctggcccttgtcaatttcggggtgccccctcctctccatccgcacccgactgcacgcgcctccctgggaccccgcactggcgagccgtccctcccggcgctggacgccccacctgtcccggcgccgtcggaagagccctgcagagtgagcccctagggccaccccgctgccttcctccccgtccccgcagccgctgtagccagcgtgggagccgggcaggtcgcgtggggcgctggacttaccgagaggttagcgccgccgtcgggggagggcgtgtcccgcacgtgtgtgtccgcgcgtgtccgcgcccgcgtgtgccagcgcgcgtgccttggccgtgcgcgccgagccgggtcgcactaactccctcggcgccgacgggctcagcccatggtgtgggcgccgggttcagggaggctccggctcccgccaatcgcggagcagggcggccgccccgacgcgcgacttgcgaacccggagtgcgcgccgggggcggggcagggacgcgtgggcgggaatgcacgcgcgtggccaggtgcgcgtgggtgcgagcgcgcgggagtcttcgagtgcgcgcgtgtccgtgtgcgcgtgggtgtgggtgtgctcgcgtgtccgtgcgcgcgccctcggggccaagagcgcgggccgcgcgggcaggtttggacactacgcgccctgctcgggtttaggacgcggctggcggctccgggaggaagaggaggaggaagaggaggaggcggaggaggaggaagaggaggagggaggcggaggagcagaggctgggacggccggaggagagagtccggccccagcaggaaaggaacccagcacgcgactactggaggggcgaggagcaagggaaggaccagaggggaggagagggggtcaggggagggaaagtgtgggagggggagccgcgggggtgcgcgctcctcctaactcggggtcgcttttagcgagaagtgatatttttccagcctcattgaaaaccgttgcaaacattgaaaatagtaaaagtgaaaacggttgcgacactaagacgtttataaaatgaccgcggactgccctcgatgctgatgagaactgggacgacgtcgcgcagagcgtccggagggagaggcgcggtgcccgggacctcggtcgtggggaggagccggatacagccgccgggacgcggggatgccgagggcaccgcggcctggtctgaccgacgcacgcggtgacagccgcccttgggagacgacggcgtctgcaaccagcagcctccaaagggtgcagccaggaggctcagcttgtccgcctccggggctcggggctaagccccttccagaagttttcgtttctacgcgaattccgaccgcaaaatccagcttacctgagcgccgctcctcttctctcatgtccctcgggggccgtcacgaccgtcccggagcgatctctaggaacctgtcccgcagcgatctcttgcacactctccccattccgaccaagtgaaaactacccatgtccctccctctccaaactttaacagccaagaatttcagcaaacagccagaaagaaagctaagtctccccccgccccccaccccaagggaagggagggaataagcactcctttaatttgaaaaataataattaaaactccctcaacttttaaggccgagcaacataatctattaattggtcgctattaacatgcagttttattgaccatagcacacagaagtctgattgtgagggaggagtgttttcaatgaaagtggagttattttagctgcagacgtgtttacatttctgtggtttagtctataactttctctttttcttgcttcagaattctgctccatgaagcaaagcccttagctcccagacattccaaaaagtctgccaaaataatagaaaaaaagagagggaagaaaaaacacacggagacccccaagtctgggtcaggctcagggttggatgtgggcagggtgagtgtgccccctccccgcgcactttccagttaggaaaaaaaaaaaaagtttcagggctccatttcctgtttgctgggggaaaaaaataaaatggacctgagcagctgagtttagaaaccgccttttccagtacctataggttctgagaggatctttaaccctagagatgccaaaatgagctcattaaaatgtgagactccagccaaggaagtttttcccctgttaagatggacagccttcgtgaaactacaaatgcattcctaggaaatttcttgaacaatcaggcacaccatggtagttgggatacaagcccacctctccataggtggccaagagaagataccaataaaaataaatattgaaaacagattaaatttctgacaagcatgcaccctttttgtcccctgaggtacaaagaacagaatgtatatttcaaagtgggtatttagtaatagggtcttgtcagtttatccactctgtgctcgaatcgtcatttgcaaagtcgattgcatttcctttagtattgaatgtgctcacaaatcacacagaagtccccatactccagttcacatggccttcaaaaagattcgatctgaatctccttaactaccaaatgcatattttggttccttttctttctaattattctccaaatattccagatccaagatatttcactggattttgaaatcttccaattagccactaattttcaagtctcaccatagtgaacccttaacatttaggggaatgctttaaagtaaacaggttctgaacctattcaataaaatcagtagcccacaggccaatgactcttttttaatactctaaaagttttttaatacgctgccaacgtttctcaatcatcatcagtatatggtgaatattatcacaatatagaacagtgctaaaaacaatatgcgtgctgatgaacaaaataacatttaacgttttaagaataatgaactgcactttaatagtagaaggaacatgatttcaaaatgagctcagtaaaaacccaatatttgaaacaatgttgtttgtgactctccctcactaccatctccagttcccccaaaagacactgcagaaggagagagagagagagagagaaagataatttcttaaaacatgaaagacgcataccgatcccattcataaaatgtgggtcattaaccttgaagaatctcagtatcccaaatcctagaattttgcatatgacatcatctcctccaactgattgcatcttgtagttatagttaggatgttctttctgctgtctaatctaatccctacctatggccgcagcattcccttcagtctgacccatgatttaggtcaaataggaggaaatcagtttcaatgaattaaatcatttcagttaacttgagaggccgaaagaaaactaagagacaacttcacgttctgtattgcaggacaaacatcataattctaattaaaatgtcatttaaaaggaaagtttttataaaaacaccacttgacacattccataagaattagta

SEQ ID NO: 1562352 - DNA, 4001 bp, Homo sapiens
catgtcttaaaggaagtcacctataaagagggcctattttaacagaagattaaaaaaaaattcacctgtagtcattctaagggttcacttgggtacatacaataaacacataatgcaatgtaataaaatgttaaatcaagcatagtaccttagacaagtgtaaactattatttccaaaaaagtgttcagaaaatcacaaaatattcaaactttcaaaatagcttcatgtattcataaatgtatacttcaaattaaacagtataacacatttggatgttttgcaaaatgtacctaccttctaaaggatggtctgttatttcaatgtcctttttaatgcactgagttttttgggaaaaaaaaccacataagatcgtacccaagctattcaagatttacacagaatatttgatttaacatgcatatgaataaggatgaaaataagaacaaaaaaataacattttgggtcacaaaatcaagtaatttctattcatgtagctataagtagggcacattaactctcaattttataattcctgtctataggagccatatttcagcagattccaatccttgaagccaaagaaagaaaagtataaggtgaaagttcttggtacacagatttttaatatattattgaacacaccttgagaaataaaagctgaacttctcaaacacagtttctatggtacatatgagtcaaatcttctaatacaaacatttcaaattatgaaaataccaaaccaaagagtatttttgaaaatggcttggcccaattctgggcaaacttccattttcttatgcactttccaacaaactaaaagccttatgaaaacaccaccaaatgcttctcacctccgtgcagcaaaactaaagacatgcaacaaacacaattttcttttccctccactcagcatctgcttttgttgctgatttttcacatttctacaaatgtcacgaaggcatggtggcctttaaaacaactgaacggacccccattcaagactgcatgccccttgacttgtagtcaccattaaattggcttcatttccaggaatcaggccatatttaggattgtacctgtgcagatttacctccacattaatctctacatgctatctactaaaaacttaggcaaggaaatgcatcagaccaaacaccccacagcacagagaaccgaccggccattgctttccaatctccgcaaacctaaccattgctggaagaaatcttactcacagtgcacagacagtaggtattttattgaagataaacatatagtggaacaaaccaaattacccccatttgagttacgtgagcactcagttctcagcgtggatgtcccacaaatcaagtcaacatttgcgtcccattaccagcagccacttgccgagtatctcttcgcttccactgggactgcctggcatccctgatgctaaggagccactgaagagcctccaaatgtctgacattcacaaacgcatcttttgctttgacccgacccttcaacctctccgagtctgctgccttttctcagacacacatccaggcaccgttagggatagttagagaatctgaaaattcagaagcgctccgaaaagcctttccaaaagtaatccacagcactcaacagtgaatttagaaaccccaatttttttctgagtttgaagtttttaagccttgcggatggttggagtaggaaaaaggaaatttactaggcagtgcaaaggaaatcttgttgtcctctattgtggcagtgggggtgttgcccaaccctaacttatctgccttgataaaggaaaccaaagaaaagagtaacaagaacaagattttgtcaaattaaaaggaaccctttccttaccttaatagtgctggccataatgcgatcaagtttattgatcgttaataaatgttaataataattattgcttctctctgaccagaaagtagttttgatgaggttgtttagagcggatgagattgtgctaagtctgggaaatgaagtcagccaatggcaggaagaggtttctattggtcctggctgtccagcccaaagaaacaggatatttgggagtggagagataagagaccctgaaaacaatgttgtttttcttgatgatatgcagccaggagattttttttttttaattaaaaaaagaaaaggcatcaattgggatggggactgccacagcaggtgtgaccggtgtgccgccgtgtgacacactgcactgagaccaaggcaggatgcagatgtgatgggactccgcatggcttcacacgggctgcaagcaccttggagccaaggcgttgagggcaccccactgccctgggtgtcagcccttcgcagcccaattcttcgcagaattactaggacagaggacttgagctcctttctcctaaaaggaaactttgcaggtggagtttatttcatgttaatagatggccatgttcagtaacagccattgcctggctgatttttaacaacctatatttattcaacatttcatataagtgttccagaacagtttcattttctccttccaaatacctgcactttttatttgctctacaacaaagttgttgaaaacgcaaggactctaggcttacagtaaacacaaaaaataaagaggaaaaataaaccttcctaagtcttgttttcaagtatttattaaaacccaaataactgaagtgactacaaatgtcccggaatatcagtgagctggtctcactctgacagacatccatgttgcagacaacagatcctcatagaacttttggctacccagagatgccatgtgagggccccattacatgtctaaaatccaagctataagttcagggtcacaggtctgttttctcctcgaaggaagtacagcgaatgcaggcctgaacattccttagagggtttcaggactttaattactcattttcaggaaattgcttggaagaaacattttgctttgaatctagctacaggaacgcaggacccataaagaggtgtggtctcaataggcgaccccaagaacacaatagactaaatcctgagtcatctgacaattcctggttgcagagctggacgttcagtaaatggatttcactcagactttaggccggcatgtgtcagagttctgtccaccagcccaggtcattctggcttttattatatacctctgatttatcacctcatgttaggacaaaagaaggaggagaaggagaaagataaggggggaaagggagaggaaggagaggaggaggaggagggagggaagagggcgagaaaaaatggagaaggagaaaggaaggacagaagagagagagaaaggaaggaggatgggaggaaggagggaggaaggaaggagaaagggagggagggagggaaagaaagaaggaaaagaaaagaaagagagtatattgtaagaaaatcattctgtggaaatcagaacctaagttctcagcacctacattatgagggggtgttgatttccgctcttttcatctctgaacaatgaataagatggcaggctgattaaaattctgtttccccgaaaatttcaaagtcctgagctgttttatctgggcagcttccactagaattctggagtgcggaggagaaaagctctctcagcttccctgagtgtccttgctttttgttctctcctaagaagcatcaatgtaaaatgttaactgtggcctccacaacacatggcacctgattatgcctttaccaaacaccagctttaaataagatgaacgctttgctaatgaaatagccacggaagaaaatcctgtgtggtcccgcctcacccacgcctcgtggttgctaatccagccctcagttgttccctgcagcaggaaagatcagcatttctactgggacctaatgcttcagtgatgatttggccttaactccctggttcttgcctaatgcaaatcaaactgtgaagagtgggatttcttacctctctattttgaaataatttccaacttacagaaaagccacaaga

SEQ ID NO: 1562353 - DNA, 4001 bp, Homo sapiens
gtagaatagtatgtgagttacacattccttctgacgtctttcagagatgctttccttcttacttatgtatctggtattccattgggatcttaggtcttaccacaaataaaatatctgattttataagattaaaaactcaacaaggtttttctttaatataaaagcaaaacgtggaacgtggaggggggaatgtttatatacaggtgtgaatgcagcccctcacacaatcccttcaatggtaaatgctaattttctaaattttagctaaagattaaatcaccaataattcctcatgaaataacagataaacgtgaaatcatgtactacaattctactctaaatttttttaaatagaatgaagtaattataaaatgttacaaaagagaagaaactggaattataagtgctactggaattatatattccttaacaaatatcttgagacggattacccatttgctaattcagtgtactttccaaaagccattgacccaaaccgaagctaggattaccaaatggcaaatagcatttgtgatgtgtgtagctcttctaaagcctttcttgagaattgtaaaacttgatatattagccacaagtttacatagctcaccgtttctgctagaattataatttcaatggtgtaattagcttattaataatttgacacatggtgaattaatttacatggttgggttcttcgcaacgtctgttgcctgatcctcctgtggatgaaggctatgagctctggcctgccccgggagcgggcaccagccaatgccagcggagcaagggttaactttgggactgtgacagttctcccttcaggggctctaaactacttggagagaatggaaaacagtcaaaaatagtcccaaaggtaaataaactctgtgtcctatgtatgtcacccagggaagaataaaatgtatttttactcacattgaaagttttctgaactacaaaagctatagagacatgtacagagtgaaacctgtagcacatacgaatatgttattttgaaagataaaggaaactatctttagattaacgatgagttgtattaaatccacatcctcattgaaattgtttatccattttattgcgcagtgtagtctgctattaataacagaatttgtcctgtacttaaaagataattaatgcctctatgcatctatgcaacataccatagcaataaacggacgatgtatttcagacagaaaccaggtaaggctagctgataaaatacagactatattttttttaacatgccaagttttgcaattagggtggtaaactggaggcaaataaacttaacagctgcaggctgaagaatggaaaggtgaaaagactgagactgagagtgggaaaggaaagggaccgctcctggcgctgagagctggtcccagagccggtgttgcggggtgtgcgggaaggcgccgtcgggggtcattccaccatcaggacccagcggacagtgacaacccagcctcaaacctggtccctactttaggccaagcgtcagcttttttagttcaaccctgatttccactccagacaaggacaaataacctcttggtcggggccccagatgaagtccccgcggtgtgctctcctggcccttgtcaatttcggggtgccccctcctctccatccgcacccgactgcacgcgcctccctgggaccccgcactggcgagccgtccctcccggcgctggacgccccacctgtcccggcgccgtcggaagagccctgcagagtgagcccctagggccaccccgctgccttcctccccgtccccgcagccgctgtagccagcgtgggagccgggcaggtcgcgtggggcgctggacttaccgagaggttagcgccgccgtcgggggagggcgtgtcccgcacgtgtgtgtccgcgcgtgtccgcgcccgcgtgtgccagcgcgcgtgccttggccgtgcgcgccgagccgggtcgcactaactccctcggcgccgacgggctcagcccatggtgtgggcgccgggttcagggaggctccggctcccgccaatcgcggagcagggcggccgccccgacgcgcgacttgcgaacccggagtgcgcgccgggggcggggcagggacgcgtgggcgggaatgcacgcgcgtggccaggtgcgcgtgggtgcgagcgcgcgggagtcttcgagtgcgcgcgtgtccgtgtgcgcgtgggtgtgggtgtgctcgcgtgtccgtgcgcgcgccctcggggccaagagcgcgggccgcgcgggcaggtttggacactacgcgccctgctcgggtttaggacgcggctggcggctccgggaggaagaggaggaggaagaggaggaggcggaggaggaggaagaggaggagggaggcggaggagcagaggctgggacggccggaggagagagtccggccccagcaggaaaggaacccagcacgcgactactggaggggcgaggagcaagggaaggaccagaggggaggagagggggtcaggggagggaaagtgtgggagggggagccgcgggggtgcgcgctcctcctaactcggggtcgcttttagcgagaagtgatatttttccagcctcattgaaaaccgttgcaaacattgaaaatagtaaaagtgaaaacggttgcgacactaagacgtttataaaatgaccgcggactgccctcgatgctgatgagaactgggacgacgtcgcgcagagcgtccggagggagaggcgcggtgcccgggacctcggtcgtggggaggagccggatacagccgccgggacgcggggatgccgagggcaccgcggcctggtctgaccgacgcacgcggtgacagccgcccttgggagacgacggcgtctgcaaccagcagcctccaaagggtgcagccaggaggctcagcttgtccgcctccggggctcggggctaagccccttccagaagttttcgtttctacgcgaattccgaccgcaaaatccagcttacctgagcgccgctcctcttctctcatgtccctcgggggccgtcacgaccgtcccggagcgatctctaggaacctgtcccgcagcgatctcttgcacactctccccattccgaccaagtgaaaactacccatgtccctccctctccaaactttaacagccaagaatttcagcaaacagccagaaagaaagctaagtctccccccgccccccaccccaagggaagggagggaataagcactcctttaatttgaaaaataataattaaaactccctcaacttttaaggccgagcaacataatctattaattggtcgctattaacatgcagttttattgaccatagcacacagaagtctgattgtgagggaggagtgttttcaatgaaagtggagttattttagctgcagacgtgtttacatttctgtggtttagtctataactttctctttttcttgcttcagaattctgctccatgaagcaaagcccttagctcccagacattccaaaaagtctgccaaaataatagaaaaaaagagagggaagaaaaaacacacggagacccccaagtctgggtcaggctcagggttggatgtgggcagggtgagtgtgccccctccccgcgcactttccagttaggaaaaaaaaaaaaagtttcagggctccatttcctgtttgctgggggaaaaaaataaaatggacctgagcagctgagtttagaaaccgccttttccagtacctataggttctgagaggatctttaaccctagagatgccaaaatgagctcattaaaatgtgagactccagccaaggaagtttttcccctgttaagatggacagccttcgtgaaactacaaatgcattcctaggaaatttcttgaacaatcaggcacaccatggtagttgggatacaagcccacctctccataggtggccaagagaagataccaataaaaataaatattgaaaacagattaaatttctgacaagcatgcaccctttttgtcccctgagg

SEQ ID NO: 1562354 - DNA, 4001 bp, Homo sapiens
cctcaataaataaattgctaattttcataagagccctttgtcaactgactaaaaacatccttaatttagaaatgtattttttagttttaagataactagtcattaagtgaaaacattgtaggcaaaatggctctaagcaatttagtattcataggaatgaatccattccttgaaagcattggtcgctgggtgcacttgtcctggatgagcagatattaggcaaatcagtctttcaccagcaaaccctgccataagaactgcacaggcctgattcctgccaagcacaccaggcccctgactggggcagaggcctcccttatggggcaggaagaaggaggcagggagaaacatagggcccatgatttaaggaggctctccctctcaggctcatgcaagtgcaggatcagtacctaaaggggagcaccgcccgaaatcctgtgccccagtcaccttaacccagtccagccctggctcctgcactccaaagctaagcagggaataccagcgggagacagaagacagcatgagaaactgaatgcatctcccacatttatctaaaaataagaaaatggacttcttcagtaggaaatggctcatctttccaaatgaataaaaatacttatagctatgggttgaattgtatcaattctctcccccagttcatgcactggagtactaacccccggtccctcgggatgtgatgatagagaggtagggcctttacagaggcaatcaaattaaagtgaggtcattagtgacctaacccaatgtgactgatccacttacaaaaaaagggacaagatttaaagacagacctgtatagaaggacgatggtgtgaagacacagggaaaagacaaaagaggcctggaacagattttcctcaaagccctcagagggaaccacttgggctgacaccttgatcttggacatccagcctccggaacggtgagatgatgaatttctgttgttttaagctacccagttcatggcagtttgttacaacagcactgggaaaggaaatcacctctatggagggacttacgaaagtcacttaactaatgcagattagaggcctcacagtcagggcatggcctcaagagccacatccattttaattgtaccatttctcactgaactctgaccctggtcaaggcatgtctcaggctccatggactactattccttccactgatcgaccctggcttcattctggcaagggagggactcatacattctgcggcctgcatgagtgtcatgtgagcacccccataaccttgatccctgcggtgcttctccaggggagccctagcattccagctggcctcatgggcatgccttagagagagggagctgaccctctccttcttcaactggattttatttttattttttggcatgttttgtgaatacaaagattcactgcctgggtgtgccccttgaaagaaggtttcaattgcattcaggtgaaataaccacaaaatgactgtaagccaaatgtagtagtatgatagaaaaatggaaatatcgtaaaagcaccagtctgtagacacctagcttctggttcctctggaaaagggagaagagagtagacagtgatggagaaaagaggggctgtgaagactatagaactgagaaggcagtaattctaaaatctccacactgtagggccaggaacaggcagtgctgggcaatggggcatcttatctcagggaagtcaagggtgtcatgtagaaccaacataattcatccaagtacagcaaagaatccagaaatggtctgtggaggtttggaaccatgaaaatcaaataggaaagatacaaaatatttacatatccacattttttaaaaggggtcctgactaggcagcataagattatttgggttctgttcattttacctttagttgcccttggttctgccatcttttttctctgtgagtcatttgtcttgcttttggtcaacacggctttcctcgggtctccaaagatcctggaataacctgaatataagttgaagaatattaaaccttattttgttttcaaatattaataccagggatcaactgtacatgtaccgacaaaacctatttcttaaacattattttaaaatatcctaaaaggggaaagaacttaaatccttccccttaaaaaaagaggggacaacattcctctcctctgagggaagcccagcattatgaagcaaaaatcgggagtgaaagcaaggccaagcctaactggcatgctgaagcacacagatgcttttgcacagaaaatattttgaaaatgttttcttttccttatagcccccagctttggtaataatggcttccctagatcattctgttagcactttctgctgctcagaacagggtagtgggatttagaatttagaaaacatcccgagaactgtaattaagcaattgtcatagtcccagaaaagaaacaacccttttactttgtaaatgctaggaggatctgtattttttaaaatcttagaacactaactagctaaaaagatagaaagaaaaaaatctttcttacaatatgcctgtagcacggctccaaaatccagtccctctctctcttcttttttttttttttttttttttttttagatacaggaatttcttacacaactttccaagtaaaatattcaatccccaaataatatatttagtagaatccttacaacatgagaaattgtaaatggcatctgtttccgttgaaaatatttttaaattagaaaacatcttaagcactgcatcaaatcaatatttgtaatgggcagaattatttctaaatggttccacaggccagttgacattcccactctacttaggaagcccccagccaactccacctgaagtcttcgaaacctatgcatagaggcaaattgcccagatgtcacagaaaagcatttgttgtgatacagaaaataaaacacattactgggggaaaaaaatcagggtactaaaccacgtacataatatcatcccaatattgcacaaagaaaaaaaaataagtggatgaaataaaagagggaaggcaggaaaggaaagaggatgacctgagaaaagttatcaaaatggttaacagtcatggtctttggctttccagtgtgaaataggagttcttattttcctctttttaaaatatttttaaaattatttattttttaaaccaactaataaaagtaatatatatttaccgtgtacaacattatgttttgaaatatatatatatatatatatatatatatatatatatatatatatatatatatatatatacatgttggaatggctaaagtaagctaattaacatctgcattacctcacatacttatttttttgtggtgcgaacacttgaaatctactcttagtgattttcaagaatataatgcattgttattaactacagtcaatagatcataggtctattcaagttcaagtcacagatctcttgaaattactcctcctgtctaactgaaattttgtgtcctttgaccaacatctccccagttcccctacgctcaacatcactaatcatcaaggaaatgcaaatcgaaatcatgatgagtgtcatctcacacctgttagaatggccattatcaaaaagacaagtgttggtggggatgtggaaaaagggaactcttgcccaccgttggtgggaacgtagatcagtacagtcattatggaaaacaggatggaggttcctcaaaaacacaaagatcaattacaaaacaaaatactatatgttttacaaatgtactacaactcaatttggtatgtattacaaatcaaaatactacatgattgctggcaatcccactctggagatagatccaaagaaaatggaaaatgaaatcggtatgtcaaagaggtaccagccctcccaaattcattacagcattattcacaacagacaaggtatggcatcaacctaagtgtccatcaacataaacgcccataaagaaaagtggtgcacatacacaatggaac

SEQ ID NO: 1562355 - DNA, 4001 bp, Homo sapiens
ttagataaatttgaaaacaaacaaaaaaaagaaacaacacaaccttgtaacacacatttgaaggtagtttgcttttttcgctttgaaagcgatcagtttagagagatgaatgactaatcccagaaatgagtatctgagcatttccctgcggatggtcggtgctaacatttactgtgctgcgctactactcagaattttaataaagcttaacgtggagatttatctctctgattggtggtggtgtgggcaggcagataacgcacaggcgcttccattgtatggaacaaatataatctcttactggcgaattaaaataaattactcctgtctccaaaggggactgctcatttctttactttctaaataactagcgcgtcaactactgttttaggctaccctgaaattgtgtacaggctaacataaaaggtctcctgccgtaaaaaataaaataggataacacacacgcaacccaaacacacacaagcaaacactcagttacctcttcattcaaatgctgtaggaacgagaaaataaaggcagcccagcgcaaccagatctcatttccgacaggttccccacgctctcctcgcacgaccgaggggtccccagcccgggccctggacgcggcgagcaggtgaccatggcaccccgcgccccgcaggttcccgcggtgccgcagccttcaggtgtcttgggcgccccagatcctccgggcccggcgccgctccaggaagtcaccctcaaagccggggcgccaggccacctcggacacgctctcctgtgcccccactcccgttcgcgaaatcatgttcgccgggacatccactgggcaggaccccctaccaggcctgcgtttccttttaaaaacaaaagcgagcgaaacaagccagcgcgccctggccgcgcccgccgctaggcgaccccgaagacagcggccctagcacgcaggaaccccccggccgaccccgccagccccggaggccactccataaccggaaaacgagccggcgcggaactcagacgcgcgcccctagagtcctcgcagcagccgccacccccacctgcacccccggcagcgccccgagatctgcgtgtcagtgccccccgcgacccccgcccaggccccgggtgaccctccatgggactggagccgcgcgccgggcgctctctgcgggcccagctcttaccctgccgctgcgggcagggccggcgcttggtcgggacggtggctgctcggcgcccgcggctgctcggtgcgcgccgggcgagggcgagggcgccggccagagacgatcagggaggccggacgctggccgggcggctccgggagctctgagctggagcgacaccgcactcgtcagtctctggaggaagtaaccgggccgtcccccacgcggcgcgctcttcaggagcgggaggaggagggaggagggaggaggaaggagggacggccgagtggaggggaggggaggaaacgagggaggagagaagagagaggggagggaaggggaggagagagaagaggaggggaagggaggtaggcaggatggggagaagcgggaggagagggaagggggcagcaggagggttgggggagcggagggagaggagagggaacgcacgaggggagagaagaggagggcggaggcggcgagggagcgcggggcggggctgacaccttccggcccaaccttccctccgcctcctgctgtcactcggctgggtccctcgccggctggccctgaggccccgggagcagggcctcggccccacgtgcgcgcgagtgtgcgccctgggagccgggcggagactttccgtggagcgctcggcgtcctctctggggccaaggccctaacgccaaacctgcctttggaattccgcagcgacggagcagtggtgctggtggcaccgaagggcagccgggcttgggtaataaggccctgaaattgagccgaccccattcttgaacctctgaatgggcttaggactaatgatcattctatcacaaaaaggctccaaatgaggcgcttcctgtagaaaccgggccctggctgtgtccccgagtcgtggtgctgatcgcgctgctcccgggaagccccgatcccgcaggctccgcgggagtggcgccctctggagctgagcggtgcccagatagcgacccgccttggccgcgcttcaatctgggctgggcactccacgcacatcatcgtcactctcggaggacttgcggctcccactttacacaggtgggaactgaaccttaggatgaataacctgccacgtcagattgatgagaaattcaaggtggaaacctgagtttatctgactccgaaaccctggtcaaaaccaccccctacactgtggtttccgtttttatcagaaggtgcttgagtccatggctgtttggactcaggtcacatgctcaatattttgcaggaaagtttagattcctgaagttgtggatgaaataggaaaccccagcttaggcgaggccacggggctgaaagctgctcacatctcaagaactgcggcaccaccgggaagggagaggaatggcccagcttctctgtgactcagggttctaggtttccatggtgactctaggtctagagttatccggataattgagatatcggtgcaccttaatgtttctgggtccccgaaggtctccgggtatcaccgtggcatgagtcacagtcagaatctatacggctgaaacaatcacgtataggggaagtgattatttcttggagactgaattgattctgatggcttctcagtgtatattcaggcccagattagagaacacagataggtcaagaaagagttccataaatggaatacagatccatagtaagttaccatggagacatgagtatgttactatttttttaaaaaaccgtagcagaaaatactgactcatctgggctgcagtttcagctaatatagggtctttctccctcaggctacttgcacagccctgagaagctgggtatagacagctgctccccaaagctcagctacttcccgaagctcacttgccccaagcagactgccttgtcccaccatgcctgccctcgtgttcatgggtgctgagtgccaggtgctccagggctccctgagtcgctgatgggctccctgagtggagccatatttcctctttgcagggctggcacaggctgggggctaggaggtggtgctttgctcatgctgggctgtttccaacatatatgagcagaaagatatcaaaagaggagcacaggagtttgaagaccaccggttcccgacagtggaaccttcctctgctcactaaccttgggcctcctctacagaataagggatgattatggaacctacgtccttaagactatggcaaatgacatagaaccaaatgtgcagaatatgttagagtgttgagtacatggtagagaaggactcaaaatgatctagctattaagaatctttttccaagctctcctcagggaggattttatagaaaacattttgaaaaaactatcatatacacgaaaaaaaaaaaaaaagtcctgcccctcgcgggtttaaatgtgtgaaagccttgggaaagggatcccggccggaagaccaaatggcagagctaagacggcagggaggctgtgggaagaggaagctgggcctgtgtgctggggtcatcgtaagcctaagctcctgcctcccacccaggtccctggtcctccctatttccccttccaaagagtctgaggctgccccaagcagcccccttgccctgggtcctgccctgtagctgatccacctctgcacgagggcagtcacatgttcataataaaatggcttatcctagttctggggcaatatcagggttccttacatttttgtccttaatactagttggcttgccagttactcagcagaattaaaaagcagtctggctgaagccagtgattattcattgactgttatcgtgcgattcacagggaacaatgagctttacagtaaattaa

SEQ ID NO: 1562356 - DNA, 4001 bp, Homo sapiens
ttttcttccttaggcttgcagactgcttgctgacttgattctgtttttcagcttctctgagatggacagagaatgaatgtggaaggcagtggaaaagctctccccagcttttgtgtacaaataccaggagaaaaggcagcctaccactcccacataaagagctgtaattactagctacagaatagaattcttttgttgtccagcttttaatgagttttgtaaaaaccatgcagaattaaagtgctctactaaatggtttcaggcagacacacaactaatcaaatttaagcttgcttattttactcaacagggcttgttagatggcagacaagccaagtttttccacataaatcaatttcaagtttggtgttgctgatggatcgctgcttttaaaccaaaaaaaaaaaaaaaaaaggataaagagcagaaatgtaacagctgagaatggttacatttaaaaacaaggagaatttgcctgacaacagtacccttattggaacaagtaatcacttatgtaagattatttagataaatttgaaaacaaacaaaaaaaagaaacaacacaaccttgtaacacacatttgaaggtagtttgcttttttcgctttgaaagcgatcagtttagagagatgaatgactaatcccagaaatgagtatctgagcatttccctgcggatggtcggtgctaacatttactgtgctgcgctactactcagaattttaataaagcttaacgtggagatttatctctctgattggtggtggtgtgggcaggcagataacgcacaggcgcttccattgtatggaacaaatataatctcttactggcgaattaaaataaattactcctgtctccaaaggggactgctcatttctttactttctaaataactagcgcgtcaactactgttttaggctaccctgaaattgtgtacaggctaacataaaaggtctcctgccgtaaaaaataaaataggataacacacacgcaacccaaacacacacaagcaaacactcagttacctcttcattcaaatgctgtaggaacgagaaaataaaggcagcccagcgcaaccagatctcatttccgacaggttccccacgctctcctcgcacgaccgaggggtccccagcccgggccctggacgcggcgagcaggtgaccatggcaccccgcgccccgcaggttcccgcggtgccgcagccttcaggtgtcttgggcgccccagatcctccgggcccggcgccgctccaggaagtcaccctcaaagccggggcgccaggccacctcggacacgctctcctgtgcccccactcccgttcgcgaaatcatgttcgccgggacatccactgggcaggaccccctaccaggcctgcgtttccttttaaaaacaaaagcgagcgaaacaagccagcgcgccctggccgcgcccgccgctaggcgaccccgaagacagcggccctagcacgcaggaaccccccggccgaccccgccagccccggaggccactccataaccggaaaacgagccggcgcggaactcagacgcgcgcccctagagtcctcgcagcagccgccacccccacctgcacccccggcagcgccccgagatctgcgtgtcagtgccccccgcgacccccgcccaggccccgggtgaccctccatgggactggagccgcgcgccgggcgctctctgcgggcccagctcttaccctgccgctgcgggcagggccggcgcttggtcgggacggtggctgctcggcgcccgcggctgctcggtgcgcgccgggcgagggcgagggcgccggccagagacgatcagggaggccggacgctggccgggcggctccgggagctctgagctggagcgacaccgcactcgtcagtctctggaggaagtaaccgggccgtcccccacgcggcgcgctcttcaggagcgggaggaggagggaggagggaggaggaaggagggacggccgagtggaggggaggggaggaaacgagggaggagagaagagagaggggagggaaggggaggagagagaagaggaggggaagggaggtaggcaggatggggagaagcgggaggagagggaagggggcagcaggagggttgggggagcggagggagaggagagggaacgcacgaggggagagaagaggagggcggaggcggcgagggagcgcggggcggggctgacaccttccggcccaaccttccctccgcctcctgctgtcactcggctgggtccctcgccggctggccctgaggccccgggagcagggcctcggccccacgtgcgcgcgagtgtgcgccctgggagccgggcggagactttccgtggagcgctcggcgtcctctctggggccaaggccctaacgccaaacctgcctttggaattccgcagcgacggagcagtggtgctggtggcaccgaagggcagccgggcttgggtaataaggccctgaaattgagccgaccccattcttgaacctctgaatgggcttaggactaatgatcattctatcacaaaaaggctccaaatgaggcgcttcctgtagaaaccgggccctggctgtgtccccgagtcgtggtgctgatcgcgctgctcccgggaagccccgatcccgcaggctccgcgggagtggcgccctctggagctgagcggtgcccagatagcgacccgccttggccgcgcttcaatctgggctgggcactccacgcacatcatcgtcactctcggaggacttgcggctcccactttacacaggtgggaactgaaccttaggatgaataacctgccacgtcagattgatgagaaattcaaggtggaaacctgagtttatctgactccgaaaccctggtcaaaaccaccccctacactgtggtttccgtttttatcagaaggtgcttgagtccatggctgtttggactcaggtcacatgctcaatattttgcaggaaagtttagattcctgaagttgtggatgaaataggaaaccccagcttaggcgaggccacggggctgaaagctgctcacatctcaagaactgcggcaccaccgggaagggagaggaatggcccagcttctctgtgactcagggttctaggtttccatggtgactctaggtctagagttatccggataattgagatatcggtgcaccttaatgtttctgggtccccgaaggtctccgggtatcaccgtggcatgagtcacagtcagaatctatacggctgaaacaatcacgtataggggaagtgattatttcttggagactgaattgattctgatggcttctcagtgtatattcaggcccagattagagaacacagataggtcaagaaagagttccataaatggaatacagatccatagtaagttaccatggagacatgagtatgttactatttttttaaaaaaccgtagcagaaaatactgactcatctgggctgcagtttcagctaatatagggtctttctccctcaggctacttgcacagccctgagaagctgggtatagacagctgctccccaaagctcagctacttcccgaagctcacttgccccaagcagactgccttgtcccaccatgcctgccctcgtgttcatgggtgctgagtgccaggtgctccagggctccctgagtcgctgatgggctccctgagtggagccatatttcctctttgcagggctggcacaggctgggggctaggaggtggtgctttgctcatgctgggctgtttccaacatatatgagcagaaagatatcaaaagaggagcacaggagtttgaagaccaccggttcccgacagtggaaccttcctctgctcactaaccttgggcctcctctacagaataagggatgattatggaacctacgtccttaagactatggcaaatgacatagaaccaaatgtgcagaatatgttagagtgttgagtacatggtagagaaggactcaaaatgatctagctattaagaatctttttccaagctctc

SEQ ID NO: 1562357 - DNA, 4001 bp, Homo sapiens
tgtcagttttcaattatttccttagaattcagagctagatggtggctgaactcagaactgctttccatagctcaaatcagctaatacagagcttttctagcagccaagaaagttctagtagtacaaaaaaaaaagttaatagcccttgaaaagtctgatgcatttccccacaactcttaccacagagttctgatcctgggatgcttgattttaagggccgtgggtggcttgccaaataggccttatcttggcttcctttgctaggtaggaatactgccttgatattacatattcaaagcaaagaacctctgacctaagggctctccactaacaatgacattctctgtaagtaaactagaaccccatctcaacttctggtttgcccttgttctttgctatgtactagcctactgcacaaacaggactgaggaggactccctttaccaccattatgttgcaaaagactctgcactgaggacccgatagggaccgactgtgcaaagcctgaacttggcagaagatccctggagaaggaggagtatggggctcagagctgctccctaagctgggctggggaaggctgaaggcctccagccttgccagagggagatccaggtgtgcttcagcggcaaggacatgtgttaccttaagcaactgcagcgctaacttaagcatgtgctcctatggctatcgtcaacctagaaatccctttcactttggggcgtcacacctgtaagctcagaactatctgagatccgctgcgagagcctggatcacgattcccaaaaagaaaagcctcctagtttattcgagagtaggaagtcattattttctgtgaaggaaactggaattggagagggaggaccctggtacactttggcagagaggctcctctctcttatctaagtatctcctcatccctcactgcctttccaccagacctccagtccccgcgggcttccctttctacctgccaatgtggactcgaggtcaagtgtcccctgggctagtctccttacatgggcaaacgggctacgcgggtgacaaacgcggcgcaacgcctccgaccacaacacgtgtattttacagcgctgggcgcggcacagggctcagtttaaggagcctccatagaacgagcgtggctcaggaccaggtccctaatgctaggaaattgacgaggtcaacagcagggcgagaaactctgaatacattacacacccttccttcttgggagtggcagtcccccgtcgccacttcactcgcagccatctatatgccaagggctcacaccagacaagtgtctgtgagcacgcctcaactttaatcctaccccgccgtgtccactggtgcggctgcccccagtcgagggttcacctgggcgctccgcggtgccgggggcacacagccagggagggcgctcttaccagagaagtcggtgagcgctgagatctctttggagcagaccaggacagtgcagtagaagaggcgcaggagctgccccggcggctctacctgccggcggaggccgggatgctgcacgggctggggcgtcggcggttggcgtgcgcgtcccggcagaagcatcgtgcgctgcgcggcggggcggaggcgcaggcccgggacgcgctgggggtcgcagggctaaggacggcgtcacatggcggggagaatcgatggccagcggctccgcggccccccgccgcctccctgcccaggctgccagagcctcctcccctgcgcgggccagcccaggcgccccagcaaaggggagggggcggagaactggggcggggcgaggatccccgaaaaggatccgcgtagtttccccgagaggaaatctccgttgccgccgtgccggaggaagcgaggggggccgtagggaaagcgcagccttcgcgcgccccgcggctgcccaggccgatccctggcgcgctgcccaccgcggagggcgcccccagtagcgcgccccgggccgcgcaccttgagcgccttccacacccgggaaacagccgggcacccgtggccctgcccgcgctggccgggtgccagcctcgccctggcggcagaaggagcgcggccggtgcccgtgacgcactttggagccagcgccgcgcgtgcagctggggcgcccccggggcggggccgatcgggggccgcaggaaggtggggtcctggaggcgtgggatcgcaccgctgccatccccgccacccgccgcgcgccacgtgcagtcacccggcacatacagttatcgccattccacagaagaggagactgagccccggcgccgtgcccaagctctcgcagccaggacggcgacgagctggaggtctcaaaaccggtcagatggctccggagccgggatctttagctccagctcggcttcctttgggtgctggttgtccgcagcgctgggggatctgacactgcaccggcgcaaacagccgccgagcgctaataattgggctttgttttaaagtgggccacagcatctttctgaacctctagactgtgcgcggggtgacccacgttcggacgcccagccagtggcctaggagtggcctgcgtagccccaactcaagggtatcgaggacaagtgcgcgaggggctccgtggctgcttgccgggtgcgggtacctggcgcccagcgacccaaaccctatggatcgcgcggggccggcggaagggaggagggcgggcgctaggcacacagtgttcccgaacccggcgggagggcctgccaagttcgcggcgggcgtgacgcggaaacgtagataatgaggcccagggcggggccggacgcactgccccgcgggctccagagctgcgaacgccccagagtgtgcagggaggcctgcagaaagaaaatgcggctgagggtccccgtgggacccactcagaggtgggccgtaaagatcccggaagggtggatggcattagataccacctagtactccagcaagggctgggtcaccgaattgggatctcggcctcttcttccagtctggggaaaagtgtgttaaatgctaaacatcagtgtttatcgagtgaggcccagcctgtctggcataatgatttttaaaatctacattcaaatattaaataaaaactcaacctccccaataacatttgaacataaatattagtgtgcgctctctaggttagggaaactgaagctgggagtgtgggtaaggatgcccagcacttaggagccacagggtaagtaatgtttgtccaaaactcgggtccctcctgtactttccattctgtctgttcattcatccagtttagatatgaattggtaccaacgtgtgccaggttctgcgctagtgactgacagtgttggcacagggaggcagccatgctcccgagtcctgggagtgggcagcactgccctgtgggtctgcactggcttccaaatgtctaagtgggcactgttactcactgtgacagcatccccaggctttcttacctggtaaagcagaaactcaaacatacttacacaccaatattcattgcagcattatttatgatggccaaaagatggaagcaactccagtggatgaatgcatacagttactattacagcagggaagacagacattggaaaataatgccccgtgaacggacagtcacgaaagacaggaaccatgggagcagaagcgaggaatgaaggagctgagcccgagggaggaagggagatattcaggagcattttaaggcaagatggatgagaaagctagaggatgaattggccaagcaaaaactagcaaaacccgggtgttgcgggaggatgaacattttagaaaaagggaccagcatgttgaaatccaaaaggagcatggctgtcttgaaggatggggaaaagtctagacagctggagcagagcaaagggaagagccaggggacttggaggtaggcaggccagagctcagggccctggagactttggtgagaatttccgtcttttatcttaagccagcaaagaactgtaagtacaaaa

SEQ ID NO: 1562358 - DNA, 4001 bp, Homo sapiens
tctcctgctagtagagagagatgtcacctgagaagctgaagctgctcctgccccatctctggtgtcctgacacggagctcttgcccaggagcggtaggctgcaaaaaggaagaactccatagctctgccagaagggactcgccttgtctgcagctcgtgtgagggctctcacgcctaagggtgttgctgaccaggaaggagctctgggtggtgacagatgcagagggcagggtgcccaaggctcctgggtagacagtaagcccctctgacccaggaacaactcccaggaggtcgcatccctggcagtctggaggctgtgcgcatgttcaaggacgcaccctaccaggagtgagcagagggactctgtaagctactagtccttggctgtgcctctgagggcagaaatgaaggtcaaaaatgtgaacacgctgaatctgacagccacctccaagccagaggtatccagtggtaaaaggcaaaaaccccctggccaaggaggctttaagaacaattgctgaccagtgaggagcttaagcagatccaactagccaggctaaaagagaaaaacaggaagaaaaaaaaaaaaccaagggggcacatcagaggctgcacacagccagaaggggacaaggagagaggtcacatagttcagttccagatcaataaacaaagtaatcaagcagatactaatccctggttgctacaggactatccaaaatgcccaattttccacaaaaagtgatacattcaaagaaggcccacctgctcctacctgccagcatgagccaggcaacagaaactgctttgagcagcccacatgtaaagaattcagagtaggcattataaatatttctaaggactaaaagagaccgtgtctaaagaactaaacgaaggtataatgacattctcacatcaaacagaaaacatcagtaaagagtattttttaaaatgaggaggaacaggagaagagaaagaaagtaaataaattctggagtcaaaaaaaatgaaaatttcactggaaaggttcaaaagcacctctgggctggcagaacatcagtaaacttgaattaagatagattatgccatctgaagaaaagagaaaaactgagtgaacagcgcctcagagcactgtgggacaccattaagcacgacgtacatatttataatggaagtatccgaaagagaggagtgacagaaaggggcagaaaaaaatattcaaggaaataatggctgaagacttgccaatgtaacgaaaaacattaacctacacacgcaagaagctcagtgaacacgcaaaataaatgcagatacctacaccaagacacatcggtcaaaatatttaaggcaaaagccaaaaaaaaaaaaaaatcctgaaagcaataattccactcacatgcagtgtctagaataaagacaaaaggtagattcgtgcttgcttagggctgagggggatggagaaacaggccagccgactgctaaagggaacggggtctctcttcagtttgctctccgttcttctctaactctgggaacgtcctttcctttccggggagctcagtgcgattcaggaacctctggggtccgcgtggcaaccctggaccgcagcgggaggttcctggctctctcccctccccgggagcggcgcgagtccgtgtgcccaggacggcagcgcagagcggagcctcggagtttacgacgcttcgcgaagcaagaaggtcgcgtctgtagcgcagcaaatgcccgcagagcccgagggaaggccggggtcgcggaaccctcccggaggcggcgccccgcagctcacccgccctcggacccacgcggcagcccccggccagcgcctccccagctcaccttccccgcggccgaggccggcggaggggtcgcctccggggcagggggcgcggggccgggggcggcctcccctttcggcctcacggcagcctggtgcactcgggcgcgcaaccccctcactttccccatcttcccggcggagcacggcaaacgtgcggagcgcctcccggaagctggtcctgcgttctcgccgcccggcggaaacaggagccgcggctgccgggagccccgcggccgccggaagtacccggaagcggctcgggcgggcgcagggtcgcgggtgtagggtggcggcgctccgcctttcaccgacgcacctgggagaaacagaccggaggacgcgggtggcgcggagcacgagaaacaacgagtttctgtctagatcgtgggggacccaagcccggggttgcgtccaaggtcggggatggagaggacgcgacccccgcggcagtcgagatggcctttttaaaattctatatttgagaaggagtctcgcgctgtcgcccaggctggagcgcaatggcgcgaaatcggctcattgcagcctcgacgtccaggactcgagcgatcctcccgcctcagcctctcgagaaggtgggaccaccggtgggcaccgccacgcccggctaatttttattaatgttttgctagagccgggatcttgctgtgttgtctggctggtcttaaactcctgggctccagcgatcctccctcctcggcctcccaaagcgctgggattacaggcatgagccacactgcgcctggccaagctagtgcattttaattgaccttcacttcatgtcaatttattttttacactattccatttagtcctcagaacagttctttagaattgggtattgctccgtttacgtgggaaacatagcagcgaggtaacgggctgggtcccgtgctgggaacgggagccctgctcatctgactgcttgcaccctgtgctgtctatgctgggcgtactggggggcgttagggaagagaccacaggtacgatgcaatgcctgtcctcaaggagcccattgttctcatgggaacacaaagctgacacatcgagaacaaactatggaacaggctgtggctgagggccatgaaggaaggctgccaagtccgggcccagccaggtagcagccacacctctatctaccctgctccccaacactgggcaccagcactcacctgcccaggacccacagtgaaaacccacccacaaaaaatgcactttggagaagagtagcaggtcccaggcagagccagggccacctctcagaaaggacatcaagtttctcgcccagctgagagatggacagatgaccgcacaagccactcacagcccaaggtgatggactctaggatatattcaaggctgagcaactggcttgaagtcgtgtctacttacatattcaaagacctagtgagcattcacaagtcattctttttaccctccaactagccgtgttctcaaccagtctacctaggaatgctgttggctgtgaaaactccagaggctggtatctttagagttccttcagggtgcattcagcatctgagcctagcgactcttgaggtgaaagtgctcacgttttttttttggtgagagagtctcactctgtcgcccaggctggagtgcagtggcgcagtctcaaagtgctcatctttatgtactttggatgccggtgaatgcctattgtttcagccagctggatcactttacctgttaaccattccaatgtgagtttacttcatggaattgtgcctgtttttaaagaacatattctggctgggcgtggtggcccacgcctgtaatcccagcactttgggaggctgaggcaggcggatcacctgaggtcaggagtctgagaccagcctgaccaacgtggagaaaccccatctccactaaaaatacaaaattagccaggcgtggtggcgcatgcctgtaatcccagctactcaggaggctgaggcaggagaatcgcttgaaccggggaggcagaggttgcaatgacccaagatcacaccgttgcactctggcctaggcaacaagagcaaaactccgtctcaaaaaaaaaaaatttatattctttaaagatcagcctcctcttccactgccagcccagtgtttgagactgctatgg

SEQ ID NO: 1562359 - DNA, 4001 bp, Homo sapiens
aacctgaacgaggacagggaagctgttttcactgctgtcttaccaatatgtattcagatcacctcaccatgaaggccacacccacaccttttgtacttgagaggccaggagagatgagggtggatggtcagtattttgggactcactgcctttgggatcccaggctctgctggcctcagtgtccactgtcatcactgtcctgtgcactgagcctttttggcagaagggctaggaagggccactctgaaacaccacagcaggagtgcagcgtaaccggccttgacggtccacaggccaacgcccacttcaaggtattacgatacccactaccaggccctgcaggcgaaggcatggcggcagctcaacttgctcctcccattcagtctgaatgtccctcctgggaacgtctgcctgaaacaaacccagcactggacagaagcgtccagggcaaggcccactccaataatgtctcctgatctttagctcataaaatcaaaagtgaggcatctctgagttccctgggcagcttctccacaatcaaatacacctggataaatacaaacctggtgtcatctcgaagcttcctacgaaaggaccccacagctcatgagtgaatcatgaggtccggatgtgaaaaagtcctggctgagggaaagcaatgtaatcatattcagtattgtccataagtcaccaggaaataataattatacaatacagaaataatagaaaacacttttccagaatagctataatgaaagtcggtgccctaagggaggagatacatatctctcctacaatccacacaagttatcgaaaacagtgtcatttatagtttttaaggaaaatatgaatattttacacgaggcaaaaatcttaaaatgcggctttcctacatttgggaatggtgcagaaaagagagcatttagaacttgctggagtgtgatcacagccagaatgctggtgctggcaggaatggcgatggttcagtccaacaccctcactacagaggacctgggatccaggaccaggaagtgatctaccgaagaggcccagagaacttcccacttctgaacctgccattttacacagccaggctacgtcgctccaggaggaatccatgttcttcagattataggaggagacccgcaaaaccaattagaaagggcatgtgtgacagaggccagggcagtggacaccaggacccgagatggtctgtgacaggaaagtgacagaggacagaggcgcagctaagacagactgcaagaaacgcgatgactggtcaaaataatgggtttctcctttcctttttcctatttttccaaatcgtccacagtgtcaagtcgtttgaaaaatggaaaaaataaaaacagccttaccaactggcagcggccagcccctccctggcgtgcaaggtcaggggcaggggcaggcgcgtacccttccccggaaggagaagcgtggagagcccgggtggggggtgggggtgcggggctgtgcctgcgctccccaccaatctactttccaagtaaaatgttacagtgttacattccaggttcctccctaatcccatgcaccccggctggggcggcgggaacaggcctggcgagcgcggggaaacagggtcggggaaccctgctggaaacccccgctgttcgccccctctggaatcgcttcccgcattcctgatcccaggtctaagaccagcctcggcgccaagaaccagccctcccgcttttgctaagcgtggcgggtcccaggcagggttggggagcgacgcttcccctggggtcctccttccccgcccctaccctcgccccgaggcgggggcgcactcaccaccagccaatgggcgcatcttccaggtgccgctcccctcctggccctggcggcagctcccaggcgaccgcagccagcggagcccctgggtcaggaaggcaaggggcgggcagcggtcgtgtcgggcaggggcgggccagctgggtgcgcggccagtcgggcaaatggcaggtgcggacccggcaggtgcgcggggcgggcgtgggcggggcaggtgcgcggggctgtgccccgggctgtgcccgggagctctgaggtcgctggcggagggtggacccgttccccgccgggctgaccccgggccagggctgatctgaccggagaagcccagcaaggttggctctgaagggaggaaacgacgccacttgatactttggctccctaggctcccagttaatgtctcccaagaggaaagggaagcatgacccaagcctttcaaatgacaaagcagaggcccagcccagtccaagttcgccgtccatgtccactgtctgaggccatcggtcttctttgcttcctccagaacagtcgctacaggctcgctgttgccagcccagcccagcctagcaggcgccccacctcttgttttctcttttactgccaggatgatgaattcattctgggaaagtgaagcgagggccatgcccagcccctctggccacggcatgggtctgcaggtcctcctttatatgatatgatgaccaaggagcttcaggagtgggggtcaggcagatgtgtgaagacatcaggatccccaaacaggaatagctcctctctccccatccacgggtacaccttcattccaaacacacatcaggtttttatagcacttttgacccatgatagtcacagtggcctcaggtaacaagggcaagttaaaactccgagcccagttggtcacttttgcagaagagagctccagggaagcagggtctgcgaaagacccagtccccgccccagggtccggctggttcttggtagttctactctgctccggcctctgctctctcaagaagcccaaggtgccctgccttcccagggacattatccaccctgtgggtcaccctggtgggcttggccctgagtctccctccaccattgtctttgctcctgggaagttctagggacacatgtcctgtggacaatgtggctttattcctccagttcacccccacctgcagtctccccaaaccagagggaccagaagacaggggtctccacagtaaggaatccttcctaatgactcaagaatcatgccagcgttgggcctgagcacggcccgtttgagtctggatgccactcggacctgctgtgcaagaatactaagaagccactctccagctagttggaacgactcccttaaaccaatgaactgaccgccaatcttaccttcatctttagctcacctgacttcagaggtaaggcttttatctctgggtttgttttcaatttttaaaaaatgtggctaaaaaatgcacaacctaaaattaccaccttagccatcttgaagtgtaaagtccaatagagttaaataaattcacattactgatctccagaactttttcatcttgcaaaactaaaattctgtactcattgcacaactcaccatttacccttgcccccagcccctggaaaccaccattctgctttttctatgaagttgagcactctagatacttcatataagcgcaatcatacactatttgtctttttgtgactggtttatttcacttagtatcatgtcctccaagttcatccatgctgtagcatgtgtcaaaatttcttttctttttaaggctgaataaaattccattggacatatgtaccacattttgtttattcattcatccatccgcggacacttgggtttcttctgcctcttaattactgtgaataatactgctatgaacatgggtgtgcaaatatctcttctggatcctgctttcaattcttttggatacatactgagaagtggaattgctggatcatacgataattctattcttaattttttgaggaatcaccatactgttttccatagctgcacaattttataatcccactcagtgcacagggcatccagtttctctacatcctcaccaacgcatgttgttatctctctctttttttttttttaatagtagccttcctaatgggtatgaagt

SEQ ID NO: 1562360 - DNA, 4001 bp, Homo sapiens
gacgccagcctcccccgcctttgccgccaccgcccagggctggccacttagagataagcttctcatccatccacccctcaggatcactgtggatccctggcctctcatgagcggcccacagcccagcccctggccagcgcccgtgtgtccacacacctttggccctgcctgcccaccgaggtgtttggcttgtgggctgttgacaggtcagcttccaggcagcccttcccccaccagtgcctgctccaagactggctctcagcccccttgacgagtgggcaggtggacggggcccacaaaccttccccggcgtggccccctccccccacccagccgtgaaggtggcccggtgctgtgggagcgtggcgacctgggggtcccccagagcacagccctgcaggcaggatgggggccatgacccccacactccagggtcctcctaggagagccagagccagccccactggaccccacgttccaagcctgggccccgggcctaccccctctcccaggacaccaggacagggctcggccctgacattctgagacacggcagccacaggagagcccagagacctcaccttggtgcctgctcatgtcgataagtcgggaagctacccgggcagcgttgagggccccctccaccacgcactccggcggccccacgaaggtgtacacggtgcggttggtggaagggcctgcgtccacatccagcagcacgcagcccggggtctgtgtgatggctccagagatggcgtcgatcacctgggacacaggcccggcccccacacctcagtctccccgtttgaaagaaggaaaaggagcttggaggtggctgcaccccgagacacaaatgggggctgaggaggcgggccaagcctttgggggctctccgacaagctgagctcccaccgaaagtgcccgcacacagcggccgcccgggaaccctcacagcagccacagtcactccagcccaagcacagtccccacaaggggctgcaggtggtgcctccaggagagactcacgggctctgctccgacagacagatgccagagacgtggccggggatccaagaaggtgaccacaggcgcaggtcacagaggggccgggacccccacccccgagcaggggagggacagatcaccagcatgggggaggggcctgaagggcctagaaccttccgggtggcaggactgctgggagcaggggctcagccccaaatcttgccctgtcccagggccttggtgctggctggaatcccggcatgacgaggcctccctgcacccctgcgggtgacccctgtggcctggtgctgcgctctgggaggccttccaggtggcccttagggcctgcgtttgttcccggaggagcctggacctcagggctgtggaaggcgagaggccggacctgggggcctgctgccccctctgtgcctacttcgttttgggtccagtgaggatggtggctgcagggtgggggctcagcaagctaactccagtggagatggagaggcggcagtggggaccatgctgggccacctcgtgtggcctcacacagccctttcagtcagtggcaggagccccattttcaggggggagcaccaaggccctttgaggcccagagatctgcccaaccccccaccgaaagcacccgaaaggcccctgaagccacagccaagcctcagcccccacaagcaccagtcgtgttccacccacccctgggtcaggcactccccagggccctgagccacgggatgtccttggggcccacgggcagcggctctgcccatcctgggaagacgacccgggacaccaagcccaccacctcctccatggcctgggccttagccactcaagctgccccatcagccctagatgcttgaccagctcctcgggcctcacctcctggttcttcccctccgaaaagttggggacgcattccaccagctgggacatggccagcaccttgatccagatgctcctctctgggcagatggaaggacagggccagtgctccgcagccgccgccagggcctttatacgctcaccggcagcacctccccaccggcttctcattaaccagcaaggcacaaggagcagtggggccaaggtccctgtgcagccgcggagtggggtgctgcagagccaccccgggtgctgttgacccagaggggatggctccactcagccagagtgtgggttcccggaaaagaagcacatgccagggtgaaggggcatgtgccgaggacccccaggagcatcaggccagcctggctggaatcctgtcgtgacgaggcctccctgtgccactgcgggtgaccctcgtgaccctgtgctgccttctgggaggccttccaggcagcccgtggggcctgcgtttgttcctggaggagcctggacccctggggctgtggagggcgagaggccagcatgaggccctggctcgcagcacccaactgaggtcagctcagctcagacaggagagtgcaggggagcacgcgtgtgagagtgagtgaggatacacgtgagggcagggcaggggaacacgtgagagtgcagatacacgtgagcacaaggcaggggagcacatgtgtgagagcgtggatacatgtgagcacaggacaggggaacacgtgtgagagtgagcgaggatacatgtgagtgtggggtaggggagcacacgtgtgagagtgcaggtacacgtgagcatggggcaggggaagcaagcatgtgagagtgagtgcagatacatgtgagcgcagggcaggggaacacgcgtgtgagagtgcagatacacacgagacgggcatgtgcgatatgggggaaggcagctgagaccccagctctccccagctgctgctcccctgactacaggctccccacgaagtcagcggcaccagggccgtgctcagaagggagaactcctgtctccacgttcagccgctgcccacttgcagtgcttttatcattttctcttttttttttttttgagacaaagtctcactctgtcagccaggctggagtgcagcggcacaatcatggcttcctgcagccttggtccccaggctcaagaggtcctttcaccttagcctcctgagcatctgggccacaggcacacaccactacactggctaacttttccatttttggtagacatggtgatatggtttggctgtgtccccacctaaatctcatcttgaattgtagagcccatagttcccacgtcatgggagggacccggtgggaggtcactgaatcacgggggcggctttttccggtgctgtttttgtgatagtgaatggtctcacgagatccgatggttttataaagggcagttcccctgcacacaccctcttgtaagacgtgactttgctcctctttcaccttccaccatgattgtggaactgttgagtccattaaactgctttttctttaaaaattacccagtcttgcgtatgtctttatcagacaaatacacatgaggtctcaccacgttgcccaggctggtctcaaactcctgggctcaagcgatcctcctgcctcggcctcccaaagtgctggaattacaagtgtgagccactgagcccagccccacttgaagttcttttttttttttttttttttttttgagacagggtctcgctctgtcgcccaggctggagtgcagtggtgcgatcttggctcactgcaagctctgcctcccgggttcacgccattctcctgcctcagcctccagagtagctgggactacaggcacccgctaccacacccagctaattttttgtatttttagtagagatggggtttcaccatgttggccaggatggtctcgatctcttgacctcatgatccacccacctcggtctcccaaagtgctgggattacaggcgtgagccacccacttgaagttcttaatggaaccccaaccatgtgggccttagggaccccacctccgtggctactcagggggactgggatgagacaggagccaggtaagccca

SEQ ID NO: 1562361 - DNA, 4001 bp, Homo sapiens
ggtacctgcgagattaactgcacattttcctaagttatcaaatgcttttctgtgtctgaggaaattaaaagacatttttattttcaaaaataaaggtagcagttaagaaaaagcaaagcatacatatctatgtaatataaaaagagaaagcacatacagtgaaagattaacagttgggaccctcaggtgaagggtatctgcgtgttcactgcatgattttttccccaattcttctgtaggtttggagttttatatataaagagttgagggaaggctaaagtcaacagttttaatttagtactcggtctgatgatttgcttcaacctaacatctagctcatgatttaattacttcattactatacatgcctcatgacagatgctcttgtatacacaattcaggtaaaattgacttgaagtccactcagcgtcactgtatgtctaaaaataaagaagcttggaaagcctggatggaaccctgagagacaggctagtccctcaagcagttgctaaagagttgagcggtttcttctgaagttcaagataacactaccgaagaatgttatcaccgcctcgttctacaattcgctcaagtgaatcctgctaaatctttgctcttctcacgagtcagacctactgctattagtggaaactacttatgaaatgaattttatttctaaatttctaatcatcttgcaatgcaatattaggcattgtcctctcggtccgctaacctgatcaaactggggtccctaaatccaaacacgcacatacagcgtgtcttctagtacacaaaaaaatttccaagtagacaacccattgttatctccttggtttacttccttgcttaaaaacaaaaaaacaaacccagatggctaccatatacgctgataaatgattctggtgtgtgttgttctataaagagagcggatttgaaatgagtgaatcgctgagtcccgcgatgagacagggtctgcattttgctcttaaaatctcgggggcgtcaggaccacatcccagctgagcaggctgagactgctgaggagtgcggacgggcgaggaggggacgcggaaaggagggagcggcgacaggcgacccgtccggcacgggtcccggcggtgcccggtccccccgggctccaggccgctcgccccccgcccctccccttcgctccccgcacagctctcccgcccctccccacccggctccctcaagtctccacgaacggaaatgggagtcacagcgccggggaccagcggaaacaaaacacagaggcggccgcgggggggcccttgtgggggaaaaggccccggaacgaggccggcccgcgagggcccgcgctcccctcctccccggcggccgcactcacccactccggaatcggccctgtcgcccccgcccgcactccagagccggctgagaacggcagcggcgagggctccacgtgcagcgtctctccgggtaagacctgcagctcccgcgactagaagtgtgaggtcccagggcccttcccgcggaatcggcgctgagaagccccaacccccctcccgcctcccaggcaccttcgggtccaggactacaactcccggcagggtgcgcaaaacgaccgcccaaggcaacggaggctcacgaggtacaaggaagcacaacgccccaatccgctttgttttacacagtctcactttccctgcacctttatacacttcgataaccctaacgaacaggacgctgactcggaggggagcttgaactaggggaaaggccactcaaagagcgcatgcgtacagagcaaggtttcaaggaggggaaaaagaacgggtcaaattaggcgaagaaaagatggcggaggctgtgccaggggacccggaagcacttaccctccacttcctcctcctgtttggcttctgtctcacctagacccgtccggtcgcagactgtctccgagacgcttcctgtccggtgagcgtcgaccgactgaaacggcggcccataatgcattgcgatggcgggtaggcgtgtgggggcggagccagggccggaagtagagcggaggtggtggcggcggaggctttggcagctcgggactgagtgcaaggtgactgggagggtagctagatcagcgtggccttttgggactccagttctgggttttttcacgaggcctgggctgcctctcacctttactaggaggagagagcagctctgtgtcctggggaccttcacggcctggcccggggtcacagctgacctctacgtttgtagaccttggagtttgccgtagacccagaaataagatcgataccctctctgagggcaaatcggggcggcgcggggggcagggaggcccgggggtctcgggcccgcagcctggctggggcaacccaaggtcaggcgcgcgggagagattttcggccaggcctacccgccccgggcgcacgggagcgtctaggctacttaggcagaacgtgtaccattaagagggaaaaaattagtcataatattgaaagtttgcatcccacctaaaaacgatggtgctaacacttcattaggcgactttatggattgttcataggaatatgcactgaagaggcagcgaacctactaacctttggccggtcagtcatcactataaatagaaccatgctcccacccagaacaaggcctctgctcagactagtgttttcttactgttgccttccccagtctttctgatcatgtcagacgctatcatatgctctcgtggcacccgatggtactggaatagagaatttatgtcaggtggtatttcacagctatttgtgtaatgactatcttctgcgttttagtggacaatatgcattcactaatcagtgaaaaaaaatgaaagggattaaaggagaaggaacaagttttgatatgggattatgtgttcgttttttggatgagttcgtaggacttataagggagatgagaactgttgaatgctgtggatagatttggggctcaggatgaatactaaaattagaaatgcgattggggaatcataggcacttacatggtggataattgaaacaatgaaagtggattttacccgtgttgcagaaggagtaacatctatgcagtcagacttagagcaaattaactgtgagaatacgtgcagcttaatctttcttagatacagttttatcatctgtaaagcagggataagaacactttaactctttgagagtattgctgtaagggtacaaggaaaggatatatatggaagtactttgcacagtatctagggctaagcaaatgtcgggtgaacctattgctgaatgttaagcatgtccttagtttgccagaagggaaagtggcattgaattgcacaatttttttttttgcatatatgtgttaagttagattttgctgtgtaactttgaccagatactttttttttgagacagagtctcgctctgtcgcccaggctggattgcagtggcacgatctctgctcactccaagctccactttccaggtttacgcccttctgcctcagcctccggagtagctgggactacaggtgcccgccaccacgcctggctaattttttgtatttttcagtagagaccgggtttcaccgtgttagccaggatggtctcgatctcctgacctcgtgatctgcccgcctcggcctcccaaagtgctgggattacaagcgtgagccaccgcgcccgaccactttgaccagatacttctaatcctcagtttctgtgtgtttaaacataggaatgataataagtggcacatgaccttgtgaggtcatttgttgtttgcttgtagccttttctcaagtatttttccctgatggggtataaaagtgatatgttatgaattctttaatttcttcaaacagtttgctttcattctgtcaggtgaagcatattttgttgattgcattgatagtaggatttctttttttttttttttttttttttttttgagacagagtttcactcttgttgcccagggtggaggagt

SEQ ID NO: 1562362 - DNA, 4001 bp, Homo sapiens
tccttcattggagagcattattacagagcttagaacattttgttcccaatatattataagtggagtgtgggggtacctgcgagattaactgcacattttcctaagttatcaaatgcttttctgtgtctgaggaaattaaaagacatttttattttcaaaaataaaggtagcagttaagaaaaagcaaagcatacatatctatgtaatataaaaagagaaagcacatacagtgaaagattaacagttgggaccctcaggtgaagggtatctgcgtgttcactgcatgattttttccccaattcttctgtaggtttggagttttatatataaagagttgagggaaggctaaagtcaacagttttaatttagtactcggtctgatgatttgcttcaacctaacatctagctcatgatttaattacttcattactatacatgcctcatgacagatgctcttgtatacacaattcaggtaaaattgacttgaagtccactcagcgtcactgtatgtctaaaaataaagaagcttggaaagcctggatggaaccctgagagacaggctagtccctcaagcagttgctaaagagttgagcggtttcttctgaagttcaagataacactaccgaagaatgttatcaccgcctcgttctacaattcgctcaagtgaatcctgctaaatctttgctcttctcacgagtcagacctactgctattagtggaaactacttatgaaatgaattttatttctaaatttctaatcatcttgcaatgcaatattaggcattgtcctctcggtccgctaacctgatcaaactggggtccctaaatccaaacacgcacatacagcgtgtcttctagtacacaaaaaaatttccaagtagacaacccattgttatctccttggtttacttccttgcttaaaaacaaaaaaacaaacccagatggctaccatatacgctgataaatgattctggtgtgtgttgttctataaagagagcggatttgaaatgagtgaatcgctgagtcccgcgatgagacagggtctgcattttgctcttaaaatctcgggggcgtcaggaccacatcccagctgagcaggctgagactgctgaggagtgcggacgggcgaggaggggacgcggaaaggagggagcggcgacaggcgacccgtccggcacgggtcccggcggtgcccggtccccccgggctccaggccgctcgccccccgcccctccccttcgctccccgcacagctctcccgcccctccccacccggctccctcaagtctccacgaacggaaatgggagtcacagcgccggggaccagcggaaacaaaacacagaggcggccgcgggggggcccttgtgggggaaaaggccccggaacgaggccggcccgcgagggcccgcgctcccctcctccccggcggccgcactcacccactccggaatcggccctgtcgcccccgcccgcactccagagccggctgagaacggcagcggcgagggctccacgtgcagcgtctctccgggtaagacctgcagctcccgcgactagaagtgtgaggtcccagggcccttcccgcggaatcggcgctgagaagccccaacccccctcccgcctcccaggcaccttcgggtccaggactacaactcccggcagggtgcgcaaaacgaccgcccaaggcaacggaggctcacgaggtacaaggaagcacaacgccccaatccgctttgttttacacagtctcactttccctgcacctttatacacttcgataaccctaacgaacaggacgctgactcggaggggagcttgaactaggggaaaggccactcaaagagcgcatgcgtacagagcaaggtttcaaggaggggaaaaagaacgggtcaaattaggcgaagaaaagatggcggaggctgtgccaggggacccggaagcacttaccctccacttcctcctcctgtttggcttctgtctcacctagacccgtccggtcgcagactgtctccgagacgcttcctgtccggtgagcgtcgaccgactgaaacggcggcccataatgcattgcgatggcgggtaggcgtgtgggggcggagccagggccggaagtagagcggaggtggtggcggcggaggctttggcagctcgggactgagtgcaaggtgactgggagggtagctagatcagcgtggccttttgggactccagttctgggttttttcacgaggcctgggctgcctctcacctttactaggaggagagagcagctctgtgtcctggggaccttcacggcctggcccggggtcacagctgacctctacgtttgtagaccttggagtttgccgtagacccagaaataagatcgataccctctctgagggcaaatcggggcggcgcggggggcagggaggcccgggggtctcgggcccgcagcctggctggggcaacccaaggtcaggcgcgcgggagagattttcggccaggcctacccgccccgggcgcacgggagcgtctaggctacttaggcagaacgtgtaccattaagagggaaaaaattagtcataatattgaaagtttgcatcccacctaaaaacgatggtgctaacacttcattaggcgactttatggattgttcataggaatatgcactgaagaggcagcgaacctactaacctttggccggtcagtcatcactataaatagaaccatgctcccacccagaacaaggcctctgctcagactagtgttttcttactgttgccttccccagtctttctgatcatgtcagacgctatcatatgctctcgtggcacccgatggtactggaatagagaatttatgtcaggtggtatttcacagctatttgtgtaatgactatcttctgcgttttagtggacaatatgcattcactaatcagtgaaaaaaaatgaaagggattaaaggagaaggaacaagttttgatatgggattatgtgttcgttttttggatgagttcgtaggacttataagggagatgagaactgttgaatgctgtggatagatttggggctcaggatgaatactaaaattagaaatgcgattggggaatcataggcacttacatggtggataattgaaacaatgaaagtggattttacccgtgttgcagaaggagtaacatctatgcagtcagacttagagcaaattaactgtgagaatacgtgcagcttaatctttcttagatacagttttatcatctgtaaagcagggataagaacactttaactctttgagagtattgctgtaagggtacaaggaaaggatatatatggaagtactttgcacagtatctagggctaagcaaatgtcgggtgaacctattgctgaatgttaagcatgtccttagtttgccagaagggaaagtggcattgaattgcacaatttttttttttgcatatatgtgttaagttagattttgctgtgtaactttgaccagatactttttttttgagacagagtctcgctctgtcgcccaggctggattgcagtggcacgatctctgctcactccaagctccactttccaggtttacgcccttctgcctcagcctccggagtagctgggactacaggtgcccgccaccacgcctggctaattttttgtatttttcagtagagaccgggtttcaccgtgttagccaggatggtctcgatctcctgacctcgtgatctgcccgcctcggcctcccaaagtgctgggattacaagcgtgagccaccgcgcccgaccactttgaccagatacttctaatcctcagtttctgtgtgtttaaacataggaatgataataagtggcacatgaccttgtgaggtcatttgttgtttgcttgtagccttttctcaagtatttttccctgatggggtataaaagtgatatgttatgaattctttaatttcttcaaacagtttgctttcattctgtcaggtgaagcatattttgttgattgcattgatagtagg

SEQ ID NO: 1562363 - DNA, 4001 bp, Homo sapiens
agcaaccaaagataatacgaagatgaatcaatgtgccaatgtccagaaaaatttaatggacccataaacaggcagtgggtcagagatcactgttgcctatcagtactttaagtagcaggaaaccatcaaaggtttgtaacaaataaacgtgactcgctttcaataaaactttatgtacggatactataatttgaatttcataaaattttcacatgtcacaaaaacctcatttatttcctgttctttttctcaatcattcatatttggtgagctgtacaaaagcaggcagcagaaggatttggtatgtgggccatagtttgctgactcctaattcaaatagcgcaatatgctagaatattggtagagaaggcaaaaatcaaattccaactcatttcactttagttctggcacctgagacttagaaggatggatacaacagcagtgtaacctaggagattaactgaaatgacatttataaataagtacaatctggcactcagcagtagtaaatgttaacttgttacatttacttaccacaagacaaactggtaacaggaaaaagaaaattgaaaacttattttgatgatgttgggattacatattttaagaaaaatgtaagctgacaatatacaaaactaacatttttttgagcacttaaccttgggcagggtactatttaaaatgcttgtcatgaaagaatcctatgagggagatactattactatcaccaatttgcagataagacaaggaggcccagataggtaaataacttgctggaggtcacacaggtaagagggggtggagcctaacagaagcaattttgcttcagattctctcaacaagtgaaacgatgatcattgaaaatttgagaaaggaaaaaaaaaaaccctgttaaattacagtctcggaaggaacagctactttagtgtaacgggaaaacacattttacttgccatgtgtatctgaaataaacagattttttattttatttatttatttatttgtttagacagtctctctctgtcgcccaggctggagggcagtggtgtgatctcagctcactacaacctccgcctcccgggttcaagcgattctcttgcctcacagcctcccaagtagctgggattacgggcgtgcgccgccacgccaggcgaatttttgtatttttagtagcgacggggtttcactacgttggccaggctggtctcgaactcctgacctccaatggtcaacccaccttggcctcccaagtgctgggattacatcacatccggccagaaataaacagatctttaaatctagagcaaatgttacatctttagtttgaatatagcagtagtgtgggaaaattctgtttactctagtggatcactgaaaatagccttactacccagtggtgaggacgcctgggctcctgagtctcacacagcgccttggcctgggtagagacgctgccccatactagcaggaagaccttgggggacttcactaaccttgggcctcattcctcagaatgggtaacataagcagaataagacaggcaaataaagccgtatcagaggatatggagaataaagtagaaaccaactacaaaattaaccaagtaatctgccagagacaacgggtgcataaagagaaagtacaccaatttagggttatgtcctaaaaatgtataaagacacaaaaaggccttgacatcttagaaaacaggaaaagtaaaagagcaaatagaaaccagctaacagtagcaagtgaaaagcacatggccaacccccacccaccgcatttacaaacaacaggaaaatttctacaaatcagtttctatggtttcactcagttcgcgatcttaaatccccaaaccaaagcctaagcgcgctccgtgtaaaagcggagggggtttacgcaccgacaccgggtggccacctggttcccgcttgcccgctcgccggaagtcggcccaccgggaccggcgcgggaccagcgcggcaccgcccctcactgccccgccctacgacggcttccctgccccattggtccgcgcggccctgggtctccgcggcgagaatctagtctgattccctcccgccctgggcgctgcctgactgctccccagccgagacacccaagccttagcacgtttataatgtgacagtggtacggggtgccacgcagtgtttccaggagcgccgggggggagcgccaaaatgctaaacccattcttagccaattgtgcgccgctcacgagtcagagctgagcagctaccgcggaaaaatctcgtgacacgcctgactcctgatgagactaaaatgcaccgggctttgaatgccggtcgcttaggacatccggcctattgctaaaaaaaaaaatgaggctggttatagaacgcactggggaagacacagggcaacagcgagttcctcctctcacatgccagtgggggcgggggctgaaaaattctctcccggatgcatatccctgtcgaaactgaacttggcgccacctgagagcgcctgaaagccgtgtgttaaacaccgggttgcccttcttgctcttcttcctcttcgcctttaatctcaggcacttagcaagcctgttaaggctcccaaacactgctggggactgacaacttatgcggacacggtcgcctcaagagagacggctcctgtaatggcgcctgcgtcagacactaacatggcggacatagtcgtgcgcggcgcaaacgtcagcacctctaccccagccgctcagaaacagcagaggagagcagggccgtgctcactgattggtccctcggtggagcgggccggaccgggcattccctttggagccaatcaggaaggcgagagaccgaattggcccgtgcgcctcctcccgaggcatgctgggagcctggaggactagcgaggaggagttgagagaacggagcggacgccatggcgaccaacatcgagcagatttttaggtctttcgtggtcagtaaattccgggaaattcaacaggagctttccaggtaaacgcctcccagattcttctgctcccaacggaccgttaggccctcacctagccttctttggcacctttcttcggagacgcagtcgttccccggctcaggccccgctagggccccgcctgggcctgggatccattttccgggccccccccaaccgcccccccagccgctcccttccttttccctcgaggaacttcgccttttccgaggtaacccaagactccctgtttcagaaccgagttaagatgttcacccttctcccctgtttgggtcccccctgccgtttagctactcgtaggcccggttgtccgccagggacgggcctagttccttcctcagctcctcctccgccgccgcgtatcccctccccctctcgcctccgcggattttgccggccggtgcctatgaccggaaagggtctctaacggccgtttcttggttaatcttaaatcctctttattattgcgagcttcagaccgcttgggggtctggatctattaataagattattcggggcctagtgtcctgtagtatctgtcagccgttctgatagttaaatgtttcaattaaaacgaactcaaactgatgcacttgctagtttgttaaaatactcgagataaagatggaaggggactttgaaatggttgcgattaattacagcaagtgaaagtggactttgtgtgtaggtctattattttcttgctacccctgccccagttgacacgctatttttgtcattgctggtagactttacataatttgcgcttggcttcacaaaatttgaaggcgaagagattgttaaagaaatggttgtttacttaggaaaatagtgtgtcatgttcagcggttgtctctcgatatttgcttttgtataagatactcatttctttaaagtacagaagtaggaaagagatcttgaaacgtaagtgttccgagttcaagtgtttttaattgtattttaaaagttgagagcaagagcagtacgtgaat

SEQ ID NO: 1562364 - DNA, 4001 bp, Homo sapiens
tttgcagataagacaaggaggcccagataggtaaataacttgctggaggtcacacaggtaagagggggtggagcctaacagaagcaattttgcttcagattctctcaacaagtgaaacgatgatcattgaaaatttgagaaaggaaaaaaaaaaaccctgttaaattacagtctcggaaggaacagctactttagtgtaacgggaaaacacattttacttgccatgtgtatctgaaataaacagattttttattttatttatttatttatttgtttagacagtctctctctgtcgcccaggctggagggcagtggtgtgatctcagctcactacaacctccgcctcccgggttcaagcgattctcttgcctcacagcctcccaagtagctgggattacgggcgtgcgccgccacgccaggcgaatttttgtatttttagtagcgacggggtttcactacgttggccaggctggtctcgaactcctgacctccaatggtcaacccaccttggcctcccaagtgctgggattacatcacatccggccagaaataaacagatctttaaatctagagcaaatgttacatctttagtttgaatatagcagtagtgtgggaaaattctgtttactctagtggatcactgaaaatagccttactacccagtggtgaggacgcctgggctcctgagtctcacacagcgccttggcctgggtagagacgctgccccatactagcaggaagaccttgggggacttcactaaccttgggcctcattcctcagaatgggtaacataagcagaataagacaggcaaataaagccgtatcagaggatatggagaataaagtagaaaccaactacaaaattaaccaagtaatctgccagagacaacgggtgcataaagagaaagtacaccaatttagggttatgtcctaaaaatgtataaagacacaaaaaggccttgacatcttagaaaacaggaaaagtaaaagagcaaatagaaaccagctaacagtagcaagtgaaaagcacatggccaacccccacccaccgcatttacaaacaacaggaaaatttctacaaatcagtttctatggtttcactcagttcgcgatcttaaatccccaaaccaaagcctaagcgcgctccgtgtaaaagcggagggggtttacgcaccgacaccgggtggccacctggttcccgcttgcccgctcgccggaagtcggcccaccgggaccggcgcgggaccagcgcggcaccgcccctcactgccccgccctacgacggcttccctgccccattggtccgcgcggccctgggtctccgcggcgagaatctagtctgattccctcccgccctgggcgctgcctgactgctccccagccgagacacccaagccttagcacgtttataatgtgacagtggtacggggtgccacgcagtgtttccaggagcgccgggggggagcgccaaaatgctaaacccattcttagccaattgtgcgccgctcacgagtcagagctgagcagctaccgcggaaaaatctcgtgacacgcctgactcctgatgagactaaaatgcaccgggctttgaatgccggtcgcttaggacatccggcctattgctaaaaaaaaaaatgaggctggttatagaacgcactggggaagacacagggcaacagcgagttcctcctctcacatgccagtgggggcgggggctgaaaaattctctcccggatgcatatccctgtcgaaactgaacttggcgccacctgagagcgcctgaaagccgtgtgttaaacaccgggttgcccttcttgctcttcttcctcttcgcctttaatctcaggcacttagcaagcctgttaaggctcccaaacactgctggggactgacaacttatgcggacacggtcgcctcaagagagacggctcctgtaatggcgcctgcgtcagacactaacatggcggacatagtcgtgcgcggcgcaaacgtcagcacctctaccccagccgctcagaaacagcagaggagagcagggccgtgctcactgattggtccctcggtggagcgggccggaccgggcattccctttggagccaatcaggaaggcgagagaccgaattggcccgtgcgcctcctcccgaggcatgctgggagcctggaggactagcgaggaggagttgagagaacggagcggacgccatggcgaccaacatcgagcagatttttaggtctttcgtggtcagtaaattccgggaaattcaacaggagctttccaggtaaacgcctcccagattcttctgctcccaacggaccgttaggccctcacctagccttctttggcacctttcttcggagacgcagtcgttccccggctcaggccccgctagggccccgcctgggcctgggatccattttccgggccccccccaaccgcccccccagccgctcccttccttttccctcgaggaacttcgccttttccgaggtaacccaagactccctgtttcagaaccgagttaagatgttcacccttctcccctgtttgggtcccccctgccgtttagctactcgtaggcccggttgtccgccagggacgggcctagttccttcctcagctcctcctccgccgccgcgtatcccctccccctctcgcctccgcggattttgccggccggtgcctatgaccggaaagggtctctaacggccgtttcttggttaatcttaaatcctctttattattgcgagcttcagaccgcttgggggtctggatctattaataagattattcggggcctagtgtcctgtagtatctgtcagccgttctgatagttaaatgtttcaattaaaacgaactcaaactgatgcacttgctagtttgttaaaatactcgagataaagatggaaggggactttgaaatggttgcgattaattacagcaagtgaaagtggactttgtgtgtaggtctattattttcttgctacccctgccccagttgacacgctatttttgtcattgctggtagactttacataatttgcgcttggcttcacaaaatttgaaggcgaagagattgttaaagaaatggttgtttacttaggaaaatagtgtgtcatgttcagcggttgtctctcgatatttgcttttgtataagatactcatttctttaaagtacagaagtaggaaagagatcttgaaacgtaagtgttccgagttcaagtgtttttaattgtattttaaaagttgagagcaagagcagtacgtgaatttgaaaatgggccgaaaaccagttgtaagtgcccaaagtaatacaggattattagggcaatgatgtattattgctagaattatcacttttgcagaatgtgttgttttttaagtggaaatagatccactcacattgctttttaaatttttgtgatattgctagtagtgttttggatgagaagagacccgagctaagagaatataattttcctgacaaatctctggctgcaataagtagttgtttgcttagtttaacgaggtgtgtttttgtagcttttaaaagctagtctttcctttagaaaatgagcgttttattataatttagaagacatgaaaaaggagaaaagaaaaaactcacgttattgatattctcatgtcatttcatttccccccccatgtattgtgtgatatgtgatcatcttgttttgtattgatcatttttccagctaatacgttgtgaacaggtttatccctctcagtctcagtcttttggacttcttcatggctgcatagaatcccattgtaggaatatactgttgcatatttaggtggtttgaaattttcattgcttttcagtaaatgcggttaacgattgctggctttaagatgaaatcattacttccttgtagattaacttttaaaaccataattacttttctgattttcaaatttgtcataattatgtataaatgcttaggaaaattgtaaaataaagtgctacagaaggaatat

SEQ ID NO: 1562365 - DNA, 4001 bp, Homo sapiens
gcagataagacaaggaggcccagataggtaaataacttgctggaggtcacacaggtaagagggggtggagcctaacagaagcaattttgcttcagattctctcaacaagtgaaacgatgatcattgaaaatttgagaaaggaaaaaaaaaaaccctgttaaattacagtctcggaaggaacagctactttagtgtaacgggaaaacacattttacttgccatgtgtatctgaaataaacagattttttattttatttatttatttatttgtttagacagtctctctctgtcgcccaggctggagggcagtggtgtgatctcagctcactacaacctccgcctcccgggttcaagcgattctcttgcctcacagcctcccaagtagctgggattacgggcgtgcgccgccacgccaggcgaatttttgtatttttagtagcgacggggtttcactacgttggccaggctggtctcgaactcctgacctccaatggtcaacccaccttggcctcccaagtgctgggattacatcacatccggccagaaataaacagatctttaaatctagagcaaatgttacatctttagtttgaatatagcagtagtgtgggaaaattctgtttactctagtggatcactgaaaatagccttactacccagtggtgaggacgcctgggctcctgagtctcacacagcgccttggcctgggtagagacgctgccccatactagcaggaagaccttgggggacttcactaaccttgggcctcattcctcagaatgggtaacataagcagaataagacaggcaaataaagccgtatcagaggatatggagaataaagtagaaaccaactacaaaattaaccaagtaatctgccagagacaacgggtgcataaagagaaagtacaccaatttagggttatgtcctaaaaatgtataaagacacaaaaaggccttgacatcttagaaaacaggaaaagtaaaagagcaaatagaaaccagctaacagtagcaagtgaaaagcacatggccaacccccacccaccgcatttacaaacaacaggaaaatttctacaaatcagtttctatggtttcactcagttcgcgatcttaaatccccaaaccaaagcctaagcgcgctccgtgtaaaagcggagggggtttacgcaccgacaccgggtggccacctggttcccgcttgcccgctcgccggaagtcggcccaccgggaccggcgcgggaccagcgcggcaccgcccctcactgccccgccctacgacggcttccctgccccattggtccgcgcggccctgggtctccgcggcgagaatctagtctgattccctcccgccctgggcgctgcctgactgctccccagccgagacacccaagccttagcacgtttataatgtgacagtggtacggggtgccacgcagtgtttccaggagcgccgggggggagcgccaaaatgctaaacccattcttagccaattgtgcgccgctcacgagtcagagctgagcagctaccgcggaaaaatctcgtgacacgcctgactcctgatgagactaaaatgcaccgggctttgaatgccggtcgcttaggacatccggcctattgctaaaaaaaaaaatgaggctggttatagaacgcactggggaagacacagggcaacagcgagttcctcctctcacatgccagtgggggcgggggctgaaaaattctctcccggatgcatatccctgtcgaaactgaacttggcgccacctgagagcgcctgaaagccgtgtgttaaacaccgggttgcccttcttgctcttcttcctcttcgcctttaatctcaggcacttagcaagcctgttaaggctcccaaacactgctggggactgacaacttatgcggacacggtcgcctcaagagagacggctcctgtaatggcgcctgcgtcagacactaacatggcggacatagtcgtgcgcggcgcaaacgtcagcacctctaccccagccgctcagaaacagcagaggagagcagggccgtgctcactgattggtccctcggtggagcgggccggaccgggcattccctttggagccaatcaggaaggcgagagaccgaattggcccgtgcgcctcctcccgaggcatgctgggagcctggaggactagcgaggaggagttgagagaacggagcggacgccatggcgaccaacatcgagcagatttttaggtctttcgtggtcagtaaattccgggaaattcaacaggagctttccaggtaaacgcctcccagattcttctgctcccaacggaccgttaggccctcacctagccttctttggcacctttcttcggagacgcagtcgttccccggctcaggccccgctagggccccgcctgggcctgggatccattttccgggccccccccaaccgcccccccagccgctcccttccttttccctcgaggaacttcgccttttccgaggtaacccaagactccctgtttcagaaccgagttaagatgttcacccttctcccctgtttgggtcccccctgccgtttagctactcgtaggcccggttgtccgccagggacgggcctagttccttcctcagctcctcctccgccgccgcgtatcccctccccctctcgcctccgcggattttgccggccggtgcctatgaccggaaagggtctctaacggccgtttcttggttaatcttaaatcctctttattattgcgagcttcagaccgcttgggggtctggatctattaataagattattcggggcctagtgtcctgtagtatctgtcagccgttctgatagttaaatgtttcaattaaaacgaactcaaactgatgcacttgctagtttgttaaaatactcgagataaagatggaaggggactttgaaatggttgcgattaattacagcaagtgaaagtggactttgtgtgtaggtctattattttcttgctacccctgccccagttgacacgctatttttgtcattgctggtagactttacataatttgcgcttggcttcacaaaatttgaaggcgaagagattgttaaagaaatggttgtttacttaggaaaatagtgtgtcatgttcagcggttgtctctcgatatttgcttttgtataagatactcatttctttaaagtacagaagtaggaaagagatcttgaaacgtaagtgttccgagttcaagtgtttttaattgtattttaaaagttgagagcaagagcagtacgtgaatttgaaaatgggccgaaaaccagttgtaagtgcccaaagtaatacaggattattagggcaatgatgtattattgctagaattatcacttttgcagaatgtgttgttttttaagtggaaatagatccactcacattgctttttaaatttttgtgatattgctagtagtgttttggatgagaagagacccgagctaagagaatataattttcctgacaaatctctggctgcaataagtagttgtttgcttagtttaacgaggtgtgtttttgtagcttttaaaagctagtctttcctttagaaaatgagcgttttattataatttagaagacatgaaaaaggagaaaagaaaaaactcacgttattgatattctcatgtcatttcatttccccccccatgtattgtgtgatatgtgatcatcttgttttgtattgatcatttttccagctaatacgttgtgaacaggtttatccctctcagtctcagtcttttggacttcttcatggctgcatagaatcccattgtaggaatatactgttgcatatttaggtggtttgaaattttcattgcttttcagtaaatgcggttaacgattgctggctttaagatgaaatcattacttccttgtagattaacttttaaaaccataattacttttctgattttcaaatttgtcataattatgtataaatgcttaggaaaattgtaaaataaagtgctacagaaggaatatcta

SEQ ID NO: 1562366 - DNA, 4001 bp, Homo sapiens
tacaatgcacattaaaattacccatagtctagaaaaaacatgtgtgtagtaaaagttagtatttgatatctgcagctcaaagtagcacatttctatttttcttttagtgggcatgttcagtgattaaaaaataaaacctagtatgttctgaatttttgtaaaggggctgactaattgtaggtcagagctagtatagtaactgagcaatttcaactgctcaggaagcgtcactatgccagtgtctggcactgctcctggcatattctgttagttcctggaaagggggagttagaagtcctcagagatcagggcttcactcttgcggttgaaagtggaagatgggagaaactaagagacccatgtgatgtcacagcttctcctgtggctccctctgtgaccgtgactctaagaagcccgatgggttgggaaaggaggagggcaaatgagattcagcgaacaataactgggtttagtttaaaaggcgaagagctgtgtcaaccctcaaagttcagaaattgccctatgcagccacagaccaaaccttggtggtgggtgctatacacttatggctgtcagtccacgccccttccactgtccttgcgttttgtcatctttgggctgcccacattcagctttccggtgtcttttttatctcattcgagatcagagccctgaatctcctaggaagctacctggactgggaactggatcttgctcagtggcaggcaagcgggcaaattagggagcaagtgggaaacttaagtgtctgctgatgttgctaactgaccgtccttctcactcttcgaatcttcagctcgaagtcagatctgaactctgccccaatctagtggaacccgtcagagttggcagactccatgtggaagaatccaacttaggcataaaaacttggaggctctggggtaacaggctctaggatattcccacatccctagtggtccctgtattgtattcttgagattcgtgcatacttgccagtgcccagagcccaggttgccaggcaccgggactgcggatctggactgccagacgcccacccaggaggctgggagagctcatttctgcgcccaactcaagtggctgcagcggctcgcgatcccttgcccagagtaggggtgccggtccctgcgaacctggatccccgcactctagcccgcgttcctggagcccagattgaaaaacccgccaactgtacctcccggggaaggccggcaccctccaggagggaagcagtgacgcggctcccccttttttgtgtagcctcccatgagcactgacctccaccttccccagctccggctcctgcgccgccgcgcgctgcctcgcccgggacccgctacacccgcgttggtgcggcgaccgaccacgtctcccgagcaggcagcctggggctcactcaccgatcctgagtacttgcggggcggtctgagggaggatatagcagaggaaatagaggagtgcccagctggtgtccctggtccagagcccgggctgggcgaggagtgtgccgtgctccatcttcctagcttcttaattcatgccgagatacagccgctgccggacgcccgagagatgcacccaacttgggccgggtccccgcctcatcctctctggatgctccggttccaagcacgctgcgcgctccccacggagcgagctcgagggaacccgcgtgggaccgcggagctggctggcaaggctgagctctctcggggctcctcagtgctgtcgctagcccatcacggctcctcctcctcctcttccatgggccgcagaccgcggaggatcagcgctctctggctcccggagcccagagaccagctgaggaaagttgctgccccgatctgcaggaacgtctccctcattcgtcctttggtcagatgcaaaagtcgggggataggcacagacagaggagggaaaagggggaaagaagactaacgaagaaggagagagggtacagggtgagttggtgcaggggctctgagcaagcctgatgagctccagcaggttaactgggagcggagccacgttccggcttctctgaatctttgctttcctcctcccctcgctggccccaccctttatttactgcccgccccaaccccactgatcaagatactcgcgcgcgcgcgcgcacacacacacacagacacacagacacacacacagacacacacacacacacacacgctcttttttctctccctcaactttgcgctctgctgctgggaagtcgatcgagtgttgcattctcaagacagatcaaatctaaactattggtccgagcagagaaagcctctgctgtccgctgtgagtggcaaggaagccttcttggtaatgtccgtgtgcacctgttagggggtcttatagacagccagctatgactcgtcccatcatttaatggaaaatcacctccaatattttggaaaataccggggctcctgttttgactctgacgaggatgatgaacaggggaagggggagaggaatgagaaagcttcagtactccaagattatagtggcttcattcctatttggacccaagataatctcttgcaaattgcttccatttacacatgccactgagatagaagcagcctccagcgccgctacttttcttcatttcttttaactgtcaggtctgaatactgaaagataggctattttagcaatgtaggtttggagactgtttctctgtagaaggacaaggacacttccctagggaaatcagcatttgattatgttggattaatttccttcgagttttgtggggaatgttctatatatatgtttgctaggtctatattaacatctcttttttttaactggtaaatagattttgaagaactgaccaaatccatatgaaaagtatgtccacagttgttatatgagcctagagtgggaaacaattgcaaaaggaatctaatatatcttaaagtccattcgtgtattaattaattaattcattcattattcaacaaatacctactgagtattttgtttgtggtgtcagacactatacttttcactaaaaaccctatggtggggaaaatgcatgttcattctccaagggaggttagaactccactgtggaaagctagtcagttcatatctcaagtagtaggcttggttctggacactttgggatgagagttaacaaagcagaacatgtctgcagataagaagagggactgatagggatttaggaatgcatttttgcgtggaaagattgaggaaaccaagaggaattaggagcacatgctggttatcttcagacatttgaagaattcttgtgttaaaagaaagtagccttattcagtgttagatatgtgagaagagctaagaaaaataagattgtcagagggaaattgtagaagagtaaattttgtctcattcggggagcatttttaagaccagagaatatcaaacagcggcaaggctgggtgtgctggcttacattggagcactttggtgatgttgaggagggaagatgacctaaaaccaggagttcgaggccagccttggaaacatagcgagacccttcctgtgcaaataaaaattaagaaaaacagtagcatgacctgcttcagaaaagaggcaaagtcaaactattcatttatttatgcatattttttgagagcccacgttgtgtgaggtattgtgccaatctctggagacacagagggatatgattgctgccactctggaactcattggcattaaagtatgatgagctttacaaaatggtgttatggaagtaaagaaaaaaagtagtgtaatcccatttaagagtttggaaaggggttcttcaggaagtgatgcttcaaaactcaaagaatcagtggtttaaaagggattagtaagtatttcttaaagtgagaatgaatgtaaatctgttagagggtttatttttaaacctaaaggtctgtggtaagcatttttagtcatctattttctctgggtacatcaaagaccaatacata

SEQ ID NO: 1562367 - DNA, 4001 bp, Homo sapiens
ccttttctctttttctttccaaaaataaggagatacttgaatgtttcacacaaaaagtagcctaacacagtactctctgtttaacttttgttcacttcctagtactgtataccctagaaatcactccacatcagttcagagaccttcctcactgttttttatacgtgcattgtgtggatgtaccagggtttattcacccaattgcctatgtattggcactgaagttgtttccaaaattttgccattgcaaacaatgctgcaatgagtgaccttgtacatatatacacttttatactggtgtaggcgtttctccagagtaaattcctacctgtagaattgctgggtcaaggggtaaatgcatatgtagttttgttaaacaatgctaaatgttcctctctaggagttggaccatcttgcattcccaccagcaatgtatgagagcatctgttaccccacagactgtcctgttgctttgcacttagcaacgggatcagttagaaccgtgatggtatctcagagtaccctgcatttctcctcctatgggagaaacggaacatcttttcattgaagggccagttttatgtcatttttgtgcagattgtcagttcatgttttttgcctatttggtctttgcttccctcaatgtttgagttatttacatacttgggatcttaaccctttatctgtgatagatgttgcaaatattttttcccagtttgacatctgtctttaatcaatggtaggggatttttttttctttttccttttaattttattttattttatttatttatttatttattttttttgagacagggtctcactccctcacccaggctggagtgcagagccgccatctctgctgacagcaagctctgcctccctggctaaagcaatcctcccacctcagcctccggagtagctgaaacgaacttttcttattttttgcagaggggttttcgccatgttggccaggctggtctccaactcctgaactcaaagagattctcccacctaggcctcccagcgtgctgggattacaggcgtgagccacagtgtctggcccatcttttttttttttttttttttttttaatgagacggagttcgctcttgtcgtccaggctggagtgcagcggtgcaatctcagctcactgcaacctccacctcccgagttcaagtgattctcctgcctcagcctcctgagtagctgggattacaggagcaccaccagcagcacgaccgactaatttttgttatttttagcagagacacggtttcaccatgttgcccaggctggtctcgaactcctgacctcaagtgatctgcctgcctcggcctcgcgaagtgctgagattacaagcgtgaaccaccgcgcccggccccagcttccgttttttaatgttattatgtatcagtcttttttttccgggcacttaggcgctgggtcattaggaagcctttccccacacgcaggtcctagtcaaccgtgctttttagcggcgagtaggccctgcggctctgcccctaacatgggcgcggggcacgcggccaggggcccgtgggagggggacagggcgcgcgaacccaggttctcaggccgcgtcgccgcgcgtgcgcactgacagccgggccgagccagcccgggtcccgcagggaagaacgccagcggcgcgcggaggccgcgctgccctgggccgcgaggtccctatggctgctccaccggaagccccgcccccttctggcagctggaggcggctttccggccgtcccggctgcagccccgaggcctcgactcaggagacggctgttccctggcagaggctcgcggtggactgcctgaccctcgcccggccccagcacgcccccggcgaacgcccacccctgtcccggcccgcagcgccccgacttacttctgaggccgaaacgcggccgctcctgcgccgggtggtcgcccgcgaatccctgccgcgccgcgctgcgccctctcgtggcccgcctggtggtgcaactgggctctctgcgcagggccgcggggccgcctggcctcctcctgccctggccgcggtgccgcgcgctcgggaacgcgggcctttcgccgctagccagcttctgcctctcggccacctgtcctctctcgcccacgctgcctgggaggcgcgcttctgccgccttcttgccgcgctcgctctagcctcgcccactcctgcggccttacagggccgaacctcaccctgccctgcggaaggcaggcctacaccttccctccgcgccttcctccctgaccggcaccaaacaccacgttgccctttccagcatcgacgacctattccccagttctctgacaccagctgaattagcgcgaaactactggttaagggattagcccagggagactgccctcccttcgccagccacaagcggggtgcccagaatgcccgcatttctaccctgcccactagaaactgagggattgccacagctcccgtgaggttcagcaattccctgggacgacacagaactcagggagacactttactgttagaagattattgtaaagaacacaactcggtaacagccgagtgcaagagatgcgcagcacggggggtgaagggcgggagtgctgtcctcacagcacctctgtgtgcccacctgcctggaagctctccgaaccctgtttaagagatttttatccaggtttcattatgtcattggccattagtgattgaattcaacctccagcccctttcccttcccgcaagaggagtagggacatgttggagctgaatgaaagttacaaccctctgatcacatggtgtgttgcaccagccccaccctgaatccatcctagagcccgcaattagccacctcattagtagaaactgtgatttgactaagggagtcattatgaataacaaaaacactcctattgcctaggaaattccaaggggtttaggagttctgtgtcaggaactggggacaaagaccaaatagattttttataccaaactccctaaaccaataacccagtttaatcgtgagaaaaacatcagacaaatcccagcagagggacattgtacaaaatagccaacctaaaatcggtcaaggttgtgaatgtggtcagaatcaaaatggtggagtcatttgtgttaaaagagagagaaaaaaaaaatgacaaatagagctggggaaagccatgaagaggattcttgttcctaaatgcgtgatgtcacaaatgctcataaaagatcaacactgtccacagaggccatgtcagccttcccaaaagaagattcctgccaggacatctgcccagcaatagcctgtccaacttcagactggtatcaccctgatcgatacttgtagctgaggctaattatcaaaaacaatatgtaatcctcctcattttttctttaaaaatcttggtcttcctttacctccctgaatttcacacacatagcttaaaatggcccacatggctccattgcaatgccctgttcccaaataaataccattttcttttagagaacctctctgttatggaggttgacaaggtcaccaaaaccaaagagagtgtgaggaactgcctcagccaagaggcatctaaggagacatgatggttaaatgtaagtggtgtcctagatgggatcctggaacagaaaaaggacattggtagaaaatggaggaaatttaaataatgtaccaataatatcaataatataacgtaccaatgttggtttattaattgttaacaaatgtgccatactaatgtaagatacaaatatgaggaaactggtttatgggaactctctgcactatcttgcaaattatctgtaaatcttaaactattctaaaaataacgctttaaaaaaaaattagagctgagtgtcatgggcacacctgtaatcccagcactttgggaggccaaggtgggaggatcacttgggcccaagagtttcagagccagcctgggtgacacagtgagaccccatctcttaaaaa

SEQ ID NO: 1562368 - DNA, 4001 bp, Homo sapiens
gaaagcaccaggccactcctactccggcctgcacaggtaggcaagggctgaaaatcactagttatggttagtgtagttaacagaaggccagcggagtcatgaaaatgttcaaaagtaaaactgtccaagaaaatcagacattcccatctccatgtttttatatgtccaaaatttctattctgacttaaatcctaaatgtaattgatccaatttggaaactactacaaaaagctcacccctcaattttttgccattttattgagttatctttctcaatcaggttaattcccaacgctctaagccatacattgtatgtaatgcatgaacttcttccccttttgtctgggtagtgtcagttatgtggaggtggtactagttatttgcataactagtaccttgggggacctgagaaaacagtcattcatattcagtgtgacataatacatatatggtactaacaagaaagagtattttttatttgctagtggcacaatttcaacccatatctaagcacagcctccaggcaatgttcaaacctgagataagattcaattccccacaggggctttacggtgtgacatatgcagaaaacgtcattttagtgctaaaagtgaggcaatattccagaaaacagaggaaagggacaagaaacagattaaaagcaaaacacgtttaaatattaatgagaacaatgctaccgatgtccatgaaattttgtgcagtactgcactgtgaagctaagcccatttccaaaaacagctgaatggaaagatctattgttccctttacagcaaggcagcagactttttacagagattaattgactggcccaagtcacaaggtaggtgacagagtgggctgaacacgtaaccaccatcctaagcactgggtcaaaaaaaacaaaggctgactgtcaactgaaatttaaaagacgcaaagaccatcagtcgggtgcccaagttggtgaatgatgcaaccaactgacagaagatggagagggaaaagggcagtttttgtaaatttggggacatctgacaaaaagctgatgacacaggtgggagttttttgtttgggatttttttttttttttcttaagacagggtcttgctttgtcacccagactggagtgcaatggctcaatcatagctcactgtagcttcaaactccggggctcaagtgaacctcccgggatcaagtgaccctcccgcctcaccctccagagtagctgggactacaggcgcgtgccaccacgccgacctaagtgttttttttgttttgttttttgtagagaggggtctagctatgttgcccaggctggtctccatctcctgggctcaaagctgtccttcctcctaggcctcccagagtgcagggattacaggcataagccaccgctcccggcccgccacagctgtctctcctggttcacggtcacccaaacgccggctcgaagtgtgggagaggaggttgggggcgaccccaggtgggcactgctggcgtccggctgtcaatccacagctcacgtcctcacaggtgcgcgcctagagtcacgcgtccagcaccgcccggctggccgggaagaggcgaccgggtccgtggtccgagtcccgcacctccggcctctctctgggccccggggcaacagcccctcccgggccgcacaggccgcactgagggcgccactccggggctcccgaactcccgggctcccggcggggacgaggcgcagggacgggggcacttccggctcgcggggcccgggtcgcccgcccgcccgacccgcccacctggctgtcgctgacgcagaagacgcggccgccacggctcaggcacacgcgggcgcccgggggctgcgcggccgcgccgcagaaggtgaaggaacagcgcgaggcacgcagccgccgcaccgtggcgcgcacgagctcagccggccggcgaccccagcgcgcccacaggtacaggtagcacagcgtgatgagcatggccgcgccgccggcagggcgagcccgccttgcccgcccgccccagcgccccaggcccggccccgccccggccggaagggccgcgccgcccccccgggccaggcggcgcgggggtggggacggcgggggaggcggggacccggaaggtgacgcgggcaactggaggctgcggcgggaggggcgggggggggtgaggccgcgcccggctgtgtgatggggagctccggaggccgcgcccagggctggtggcggcggcgaggggcagcgctggggcggggggtgtgcaccggggtcaggggacgccggggctgcacccggagagggggctcgagggagtggaggccggggtgcggggccgcgccagggctgaggagtgggatgggtatgttgtggatgcgggggaggggaggctccagtggctgcccgacctgtttaagccaagtccggcctcccttccttggaggggtgggaggcggattgaggagggggctctgcctatgttcatagctgccaaggccaacctttactaaccagcagcacaccgggagtcccagagcgctccacagccgctacccagtcgacttgggaaaataagataaggccgtttttattaaattatactaagccttcatgcaaaagattttaaggtcaatcacatacattcacgggatgcaataatgtttttttaaataaggacaggaaacagaaattgaagacagataagcaccaagaaggctgcctctaaaaaggctgtgccaggaaggctccctatggtgttcttgctacatgtgggtcaacagtttgactgtaagcatcctaacaccagtgggaaaaggaaaacatcaccatgatttggtgttcttgtctccaagggaagcataattagtcctgacacagaggcttctcccatagaacctcatttctttaaaaggcattatgtaaagaacgtgttctgaacagctgcgaagcacagcaaagaattccatccagtggcttcctattctggccctcgctgaaaataggtggcaagatgcagcaaaagcaatcatgtacaccacgtccatgtcttaatctaaggatagtttttgtttgtttgtttttgagacagtctctctctgtcacccaggctggagtgcagtggtgcaatctcggctcactgcaagctctgcctcctgggttcaagcgattctcctgcctcagcctcccgagtagctgggattacaggtgcccgtcaccatgcctggctaacttttgtatttttagtagagacagggtttcaccacgttggccagggtggtctcgaactcctgacctcaggtgatccacccgcctctgcctcccaaagtgctgggattacaggcgtgaaccaccgcgcccagctaggatagattttttttaagagacaaggtttcgttctgtcgcccaggctggagtgccgtggcataatcacagctctctgcagcttcgaactctgagctgaagtgatcttcctggccaccatgcccagctaattttttagaaattatttttcatagagacagggtctcgctgtgtcgcccaggctggtctcaaactcctggtctcgagcagtcaaactcctgcctggatctcccaaagtgctgggattacaagtttgagccatggcgcctagccataaagatagatttttaaagtaccttggccatttgttcatctgctttaatatagctgcatagaacacccactcccagaacttcagacttttggttagataacatagtatattttcccccttgcatatagcgatagatttttaaaagagagaaaatccaaaaagaaataactgggcttaaaagcaagcatctctgtggaccagaaatagaagaaaaacaaagtgataaacaggactaaagccatatcctacacttctctacaggacagtggcagccggaaagtgggttcctgcatggtaacaagaccttaaaattgtgtcactggagaaggacgtgcagttcccgctgaggagagacttggccactc

SEQ ID NO: 1562369 - DNA, 4001 bp, Homo sapiens
actgcttaaaagaaaaaaaaattggccaggtgcggtggctcacgcctgtaatcccagcactttgggaggctgaggcgggcagatcatgaggtcaggagattgagaccatcctggctaacacagtgaaaccccgtctctactaaaaattcaaaaaaaaattagccgggcatgatggcgggcgcctgtagtcccagctactggggaggctgaggcaggagaatagcatgaacccaggaggcggagcttgcagtgagccaagatcgcgccactgccctccaggcctgggtgacagagcaagactcagtctcaaaaaaaaaaaaaaaagaaagaaagaaaaaaactacctattataaacccttgatgctataaatttaatggagctggaaataaattccctggaaagactatggtgggagaaggggggcattaccttcatccgtttacattctccagccatgggaactagctcctttgttttcactgaatttatgtttctatagaggcacccaggattgagtctcctataggggggtcccatgaagctgccatgcccctctgttgatacaccttgctttgcaggtcaatttgtgatttttaaaatggttttatgcaaacgacatgtttagcccaaatgcactgcaggtagctggtgataaaacagcaatacggaccaggcacagtggctcacacctataatgccagcactttgagaggccaaagcagaaggatcacttcaggccaggagtttgagaccggtctttgcaacatagggagactccatctgtacagaaaattaaaaattagccaggcggccaggtgtggtggctcacgcctgtaatcctaacactttgggaggcaaaagcgggcaaatcacttgaactcaagttcaagaccagcctgggcaacatggtgaaaccacatctctacaaaagtaaagaaaattagccaggcatggtggtgtgtgcctgtagttccagctactcctggggaggtcgaggctgcagtgagccgcaatcacgccacttgtactccagcctgggcgacagagcaagtccccatctcaaaaaaaaaaaaaaaaaaaaaaaaaaaaggctgggtgtggtggtcccagatactcagaggctgaaaagggaggattgcttgagcccaggagttcaaggctgcagtgagctgcgatcacatcaatgcactccatccagcctgagcaatggagtgagaccctgactatatttaaaaaaaaaaaaaataggaagaaacaactcaaccacagggctagtatgttactcggttataaaatgataaagccctaaacagagaattagcccgtttccagaagaggccaagaacagatgatacagctgaactgaactcctgcctgtacagctcgttttctacaagattccagacctggaagatgatggcatccagcccccattgaagcacctcgaacaagaaaaacgccgagtccgaagagccaggccttgaacacacgattcctgtctataaataactccccctggggaataaaaagcaggatccaaggcaggaaacccgagccgtggaatctggtaagttcttaggaaacccactcacgggcctgagtcccccgtggaagcggcgacttcggcacctggacacccgagtccccagagccccgggcggccgcgcgtccctacctgcaggcctgataccggccgcggagcgctcctggccccgctcccgccaggctccgggaccgctgaaacgcacccaggggggtgaaggcgtagtcgccaaggacagcgcagatggcagcggaggcatgggagccggaacctaccgtggcaaagggccaggtcgggacgcccctcggcgcagccccaaatcctgcccgcgccccagccccgctcaggccgcgcccctgccacctctggccacacgggctgagacgtctggctcctgcacagcgcacttcccgctgcccttctccactggctgctcaggccctgcctcgccagcacggcatccgcgggggatccctacctgtcctttagggcttgcctcataggtcaaacgtcacctcccagggaggtatggcctgccccctggccaggtgggccccttccacgctcgcctgcaacaccacccacccaccttgataactgcttgtaaaggttgtactgctttcccccttgagactgcaaaccttcaagggcaggaaatgggtctgttttcctggcaaaataatgaagttggcttaaggttttgctgaataaaatgagtgacagacaaaagtagccaaatttggcactcctgatgggttatttgatgaaggaggtgcaatgtatgggcttaactagttattctggatttctttccccatgttactcctccctaattctgatgaggaactgagagctgaatctattaatctattaactcttaaccttcctttttttttttttttttttttttgagacggagtctcactctgtcacccagcctggagtgcagtggcacgatcttggctcactataacctccgcctcccaggttcaagtgattctcctgcctcagcctcttaagtattgggattacaggcgcccgccaccatgtccagataatttttgtatttttagtagagacagtgtttcaccatgttggccaggctagtctcaaactcctgacctcaggtgatccacccacctcagcctcccaaagtgctggggttacagctgtaagccactgcatccggccttaaccttccttttctaaaggcactaccagacttctcctgctaccctaaggatggagtcctaattctgccactggaaccctgaatgcttcactttcagcacaaaaatttcaagcaaagacttgcagcctctccttctcagtttaggggaatgggggaattctttaatctgtggtgggacacacatgatgttaattagaatactctctcccaaagaggaggaaataaataggaaaatgaatcaagtctgatgcccgggaagtgtttatggatgttgtgcagaatagccctaccacaaagaaaatttcaaatgagacatcctatcactgctggggtttctcataacacaagagctgaggctaggtatggttgttttttttttcttgctttataagaatattattcaataagcagatttccaagccttgcattctttctattcaatgtttctaagattcacacatacaatttcgcaaagctgcattttattcatgttcactgctatctaatattctatttgtgatcatatcctactttgtttagccattctcctggggatcaacatggggttatctccagtttgtttcctctaacaaataatattgttctgaacatccactcgtctcctggagcccctgggcaagcatttctctgggtgtggacccattactacaccaggcatacgtccagcaagctaattaatgtgcagaattaagagataatgctaaactgttttccaaagcagttataccaatgtacactcccattaaaagtgacttttgtttttgactcggtatttttcaggtcaaacacattttcctttcaattttagatttatactgattttcacaaactgtcttggagaattatgaggtcctcaaacacaaagcttcatattgtggttcttagtcaagaaaatctcctagaggcaatgatccagctaattacagatcccctattgtccacgtctaaatttacgcattgtagctgggattagacccatgaatcctaggacaatgccaggggtgtcattaacttaaaaactctggcaggccaagtgcagtggatcacgcctgtaatcctagcactttgggagaccgaggcaggtggatcacgaggtcaggagttgaagaccagcctggccaagatggtgaaaccccatctctactaaaaatacaaaaattagccagccatggtggcacgcacctgtaatcccagctactcgggaagctgaggcagagaattgcttaaacccagaaggcggaggc

SEQ ID NO: 1562370 - DNA, 4001 bp, Homo sapiens
ttttaacaaggtcagctaattttttaggccttcaagtttccgtgctgttctaactgtatacagagaattaccacatggtcttctggtaatgagaaatttaaagttgaaaaatactattctcataccttccgtgaagctttatttttaaaaggatcacaaaaacagaactttctgttaaagaaaacatagttaacatttttacactcagctctgtaaaaaatttaaattaaaaaagaaaaaacatctttgttttatacctttatttaacaaggacaaatttagtaattatccaacaactcctcaatgtcaaggaaattaatcttgcctcttctgatgactgcagtgctaaacttctacctacacttttaggaaagaggtgaaggcattaacaaaaattttttttgagacttcaaatagcaaactctcacctaagttttggataaaaattaatcaccccgcgaagaacatgtagagctttacaggtttcaatgctatatccaaacacaaagcttatacttgttttacacatgttctgcttttccaccctgcaagttatcaaacacacgtacacccaaagccaacttcattctacagacctgcaattcgaatcatgcaatcacgaatttgttagggagcagccaaaatcacggttttgtataactgctgatgaacacttccagagtagtggcggttattttctcagagatcacaactttttacctccccacccccaccccgtaaaaaggttaaggcttcccgaagttggcttggaaactgtatatataaaaacttacacgttccctttctcctggcctcggtgctatcttgactcttttattgtcaaaaaaggaagtacaagcacgaattaaaagccaagcaccagccacaatgtacgcaacgcaaagaataaatttcctttgtagacttaatatttaatattttttgtcgtcctaagtctcctaacatctgcagcagcattagtgtgatatagttctataaaccaggatgaatatatccattacatttttgcctcgaccactagaaaaattatttaccgtaattattaaagtataaataaagctccaatagctaatcaaaatggaagccccgcattaagaagcagtgtagcctaaggccccgctgcatcccaatgcgcgtttcgaggcttaccttcgctgctgcctttttcggcttcgcttccacttttgcaggaggtttctgaaaggcaaaagcagcactgagcgtcctcacccgggacgacccgcggaaaacgaacggttacggggctcgctttacttacagctgacaaccgcgccgatctcctcttgggcttggagaaagaaaaaggagagtcagcgagaagagaaggcaggccagcggctcacgggaaacccaccaccccccgcagaaggcccgcactcacctcttccttggcggcgccttcggcggagctgacctgcggagacggagacgcacgaatagaggcgggccgcagtcccaggactcgcgggcccgcccggccccgagaacaatgcccggccgcgtgacgtcacggcttcccgccgccccgttcgaatagccccctcagctcccccggccgccaaacgttccagaacgcccgcccccgcggccgccgagcgctcgcctgcccgcccgccggtctccaagcgcctcccgggcccgtcgccaccgtgggtgcaacggggcctgggcctcgcggggcccggcggggcgccggcggcggctccagggggcgtgtgcgggccgcggccgccgctcaccttcctcttgggcatcgtggcggcggggaaggcgcgtgccgggtgcctgcggggaaggcgcgtgccgggtgcctgcgggccgcggcgcgccgacagccttcgcgaaactgggctgccttgccgctgccactcctcccgccgcccgagctgctgagacccacagcgggggcggtgggagaaccggatggaaccggattgggagcccgcctcctcctccccccgcgtccccggccgcgggctccccctccccgccggccgggccgccccccacccccgcccattggctacgggactcagcccgcgcccggaataggtgaggcgggcccttaattgatcccggaccccgcccccttccgggggccccccccccccccccgggcgcccccacccctttccgccgtctcgcggggccccagacccaggcgaagggggcggggtcccagtggcgctccggcctcacggtagtttgaagccgagccgcaaagtgcggtctgcgcgctgattggcggacgcacgtcacgggaccgcgggtccccacccacaattcttctggatacctgggcgccttcaggccactggtatctggcccctcccctccggggtgaattgggttcgaacatttatagttcgtatcttagactgggaagggagaaggataaggtatacaggaagtagcaaatttctcccgcctctgtcggcaagaaaggctatccaggggctccagcttcgcaggcctgcgtgaagcgggccctggtgcgcaggcgctgcaggagggcgtgggaaggagagccgacgcggcctttctgtgtaacttccttccttccttccttttatttgagacagggtctcgttgtgtcgtccaggctggagtgcagtggtgcgatcacggctcattgcagcctcgaccccttcggctccagcgaacctcccactccggcctcccgagtagctgggaccacagggcaccattttgcccagctaacttttgtattttttgtagagagggggtttcactatgttgcacagcatggtctccgactcctgggctcaagcgatcctcccgcctcggcctcccaaagtgctggggatccaagctgtggaactttcttcagatttccctggaggactgcaggtgcacgagggtcgtttctgggcccagagtagggcagctctcagattgcagctcctgagagccgtgcgcgaccgtctccagcactcgcggacccccagagggctgtttttttttctccatagcattgattgaatatatatccttatacattccatatatatctcaggaagaatacacaaggaagtggtaccagcggttgcctctggggaaaagtgggaagattgagggtaaaatttcccttttctcgtgtgtaattttttttcactttcctatctgcatggattaccttaaaaaaattcaacatcagagagtacccaagtttgtggcacaagcatgtactgagcacctgccctgtggcaggcaccgtgaagtccctggggtagagagaatccaggtttgtatcccaagcactgggtctagtaatttagtggggagagaaagtacccaattggcctagtaaagaaaggggaagccatcggcagggggggtcagcatatttcaaggcatgctgacttgctagagtgtggcagcccaccaagacctttaaagtggcagggatggagatacgaaaaatggacgtaaagatcagggaaaagaggcagaaaaaaagaagagcagcccgtcatgaagttcgatcattatccaaagattgagggatactgcaaggtcttaagcaagcgaactctatgcttttggacttacctcataaagaactttctcccataagaaccgaagatgcgctaggccagaggtgacaactgatggtccacagatgttttatttggcctagttttttttaagttgccaacacaaacaaatggagcagccagaactcaaatgaaaaactatttggcagtagattccactactcatcagcatgggggttttgacctgctccgtttctgacctgaccccttcataggcaaacctgtgggtcttttgctccgtggaaagtcaccataatgatgctaacgacctgatcagcataacacactatagcccagaactggattcaagcaatcctcctgcctcaggttcccaagtggttggaactacaggcatgtgccaccatgtccaattggcagtat

SEQ ID NO: 1562371 - DNA, 4001 bp, Homo sapiens
cgtgatctcatctactattcaccccaagcctccaagattgtctagatggaaattaaggcacgggagctagatgactctcaatgcagcacaattaataacgggtggaagcaggatgtgaacacggatctggccccagtccaagcgccttctccatcgcatgcaatcagttacagttataaaatcgatggagggcagattctctctaagcctgacgctaagtcccgaagcagggggccagggccttcggaggggaactgggcttccacggagcagagaagagagtgaccatccatcccacgctcccatgcccgctttggcgccactgagtgcccccaccacgcgcagcctcacagaccgggtccccgcgtgggtttggaggcgaagtcgcctcccgccccaggtctccaccccgctccggcccagcccacgccgttaggggaggaagtctccaggcttcccccaagcacgcgacagcgagccgtctccgagcgcacggggcgaggccctgaggggagcgaatggcgacggttcaaacacgctggcgtcggccagggcttcctcactaacccggcaggcctcctcagcggcgcccgcttcgcccatggccgctgccgcctccgctccgttcgcctgagcgtcggcgcgccctctgacccctcacgccagaaagcgcgggaacgaatccacgccgggggtcgggaacggagagccgccaggcccaaacctcccagaatttgcgcagtattctcggcctagagagcgaggagtggccttggcgaggtccctctttggctcttctggcttagccggggttttaaacttgttatctgcaaagcagaaggaaagtcagcccctgatgtaagtgtcaagtaaaataaatcggatgggtcctttcctgtttggcgaggaatgctacactaagggggactgcgttcaaatgggcagtctttgctggaaacctcgcctccgcgcgccttccctcgctcggattcaggcgcttttacgttaagggttgaatttttgtgtcaacaggcacctcgggaggtcgcctagacaactgagcggagcaactgagataacccccgctacgtgtggagtgacctagtccattaacttgccccagcacgcccgctgagtccgcaaaatataggatggcctcgggttttagatgaacccaaagctaagatttcttccctctctggaattagcaagcagcccgccctgcccaactcccctggaagcgcgcgtgctcgccaggcctcgggacgcctgcgcgggcgcccttgcactggcaccagggctccggggtaggggcgcaccgatctgcccaagcctctgcaggcactggaggaaggcgagccctccacccgctcaacaggccccagtgccggcctttccttccagtctcaactccacccgggggcccgggggctccacagttaaaaactccacgccacggagatcgcaggtaagctgctggctcaacgaggtgtgctaaatgggattaaagatcctggaccgtggccaggcgcggcggctcaagcctgtaatcccagcgatcagggaggccgccgcgggaggattgcttgagcccaggagtttgagaccagcttgggcaacatagcgagacaccgtctctacaaaaaaataacaaatagtggggcgtgatggcgcgcgcctgtagtctcagctacttgggcggtcgagatgggaggatcgatcgagtctgggaggtcgaggctgcagtgagccaggatcaccgccaagatcgcgccactgcattccagcctgggcgacagagggagaccctgtctcaaaaacaaacaaaaaatcctagaccgtttacaaacagccttccgtctcttcctggtcaagtcctaaccctggctaacctcgccgtctacagcctgaattttggcaaccgaaaggcagcgccggcgccacgtgcacacgggctgggccgctccgccagctgccagggccactgccgcgctcactcccagagcgcgctgcgagccgcggcgcctttgtgacgccatcagcccgcgcgccgccgccgccgccttctgtgcagtcgcggcccgggcggacggtggctggctgctccgcagcgctcggctggctgcagcggcaccgcgggttgcgcggccggggatgctccagcgggcgcgatggcccccgccatgcagccggccgagatccaatttgcccagcggctggcgtccagcgagaagggcatccgggaccgagcggtgaagaagctgcgccagtacatcagcgtgaagacgcagagggagacaggtgggcgcacggccgcggtcagccgcgccacatggcgggccgggggccggggctggggctagggccagggccccggcacggaatgcggcttccacgtgttgtcgtgacacccagcgtgtgcttcggtttccgcgctgccggaaccgcttcttgctgtgtctagtgcctttttacacttaaggaaacgggttgagggggttccgttacttatgaaagtcacagtaagcggggaagctgagaaaagacccacatgggtccgattccccagccggcatctcgaatcactgggctgccctgatttgccctggtgtccggtcggtgattgccgccttcctttgaccagcacctttacgtgacggggctgcaggagagaagacagacaaaatcactaccctcgaggatctattagtaataaagcaaggaggcaaacaggcaaataaagtagaccttgtgtaagtgtagtaaaggaaatgaaaaccaggtagcaggccgggcgcggtgtctcacgcatgtaatcccagcactctgggaagccgaggcgggcggatcacctgaggtcgggagttcgagaccagccggaccaacatggtgaaaccccggctctactaaaaatacagaattagccgggcatggtggcgcatgcctgtaatctcagtactcgggaggctgaggcaggagaatcgcttgaacctgggaggcggaggttgcggtgagccgagatcgcagcattgcactccggcctgggcaacaagagcgaaactccgtctcaaaaagaaaagaaaagaaaaaaggaaaaagaaaaccagataatagcaaaaagggaaggaggttgctcttcttgataggctgttctgggaaggcctctctgggctgataatcagctcagatctgaagagaaatgagcggaaaccgcctatgcagaggcaggaaagagcttcacgtgccctaggagtggtttgaaagaccaataagttggggttgggggggcgagtgttatgagatgaagttggagatgtaggcagtggccagatcacacagggctttgtagtttagattttaacggcactgctgttggatgatttcatttacctgatccaaaaatactttctataaactcttgagtgagcccatacaatatgaactacaatgtgtaatagaggttttaagataaagttttatttagttactgatggtactaatacatttagaatctgcttaaaagaacagatattatctcccccatcactgacattctcagtttgttttatttttaagagaaatcaccagactacccaaaaaaagaaaatacactttcctgggaagtctgatagaaaaaggaataaagaccaaaattcctgactttgattctgttaagaatctccccaagagattttgtttagtctcacagttccaggtaccccatatatgctggtggtttctaaacctaaattgttgtcccagcccattcctacttgcagctcggatgtgccttgctagcctggcttctctacctggcacctcacactcaggatgccaaaaaaagttctgttttctttccccgaaatcctgttctctgctgctgctccactgccacctgttttcttttcttttggttgctggttcccaccagccattcagattccagccggacacacgggattgtcctggactcctctgaattcctcatcctcttcccctgg

SEQ ID NO: 1562372 - DNA, 4001 bp, Homo sapiens
gattaatcacttaccttaaatgggtatctgccaatttcagcctccaactcttctgcggtaaaaatcttgcctatgaatcttttggcatcatatattgtgttttgaggatttgaatctgccagctctacgctttcatatcccacatatacatcattgtcagtaaaagacaccatgctgggtatgctgatatgcccattttcatctggaatcacctttacttttcctgtgccaggaaaaaacaccccaacagaacaataggtggtgccaagatcaataccaatcactttaggagtaggcaatggtaaatactgttgtgccaaatagccggccaacaggagagtcaaaacagccgatcctgaaataaaggaaaattaaaagatgtattttatcaaactagtacaatgtactaaattactgtagcaaagtccctttaatatcactcgttgaaacaaggctaaaaaagacaaatttcaaaattttttataggactgctgatagcactcctctcagacagcaagtttttcaaaatgtaaactggttataataaaatttaaaatgaagtaaacacaaacaacaaaaaaccctataactgtatgtttgtgtcattctctaataaatgtaataaaatgtaaaaatatttcaataatatttgtgcagatgctgacaagaaacaacatttatctggagcaaaagccagatataatctaatattcttgatcaattgatatttagattttacagctttataaaaagcttcgattatctttttttaaaagctccattattaaaattctcacaagaaaaactttattattttataagtctaaaattctctcctcgtatctcacctccttttccctttcaaaaggatgaaatgaataaatgggataaaatgattttgaaagttccttagatatgaaactgtcacttcaaaacagaacacagttaactttttatgtatttaagtatgaactagggacttccttcttgcagtggtaatatttaggggagaagaagcataaaggtgggcaaccctgacggcaacatctatgaaagcttcttgaagacaagtttcgttcactgttgtatcccccagaccaggaatagcagatgcccaacaaatactaatttaaaaaaaaaagaaaaaagagtaggaacaaatgccacgcagattgtaaacataagcgaagaaagatgcccctttagtttttaatgaatctcgtatttggtatcaggaggctgtgttatacacctgtgtccgctcatattacatatgacccaaaacatgaattttcagggctctgtgttactaattgttagctcatcctcatcaacacataactcaaagaaataaaaccaagtgcgaatcccactttccacttccagctacaggcaacatttcagaagcatttcatcaccttggagacgcggggtgggtgtgtgtgtgggtgggggataggtaattccaaacccgatgtgatggaaaaagcctccaaattcagcatccctgagccgacagatccggatgtagctcctcccccttcctccacaaaggggtcctggaggtgcacgttctcgcagccttccatagcttgccccaattcaacaggcaattcaaaaacctaggtgctgttgaaaggaacgcctccctaagcctgatgtccctgggatggacacagctggtcgccgtctatcctaccttggcctgcaggggccggggccctcctagaggcgtccccgcccccatccactccgaacagccgaaaaccgtctctaagtcacctttctgactccccttccgctgctccagctagatccaggaggtgagtcaaccacccctgcccactctggcatcctcagatcgcctctacgcccgcaagagcaacaaggacccccgggaacccacctaagatcgtcatctctctggccatcacagtcccgccgaacaggcttgtgatgactgtaccagacgtgaggcaccgcccccactcctcccggcagtcccgcagccccctgggaaatgtagtccgcttgctctgaggcaatcggagaagctatcgctctgaccaaagcaaggacttcatctaccgtgagggcgcggggcaaagagcctccattcaaccgctgccagtgacgactgagtcccccttccacgcaacggccggcaggaccagtgagactgagggggaggagcgccgtggcgagagactggcgtttataatcaaacctgtggtcccgcgatcctacttgagggaaaacaggctatctctttagccccgccccgcgctttgcattctgggaagcggagttccagcctttctctttccgcgggagggaatgaaagggagggtgagaaccgttagttatttctttctttggtcgtgcccctaatcaggtccaggattcgagtttgtgttctttcgttttaattccttttaaagcgcgttcgtttgcctgagatctagcttctagatggcgttcctatagcctcccggagccccagccatcctccgtagaagggtccctgccgcagtgcggggcctgagggaagtcggctctggcgtccgtgctccaacgctgggagcagccctgaaactccagtgaccctcagccgtctgcctttgttttgggataaatgaattcaagcattcttcagtcaattcgatttatccaagggatcagggacacattttctctattgctagcactgacgtgggccattaaaaacaaaaacaaaaacgaaattaaaaagaaaacccttagctctctcttcaagtaagtcttaagtggccaaaattgaccttatgggcaagtcctgtaacgtgacagccattttaggacgcttgtgacatgctgttcaggttctagtctgaagtaggatttttctcgcatcttggtcactggtagcacttaatgactcctctgagagtggttttgtcatttttgctgttagagttcacgataactaagatcctggagaattgaatccattttctcagcttagatataaatcaaaccatccctgttgacaacacgtcagcctgctgtgggaatacattgctggttatttctgacttatcaatgtgaattttgattatggaagctgaattctggttgatagggatccattgtaatgttctctctacttttgcgcatttttaagtatttcataatgcgaaatataaaaagtgtgtgtctatagtgagtgctgttcaataagattcttataaggagtgaagaattcaagcacttagttcttaagtattacttgtaatgggcagtgggctggaggtgttccaggcagacggaactcaattaccaagagcacagaagcaagagatcatctattccatagattagaaagtggtggatcataaagcatgaggtagaattctgagagacagaactagagacttaaaccagattaagattagccgtctgtgacaagcactggtcattgggattctccctgccactcactcctttctccttgctaacaagatcctgatttgttcaagaagcaggtaaagattatgtgatctcagagtagaaggcctttagaattaagattgaactaaataggttgtattcattttctatttctgccttaacaaattaccacaaatttagtgtcttaaaccaactcaaatctattatttttacagttcggtatatcagaaatttggtatgggtctcacttaactaaaagcaagttattagcaaagctgcattcctttctggatgttctaggggagaatcagtttcctgctaatttgagttattggcagaattcattttcttgcagttgtagggttcaggtcttcattttcttgctggctgtaacctgagagctgtttccagtttctgaggccatacacatatcttagctcagagaccctctttctccatcttcaaagccagcaacagcgggtcaggtcctttacagaggacatttttttgcatcgctcttccaaattttagatgtcatgtgtttacattgg

SEQ ID NO: 1562373 - DNA, 4001 bp, Homo sapiens
aaaggctccaagacaaagaggggaaatggggtggggagggaactacaggtggggtgaggctagagacaggcaggaagggcaggttggccctgtgaccaggggtttcacagggcagccccaggctgggcagaggcccccaggtcggaaggcagagggctcggctcccaggccacctgctcggttgggaagtgaactccgccttccctccttgcggctgacgcctccctgacccacggaccacacaaaggagctggtccccctccaggtttgagccacccccagcctgggggcagtcttgagcccgagatgacaggagcttgggacagctccagcctggattggctctgagctcgggcagctccagcctggggtgacccggcctcaaaagcgagtcaccaagctcttgggtttcttctcacagctctaagttacaccttccatcttacctgcccctcgcctggcaagggttcacaaccatctaacttccaacaaggctggagaggtgccccttttggtctcgcggaggtcccctttcctttcccctcttctagaaagataagaaggcatctcccagtctctggggggaggtatctgtagttctgttcctgccagtagcagggtcttcactgcagctcccaccctgaggctggagggcacagaggagctgggggaacggagagaaggggatgagaatggcggggatgagaatggtgggtgatgagggggcaggggtgggagggttgagtggatagagaggagcacaggttgagggatggacaagtggagggcggaggcaaaaaccctcctctgagcacgaaaaattccctagctgccaaaaaacattccctagctgccggagcccacaggtgggaaggaatgcaggatctcagccttctcccacctcctccgagagcccaggacggggatcagactctaagctccccccagaggctggctgttagctttcctgccccccccgccccccgacataagagcccacctcctctagccctggttcccgcctcgccacggatccgccgcccctgccggcctgaagggcagaggggccccatcccgccccccgcgctagtgtcgccaggcggcgcccttccacgagcagaacggccgcgcgggacgcttcccggggcaaggccgtcccctcccaagcccccaacccccgggcagcggaccgcaggccgccttcgggaaaggctgcgagatgctgagcgcgcgttttaacccaacaggaaagccgggcggagggggaaggcgcttggcccgggactgcacactgggactcccagtgcagtgctccccgcggggtcctggccgccgactcccgcccctgtgccccagccccacggcgcccgggagactcaccttctccccggtcagcacgtgcagcccctcgcgcaccttggcaaaggagccctcgcccagcttcctgctgccgatgaggtagttgcccacgcgcttgtggtgctggaagtcgcggagccgctcgcggggcacgccgctcacccaggcaggcaggaaacttccctcgcaggccgccgcgggcctggccgcgtcctccgcgccgccgccgcccccaggcgccgccggctcccccaggagcccgtcccccgccgccgccggcatcgcgctcgccgcggcccgcgcggctcctgctcgtctcccgcgctcgcagctcctcctccccaggctcttcggcttccccggcttctcccgccgccgccctgggcccagccccgcctgggtctccgcacccagagcccggggccgccgcgatcacgccccccgcgccgcccagcgaggcgcgtagacaatagcggctgcccaggggacgcgggaccggggaccccgcccccaaaagttcttcctcttagggtcgcccgggcccctttcaggacaccaggatcccgccccgggtcccgtccaggaagctaatgacagtcgccctgctcgggcgcgcggggtggggcgcggtccggcggcgcctgggtcccggggtccgggtgcctgggtccgggagcccgggtgcctccgcagcctccgcctcgccgccgccgtctggcccgcacgggcttgggtcgggctcccgcgatcgctcctagccgtgcgctgggcggccgctcccgccggagagaagcgcgcggcgggctgccggcgccctctggaaggcagcagaagaaagccccattcagtttgaatttgcagaaatttaatccgctcgcgggcggcgggaacagatgcgagctccactccgcagcccgtgcactttcaaatccctagtagcccctccttccccgcgcgccacagtcaaactcgaccctcgctggagaggggagggcccggggaggggagcggcggagtggacggagaagccacctgagcgccagacagggagaacctgcgcggcctcggaggcgcgcgctcccgggccgcccaggtcgggccgcctccggctgcgcctcttgcccggattctgggcttgggttttctggacctttcggcggtgaaatcccccactggccgcacccacccggggcggggggaagggggaaggctctcgaactccgtggactgtgagtcgggttgcgtgcccggccctgagtccgccacacagtagggccccctggaccgggggtggaaggatagatggatggctggaagaaagggtggggaggcggccaggcgtctgcccgggctcgcacgcagcctggttggctgtgttggaggaggcgcagccacagcagtaatagtagcagcagcaatgtaggaaccagggcgtttgctgcctctgcttgtagcttacaccttctttgccttccattgaaatgatgcctgtgattgcaggaggtggaccggcgctcgcctctcttcgatgcttttgttctgcaagcgctgtgactgtgctcatcgcataaacaattgcaactgccctgacgacactggaccctctcccaggatccccaacgtcttctcaaaccgaaaatgaagaatcttgtgagggagaaggaggagggtaggtaggaggaggcatttacaaaatgctacctgttgaggtgcccgcatttgatggaaacttcaccccgatcatgcaacatcagagctgaaaggaaggatttggtcctaacaaagttcctttcattgtttattcctgagtaaacaagtatgacatcgacccatagcaatgctttgagattgggagtggggggtgggggaacaacagctgtcatcaatccagtgtctgggggtctcgctgacccatctgaagagggacgcagagaaatgcctgctttcaatacatctaattttaaatacgctactatattcatccacctacctgttacaagtcaccagcctcagttattatgacggaacatactgcgttttctgttgttctgtctcattgttcccgtttaccaatattaaagatacagcttaaaatgtttttcttgctgtgctgaagggacttctttgctcccaccggccttgactatttcagtaacgttcattcaatccttttaatgtctctaattcagtaatcaaatcttaacaggacagttgcatgggaggggaatggtaactagcgtggtgccagcagaatagatgtccagcaactgtctaaagaatgaggaatatggagctcactttggggtaaaaaccactctgaggccgggcgcggtggctcacgcctgtaatcctagcactttgggaggccgaggcaggtagatcacgaggtcaggagttcaagaccagcctggtcaagatggtgaaaccctgtctctactagaaatacaaaaattagccgggcgtggtggcgggcgcctgtaatcccagctactcgggaggctgaggcagagaattgcttgaatccaggaggcgaaagttgcagtgagctgaaatcttgccactgcactccagcctgggcgacagagcaagactccttctcaaaaaaaaaaaaaaaaaaaccactctgaatcttccatcagaaa

SEQ ID NO: 1562374 - DNA, 4001 bp, Homo sapiens
aaccaaacctgagctcctcctgtttcagatcctgctgcagctggtgcccctgcctcgggcagcaaattcccctcgtgactccaatgcccctgccatcttgggtctgggagcctttgcaccctgcacgccacaggctcgccacctcctcccgccagcccccaggatgccttccccacgtgggggcccttagtggccgggaccactttggtagcagtgcttaccccagccccccaaaccatcagtttctggggccagctccccatgaagcaagagccccaggagcagggacatctccttctctgatgtccctgcacctccaaggtctgggagacgctcatccctcttctctgtggcctctgcctgggaaagcttgggggctttgtaagtcaaaggttggtcttgtgggaacctcccagtgggctgtccctgagccctggagccacagaaacccctgccccacccacgatggctgtcatctgagtctgcatggaggtgtgtctgtgccaagtgagcacacatgcaccaaggcggcccctggccaccaggggctcttgaagtctgcaggcggcccttcctctctctcccactccccctgttggggccaccattctggctggcaagatggctgtgatggcctccagcaggccccctgcctccacccttagccccttcaagcatttccccagagccaccatctaaacgacagctgtgagaactcctctgtgcccccatttgtctcccacagtgcccatattcatcaccagcccacaaggcccctcctgtctatggaggcctcctcaggacatctgggggcttcctgggccagggtggggggtgcctgctccaggctgtttctggcttgtcccctccctgggtgctgcctaagcagcggcctctgtgtcctttccttggaccctcagcacccctgcatctaacctacccccaccccgagcttgcctcaagacccagcatggacagggccgcctacctgaaggtgtgggtggcggagggctaagacatttgggagggctatgacattccgggacctttaaattctttctctctagggcaggatcataactgcatacacttctaatggggaggggacctggggagtgtgactccggtgtggcccagctctgagctgtgcgggaggcatccctggggtcaggggcctcacaggttcacccaggggagcacaggctgcggaccctacaacgtgggttgcgaagagtatattttggatattttcgcaaaaatccaggaggaagctgtcactcctggttcaggcagccccgccttccccagtgtggatcggctgccgggctgcggggaatcccacgtgtgtgggggagggcgtgtccgcagaccgtgggcaccagctggccttggagagcgctcggccggtcacctccctccttctcccttcttctaggaaatcagcagtgccagggagtggaaggggcagcgcccgtgccccggcgtgcagggtgcgcccgccttccctccctccttccagcgttcgcggtcctccttccctggcagggaccccgcccccgagcccgcccccgcacggctgtgcgtcctgccatgggtcccggtgccaggccccgccgcccactgccgtccacgccccgccggccgccccggcgcctccgccgcccgctcctcggacccgcactgccagcccggcacctccaggcgagccccgcaggccccgcgtccgagccgagctggggacgcgcgggccgagccaccccgcccctgaccgcggcgcctccgctccttccccggctcacctgcccagccgcatggtgcgggcggagacctcgggccgcggagacctcggggcgcggagacctcggggcgcggagaacttgggccgcgggagacctcggagaggagcaacctcggggcgcgggagatcggctctaactgcgctcccgccgcgcccgaggctctgagcgcccagcgcgcggtgtgctggaggcagccgtgtccccgccccgtccccgccccgcccccggcctggctcctctggcgaccgagaccgccccgggacaggaggcggggcgctgcgcggcggctccggaaagttcggctctgcccaggcgtgtgcccgtcggccggaggcgggacagaggcaggtcggcctgtccgcctggacgcggacctgggcgccgtaggtgccctgggaagcgcaggggtggggggtacccggcaggaaggtggccaggggtgctgcgggtgccggcgcagcgagggagggcaccgtgggaggcaagggccgttccccgcgccgcgcacaatgcgccggtcctgcggccctccccgagcaggagtccggggacccaggccccaaggctgggagagcgccaggcccctggccggctgcgctccgatgatctccaggacttaaggcgagtgagctcagcgactgctgaggaatgaatgactgaatgaacgcatgcatgaatggaaggagggagggaaagtgggcgggctctaccctctgggccagccccagcccgcccccacctagccttgctcccctagccttctaggggtgtgaagggcgctggcgcagcctctttgcttaacactggctctgaggatcccccgccgagaaaccgaggcaggcttgcggctctgggctcgtcagccttggcagtggcgtctggcctggagtctggggcagctggtttgggaaaggctgcaccacgcaaccgagggtgggacccagagtccctgctccttccccaccgcacccagcccaccccgccctccctccctgatccctgcaagccaggtgaggcccaggggggacgtgactccctttctgcagaggcacctccggaagggcctgggtgaggctgctagacagggcagcggggcaccctcctcccggagcccccgcctctgggctgaggctcggatccccaccgcctcctgcgcatggaggaggcgagaagcgcagggagacgggggccccagacggcaccccgcaggctgccattccttcaaccaagatgtagagaacgccgtggacaaaagctttaaaaaaattctgaaacctctgcccgtgggaagtcaacatttttgcggagcagagagcccaggcacaaaataagaaggcggaagagacgggctggggggataggggggacggcggcggggaagggcagggagggcggcggcgaaggcgcaggaagccctgaagccgggcggcttccccctcccaggccacgctgagagacgggggttggggggatttaaaatcgcgcgcctggcaggggcggggcgggggccacctgccctccggcgggaagagctgggcagggcccgcggagtgcagggcggaggcactggcggtccgcacccgggtgaggtgaggcgcgtaaccgcatctgagccggactctttaggacgagtcccgtccctggagtcagaaaacccggtccagcgccagcgtggacgtgcgcttcccgggacacgcccagggacgccggctaggaccggcgaggctggaggggtggcgatgttgggggctgaggttcctcgccccggggcgggcggctgctggtaagggaccgcatggccccgcaggtgaggagggcgcaggtgaggagggcgcaggtgagccgggcgggctgcgggcagcgccacctcctcccggaggccctccctgattgaccggccgggaaccgcgcgcctctgggcctgcggctgaggtccggggctgcgccgcgccgatgagctgacgccgggccgagcgctccacccccagggccgggcgcacctgaatcccctccacccgcgggactgcggagagggggacggcccccggataccgcgtgggggctttgggaggatggggaatgggtcctgggggagcagagcctcccaaattaaggcctcccaagagcgcggccggtcatccgcggcggcgaagggaaggtgccctgtcggtgcgtccggaccccgcagccccccagtgccgc

SEQ ID NO: 1562375 - DNA, 4001 bp, Homo sapiens
aaaccaaacctgagctcctcctgtttcagatcctgctgcagctggtgcccctgcctcgggcagcaaattcccctcgtgactccaatgcccctgccatcttgggtctgggagcctttgcaccctgcacgccacaggctcgccacctcctcccgccagcccccaggatgccttccccacgtgggggcccttagtggccgggaccactttggtagcagtgcttaccccagccccccaaaccatcagtttctggggccagctccccatgaagcaagagccccaggagcagggacatctccttctctgatgtccctgcacctccaaggtctgggagacgctcatccctcttctctgtggcctctgcctgggaaagcttgggggctttgtaagtcaaaggttggtcttgtgggaacctcccagtgggctgtccctgagccctggagccacagaaacccctgccccacccacgatggctgtcatctgagtctgcatggaggtgtgtctgtgccaagtgagcacacatgcaccaaggcggcccctggccaccaggggctcttgaagtctgcaggcggcccttcctctctctcccactccccctgttggggccaccattctggctggcaagatggctgtgatggcctccagcaggccccctgcctccacccttagccccttcaagcatttccccagagccaccatctaaacgacagctgtgagaactcctctgtgcccccatttgtctcccacagtgcccatattcatcaccagcccacaaggcccctcctgtctatggaggcctcctcaggacatctgggggcttcctgggccagggtggggggtgcctgctccaggctgtttctggcttgtcccctccctgggtgctgcctaagcagcggcctctgtgtcctttccttggaccctcagcacccctgcatctaacctacccccaccccgagcttgcctcaagacccagcatggacagggccgcctacctgaaggtgtgggtggcggagggctaagacatttgggagggctatgacattccgggacctttaaattctttctctctagggcaggatcataactgcatacacttctaatggggaggggacctggggagtgtgactccggtgtggcccagctctgagctgtgcgggaggcatccctggggtcaggggcctcacaggttcacccaggggagcacaggctgcggaccctacaacgtgggttgcgaagagtatattttggatattttcgcaaaaatccaggaggaagctgtcactcctggttcaggcagccccgccttccccagtgtggatcggctgccgggctgcggggaatcccacgtgtgtgggggagggcgtgtccgcagaccgtgggcaccagctggccttggagagcgctcggccggtcacctccctccttctcccttcttctaggaaatcagcagtgccagggagtggaaggggcagcgcccgtgccccggcgtgcagggtgcgcccgccttccctccctccttccagcgttcgcggtcctccttccctggcagggaccccgcccccgagcccgcccccgcacggctgtgcgtcctgccatgggtcccggtgccaggccccgccgcccactgccgtccacgccccgccggccgccccggcgcctccgccgcccgctcctcggacccgcactgccagcccggcacctccaggcgagccccgcaggccccgcgtccgagccgagctggggacgcgcgggccgagccaccccgcccctgaccgcggcgcctccgctccttccccggctcacctgcccagccgcatggtgcgggcggagacctcgggccgcggagacctcggggcgcggagacctcggggcgcggagaacttgggccgcgggagacctcggagaggagcaacctcggggcgcgggagatcggctctaactgcgctcccgccgcgcccgaggctctgagcgcccagcgcgcggtgtgctggaggcagccgtgtccccgccccgtccccgccccgcccccggcctggctcctctggcgaccgagaccgccccgggacaggaggcggggcgctgcgcggcggctccggaaagttcggctctgcccaggcgtgtgcccgtcggccggaggcgggacagaggcaggtcggcctgtccgcctggacgcggacctgggcgccgtaggtgccctgggaagcgcaggggtggggggtacccggcaggaaggtggccaggggtgctgcgggtgccggcgcagcgagggagggcaccgtgggaggcaagggccgttccccgcgccgcgcacaatgcgccggtcctgcggccctccccgagcaggagtccggggacccaggccccaaggctgggagagcgccaggcccctggccggctgcgctccgatgatctccaggacttaaggcgagtgagctcagcgactgctgaggaatgaatgactgaatgaacgcatgcatgaatggaaggagggagggaaagtgggcgggctctaccctctgggccagccccagcccgcccccacctagccttgctcccctagccttctaggggtgtgaagggcgctggcgcagcctctttgcttaacactggctctgaggatcccccgccgagaaaccgaggcaggcttgcggctctgggctcgtcagccttggcagtggcgtctggcctggagtctggggcagctggtttgggaaaggctgcaccacgcaaccgagggtgggacccagagtccctgctccttccccaccgcacccagcccaccccgccctccctccctgatccctgcaagccaggtgaggcccaggggggacgtgactccctttctgcagaggcacctccggaagggcctgggtgaggctgctagacagggcagcggggcaccctcctcccggagcccccgcctctgggctgaggctcggatccccaccgcctcctgcgcatggaggaggcgagaagcgcagggagacgggggccccagacggcaccccgcaggctgccattccttcaaccaagatgtagagaacgccgtggacaaaagctttaaaaaaattctgaaacctctgcccgtgggaagtcaacatttttgcggagcagagagcccaggcacaaaataagaaggcggaagagacgggctggggggataggggggacggcggcggggaagggcagggagggcggcggcgaaggcgcaggaagccctgaagccgggcggcttccccctcccaggccacgctgagagacgggggttggggggatttaaaatcgcgcgcctggcaggggcggggcgggggccacctgccctccggcgggaagagctgggcagggcccgcggagtgcagggcggaggcactggcggtccgcacccgggtgaggtgaggcgcgtaaccgcatctgagccggactctttaggacgagtcccgtccctggagtcagaaaacccggtccagcgccagcgtggacgtgcgcttcccgggacacgcccagggacgccggctaggaccggcgaggctggaggggtggcgatgttgggggctgaggttcctcgccccggggcgggcggctgctggtaagggaccgcatggccccgcaggtgaggagggcgcaggtgaggagggcgcaggtgagccgggcgggctgcgggcagcgccacctcctcccggaggccctccctgattgaccggccgggaaccgcgcgcctctgggcctgcggctgaggtccggggctgcgccgcgccgatgagctgacgccgggccgagcgctccacccccagggccgggcgcacctgaatcccctccacccgcgggactgcggagagggggacggcccccggataccgcgtgggggctttgggaggatggggaatgggtcctgggggagcagagcctcccaaattaaggcctcccaagagcgcggccggtcatccgcggcggcgaagggaaggtgccctgtcggtgcgtccggaccccgcagccccccagtgccg

SEQ ID NO: 1562376 - DNA, 4001 bp, Homo sapiens
accttgtaatagttgccattcccccatgcatcccaagtaagtatgaagaatttcagcaaattagcctggtgacgccctgcctttgtatttttcttttattatttttgtaaaagaaaaaaaaaaatctcaggacctctcccaactttcttacgcaaaagggaagttagttaagcccagaggccaagtgactgcaacaccctcttccaaacgaatggctgttactagcattatgcttcagccaaatccccaaggaaggataaaaagactcagccatctgcgaagggctaccctgacagatcattcataagtcaattctttgctggtctcccataaacaaggggatgccaactgtaacttcaggtctacaacctaagtctagttcctaaaactaaagtctaaaacataaatagatcgggcgtggtggctcacacctgtaatcccagcactttgggaggctgaagtggattgtttgaggtcaggagttcgagaccagcctggccaacatggcaaaaccccatctctactagaaatacaaaaaatagccggatgtggtggcgtgcacctgtaattccagctactcaagaggctgaggcaggagaatcgcctgaacctgggaggcagaggttgcagtgagctgagatcacgcctctgcacaccagcctgggcaacaggctgtctcaaaaaaaaaaaaaaaaaagtataaataaaaatgtcttcccatattttggacagttttcttagtcttgggtcctagaattgcatttactagtttaaaaagtatgactatttttatgacttctgaaagactgagcaacattacaatctcattgagataacatttcattgagttttgaacatgattatttctttgggaaaaaagtaggtagttaagtaaaccaaaaataaaattctaagccccccaacaatgtgaatggacctctcctctcaacaaatggcattccaaagttaatctgaaaaactagttcaggccttccacactgaccatgtcaattacaagcttatcttctcaggtgcaaaacaaagtcaagactccatctacccagaggcatctgcataactgactccctttactctctttttctcttcaagacactcatggtatcttaaaatacagatttcttgggcactaactaaattctcacagaactatttgccttactgccttcctgccccacctcctgaaaacctctggaaaaccagtcacagacgtgtttgtggctcacgtttttcccggatgcgccctgaagcaggcttagtaaacctcgagaactgacaattatgcttcagtcactccgactgtcattttttattggcctgtatgaatcctgagggcagagaaatcctggccacacttagctcactcccccgtgggactgggcgcctattcaccagattgaggaaatgcatttcgggaaatgttttgtttattatcaaacagaccagcggagccgcggtactttcccggaaagaatcaaactcgacacaaagctctggcaccgccatttcacgggggtgggacccgggcgctcccgaggacccgtacacggccacaggcaagcggcaagagaggacccagaacaccactttctcctggttgatttgcgagcccaggtcgggtttaatctttggcgcggcaaagtggaccgaaggtttcccagactgggcgtctgtcgcccccaacagcatcgccgcccccgtagcccagctgcgtgccctacctcccgccctgcgccaagactctcctccccgcctctcacctgcggctgcggacaacacccatggcgccacggcgacgagcactagggtcgtcgcgcccaggaggacgaccatcatctgggagccgccgcagatcccaccagttacatgttcgcgcacgcgcagctcctctcagccgccatcgccccgtcctaagtcacaccgcccctctgcacacgcgctgcccctcttagctctcaccgcccctctacgcacgcgccgcctcttctgacacacacaccgcccctccgcgcacgcgccgttcctccacgcacgcgcctttcctcctagctagcaccccttctccaagctcccattgccccatcctaattgcagcacccctgtgcgcgcgcgccttagaaatcgcaggcctcctgcattctcttcttcctcactctttccggcctatggccggtctggagcacttcaccatcgcattccaggacgactccccctcacaggaggccttgaccttcacaggatcgcggcacacacctgcgcagacccagcgactttggagttcccgcgtctcttccccatgtctgcagtcggagggcgcgggtgggctcctggtcgcggcccggcgctcttcgtcctcgcccttctccgcccggggcgcttgctgaccctagagtcttggacagtggcgttgggagtccccagcggcctgggaaccagatgaggctggaaggaggaagtggctgagcgaccagaccgttgctgtgtgcagagcgagagcggggcagaggcggtcgagcgctcgttttccgggcgacttggctgaggggcgagatggtcccttggagagaacagccacgggccctgggccgaggggctccaaacagcagtcgctaggctgttttggtcgtcgggctttatcagtaaacaattcgagcccatggttcgaatgattatttaattaaattcctcagtaatagatccagtgcattgtgaaaatatgcgaaataaaatttaaatgatgagataaaataaggaatcaaatacttcgttgttataacaaccaagcaattaattagcaattacataattaaatgaatgtttgtaaagaacaatgcaatggaatatatatgtattccatctatatattccatctctatattccatctatatattccatctctatatcccatcactatattccatctctatatcccatctctatattccatctctatatcccatctctatattccatctctatatcccatctctatatcccatctctatattccatctctatattccatatctattccatctctatattccatatctattccatctctatattccatatctattccatctctatatcccatctctatattccatcactatatcccatctctatatcccatctctatatcccatctctatatcccatctctatatcccatctctatatcccatctctatattccatctctatattccatctctattccatctctatattccatatctattccatctctatattccatatctattccatctctatattccatctctatattccatctctatatgccatctctatatgccatatatattccatctctatatgccatatatattccatctctatatgccatatatattccatctctatattccatctctatatgccatctctatatgccatctctatatgccatctctatatgccatctctatatgccatctctatatgccatctctatatgccatctctatatgccatatatatatgccatctctatagccatatatatatgccatatatatatgccatatatatatgccatatatatatgccatatatatatgccatatatatatatgccatatatatatgccatatatatatatgccatatatatatgccatatatatatatgccatatatatatgccatatatatatatgccatatatatatgccatatatatatatgccatatatatatgccatatatatatatgccatatatatatatgccatgtatatatgccatatatatatattccatgtatatatgccatatatatatattccatgtatatattccatatatatatattccatgtatatattccatatatatatattccatgtatatattccatatatatatattccatgtatatattccatatatatatattccatgtatatattccatatatatatattccatgtatatatgccatatatatatatta

SEQ ID NO: 1562377 - DNA, 4001 bp, Homo sapiens
gtagcacacgcctgtaatctcagctactcaagaggctgaggcagaagaatcgcttgaacccaggagggggaggttgcagtgagccaagacagtgccactgcactccagcctgcgcgacagagcgagactttgtcaaaaaccaaaccaaaccaaaccaaaccaaacaaaacaaaacatgatgattgataacggaagatgatacataccattgactcttgaacagtttgaaggtttataaaggtagcagaaaaaatgagtccaatgtggctttgagtgtgcaagtgtgagccatggaatatatattttaataaatgtttcacgtctatgacagtacctctagggttatgatccttttcatactactttttgaaatgacttttagacaaatcaccattgtcaaattatgtgaaccaaaatcagattttctttaacttttcaataaatacatgagaaactttagaggaaataataggtaagaaaaatgagtcatgtacatttttgattatctaaaattgtggaaaacaactttatgaacaatagaacttacaagttcaagtcattttctgcgacaaacagatcaagccttatcagctatgccctaattgctaggagtgtttatcgaatattttccttagggtagattttgatagagtatctgctaccccctcaccccctcaagcctgcacaggtggatagggggtgggtggacaggatactgagaaaccttggcaagcagtgggacttagcccctgggccagtgagcacacatgggaaactccacctctccctgagccagctccggcacttctcaccactgaatcaacgcccaagcatgctatattcgtttctaagacttcttgctaaacaaaacaaggaaataaaaaaaaaaatgttaaaagaaaggaggtgggaatactcagagtcaatataaccatcgctaaccaaataaacgggctgatggagtcaactcgctactgcgtgtaacggattgatttgctcagggttgaaatgcaagtgccgatcgcctctccatattcgcggagtatcttcccagtatctcccctctccgaccctgggagggtgcacccttctgtctccgcggccacgtcccctcgccccttccccctcctgcctccacgcagcggatccggaggggtgtaggccgctccagccccggctgcagtctgtgaccctgacgcaggtcgaggggggctaatcccaggggacctcaagggggcgggctggagatcccgaacctgagcacccagctggtgagccggttttgcaaggcggggtggacctggaggaatgtgaccctcaaacttagcaacgactcacatcttgcagtggcaaatgcccggtatcctgggcatccttggtggggtggggtgggacgcggaggggtgcaacgaaagcggactcccagcaggggcgacgcgtggagggcgcaggacagggcccgggaggggtcctggggtcgcaggtgcggccccgggagagaggaagggcgcactagccgcatactcaagacgcagagggagggcaggaggaggaggaggagtcggggagagcgagagggaaccggaggggattccgggaaccgctgcagggaggcggcgttttccctccagtcagctggccacgcgctccgctcccgcgaccccgccacgctgcgttacctttgcagctctcgccttgcggctcccgagagatgctagcctcgggccccagccgcgcccggctctgggacccgacgctcgcggtcaggatgcgcctcgcgggcggcctctcggacagaagcggcgggcgggggacaaaagcggcccgtgcggccgggtggtggtccgcgggctgcgctcggggaactgttcggctcgccggcgggattcctacccgccgggaagaagcgtctttagtgcgggtgcgcgcgccgagccccggcctacgaggagcgatacggaagcgcgggcgccgcgccgccgccggcgcgggggcgggggcggagccaggggcggggccggagccaggggcgggtcctgggccgctggcggggctggagcagggccggaggcggaggccgggccgggggctgggcaggagaatagaaaaaaggtccggtcatttacaatcgtctgctgccgattgtcagctcctaaccaatcccgccttcgccgagaaagctccataggggaagaatttgggactgttttgtttactgaagtatccttaggggttagaatagtgcctggcatttagaagacacccaaagatgtgttgactgactgaatgaatgaatgaactaaagagtgaatgggttctctcctggctcccccacttgttaattgtataaacctgcatgatataattctccaactagtaaaacgaggataaaaatacctaccattgagtaaatgttgtaaatatctacaacattatccgttgtagattctcccctcttctccgcgggtctcttctccatactcctacccttccctcgaccccccactgatcaacgtgtttcgggataggcagaaagacagatgttcttcattaatttgtctgcttgttatttatagcctgtcaacttctaaaatagactatgaggccgggagcggtggctcacacctgttatctcagcactttgggaggccaaggcagatggaccatctgaggtcaggacttcaagacccagcctgaccaacatggtgaaaccctgtctgtactaaaaatacaaaaattagctgggcgtggtggcgggcgcctgtaatcccagttacttgggagcctgaggcaggagaattgcttgaacctgggaggtggaggttgcagtgagttgagattgcaccattgcactccagcctgggagacaagagcgaaactctgtctcaagaaaaacgaaaaaaaaaagaaaatccaaaaccaaaatagactatgaggcagctttcaagtaaaatgtatgtatattctaaacattacagctactaaaatggaaatgttaatatctttttgaaggagagggaaaagatacactaaccacctaaattgttttaactgagtatttaatctctcgttcagctttctggcctcctaggaaagggaggaggaggatgtttcatactttttgtagatgggaaaaatgagccttttaatctatgaagtcaaccaacatttgctgatactcctttaaggctaggcacaagggtgatcataaagaggatgtcacggtcctgcctcttatgtgacccttggcagaattcccaccagccccatacgatctgaagggaacttatctaggatcctatttcttataaaagacattcaacattgaaaatattttcagccacagttttagagaatttgcagaaatagcctctgaaaatgggagaaatccaataccaaactccatgtgctgcatgcactcttttatataaacatatatattaaaaataaaactatgtcaaaaccttaactatgacttattgcagattggatgatagtaggtgatttttattttgtttcctttccaaacattctacagtaaacatccttacttatataattaggaaaaagattttttaaaaaacaaatgcagtcctggctaacacggtgaaaccccgtctctactaaaaataccaaaaaaaaaaaaaaaaaaaaaaaaaaattagccaggtgtggtggcgggcgcctgtagccccagctactcaggaggctgaggcgagagaatggcgttaacccaggaggtggagcttgccgtgagccaagattgcgctaccgcactccagcctgggcgacagagcgagactccgtctcaaaacaagcaaacaaacaaaaaacaaaacaaaacaaaagcaaatgcagtctatgccaaggtgtgaagagcttgaaagctgtcactccactccccacaacaagagaaaagctgaacaaattgaagattaacaactcttcttgtttcagtatcagtgaattgagtcacagggcaaactgcaaaaactgaaaga

SEQ ID NO: 1562378 - DNA, 4001 bp, Homo sapiens
ctcagcctcccaaagtgctgggattacaggcgtgagccaccaagcctgggtttcttttggtttttatgtttggctcataagcgtggtcagctggtgtcagaggttaaggaggccgccaggtaagaagctctctgggtagggacagaaccggttttaaaagcctggctcagctgggcacggtgcctcaagcctgtaatcccagcgctttcagaggccaaggcgggtggattgctggagctcaggagtacaagaacagcctgggcaacacagtgagacctcctctctacaaaaaatacaaaaattggccaggcgtggccaataataccaccttcttgggaggctgacgtgggaggatcgcttgagcacgggaggcggaggctgcagtagctgagatgctgcccactgcactccagcctgggcgacagagcgacaccctgtctcaaacaacaataaaataaataaatgcctggctcagttgacactcttcctcttccgccccaacactgatgggacccggacagttctgagccctgcctgaatgctgctgccccatctctatgaccgcgggaactgtctagatttcacacccagtgtcaaacatgccctcggccaaagtcggaattgagtctgggtcacccgtccaagacgctggtccctgctccaccgctgctactacaaagggactgagtctagcttccagccaggccttcgggaggcactccaggcggggactaagcgcagtctcgccaggctgcagaaccagtggccagcaaaggcggcccccgccggagccctggattcaatttgctgttgttcattccgagaaattcggagactggggccacgctggctttcccggcgcgggcgcgcgggtgggggaggtggcgcagccgaggttaccggcttcacggaggggcaccgagtgtcctctcccggagaggggtgtcccggcggccaggacgccaggaggggtgccccccgtcttcctgctgctgcccagctcctgtctggaactcctggccgcccatcccagccccgctgcgggctcccagcgggcccctctagccctgggcaccccgcaagacccccacctggggcacccgcaggttcccacctgatctgagcactccgcatatcccacccaccaggagcaccccgcagattcccacccactctgagcacccggcagattccccccaccccacgatccgggagtcccccagcccccacatgctgcggctgcgcccgcgtcccgccgcggaggcccaggcccggctcacctggcggggccgcggcggcggcggcgaagactccgagcagcagcagcagcgaccacagcagcgtcggtcgcatggccccgggcgctcggcggcggctcaggtcgcggccggggccccgctcggggtccgcggagccgctcacgtcgccgcccaaaccgccatggcgagcgcagggcgcgcagggcccgcctcttcccgagcagcagcggggcgtcccggtggaggggattcggctcggccgcccgcgcccccgcccccgccccgtcccgcccccgaggccaccgcccccgcgcgggactttcccgctccgggaaccgcggccctggggggcctctgcggctgcagcgcggggaccccacgcagccggcctcccagagcgcggagcctcccggaacgtcctggagactggagccccgcgggacgcccaccttcgggggccgcgatccttccggaagggccccgcgagaccccggcccagacccccgggctttccctggagcccccacccctcctgaccccccccaactctcctctcgggtgcttgatcgcacaattcgaggattcgcccctttagtcgaaatgtttgctttaatagcccccaaagtacatattaagctttcaactctcccccgcccccctccccttttttttgagacggagtcaccaggctggagtgcagtggggcgatctcggctcactgcaacctccgcctccagtcaaccccattttgaaaagggttttaaggggaaggagttagaaagggcccagtgaaggaggaggtggggctctgggggtggggggaatggcctccgagcagggggagggagagacagaaacttccagcatttctaaatggcgtggggtttgccctggagccggcggcggtgcacgagtaggaagtcctttagcagctgggcagccgcaggcccgctccccagcccgagcctgcaccatgtcgtttgacgcctgttgggagagggttttaaatctgccctgttcttccaagatgcgtcataaagctagcgcagcaaaggagggacgcggtgcagggagaccaagaatttaaaaacaggtcgtcccgggagcccactggacacgttagcaaaaatgggttttgcaacatagagcttttcttttgctcttcccacattcttgcatttcctctttgtagaactattttgaaattggccacgctcgtgaaaatacgtgatgaaatacctcgcagacaattgaattatgcattggatatttctagatacagagatgtatttatatgttacacgaaaaaagcgggcgataacttggaatcacttcaaaaagtatgcactgatgccaggcgcggtggctcacgcctgtaatctcagcactttaggaggccgaggtgggcggatcacatgaggccaggagttggagaccagcctggccaatatggctgaaacccgtctctactaaaaatacaaaaattagtcaggcgtggtggccggcgcctgtaatcccagctacttggagggctaagacaggagaatcacttgaacccgggaggcggaggttgtagtgagcggagattgcgccactgcaccccggcctgggtgacagaccgagactccgtctcaaaaaaaaaaaaaaaaaaaaaaaaaaaaaaaaaaaaaaaaggcactgaaaatgacaggattgcaagaaggattctgttttcaaacaaataaataaaattacaagaaaacgactgggtgaaagatgccaacattctaacaagaaatcggttacaggatcacacaagtgtcatccgcctcaggggatgtaaccgaatgctggttcagtcgctggctgcttgcagagtctaacaagagcaagatgtggtggaaagaaagtgactttatttccaaagctagcaaggggaagtggttggattcctatccccaaagcaatcacgttgaattgtggggtatggggagtgggaaaggcaagggttatttattttatttatttatttatttatttatttatttatttatttatttatttgagacagagtctccgtcacccaggctggagtgcagtggtgtgatctccgctcactgcaagctccgccttctgggttcacaccattctcctgcctcagcctcccgagtagctgggactgcaggcgcacgccaccacacccggctaattttttgtgttttttgtagagatgggttttcaccgtgttagccaggttggtctcgatctcctgacctcgtgatctgcctgcctcggcctcccaaagtgctgggattacaggcgtgagccaccgcgcccggccaaggcaagggtttaaaacgggaaaacgatgtggaagtcaggcaaggattatgctaagtacactgtctgtttgtcttgttccggtggctgtcttgggtcctagtccacaggaagcctgtggtctggcatcatctcaacaatggctggattcttaattagacgccttgaggtcacatgtggaattttgcagaagaatctccaggcttggtctgtctgtctcaagattagcgtctggaacctctaagaaggcacgtaactagacacgggcatacagttagataaatgtgaagggagtttatacggtgaagaagggagggacatggagtccattttaaggctaagggaaaaggcttctgcagtttgtttcaaggttacatctttgatggctgggtgcggtggctcacgcctctaatcccagcgctt

SEQ ID NO: 1562379 - DNA, 4001 bp, Homo sapiens
cccacccaaatctcatcttgaattgtcctcccataattcccacctgttgtgggagggacttggtgggagataactgaatcatggcggcagtttccccatactgttctctggtagtgaataagtctcatgagttctgatggttttataaggggaaatcccttttgcttggctctctgattcgctcttgctgctgccatgtaagaagtgcctttcaccttcggccatgattgtgaggcctccccagccacatggagctgtgagttcattaaaactctttcttcccggtctcgggtatgacttcagcagcgtgaaaacagactaattcaccaggttagttgtgttatccactaattttatgcagtggctattcagagagcacttaacacttagcctaggcaggagaaagcaactaaccaagccaagtgcctgcccttgggctgaccttccttagggcatgctggggtcagccctagaccctcaccagcagcctgaatttctccaaggtgcttttgccaggcaagtcctgaggaatgttttactcacttgaagggcgaatagaggcatgttagaaattgtaatagtaggcaataaaaacaatgatagctaataataataatgataacaatggcaaactctgagagccctgacagtgtgctgagcccccattccgaaagtgtcttattattcacagcacgcaagcatcaggagtcccgtgagctgtgttaactgttaactgtgttccatcagcaagcaaacagaacccagagcatgctgggagaccaccttctttggaagacccttctgagttgaattattgggttttagtaagaataattattcctcagttattgattcaaaaaaataaacctctatgctgaaagggattaggatatgccaccccaaaataagccattttggcatataaattattttgagctgaagataattgagaaaaagtagagatagaaaaagagggatgggagcaaccccctttgggacccctccctttgtatgggagctctgttttcactctatttcactctattaaatcttgcaactgcactcttctggtccgtgtttgttacggctcgagctgagctttcactcaccgtccaccactgctgtttgccaccatcgcagacccgccgctgacttccattcctccagatccggcagagtatctgctgtgctcctgatccagtgaggcgcccattgccacttccaatcaggctaaaggctcgccattgttcctgcatggctaagtgcctgggttcatcctaatcgagctaaacactagtcactggcttccatggttctctcccatgacccacagcttctaatagagctataacactcaccgcatggcccaagattccattccttggaattcgtgaggccaagaaccccaggtcagagaacacgaggcttgccgccatcttggaagtggctcaccaccatcttgggagctctgggagcaaggaccccccaccccccgtaacattttggcaaccacgaagggacatccaaagcagtgagtaatattggaccactttcgcttgctatactgtcctagccttccttagaggtggaggaaaataccggacacctgtcggccagttaaaaacgattagcgtggccgcctgacttaagactcaggtgtgaggctatctggggaagggctttctaacaacccccaacccttctggggttgttggggacattggtctgcctggagccagcttccactttcaattttcttggggaaaccaagggccaactagaggcagaaagctgtcgtcccaacctcccagcagtagctgattgagatcatggctcagccagaagtctctactcaacagtcgcccacgcatgcgcccttacctttccttctgacccatacctcctgggtcccgaacacgactttcttgaaagtatagccccaaaattctccttacctctgaatctacttcctctgatccctgcctcctaggtactaatggttcagactttcatttcctctagcaggttgtatctccaaagggatctaaggaagccctacgctgcgtcctcaggcacctaggctatagcccagggagtcttatccctggcgtccctcctaatttaggtatacagctcttgacatgagcagttatgcaggacccattccccaccacccttgccagggccccaagtttgtaatggctaagagagagacacggagagagagagatggagagagagagagagagatgaagagagagagagagacagagaggcaggttcttggcctcacggattccaaggaagtcaaagagtaaaagaaagaaaaagaaatagttaaaaaaaaaaaagtgtgccctattcctttaaaagccagggtaaatttgaaacccataattgataattgaagatcttctctatgaacctataacactccaatgccactttgttgtcagtgtaaataagggcgtagcccgaaagcactgaggccactgacaacccatagccttcctgtctaaaatccttaacccagtaacccacggatgagccaaatgcattcagttggtagcggcaactgctttgctaaaagtagaaaagtaacttttagaggaaacttcgctgtgagcacacctcaccagttcagaattagtctaagtcaaaaaagcaaagaggtagcttactaactcaaaaatcttaaagtatggggccattatgttagaaaaaagtaatgtaactccaaccgctgataattcccttaacccagcagattttctaacaggggatttacatcttaattaccatacaaaggtccgaccagacctaggaggatcttccttcaggacaggatgatagatggttcctcccaggtgattgaggtaaaaaacacaatgggtattcagtaattgatacggagactcttgtggaagcagagttagaaaaattgcctaataattggtctcctcaaatgtgcgagctgtttgcactcagccaagccttaaagtacttacagaatcaaaagactatctcaatcctgactcaaaaggttcgctacaccctctctgaaacgaatttgcataaaaactgttgtttatgggaatgcatcttgatggggcagctgggttgttatgaaatactcaggaacccagcccagctctaggactcactcctgagcgcaaaggcaatgttgggcacgctggtaaaggaccactagaatccagcagcccggacccctttctttgtggtcaagaaaggcgggaaaacaggtgcaggactgctacatcggtgagtgtaactaatccgataagcagaggtccatgggtggttacgcaccctggaaaggaataagcattaggaccacagaggacactctaggactaatgctcatcagaaaatgactagggatgctggcatccctatgttcctttttcagatgggaaacgttccccccaaggcaaaattgcccctaagatgtattctggagaattaggaccaatttgaccctcagacgctaagaaagaaatgacttatattcttctgcagtaccgcctggccgtgatattctcttcaaggggaagaaagctggcctcctgagggaagtataaattataacaccatcttacagctagacctcttttgtagaaaagaaggcaaatggagtgaagtgccatatgtacaaactttcttttcattaagagacaactcgcagttatgcaaaaagtatgacttatgccctacaggaagccctcagaatctacctccctaccccaacatccccctgactccttccccaactaataagaaccccctcttcagcccaaatggtccaaaaggagatagacaaaggggtaaacaatgaaccaaagagtgccaatattccccgattatgccccctccaagcagcgggaggaggagaattcagcccagccagagtgcatgtaactttttctctctcagacttaaagcaaattaaaatagacctaggtaaattctcagataaccct

SEQ ID NO: 1562380 - DNA, 4001 bp, Homo sapiens
tctcctcaaaacagatgcccatgaaaaagcccacatccagcacttggttctcctctatggctccatgtcttcaaaggccacgtgggtgagggagggagagacaggttggctgtgctgaggagtctagattttctttgaacagccgtgaggagaaatttctggaggggcaggagtaaaatggggacagacaaaggagccttggatttgtctggtggcagaaagctatgagggggtagggtgggcacatggatttcagatatatttccagacgtaaaaacaaactggagacttcctgatacatttgatgcataaaagctgaggtcaatgtccattttgggcttaagcagctggtgccccgattggagctcagctggggaactcacgagtcccatttgagctgcattaggttggagatgctggagagaggctgaagtaggaatgtcagggagacagccagatgaatgagcccagaggtcacaccaagaagagatgtgggctagagacagaaattattttcaaaccttttaatagaaaattcgaaacctggccaggcatggtggctcgcgcctgtaatcccagctctttgggaggctgaggaaggtgaatcacctgaggtcaggagttcgagaccagcctggccaacatggcgaaaccccatctccaataaaaatacaaaaattagccaggcgtagtggcacacacctgtaattccagctactcgggaggctgagggaggaaaatcgcttgaacccgggaggcggaggtggcagtgaggcaagatcaagccactgcactccagcctgggccacagcaacagagcaaaaccctgtctcaaaaaaaaacaaaaaaacaaaaaaacaaacaaacaaaaaaaaaaacggaagaagaaagaaagaaaagaaaatttgaaacctacatgcaagtagaaaagtagaagactataataaaccaccacccatcacccaactggtaccaagagagatataaatgtgcgagtcatgggcctatagcccgtgtttaatgccagggtttggctgaaatcccccaaaggaacagtgccagggaaggagagaaaaggccttgggcatcacaattagctacatagaaacctgacagagcaggagggtcccaagcagagacagcctgacagggcgggaaaccggaggggtatcccggaaggccagggaagagttcatgagaaaggaaggaggtgaccatggtgttattggaacctaggcagtcaatttagaggacagaaaaggtttcaatggatttaggtttagaagccatggagctggggcgctgggggacagaatccagatttcagggtgctcgggcctgaaccggaaggaggggaggtgcagcgggtgatgggaggcacatctgtagggagggctggcactgagggggcagacttggggtcagggagggctgtcagggcactcggggactggtgggggcctccacttgaactgatagtctccagaagggtcagatgacagccacggtgggatcttgggtcttttggggaagctactttatttagacgcccgccagcagagagctgcaggaggacagggaatcaaaagacgccgggagtctccccctgagtttagggcccagacggtctgtaatccgggcgcggatggggctttctcctgttacagaatcgacggcagcagcagcctagttgcgtctcagcagccggccgtggcgtttgcatcttctctcccgaggccccgaaggctcttaagtcacttgcagggcgcccagggatgggatcaggggcggcatctcgcggggcctcccggttcccaagcgcgccccctccccgcggacccctcacctgacaccagcaggcagccacccagccagctcccaaggctccacgccatggacggacgctgggggttccgcggcttcctccaagcacacgacccccgcccgcgcccgggagagcttgtccgcggcggcttccgggaaccagcggagatgggcggggcggggtggggaggggccgggcgaccgggctcccaccccgctgcaggccccgcccaccagcccgggtccacccgcgaggcgcggggcacaggcttggcagatgcacacgaggaagaggaagggatcctcgcaagctttgaaaggcgccgtcaagtcaaataaataaatgccctacaacaccaacccaggactgagatctgcatgctggaatgacggtggtggtggtggctttcagtattccccaggttttgtccggagcaccggcacgccctctcttgaagtccgctctccgcacaggtgagttaaaagcacttcagcagcaaatccagtttgagggtcttctttacccttctccccagggataaacaacacaaaaccaagtcatctttacgcaaataactagtttctttcagagactactaagaaagcgttaatttcctctttttaacttgattagtggttagacgggaagatccggagctgtccagtgtcttgggtaatgcacggcatcgcctgatgtctgacgctagaacaccacgtaaagtcaagcagagggaagtgaatgcgccctaggcccctgcaggccaccaagaagagctagagggagttggtgcaatcctagagatgccggcaggtgcaccaatctgtggcacacgtacgctctccaatggaagacaactcaagaccacaccaagtttgtattaaaaaagtactgttgtgttactttttaccaacctccaatcattatacaaaatgttaaaaaatacacaaacacacacacacactcacagccatagaggttatcgcaaaagatcaacccagaatctttcagaatatgacagatgcactgagaaggcagataaattgattcaatatacaaaaggcctctttcctatggaatttcattagattaaataaggtgttccctcctcacagcctcatccttatgagcaatcatataaataatctatttaaagtccttgaactataacttgtataatttttagttttccccctttgaaggggcctaagagaaaggtttgagaaaccagctcttgaggggggcaggggtgaggggtaagaggtcctgtgcctttcattcatcctgggagcttctcaggattgcagcatttccacctgagtgttcattcttgtacattttctcatctttctcctgggttcctaggatcttggagattacctagtccaatccttttacttcagaaacaaaaaacctgaggctcagaaaggctaagtcaaatgcctagggtcacacagggaaactgtgggagttggatccctgagtcccagtccttaaactggttgctacatgacattctagaacctctccccaccaactccctttttaaagacagggtctggttctgtcacccaggctgaagtgcagtgacatgatcttggctcactgcaacctccgcttcctgggctcaagccattctcccacctcagcctcccaagtagctgggacaacaggcacatgccactacgcccagttaatttttctaattttgttttgtagagacagatttgccatgttgcccaggctggtctcgaattactggcctcaagcgatacgcctgtttaggcatcccaaagtgctggggttaccggcaggagcaattgctccgggccagacttcccttcccccgcccacacccccccaacccggcctagatccacaggcactgtaatcacagctgacacactcgactcggaatcagcatagagagcactctgaaaattgtcaaatagggtccctgaaacttgtataccatacttctcctgaagatcttgaagcatctttgtgtttgctttttttttttttaacttaaaatatggcattcaggttttatccctctccccgacgccatgtttcctttctgtattagtcacacacgtgatcctaaagtctgtcttccccactttaactggggagggctggacaaggtggaattccaattgcaggagacaggatgtga

SEQ ID NO: 1562381 - DNA, 4001 bp, Homo sapiens
tgctgggagtggaaactcatacgctgagcggcagtgacgctgcggagctgacaaaccccacagcccgcccggtcacctgcttcaccgagggccacagcccccccggggtcaggtggccacaggggtcctggccatgtgggacatctgttctgtggccctgctcaggatggcacccggcggggactggccctggggccgaggcatgggctcagccgccgccctgcagggacgtagccagggacctcttcccagcagagggactcccccactcatccccagaatactgaggggcacgctgggtgccaggctggcagggaccctggggattctgctgtgagctggatggggaaggagttccttcctaaaatgtggagtctggaggccactcttggtaaagtgctggcccccggggattctgcagtgagctgggcatggattctgcagtgagctgggcttcactcatggtgaaacgctggggtgacggcagacagcccagagcttctagcagctcatttctgtgaagcctccagaatccggcctcagcccccaaacccgcaggcgttgcgccaccgtcacggggaaggcgagtgacagcgagtgtcccctatgcccccacagctcgctcccaggctgagctctccggccatccccccccttccccattgcagccatgccacccctccttctccccacccaggaactgacagaggagaggggccccggatggacagggacagcagggcagaatcccagctcccagatccaggggaggggggattgggtgtggggacggtggtgcaaggggtggtgccaggggtggaggatgcatggggagggctggccccaagagtgcagtgttgggggaagggggccaggtgggcctgggacccaggggcgtggcttcaatccccctcccaccaggaccttgggaatggcctccaggagcctgttgtggggaggccagggtcaccagctgaaccaactcgaccagaatcgcacagcggtgcccgctcccctacagcaagacgtcacccaggggtccccacggaggaggcagggaagctcgagggtcccagaggagcatggagcatgtgccacaccacaccacactacattacacatgtgcaccatacatgtacatacaacagactccccacatcacatgcgcacactcgcacaccatacatgcacacacacacaccacactacgctatgccacacacgtgcaccatacatgcacaccatgccacactacacacacgacactacacaccacgaaccacaccacaccatatcacacaccacacactgcgagtcgatctggagatggaatcgctgtagccaggcggggcagcatgcagacaggagggcctaacacaggcaggcgcagcaggttcacagaggaggccccgggaacctgcctcctgcccagcccggagcaccaggaccccccagccgtccccctaggggcttgtgggcccagcctcttcctggccttgccggcctcacagccccttgtcctcccatgccggccccatcctcagccgcaagcgctcccagcacaccatgtggctctgctcttggtggcaggcacttccccttgccgggtctcaaaggggaccctggagcagacggtctggagaccccttcctgccagacacccctgggccggggctataagcagggccaccagggtcactccaggctggggcaggagagtgcttccctccaaaaatcaccgtggacatagcggggcctctgcacactcaccctcggtgtgctggagtcctcggcggtgctcctggctgggcgtgggggctttgctaccagtctgccctgggtcacgtctagaaacctcagctggaggcgcgggtcgtaaagtcctgacacttcctgttcctctcagctcctccttggaggaagtggtgggttgcaccaccgtggcccttcacccctgcccctctccgctctacagcagctctgatgtcagagagcggccccttgagacaggtgggacatgtcatttctcacatgaggtcccggcgagaaggacctgcttccatcagattcacacttgggagaggggcccggcctccaggagcgccaggcagaaagggcacccattaggaagaagaacacagaggccatgggagtgaaaagtttgatgctggaaagcaacagtagcacattctgctacagagcggaatgaaaaaccctggggagcaaattcctgagccagagaatggagcggaggaaccagccaaggaggataaagaggtgggaacaggcaagaaaacctgggtgcgtgcacgcattgacatccacctgcatgtgagggcgggaggggacagaacagggacagcgaggaggagacactcaggtcacaggaggaaggctgcggatctgggcggggacgtggattgcgaggccactgaacaccccagggatggatggatgaggtcctgttaactagggacattaggaggataccacagaacacgaaagggaaaatactacaggctcagagagagagagaagggagaggaggaggaggaggaagaggagggaaagagattatacctagaaaaaaaacccaaatcagacatcttcagagcaaggactcagacacattactaccctaaactctgttttatttatttatttatttttatgttttcagttttttttgagacagagttttgcttttgtcacccaggctggagtgcagtggcgtgatctcagctcactgcaacctctgcctcccgggttcaagcaattctcctgcctcagcctcccaagtagctgggattacaggcacatgtaccaccacgcctgggtaatttttgtattcttagtagagacagggtttcactatgttgaccaggctggtcttgaactcctggcttcaagtgatccatccacctctgccttccaaagtgctgggattactggcgtgagccatggctcccggctcctaaactctgttttaaagatgtcttgcagaaatagacatgaagaaatccatgagaaatacaagagcagatgatacaaagttgggcaaagaaataagtaaaaattatgatgtcataacctgttgatttaaaaaatagtggtaagaatattaacgctgtgaaacaaaacgcctagaggactgggttgggaggggccagggagcacattgccgttccatcctatctggggaggaatatagatgcttgtcagtgggcattttgatagaaaatatctaagtatatatgctaacaattcaagagtctccttaagaataaaaatagcatgtatatacctgaaaaaaaatatgacaaatctttattttgggcatggtggctcaaacttgtaatcccagcactttgggaggccgaggtgggaggatcacttgagcccaggagttcgagaccagcctaggcaacatttggagacccagaccctcatctctacaaaaaaattttctaagaattcgccaggcatggtagcacgcgatatggtccaggctacttgggaggctgaggtgggagaattgcttgagcccaagaggttgaggctacggtgaaccatgcttacaccactgcactccagtctgggtaactgagaaaaaaaaaaaaaaaaaaaggcaaatcctttaaaagaaaaaagtaagggaaaatagaacaaacaagaaaggtaaataaaaaccaaacaataaaacattgggaataatttcaaacccatcaggaatcacagcacctgtgaatgggttacattttcttgttttaaatcaacaaggtcttgcgttgggttttagaaataaagagacaaaacaagttccaatgaaatgttctctgtcaagggtatcttctcattacagacttagcctagaaaataatgaagaaggacagaaagagaataccattctactacacccgctgatgacttaaagtaagcaatgaccctcgctgcgaacgtcacggacgcagcagacgttatgcacacacctttaatgaatt

SEQ ID NO: 1562382 - DNA, 4001 bp, Homo sapiens
ttgagcctttccctgtgcttgcctggcagacctgcgtgctctgaggctgcccgaccctgagctccagaacagaccatcgagttcaggagacaagcatgtcagccatgacacaaggcagatgagagggacccccagcgtccacacgtggaggcagcgggggcagccggtgagcatagatggggaaggagattcagagcctgagggctgctctcctgccctcccatcctggacactggcctgggccccccagcttcccttcgcccagcttccacccccataacacacaaccccagagcttgggaaggaggtctctctgtgacaggtgggattctggaagtttccacggaggagaccccataggagcagggtttgaaggtcaagaaagatgctaaggatggagagggccagtggggagagggtggttccaggctcacttcacagaggtgcttggggagctgcaatattttggcagcaccaagggaagagtcaggtcagtgaggttcataagggatgagaaaggagtctaaccagccctggagacccctggggtctggccccacagggagatgtccaagtggcagaaagtcccttcctgcctggagagcacccccacgaggaccctggggccacccgggaaccgctgctccctcccagtcactcaccacacttccctctcccgcccaccctccaacctgcctgcaaattcccctgcaacccaactctggtctcctcccaaccctgcccccacgtaggcctttttttttctttttcacttcttccccccagtgacttccttctgcagtgttgattcagctccctttgaaggcgggtgagaccttttgcaggctgggggcaggggcgggggcggagaagagggctgcaggcagggctggcagaggggaggaggtgacacacactccctggaggcgagtggggagggctcggggcaggaaatggagttgggtgccccaggtggggtgctccaacgagctctttctcatgggatcccccacagatccatacaaacaggctgaccatcagggctggtcccaggccaccaggctgggtgcaatgcagaaatggagatctgccccggggaaggcaggtgagtgtaggaaggagggagggctgcgagaagctgggggcagcctccatccccctgtggcctgggtgggcctgtgcccccccaaccccccgacgcagcttcccacactgggagcacagttcctccctcctctgccttcctctgcgtggtgtggctcctccttgagggagagagctgaggaggtggcattcttgcttccctgactcacccaaaggaagatttcacagcccctggcaagggctgccagacaggctcacctgtcaccccctgtccagggacagactgaccggtagccttggctgggtggggagttatgctgggaagtcttccaggccccctgggggtgggaagatgctcaatgttcaaaggagatggaacgaggaaaacagttaagcaacgatggactccagggggaaaaccggagaagaagaaactgtaattccagtccgtccacatggcccagcagtgaacgacaattgcatggtcagagagagcaaaagcaccacgccgactgaaagcagctcgaatgtggtggggcagtgggagataatgccctcatctaccaaaacaagatctgccaccttcgcagaccactaaacctcattcctccacccacctccccacccccatgaaggccaactgaccagagagcagggctcccgagggtcgggtcgggtcgggtcgggttgggtcgggtgggtgcctcttaccctaactgaggctctgccctggactcggagtccacttgctgtcaaagcatgccactcttctttctgatacttgacatatttcttttcccgttcaattcatggtttctgcccaaacggagccacgtgaggacttctttggggatgtgtctccaagaaaagtgtgggctgccttcctcaccctggatgcctgtgggcagccttcctcaccctggatgcctgtgggcagccttcctcaccctggatgcctgtgggctgccttcctcaccctggatgcctgtgggcagccttcctcaccctggatgcctgtgggctgccttcctcaccctggatgcctgtgggcagccttcctcaccctggatgcctgtgggcagccttcctcaccctggatgcctgtgacttggtttccatgggggcttcctaagctcagggaccccaagcctccatcaaatctaatgacccgccttgtctctgaacacacctgtgttgtccccgagcccctcaccaaccccctctgcaacccggcccacgcatttcccatcctgaagggtccagctcataggccggcccatgtgttccctttacccctgctttgtccctacctggtggggagctgtcccttctgggccctagtgtggcacttcacacacaaatgtgtcctgtgggtggtatctgggcctccccctgcagtgaggggatgaccaatgtgcagagctcactgggcctggatatgggctcgggtggcacagaacagagagaaagtgctccgtaaaagtgagctgcgatgcggaggtgggcaagctcttccctggagggggaagagctctcaacccagagggatctgaccaggaaggttcaccccccctccacccaggaagcccctgcagacagtatgtgttttaggctttgctggccaaatggtctctgccgcgactactcagctctgccattgtggctgcagagtgaccatagaccttctgaaagtgaatgagtatgactgtgttccaataaaactttattgacaaaaacaggtggagggccagcctaagggcccaagtttgtaggtctctattctagaccagtgattctctggagaggaatggggcatggggagtggggacagtgtgtgggagaagaggtgggacacaggcacgtgggaatggtgcggacatggaggacattggaggtggggaagagctagagaacctaaacactgacgctggaccctggtcaacactaggtctctccacagcctcctcttttagcctctccctccagtttcaaaatgactcctcctctgaggggactcaggctccccaccctgctccccagttcccaccagaaaccccaagtgggtgttccagcctctgccccacaaggcccccatggaaggcagcaccgccaggcagggacctttcctcgctgcccctccctcttccagttctgagtcctgtcccggagatgacctctcaacccagagggacctgaccagaaaggtctggccccctccacccaggaagcccctgaaggctggagggcagccctcccccctccctccccctgttagtttttctttctgatagaaacagcagcaaccgctaggcacctgctaggcagggggctgcacagcctcaggtcagttcctgaaaggcacctttttccatttgtaaatgaggtgacaggtctgcctcccagggatgagcagatgaagggttgggagtgcagagcctgggaacacggagtggcagtggggactggggcccagaggctgctgagtgagggaaggctaggggcagtgaagctggtgaatgaggcaggggcagaagacagggtgggggaacatgcccagcgaggctggtgaatgtggcactgcaggggcagggtgggggacatgcccagcggggctggtgaatatgccaccgcaggggcggggagggcagaatatgcccagtgaggctggtgaatgcgccaggggcagagggcggggagggggaagatgcccagcgaggctggtgaatgtggcactgcaggggtggggtgggcggatgcaatgatgagcatttcctccctggggccagcagagcaggggtgaggctgagtgggtatattactccgatttgggtgggaccccatgcagtcacacgtgggggacgcagggctgacagccttgcatgaccctttcacacttt

SEQ ID NO: 1562383 - DNA, 4001 bp, Homo sapiens
gtagcaatttcaacagaagcattcctagataaagaaataccatttttttaaaaaaagatcatactatcagaaatgatctccactggactacttaaaggtgtctgaaataattttaacaccatcatcaaattagtgtccctcacttcttaatttatatgacttaaaagtccctggattctttacaaacccatctgcactaaggatttttctttcatatgtatgtatttttcaatgtttttacttacaaggaaactcccatcaaaataacgtttcaagcacaccagtaaaagaaattttaaacagaaacatattttgttctcagagataaactaagaaataataactatgaaggatgtttaagcttctgcactctcaaccttaaagtcatctaaaaataaaggtatcccaacaaatacattcctcctattcatattttgggggtttagagtggcaccatgcaaaccagctggcctgctgggtcctggccccagttcctgccctcacatcctgtccactacataatccatgagatctctgtgcctttcttttcatccgttccacgggattagcaaaactgcctccccgctgacagaactgagaatttctagaggcatttgtttgtatgggatttgctgttattatctaccctcttcattggccttgcctttattatctgtacgttttgatcaagaggagcagcaagagaagaatgccaacagacaagcacaaagaaacgcatctggccggagcctgcatgtatctaaatttccaggttgctgctgccctcagaatagcactgatgatggcaaagttctagaggaaactttcatattgaagaggctataaaaatctctatagcctccaactccacagagaagccgctaatctatttcttccaaagcaaagccttcttgagtctgaatcacaacaaaagattgcccataggaaatgtaatctccgaagttgttttctaatcccaaggcaagcagaagcgcaggaaggtgcggccgattcctcgccggtttcctttttttgggaattcggattgcattcgtgcaagcaagggactgcaattgtgtcttgggtccacaccacaaaaccgtgtcggtgcgtaagaagggaagggacgcggcggacccggggacgcgctcacagggcgcggaagacgctcccctttaaatgccttcaggggcggccccgcggcgcgccctggggccgaacggcattgcctgcccttcactgacccaggattctgcaggcttgcgagcgaggggccgaggaaggagccggggctccaggcagaggcggcgccgctcccgccaacgcgggtccccgggaggccggcgggaggcgaggccgggccgcccctcgccggcggccgagggcagcgaggtcagcccgggaaggagcggccgcccggggtccccgcgagaggagggagcccgctcggcggcggggccgcggcgcccattcatccccacgcccgtcccgcggccgccaccccacggcccaccgcggcccccggcctcccagtgcgggtccgcccgccactccgccgccacccccgaggacgggaaggacaaggcagaggggcagccgctgccgtctctcgggcgcgcggcgaggggctaagggcggccggggagacaagcgccgggcgcgggacggatgccccgggcagccatcgcgcagacccccgcgccgacccccgcccccgctgcagccgcccgtggtccaggccgccgccttgcagccctctcctcacctcatctccgggcgggtccgcgctgccgccccagggacaaatcagtgccgctcacgcgccgctgggagggacgcaggagccgcagccccgcacaccatccccgcccgcctctctgtccgtcccggagcccgctcgggattcttcctcgcgagccgccgtactacggagcaaccaagctacgctccctcccctggcgcctccactcttctctacctccttcgctccctccctcgctccctcgctcccgcctatctcctcatctccctccgctgcctcccccgccccccatccaccatccatctccgcccataagtgggtggggaaaccgccagccaattggaagaaggggcccgcaccttctcaccaccccctaccactggccccgcccaccgtgcgaacccaaagagggtgagccaaagaaatgtaagacaacagagtgacaagccgaatgagccaatcagcaggggctgtgtgggggcaggattagcactctccccctcctccccatgtaggcgtaacaggagatttatggtctgaggttgcctatcgtggtttatggagattttgttgcacgatttcggtgcatctgctcgttgccgtgagagacactagataggatgcacttaattgacttaattattggaggttttcaaggagagaataatgtggaaaggaaaaaggcgaagcacaacccaaaggggttggccgggcctatggttggaatgaggaagggtgtggtcttcggctaaaatttgcataaaacggaacccatccgggcgattccaacttcgcccatttattggtagtccttggggcggggcctcgcctctttctccgcccccgagcggaacatgacgggagatgtagttccgagaccggttgccatggcgttctggacagcctcgcgagtccgaccccgcccttcaggagtgacgagcggcctgaccaatgggagcagggggcgggctctctgacgaaggactggaaggtggcggtggtgaaggtgcaggccgttggggcggctcagaggcaggtgagccccgggaaacgcgtcctgtgtcttgggaaacgggcctttaagcgaaaggtggagagatgccccacagaaccgtgcagccctggggaggatggtggttcgcgtcgaaccctaacctgggacttgttcgggcccaggcctagcttagctgaggccgctgaggggtgggtaagactagatttgagggacagtttcctggaccttgacgggttttgattgtaggtcttatctcagtttgcatctccctctacttttatggaggcagaggtctgggagtgcccttccacttaatctcccaggttgggtttttctcctctgcttcttgttcctagaatttgagtgtctttttctttctctgttacttcttctcagccacttctttcttcctcatcactttgctgttttcggaaagcagttagtagttattcgctgtatgtggcttttgagccagatcggccctcttcattatgctaaacggcggaatcatctggagcgagatgtaagcatcgccttgggataggtctgggtcggggccgaacatctgcgtttctaagaagctcccaggtgctgctgtccacgttatgagtagaaaggttttacctgaactctgtccagtacaaatataatgcgagtcccttatgtcattttaattttggggtagctacatttaaaaagtgaaaagaaacacgtgaaattaattttaattatatgtttcatttagcctagtatatctgagacattatcatttcaacgcttaaacaaatatttaaaaattgagattttacgttcttttcttcgtattaaatcttcaaaattaaattaaaaaattaattcttcaaaattaaatcttcaaaatctgatgtgtattttccacttaacagcgcatctcaattccgactagacacagttggagtgctcaatagccacctgtgctagtggctgctacagtagcctactgcagaaattaaaaggtgggaaaaataaggttgcattgaccaaaccctttgcaactctatgagatgggattcagaactactttagagattctctgtaattgagatgtgcccaatttacagaaataatagtcaaaatagccaacatttctgaaagtatgatgttgcgctgagtgctttgcaggtattatttaatccttatggcaaccctctgagataactgctattattatctaagatatgggat

SEQ ID NO: 1562384 - DNA, 4001 bp, Homo sapiens
gcacactcttttctatttgaaatttagaatttcagcagaatacataactttctcagttgttctgttaacgatttctccagcctacctctctgttgccttttagcatgagtgcattttttttcttctgtgtgttccatatgataccaattgatatttcagaattgcacaagggtttcattgtgaaactttggctttctggtttgactttatataatattggtcagtacatgtcccttgcctgagacaatgtgcaccttcctcctccacaaagggacgtggctcacatcacttgagctgtgcgatgatcacttgggcagcgagggcgtgagaaaatatcattgtattgtggtattagacactcgtcccgcaggttaagtattataagtgttactttaccagaacgtgaatagcaacaataactcattttacaaaagaaagaaagagagacagaaagaaagagagagagaaagaaagaagaaagagaaaggaagggaggaaggaaggaagggaaaaaagcaaaacaaaaaaggtgagagaaaaaagaaaaagcaaaagtagaactgcattgcttagtctattgtaatttcctccattttcctaaaaagttaacgcgaagaaaacaaaataacggcaacgttcccaggatttcaaatctcatgagtccagaatccgtgaaaatcctgtttaaaatcatccggtgaaattggctttgggacgtctccccagctactggatcatgtggcttctgaatctttctaacaatcgtcccgttggatgtcccctgaggacagagcagctggctagagtccccagaccagacttctctaagtgaatgtagatgtgcaggtggagaggataaaagtaattctggctcagcagccacgaattccctccacctccgccccacaagtgcgctgcatatcgccggctcagctgggacgctacagagcccagaccacgcggacgctgccccctccccggggactcaaagtgtggccggcgcccgcctcccagtgatgccatctttcttggggtcttagcatcttaccagtgggtagtgagttttgcattcgaatcacgtccctctgtctgaaaacttaccccaactttgcaaacagatgagaacctgctagtgggaacccttaattttctgtatctagaactgacaaaatcagacgcaattcacaagaaacccacgacctcgcgctcccttgctcccagcgtccgctcgcgggcaccctgggtttcccgctcgcctgggcgcaaggtcagacgccccgcggcgacctcggcccagagccgcccagacactgtcagccagcgccccgtggggggctggagggtgggggcaggctggtccaggcaggaagggtagaggaacccgagcaacttacagcccagggcgaccaccaggtagcgcagcagcagcaggaggaggcggtggcggctcctcctcgccatcttcccggggcggcagccggctgctctgaggaggtcgagggtcccggcggcaggagcgcaggaggccgggggcccttgaacttctggggcgggaaaggagcagagagtcgggaggggaggaagaggagggacggctctagatgggatgtcagtttccccctccccggggcgccttctcagctggctgccaagaggcgggtcctccagcccagggatgggggtctgttctgttttgggggtgtgggggtaggggctagagggcgtgaaaaccagacgaggcgtccgccgggtcctagcgagggggcagcaggaggagagcagcgcccgggaaagccccggcgggtcgtccctccgcccccacgcctccgggattgatcggctttgtgtctggtccgcgcggggctgccagctgtccccagggcgaggagctgggggcgggaggcgcgggcaggctgggggtggggggattgggtgtctcggggacggggatgtatgcgggtagggaaacgcctcctgttttgccccaactcctttcttcccctcgttggctcaaaacttctttctggcttttcagcctaggggtggagatatttggaaaattctgcccaacgggcgaagctgagggggtggcgctctgaggagatggggttcgcgggctccgcctcgaactcgagaaaaaaaaaagcaatcaagactcgtgctggaagtcaggtctcagattttagtacagccttggtcccttctcagtttaagctttttgctccttggagatttgaggtgcatttgtctcgcgttcttgttctttgcttttttttcagtgtcagagttggaagttcatctaatggtgtgaaatatttatcatgtttctttcaagttacataactgctgcttgtggagttttccacgtgttaaaactctacagctgccctttgtcaggtttatttttggtctactgtgcttttaaaagggaaacccattatgaatgctctgttgcgtgctttaaaattgcaccacacttacattggacgcacgtacactggcaatttttatatttgttcctagggaccaaaaatgtatggtgtattcaagagtattggcaggtctggaaaaaggccattcccaggagaagaaattagtatacatcagtttttttcttttgtttttttgtttgtttttgtttttgtttttttttaaaggttgaataatggatgaagttctgtacagcagatagttgatttagtggtgtatttaaaaagaattcagctagctcagtggacaaaggcgaccagagtttagctgtgcagaactgtgaggaatgaggcatccttgctgttgccgtggtgacagtgatgaaaacttagtacccagggagggggtgggaggagaggacccaggggacccagaaaggaaagtcaaaatggcaaaatgttaaaactcgtactccagtcaaccgaggagaaggggcacagatttaacaacagcttatgccagtttttctgggcagtaatgagaaggatttgatgcttaaaaagaaaagttgttggcatcttcttttttctaattcttgctacagctatatgtcttttactcctccctaaaaatatacacaaaaatgtcatacttaaaaaaattctatgcaatcctatgtgagtaactgactaagttatttatttgccacccagccaaggcatttgacaaatggcaacaatgtgctggatgctgaaggacaaccatgaacaagatagaggctttcttgctaacaagctcacagtcttgaggggagacagagtcttatcaggaaagatgcctgataccacatggtaaatgttacaggaggacagaaaataataacagctatttttattgcatgctttctcagtgatggagtctgaataacgcaatatctaatcccccaacaactccataaaagaggaaatgttatcattcccactttgcagatgagaaaactgggcggagagacactaaatggcttgtccaaggtccatgataaggggctgttccttttgttgggagtggggccagggctttctttattaaaccttgaaaaatgggtcaaattctgaagggaaggacataaaggagaggcattctacatagaggaaacagcaggatccagagctaggagattgaaaaattatggtttatttagaaaaagcaaggttctacagtactaaagtgtatgtgggatcgggatagtgaggtaggtggtggtggtggtagaaactgaaggggaggttagagtacgaagagcattcacgctactgtctagacctcatcctacagctaatgagctttttgaaagcaatgagataagaaaagactcatattttagaactgtggtgtccaatatggtagcctatagatctaagtggctatatacattttttttgttttgtttttaatttgagacagagtctcactttgtcacacaggctggagtacagtggtgcaatctcagctcactgcaacctccgcctcccaggttcaagtgattctcctgcctcagcctcctcagtcca

SEQ ID NO: 1562385 - DNA, 4001 bp, Homo sapiens
gggaacgctttgctgactggtgatgagggacctacctcttcacacccatgacacccacccgctgagcccctcaccggggctccgaaggccctggtcaggtcacctctggtctcactttccattctcccctccttcctcccctccagccacagggtccttctcgatgtgcccagacatggtgggtgcacacttgtctgacagcctctcttcttttccctttgcttggaatgctctcttcccagttaccaaagatactcaggctctctccccaatttccttcaggcccttgctccaaaagctccttccgggtgaagcctcccctcccatcctccttaaagcttcagcctctacctgggacacttcctcccccactgcctgcctccttgaaactctccttagtcctcttgcagcccacacagctgaacacaggcaggagggggcgctgctgccctggctggtgtgcagccaccagaggctgaagctcactgacgtctgtctggggcccaggatcaccttccttgattccagctctctcaggctgtcaggacctggcgctgggaggcactaggccatgccctggcctgaggccttctctctccctctttgccctgtgtctctgcagggaagcccggccctgcccctgggagggtgggggcagacgtgtggagagtgggtgtacaaggccagggtttgccaggcccaggacagcctggcacctgtcaatggatgagcgcctctcccttagcctgatgtcagggtgggcatgagggtgggagcagagggtgcctaactgaggaaagggtctgtgcaacccccttctcctaccagttctcgtttctgaagtctcctcaagcacactgcggtgtccacaccattggcagcaggctccttctcttcaggtggtcttaggaacttctcagaactttttgagttatccttctggtctcttcctcctgagcacggttctcctggttgagctccaggccatgccattcaacgccctccaggacaggccgaagggcttgtctgtttggtggttgctaaggtttgaaaaaagccagctggaaacttaatccccaaagcaacagtgttgggaggtgggacctaatgggaggtgtttagtcatgagggctccacccttatgaatggattctctctctcttgttctctctctctctcttcccgccccgcccacccctccttccccaaccttgtgataccttccaccatgtcatggcaagaaggcccttgccagatgtggcccctccatcctgggttcccagtctccagaaccatgagccaaatgcatttctgtctgttacaaattatgtacggtgtggttttctgtgatgaacacagtgctgtaccagggccctcttgccaagacagccagcttataggagcctgcatgtgaggcccggacgtcctacagagcagcagttagaggtctggccttctggataggcactgccctgccctgcacacaggaccttggtggggcatgatggggctcttcaccacgctgccctcattttaggaggtgggcaaccctttctcccccttctccatgtgcttctgcagttggaagaagtgaggggggttcagacacacttaagctgagcttagagcaaagcatgtccctcaaggtgaccttgccgcatggcctgaacctagaattcccctgaccagggtggacagccatcaccatgggcctttctgcctggcctagtatggctctccttcgaactcacctagacccttgcatcaaaggactcggggactctgctgcagtcatcctagcacggtcgagaggagtaggaaggtgcccagcggctcagcctttaaggaggtctattggtcaccattgcttctgccttcttgagaaccatcaccctcggaggatccggtagtgtatcccagtcaagtgtcaaatgcgttgttccctggagaggaaggcttatttccagaaagtactctgacgttttgtaatttgtgatttctatcactggctcagtggcctacccactgctcagctcatgtggcatgaccaggctggggcgtcgggtcatcttgttctctgggtgtgtggcaacactggtttatggcgtaatttccttcctgagaagaaattcagtaatttctaatattcagggctttaggtagaggcctgaaaatcactctccatgcctctttcagtattttatatatagttgtctcttggtatccatggggtttggttccagaatcccctgcagataccaaaatttgcgaatgttcaagtcctttatatatagtggcatagtatttgcatataacctatgcatatcagccaatcatagatggtgatttaaatcatctcttgattacttctaacacctaatactatgtaaatgctttgtaagtagttgttacctggcatttttttatttgttttatttttgttgttgtttcattaattttattttatttttggaatattttcagtccattgttggttgaatccacagatgcagaagccttagacacagagggccgaccacacctatgtatgctgttcttaaagtagcaacatatttgttctgaacatagaagaaattagtcgtctattagactttaagggagtaaatatggtccaagttgatttttaaatttagcaaatagtcatagacatatcagtgtcttacagaaaatatttattggaatgctcactctctcatttgggatactgctttgccttgctgtgtcttaagaatgtcatcagagcatcacacacttgaaaaacgtttttaaaaggatatgatgataattaagaccttctccccaacccctgcccattatccaagatcaatgtttttttcctttatcctgattttaaaatcaagtacactttattgaggcatactttacatgaagcaaaatgtaccctttctaaatatgataagtttgatgagttttcaacagatgtatacagctgttaccatgactgtgtctttacccaggttcttgcattgctcaatccagatacagaatgtctccatcaccctgacaagttcctttgtgccgcaccctctagccaatcatctgttttgaggagagttttaaaacaaaggtttttgttctttttcactgatgaccataacctaccacagacagggtctctctctctctctctctctctttttccctgttcttgcgccagctgcctgacaatttgtgggattaaagctctaagctgcttactggctcttctgactagggagagggagcaagcctcattatttttctattcttttcagtgactgctcactcctcttcctccaaaatccctatccatccatccatccatccatccatccatccatccatccatccatccaactttccatctacccatctatccttccatctatccaatccacttgcgtgttgaacgtctactatgagccattggctaccaggaatcccacttccacccaaattatgtttcaacagggaagacaaacaatttaacaattacgataaaaaagaaaatatgccatacaatggaaaagaagggggcatgatgggagacccagcgggagtagctggcaacgattcttagggggaagagacattcctaatagacacctgcaggagaaatattaaagagtcaatcatttcagtagcgcttattgtgaccaataatgcaagaagtttctgggttcccaggctgatgggtttgaaagtcactgcatcatgaatgtgcccaggacccacacgttgttttgtaagagaggggttcagtaaaatgtgaaatgaccgacattcaacaggcagaactgtgcagaatgcacgctttgccactgattgaaagtgtttcttcagtaggttttgatagaatatattactaatctggtaagaaacagcttagggccactcaagaaaagaaaagcagcccctagaaacatgttctgtggctgggcacagaggtagctgctggaatttgaacaggggtgagcagg

SEQ ID NO: 1562386 - DNA, 4001 bp, Homo sapiens
ccgtgcctggcctcttgttttatgtttgctgttctcgctgtaggtgaggcattcccaccatattcccttgttaaaatcctactggcccttcaaatgccagctcatatccacactgtgtctgaccctgatccagaatcctctccccttctttgaccccttgtatatatctttcctacagtgctggtcatattctaacttctaatcatttgtagacttatctgggcattttctcccaggaggtcccaaaggacagagaccatcttgctcacctttgtccccactccagcacccagaatgtttcaataaggttttcctgaattaagtgggaagcaaagtattagattcaataccactacaatgggaaagtgagtgaataattgataaagtatactatgctctggaaatagattattgagtaatcagaggaaaacctcttgcaatgtagtatgtttttatatattaaattttatattatttatttatatttatattattaacatatttttgttattcattttgtttattaagatttactctatatatatatgtgtgtgtgtgtgcgcgtgtgtgtgtgtgtaacccaccttatttctaaaaaaaaattttggcagtcagtgactattaatagtagagcacaaactcttaacctttttttcctcccgctttcccagagtccttatcaccttctaatataataaagttttcttaactgtgatgttgattgttcaacgtttgtctttcccaccaaaatgtaagctattgcgggcagggatctttgcatgggttgttcttcattgcatcccaggccactagaacagtgtgtggcatatggcaggagtgcaataaacattcagcgaatgcaggcaggcatgcgtgaacgcatgaataataagtgttcctttcaactaccagaaagagcgaaaccacacaggagctgtctcaccctcagagatttaagacgacagcaatgagtccctctgatgtcttctaagtgagctttattttcaaaacaaatcattttccaataacctatcaaaagcaggtcctacctgaatatccttggctatttcctctggatacagataatgccttcctccaatggatcctcggctcacctgatgattgtgtgaaactggccagagaaagcagagggatttttcctggtgattggaaatcagagtcacggctgaatttaagcaactgtgtgaactcagcaaagtccccaccacctggaccatacatgacagctatggttattgacaaggtccttccttaatggagctggaacctccttcttaatctaaatgtggactcaaatgaactgtcaattcacatagagcaatgtgacaaatccggggggcaaagcattatgcaatagattgggcacatgcgcacgtctctgctacttagtcaactttcttctaaagtttcccacttttcccattaccacaatcaagatcagatatcagtaatattctccgcgtcccatgccctttcctcagggagatgccaaggcccaagagctggtccccccaaaaagctgaaggtctttgaaaaaaagtggggactcaggtcccgtgagtggttttgattttcttttcttttgaaagttgcatgtaagtgttttccaaatactatacaagaatgtctataacttaataatggaggaatgttttcgttgttctgtgttggtgagatgctttcctatgcgtttgttgtataagtaagtgagaatggcagaaggaaaggaggggagaggctgatcatcctatcccgtctcccactctgggggtctcggcgcttccagcctgaagcgcgcccgctgcgcgtccggagacgcaggttccaggagccccccggggttgcccgactaggccacttgcgccccggaagagggccgcggaggtgggagaccctaacttacccgggtctgagatgccgagagagccgggtgtggagctgagtgcgcgcctgccgagcgctgaggccacagacagccccgccccggggcggcaccttctaagggcctgagcgctgcacagggatgggggcgggcggggcctcccagagccgccaggcgtcccgccccactccgcccacacgcacggcccagcccagggttccccgggaccaccccagaccagccccggcccccccgggtcctccacactctgcaccccagaccaacaccaacgcgcgtagggaagcgttttagatcctgtcggagaggctcaaggccggcagaaggtttgcattaggatcgagaaagccgaccaacggacagatctacctaccttcctgcgggagtttgaggttgccaggggggaagccactgcagccaggagaaaggccgtctgggaaccaccccaccctcggacgtgcgggccttcaaatatctctgaacataatcctccaaagaccgctcaacctccgctcccgacgactctttctagcctcgtcccgcaccccagctgtggccacacacctattaggcaaacatttatgaagcacccacttactgggtgtgcagccctgagctgggggtgcagctgtggaccagacaggagggggcccggagcggcagacagtcgctggaggcacccgagccttggcgagcacaccctaacgtccttggggcctttcagcccgagccgtccttgtccagagagcaaaccatgcaatgatgcaggtgacttcccagcaaatttcatagcgttgctcaccagcttggcaggcaagaggagaaggggcagtccccaaaagacaatcccatgaaccttctagggaatgacgtccaggctccaggctcctgctctgcaggcgggtcgcagaggcaggttcctgacctaggactagaagacattctctagggtcactgcctccatggtcttccttggcaggtcacttcttcctgggcttcgacctcggtgttctcatggggacgagggtgattggaggccctccaaggggtgcaccgatgtgtcctgtgcaccaggcagaaccagcattgccctacagtgtgggtgcaaaatgaacccacatggccacgttggaaagtcctgaaatgttcatagcctatgacatgaaattgcactgtgtgaaatctatttattctttttttttttttcttttttttctgagacggagtctcaccctgtcgccccggctggagtgcaatggcacgatctcggctcactgcaacctccacctccctggttcaagcgattctcctgcctcagcctcccgagttgctgggattacaggcaccggccaccataccctgctgattttttgttatttttagtagagacggagtttcgccatgttggccaggctggtctcgaactcctgacttcaggtgatccacccgcctcggcctcccaaagtgctgggattacaggtgtgagtcagcgtgcccagactgaaatctatttattctatggaaaggatcagagctgtagaaaaatccttatgcatgtaaaagttctttgtgtttttacttgcaataactagaatctaaacatccaaaaatagaaaatataggtaattaaattgtagtacatatgatattattctacatagtagaatattatgtggagtccttaaaatgtttacaaataatttataacaacatggggccgggcacagtggcttacacctgtaattccagcactttgggaggccaaggtgggtgggtcacctgaggttaggagttcaagaccagcctggccaacatggtgaaacctgtctctactaaaaacacaaaaatttagctgggcgtggtggtgggcacctgtaatcccagctacttgggagtctgaggcaagagattcacttgaacccaggaggcggaggttgcagtgagccaaggtcacgccactgcactccagcctgggcgacaagagtgaagctctgactcaaaacaaacaaacaaacaaaaacccaacaggggagatctttatattatcatgttacgtgaaaaatacaaaaacagaaaacaa

SEQ ID NO: 1562387 - DNA, 4001 bp, Homo sapiens
gaggcaggagaatcacttgaacccaggaggtggaggttgcagtgagccaagattgtgccattgcactcctgcctgggtgacacagcgagactctgtctcaaaaaaaaatgcagattgctgggctctattttcagagtttctgatttggtagaactggagcgggcctgggaatctgcattcctaacacattcccacgtggtgctaatactgctggtctggaggccctgcttggtgatctattggaatcaccgggggagcttttagaaaataatggttcctggatctcacccctagagattttaatgtctttggtctgggttcctgcctgactcagagactttttagaaacctcccaaatgatcctaatttgtagccaagattgagaaccactgggctgtggtgtgggaccctaggaaaatgaccaatggccttttgtgctgcagggtacctggaagaattttgcaaaaatatagaaatatgatctcactgactgtttttcaaatcttgtttgttttttacattttcttttttggccttgtttgcctctgatacagtctgaaaagaaattgcagaaagaaactctccagtcttcagtgtaacctcagctgtccccagtctcacacacgctggtgccttcaattacaattctcctgtcagagcttaagtccagctaattaactgcctttcaaatgacaaccctatatttttaaagaatttttttaaaacttcacatgtaatttattgcattgcttttgctaaatgtcctccacacccccaatgcctgctaggctgggtcgccatggtatttttgtgtaacgagtctcaaaatgagtttggcaatgtctccgtaatagtcagcatggtgtaaatgacagtctggatctgcatgtcatttgggattttatatcagattctctaggttcatttctatgatacgtgatgccaaagcacccacatgccccgtggctgcactttcagacagttggactcaaacagagtgggagagcaactgatccaacaatctgaattttcagaaaacggggctccttagagatgagatggcttgccaaaagtaatctctcctatcagaagtacatatcctcagcaaactaacgcaggagcagaaaaccaaacaccgcatattctcacttataagtgggagctgaacagtgagaacacatggacacagggaggggaacaacacacactggggcttgtcggggaaaggtgggtggggaagagcattagggaaaagagctaatgcacgctgggcttaacacctagatgatgggttgacaggtgccgcaaaccatcatggcacatatttatgtctgtaacaaacctgcacatcctgcacatgttccctggaacttaaaaaaaaaaaaaaagaaacaaaaacaaccaaccaaaaatatatctaaaatgtcatctgttagcaattgactcacatattattagtatagaaaagagcaattcccaggaccttgtacagaggaagcaggctcaaaacagctgaggaataggccacttttatcagatagcattggatccatgcacatgggggttggcttcttacctaaatatgccatcagaaatcatccttgttcctgtcccctcagcttttgtagcttgcacagtgagtaaagggatggtggaggcagaaatggtaggagccagagatgttcaaaatccatctgatgcttggcctgtgctgaacgttctcaaactgtggccttgtcaggcccagaaagtggggtggattcctggccgtttctgcttctgcctgggtgtgagatgtgaatgctgcccctactgaagggtagtgcaattttttttttttcttaaaagcttagacccagagctgctaatctactggaaatcactcaggacacagggctctgggcagctgcgctgagcgagacacctgcaaatggagaccaacggggcctccagcaccctggagttccgtaaggcccccagctgaacccaggggagaagagggcagtgggtggcgcctcgctgctctgggcacacaccacctcttctgacttctcccacgtgctccggctgtgtcgcctatcagcactgataacagcctggaagctttcagaacagaagctttcccagcatgggaaactctcattctttcttttttttaattttccaaagcctttatttctaagaccaactgtggcctacccgtgcataaactgggcaggctgtagacagcaggcttgccaagtaaatactacagccttcctcccaatattgagccctgtcccattgatcctgcaggggagatgtgtagggcatttgttcacggggaggccacaagtttgggcctctcatcactgtgacctcacacccctgttgagtgtgtcgtaaacagaggagccgttcttcaagccccctgccctgagtgcacccctctcattcttttgttattattagcaaattcccccagttcctgatcattctttcttaagcctttagtgactgggtaaggttcttgtggctgactccaagctttcttctaaaaggaatagattctaggggtgagtagaggagacaggaatgtcggagtcagagctcaggaatctgggttccagccccaggtcaatcctagataaactagagggctccttaacttacttccctaggttgactctgggtttttttatcacgctcgacaggactccttatgcatttcttcgaaagagcatccagtcttaacatcatcatttggcctcatttggtttaagaagcagaattagggtaaaagcaatgatggataagcctcattttggtgaatatgatcttattgagacaagaattctgagtcaattgtccttggaaccaactgtctattgttttcatctttatcacaacactatgtccaaattttggaaacatgtttccctcctagcagaaaagaagccacccagggccaccagatgcttcccgacacttggctggctttgtctggtcttctatccttcccctatccccagagtcagtgggtactaaggtggccagggtcgctcaaggaatcagaatgcaaccgtccagaggcccagaatcagactgtcctctctgattaggaaagtgtttcctgccacctcccagggggatgtggggtgtggcttgagtctggtgcttttaccaggagcttcccagacctctctatgggtgatggagagagagtctggggtgtgaaggatggaaatataaacactgaatactcagagagtcaggccagcgagctggtgaggagactccatcaaactcaatatgaaaacatgggtgggcgtttggggatggataatgaatgacagctgaagtcacacatcaggagggaaggaaggactctcatcttcagcaaatgacataaatctggggagcctcagtttcctcacctgaacagtgagaatgatggaatctaccctgagtatatatcccaggtctttgtgcagcatggaatcagcccccagccttcctagctcttgctttattttattttattttagagaccaagcctcgctctgtcactcaggctggagtgcagtggcgcgatcttgacttactacaacctcctccgcctcctgggttcaagtgattctcctgcctcagcctcctaagtagttgggtttacaggtgcatgccactatgcctggttaatttttgtatttttagtagagacggggtttcaccatgttgcccaggctcaacatgcctgggctgaagcgatccacctgccttggcctcccaaagtgctaggattacaggcgtgagccaccgtgcctggcctcttgttttatgtttgctgttctcgctgtaggtgaggcattcccaccatattcccttgttaaaatcctactggcccttcaaatgccagctcatatccacactgtgtctgaccctgatccagaatcctctccccttctttgaccccttgtatatatctttcctacagtgctggtcatattctaacttctaatcat

SEQ ID NO: 1562388 - DNA, 4001 bp, Homo sapiens
tcaccttgtggcagctccaggccagcaggggacaccactgctccctccagtgtcctctcagggttcacctgattgagtcaggcccatcaggataatcttccttcttttttttttttaactttttttttgtttttgagacagagtctcgctctgtcacccaggctggagtgtagtggcccagtctcagctcactgcaagctccgcctcccaggttcatgacattctcctgcctcagcctccccagtagctgggactacaggtgcctgccaccatgcctggctaattttttgtaattttagtagagacagggtttcaccacattagccaggatggtctcgatctcctgacctcgtgatccgcccgcctcggcctctcccaaagtgctgggattacaggcgtgagccaccacgcctggcccctttttcaacttttattttaggttcaggagtacatgtgcaggttcattattggggtaaacttgtgtcatgggggtttgttgtacagattatttcgtcacccaggtactaaacctagtacccagtagttatttttttctgatcctctttctcctcccaccctccactctcaagtagccactgtgtctgtcaatcatccttcttgataaactcaaagtcaaacgagtccagatcttacctacatctgcaaaatcaatttttcctataaaggaacgtaatcacagaagcactgtcccacagtagtacgagtgctgagccgttgtaggcagagagggttgtcctgcccacactcaaggggagagagtgcagggccagttcacccctcacgcggaagtggcagtgctgggggctcacttcgtgctctgctcaccacaactccaaactcacaactttattcccaccaatcccatcccctccagtccagggggcacacactccagcaggacttcagctgagcccagggaacgctttgctgactggtgatgagggacctacctcttcacacccatgacacccacccgctgagcccctcaccggggctccgaaggccctggtcaggtcacctctggtctcactttccattctcccctccttcctcccctccagccacagggtccttctcgatgtgcccagacatggtgggtgcacacttgtctgacagcctctcttcttttccctttgcttggaatgctctcttcccagttaccaaagatactcaggctctctccccaatttccttcaggcccttgctccaaaagctccttccgggtgaagcctcccctcccatcctccttaaagcttcagcctctacctgggacacttcctcccccactgcctgcctccttgaaactctccttagtcctcttgcagcccacacagctgaacacaggcaggagggggcgctgctgccctggctggtgtgcagccaccagaggctgaagctcactgacgtctgtctggggcccaggatcaccttccttgattccagctctctcaggctgtcaggacctggcgctgggaggcactaggccatgccctggcctgaggccttctctctccctctttgccctgtgtctctgcagggaagcccggccctgcccctgggagggtgggggcagacgtgtggagagtgggtgtacaaggccagggtttgccaggcccaggacagcctggcacctgtcaatggatgagcgcctctcccttagcctgatgtcagggtgggcatgagggtgggagcagagggtgcctaactgaggaaagggtctgtgcaacccccttctcctaccagttctcgtttctgaagtctcctcaagcacactgcggtgtccacaccattggcagcaggctccttctcttcaggtggtcttaggaacttctcagaactttttgagttatccttctggtctcttcctcctgagcacggttctcctggttgagctccaggccatgccattcaacgccctccaggacaggccgaagggcttgtctgtttggtggttgctaaggtttgaaaaaagccagctggaaacttaatccccaaagcaacagtgttgggaggtgggacctaatgggaggtgtttagtcatgagggctccacccttatgaatggattctctctctcttgttctctctctctctcttcccgccccgcccacccctccttccccaaccttgtgataccttccaccatgtcatggcaagaaggcccttgccagatgtggcccctccatcctgggttcccagtctccagaaccatgagccaaatgcatttctgtctgttacaaattatgtacggtgtggttttctgtgatgaacacagtgctgtaccagggccctcttgccaagacagccagcttataggagcctgcatgtgaggcccggacgtcctacagagcagcagttagaggtctggccttctggataggcactgccctgccctgcacacaggaccttggtggggcatgatggggctcttcaccacgctgccctcattttaggaggtgggcaaccctttctcccccttctccatgtgcttctgcagttggaagaagtgaggggggttcagacacacttaagctgagcttagagcaaagcatgtccctcaaggtgaccttgccgcatggcctgaacctagaattcccctgaccagggtggacagccatcaccatgggcctttctgcctggcctagtatggctctccttcgaactcacctagacccttgcatcaaaggactcggggactctgctgcagtcatcctagcacggtcgagaggagtaggaaggtgcccagcggctcagcctttaaggaggtctattggtcaccattgcttctgccttcttgagaaccatcaccctcggaggatccggtagtgtatcccagtcaagtgtcaaatgcgttgttccctggagaggaaggcttatttccagaaagtactctgacgttttgtaatttgtgatttctatcactggctcagtggcctacccactgctcagctcatgtggcatgaccaggctggggcgtcgggtcatcttgttctctgggtgtgtggcaacactggtttatggcgtaatttccttcctgagaagaaattcagtaatttctaatattcagggctttaggtagaggcctgaaaatcactctccatgcctctttcagtattttatatatagttgtctcttggtatccatggggtttggttccagaatcccctgcagataccaaaatttgcgaatgttcaagtcctttatatatagtggcatagtatttgcatataacctatgcatatcagccaatcatagatggtgatttaaatcatctcttgattacttctaacacctaatactatgtaaatgctttgtaagtagttgttacctggcatttttttatttgttttatttttgttgttgtttcattaattttattttatttttggaatattttcagtccattgttggttgaatccacagatgcagaagccttagacacagagggccgaccacacctatgtatgctgttcttaaagtagcaacatatttgttctgaacatagaagaaattagtcgtctattagactttaagggagtaaatatggtccaagttgatttttaaatttagcaaatagtcatagacatatcagtgtcttacagaaaatatttattggaatgctcactctctcatttgggatactgctttgccttgctgtgtcttaagaatgtcatcagagcatcacacacttgaaaaacgtttttaaaaggatatgatgataattaagaccttctccccaacccctgcccattatccaagatcaatgtttttttcctttatcctgattttaaaatcaagtacactttattgaggcatactttacatgaagcaaaatgtaccctttctaaatatgataagtttgatgagttttcaacagatgtatacagctgttaccatgactgtgtctttacccaggttcttgcattgctcaatccagatacagaatgtctccatcaccctgacaagttcctttgtgccgca

SEQ ID NO: 1562389 - DNA, 4001 bp, Homo sapiens
tcctggccacatggcaccccagtctcaccttgtggcagctccaggccagcaggggacaccactgctccctccagtgtcctctcagggttcacctgattgagtcaggcccatcaggataatcttccttcttttttttttttaactttttttttgtttttgagacagagtctcgctctgtcacccaggctggagtgtagtggcccagtctcagctcactgcaagctccgcctcccaggttcatgacattctcctgcctcagcctccccagtagctgggactacaggtgcctgccaccatgcctggctaattttttgtaattttagtagagacagggtttcaccacattagccaggatggtctcgatctcctgacctcgtgatccgcccgcctcggcctctcccaaagtgctgggattacaggcgtgagccaccacgcctggcccctttttcaacttttattttaggttcaggagtacatgtgcaggttcattattggggtaaacttgtgtcatgggggtttgttgtacagattatttcgtcacccaggtactaaacctagtacccagtagttatttttttctgatcctctttctcctcccaccctccactctcaagtagccactgtgtctgtcaatcatccttcttgataaactcaaagtcaaacgagtccagatcttacctacatctgcaaaatcaatttttcctataaaggaacgtaatcacagaagcactgtcccacagtagtacgagtgctgagccgttgtaggcagagagggttgtcctgcccacactcaaggggagagagtgcagggccagttcacccctcacgcggaagtggcagtgctgggggctcacttcgtgctctgctcaccacaactccaaactcacaactttattcccaccaatcccatcccctccagtccagggggcacacactccagcaggacttcagctgagcccagggaacgctttgctgactggtgatgagggacctacctcttcacacccatgacacccacccgctgagcccctcaccggggctccgaaggccctggtcaggtcacctctggtctcactttccattctcccctccttcctcccctccagccacagggtccttctcgatgtgcccagacatggtgggtgcacacttgtctgacagcctctcttcttttccctttgcttggaatgctctcttcccagttaccaaagatactcaggctctctccccaatttccttcaggcccttgctccaaaagctccttccgggtgaagcctcccctcccatcctccttaaagcttcagcctctacctgggacacttcctcccccactgcctgcctccttgaaactctccttagtcctcttgcagcccacacagctgaacacaggcaggagggggcgctgctgccctggctggtgtgcagccaccagaggctgaagctcactgacgtctgtctggggcccaggatcaccttccttgattccagctctctcaggctgtcaggacctggcgctgggaggcactaggccatgccctggcctgaggccttctctctccctctttgccctgtgtctctgcagggaagcccggccctgcccctgggagggtgggggcagacgtgtggagagtgggtgtacaaggccagggtttgccaggcccaggacagcctggcacctgtcaatggatgagcgcctctcccttagcctgatgtcagggtgggcatgagggtgggagcagagggtgcctaactgaggaaagggtctgtgcaacccccttctcctaccagttctcgtttctgaagtctcctcaagcacactgcggtgtccacaccattggcagcaggctccttctcttcaggtggtcttaggaacttctcagaactttttgagttatccttctggtctcttcctcctgagcacggttctcctggttgagctccaggccatgccattcaacgccctccaggacaggccgaagggcttgtctgtttggtggttgctaaggtttgaaaaaagccagctggaaacttaatccccaaagcaacagtgttgggaggtgggacctaatgggaggtgtttagtcatgagggctccacccttatgaatggattctctctctcttgttctctctctctctcttcccgccccgcccacccctccttccccaaccttgtgataccttccaccatgtcatggcaagaaggcccttgccagatgtggcccctccatcctgggttcccagtctccagaaccatgagccaaatgcatttctgtctgttacaaattatgtacggtgtggttttctgtgatgaacacagtgctgtaccagggccctcttgccaagacagccagcttataggagcctgcatgtgaggcccggacgtcctacagagcagcagttagaggtctggccttctggataggcactgccctgccctgcacacaggaccttggtggggcatgatggggctcttcaccacgctgccctcattttaggaggtgggcaaccctttctcccccttctccatgtgcttctgcagttggaagaagtgaggggggttcagacacacttaagctgagcttagagcaaagcatgtccctcaaggtgaccttgccgcatggcctgaacctagaattcccctgaccagggtggacagccatcaccatgggcctttctgcctggcctagtatggctctccttcgaactcacctagacccttgcatcaaaggactcggggactctgctgcagtcatcctagcacggtcgagaggagtaggaaggtgcccagcggctcagcctttaaggaggtctattggtcaccattgcttctgccttcttgagaaccatcaccctcggaggatccggtagtgtatcccagtcaagtgtcaaatgcgttgttccctggagaggaaggcttatttccagaaagtactctgacgttttgtaatttgtgatttctatcactggctcagtggcctacccactgctcagctcatgtggcatgaccaggctggggcgtcgggtcatcttgttctctgggtgtgtggcaacactggtttatggcgtaatttccttcctgagaagaaattcagtaatttctaatattcagggctttaggtagaggcctgaaaatcactctccatgcctctttcagtattttatatatagttgtctcttggtatccatggggtttggttccagaatcccctgcagataccaaaatttgcgaatgttcaagtcctttatatatagtggcatagtatttgcatataacctatgcatatcagccaatcatagatggtgatttaaatcatctcttgattacttctaacacctaatactatgtaaatgctttgtaagtagttgttacctggcatttttttatttgttttatttttgttgttgtttcattaattttattttatttttggaatattttcagtccattgttggttgaatccacagatgcagaagccttagacacagagggccgaccacacctatgtatgctgttcttaaagtagcaacatatttgttctgaacatagaagaaattagtcgtctattagactttaagggagtaaatatggtccaagttgatttttaaatttagcaaatagtcatagacatatcagtgtcttacagaaaatatttattggaatgctcactctctcatttgggatactgctttgccttgctgtgtcttaagaatgtcatcagagcatcacacacttgaaaaacgtttttaaaaggatatgatgataattaagaccttctccccaacccctgcccattatccaagatcaatgtttttttcctttatcctgattttaaaatcaagtacactttattgaggcatactttacatgaagcaaaatgtaccctttctaaatatgataagtttgatgagttttcaacagatgtatacagctgttaccatgactgtgtctttacccaggttcttgcattgctcaatccagatacagaatgtctccatcac

SEQ ID NO: 1562390 - DNA, 4001 bp, Homo sapiens
gtattagattcaataccactacaatgggaaagtgagtgaataattgataaagtatactatgctctggaaatagattattgagtaatcagaggaaaacctcttgcaatgtagtatgtttttatatattaaattttatattatttatttatatttatattattaacatatttttgttattcattttgtttattaagatttactctatatatatatgtgtgtgtgtgtgcgcgtgtgtgtgtgtgtaacccaccttatttctaaaaaaaaattttggcagtcagtgactattaatagtagagcacaaactcttaacctttttttcctcccgctttcccagagtccttatcaccttctaatataataaagttttcttaactgtgatgttgattgttcaacgtttgtctttcccaccaaaatgtaagctattgcgggcagggatctttgcatgggttgttcttcattgcatcccaggccactagaacagtgtgtggcatatggcaggagtgcaataaacattcagcgaatgcaggcaggcatgcgtgaacgcatgaataataagtgttcctttcaactaccagaaagagcgaaaccacacaggagctgtctcaccctcagagatttaagacgacagcaatgagtccctctgatgtcttctaagtgagctttattttcaaaacaaatcattttccaataacctatcaaaagcaggtcctacctgaatatccttggctatttcctctggatacagataatgccttcctccaatggatcctcggctcacctgatgattgtgtgaaactggccagagaaagcagagggatttttcctggtgattggaaatcagagtcacggctgaatttaagcaactgtgtgaactcagcaaagtccccaccacctggaccatacatgacagctatggttattgacaaggtccttccttaatggagctggaacctccttcttaatctaaatgtggactcaaatgaactgtcaattcacatagagcaatgtgacaaatccggggggcaaagcattatgcaatagattgggcacatgcgcacgtctctgctacttagtcaactttcttctaaagtttcccacttttcccattaccacaatcaagatcagatatcagtaatattctccgcgtcccatgccctttcctcagggagatgccaaggcccaagagctggtccccccaaaaagctgaaggtctttgaaaaaaagtggggactcaggtcccgtgagtggttttgattttcttttcttttgaaagttgcatgtaagtgttttccaaatactatacaagaatgtctataacttaataatggaggaatgttttcgttgttctgtgttggtgagatgctttcctatgcgtttgttgtataagtaagtgagaatggcagaaggaaaggaggggagaggctgatcatcctatcccgtctcccactctgggggtctcggcgcttccagcctgaagcgcgcccgctgcgcgtccggagacgcaggttccaggagccccccggggttgcccgactaggccacttgcgccccggaagagggccgcggaggtgggagaccctaacttacccgggtctgagatgccgagagagccgggtgtggagctgagtgcgcgcctgccgagcgctgaggccacagacagccccgccccggggcggcaccttctaagggcctgagcgctgcacagggatgggggcgggcggggcctcccagagccgccaggcgtcccgccccactccgcccacacgcacggcccagcccagggttccccgggaccaccccagaccagccccggcccccccgggtcctccacactctgcaccccagaccaacaccaacgcgcgtagggaagcgttttagatcctgtcggagaggctcaaggccggcagaaggtttgcattaggatcgagaaagccgaccaacggacagatctacctaccttcctgcgggagtttgaggttgccaggggggaagccactgcagccaggagaaaggccgtctgggaaccaccccaccctcggacgtgcgggccttcaaatatctctgaacataatcctccaaagaccgctcaacctccgctcccgacgactctttctagcctcgtcccgcaccccagctgtggccacacacctattaggcaaacatttatgaagcacccacttactgggtgtgcagccctgagctgggggtgcagctgtggaccagacaggagggggcccggagcggcagacagtcgctggaggcacccgagccttggcgagcacaccctaacgtccttggggcctttcagcccgagccgtccttgtccagagagcaaaccatgcaatgatgcaggtgacttcccagcaaatttcatagcgttgctcaccagcttggcaggcaagaggagaaggggcagtccccaaaagacaatcccatgaaccttctagggaatgacgtccaggctccaggctcctgctctgcaggcgggtcgcagaggcaggttcctgacctaggactagaagacattctctagggtcactgcctccatggtcttccttggcaggtcacttcttcctgggcttcgacctcggtgttctcatggggacgagggtgattggaggccctccaaggggtgcaccgatgtgtcctgtgcaccaggcagaaccagcattgccctacagtgtgggtgcaaaatgaacccacatggccacgttggaaagtcctgaaatgttcatagcctatgacatgaaattgcactgtgtgaaatctatttattctttttttttttttcttttttttctgagacggagtctcaccctgtcgccccggctggagtgcaatggcacgatctcggctcactgcaacctccacctccctggttcaagcgattctcctgcctcagcctcccgagttgctgggattacaggcaccggccaccataccctgctgattttttgttatttttagtagagacggagtttcgccatgttggccaggctggtctcgaactcctgacttcaggtgatccacccgcctcggcctcccaaagtgctgggattacaggtgtgagtcagcgtgcccagactgaaatctatttattctatggaaaggatcagagctgtagaaaaatccttatgcatgtaaaagttctttgtgtttttacttgcaataactagaatctaaacatccaaaaatagaaaatataggtaattaaattgtagtacatatgatattattctacatagtagaatattatgtggagtccttaaaatgtttacaaataatttataacaacatggggccgggcacagtggcttacacctgtaattccagcactttgggaggccaaggtgggtgggtcacctgaggttaggagttcaagaccagcctggccaacatggtgaaacctgtctctactaaaaacacaaaaatttagctgggcgtggtggtgggcacctgtaatcccagctacttgggagtctgaggcaagagattcacttgaacccaggaggcggaggttgcagtgagccaaggtcacgccactgcactccagcctgggcgacaagagtgaagctctgactcaaaacaaacaaacaaacaaaaacccaacaggggagatctttatattatcatgttacgtgaaaaatacaaaaacagaaaacaaaacaaaaaccccacaaaactcaaggccttaaattgtaaatatgagatgccaggcattattcccaaaatctataaggaagcacaccaaccaccatgttaacattgtctattagtggtaggcctattggagatttattatcttatttatgctacttcatgttttccttccttttttgttttgcaacaactctgtattagtctgttctcacactgttataaagaactgcctgaaactgggtaatttataaaggaaaaagtcttaattgattcacagttcagcatggctgaggcctcaggaacttacaatcatggccgaaggggaagcaaacatgtcc

SEQ ID NO: 1562391 - DNA, 4001 bp, Homo sapiens
taagacttaatcacagggatgaaagggcctatagggattaaatgtctaagtgctcacccgtggccaggccaaataaacaggatccaaaagggatttggcttttgaatacggatgcatgagatgtggccgagtggcccatgcctgctccatgaccacaggaaaaaaacaaatcacagtgtgtgaaagcagcttcgttgaaggacattatgctaagacattccaattataagtgggttgatttcaattttttattcccagaattactgtttaactgactgatagacatcaaccatatttggaggccaggcacagtggttcacacctgtaatcccagcacttcgggaggccgaggtgggaggatcgcttgaacccaggagttcgagatcagcctggacaacatagcgagacaccacctctacaaaacataaaaaaatagctggatgtgatggcacactcctatagtcccagctactcaggaggctgaggtgggaggatagcttgaacctgggaggtcaaggctgcagtaagccatgatcacaccactgcactcagcagtgacagtgagaccctgtctcaaaaatcaaatcgaaacaaaccatatttggtatacatacttatcctacccctaagtagaatatcataataggcatttactttagtaatgctaagacaactaccatttatgttctctggaattatatgaaatagccatttatataggttagaaatggtcaaatatgggcaattcatgtgtatcaacctaggaggacctacatttccagtgaatgcttcttgctgagtcctagcacaggctgggcccctggagatcatttaggctggtttgctctctgataggtggaataactatagcctagagggcttaagtcacctgtccaagatcacaagcctctcaagttggccacagtgcctggactagaactcacatcacccaagccagtgtccagcactgactgtcctagcagaggtcacacattccaataactcactgttttcattgctgtgaccagttggctcaactgggtacaagacataagatcaagaccatgatttgagcttacacatgtcattagttgtgccctgtctccaggctacagaatgatcccctaattccagccattcctgtcatgaatgtgtgttattcatgacaacagcaatcaggacactattaggaaagtaacactcatttgaccccaaagtccagagttttcttttctttcttttttttttttttgagatggagtctcactctgtcgcccaggctggagtgcagtggcgtgatctcggctcactgcaagctccacctcccgggttcatgccgttctcctgcctcagcttcctgagtagctgggactacaggcgccagccaccacgccaggctaattttttttgtatttttagtagagatggggtttcactatgttggccaggctggtctcgatctcctgacctcaggtgatccgcctgcctcagcctctcaaagtgctgggattacaggcgtgagccaccgcgcccagccccaaagttttcttttcttgaaacatggtagatcgctcacatcacctgggcctataaaaggcagcaaagtctttcatttttatatcaagaagagaaaacaatatgattacctacgtttaccatgaatcctccattttaaaaactctcaaaattttcattctaaggcaattaacaaagaaatgagtaaggaaaacacaagaaggaaagaaggaagagtggatgaggagccaggccatgtaccaggaaaatcattccttttatcattttctggaaaaggcacatagataactttgttacttaattcctcaaaaaataaagaatgtgtgctaagacttacctatgcagtgtgtgggcaggatgaaattcctttccaaagccaggctgttctgaaccttcttgctggcgttagcgagctctcttctgggttgcacacaagcctcagcctgctgggcaccttcaccttacaaccatctaagcccttgcaactgcagtctgcaatcctatgcttttatgaacccacatgtttaatctaatcgtatgtggaaagttaaatactaactggcagttggaattcaccttggtgcctgatggggtgtgtgcctcagggactctggctttgggcagagtggcacaagttcctgctctgggacccttcctgccagctccagccagggcagggcctgggtacagtgaacatctttccccagaagaagtcttcctcttagggtaggcttgggggacaacagcattccctgccagaatacgtgggaagggctgggtggggtggctcacgcctgtaatcccagcactttgggaggctgaggcgggcagatcacctgagatcaggagttcaagaccagccttgccaacatggtgaaaccccgtctctacttaaaaatgtaaaaattagccaggtgtggtggcacacacctgtagtccctgctactctggaggctgaggcaggagaatcacttgaatccacaaggcagaagttacagtgagctgaaatcataccacggcactccaggctgggtgacagagtgagactctgtctcaatgaaagaagaaagaagaagaggaagaggaagaggaagaaggaagaagaaggaagaagaaggaagaagaaggaagaagaaggaagaagaaagaagaagaaagaagaagaagacgatgtgggaaggacagggccccagggagaggagccaagaacagccatctctgggtggttggtatgggttgagggggtcagtataattccaggcaagtgccgtgttctgaagacgctaaataagctagattctggtaaatactcctccacgggaccacatccaaatgagtttataacaacattgttgtcttgtaaaagagaaacgggctgcaagggtactaaggtactacatggaggagctggaagttaagtccaacaaagaggttttgaggtttttgtttgttgttgttgttttgaaacagagtcttactctgtcacccaggctggagtgcagtggcgcaatcatagctcactacagctttgaactcttgggcttgagggatcctcctgcctcagcctcccaagtaatgggactacaagtgtgtacaaagcctggttaatttttatttttatttttgtagaaatagggtcttgctgtgttgcccaggctggtctcaaactcttggccgcaaaggatcctccagcctcagtctcctaaggcggtgggattacaggtgtgagccatggtgcctggcccccagcaaagtatttaaagacctagcaagagctaaacatactctatttaccaaaagatccttttctatcatggtggggacccttggaattgggagaactgagtctttatattggctatcatttaggagtgcttaccatgtgcttttatcgtattaacctcaggtaatcattgccacaacctgatgtggaaggtactgtgaacttagccaagggaatcagggcacaagaggtctgatgacatggaggtggagccatttggatttgaatccaatttaaatggcagccacggaagttacactcactcactcaaaatcacttcaaggtcatgtgggtggtcattactctgtaacttgtctcatggttttgtaaaaggaaggttcactttgttttaaaattggagtttcacattaaatggtgctctgaaccatgtggcttgaagcacactgggtggcaagaggaagatagctaagatttaacatgatctacaaattattgcagagttaacgttattaggtgtattttaaagaaatacgaggatctctgtaactccgcaaaagcttctcattaacaccatttgtcctcatgggttgtcttcactgaacaagataggcaaactcagccaggaggaacactttggtggtgtaactgtgttcaccatgcctctgcagaaatggaagcaaaacgttcaagtaagaattccgctaggagacggtgccacctg

SEQ ID NO: 1562392 - DNA, 4001 bp, Homo sapiens
agaatcacaaagttcaactaaggcaatttctgtaaaacccccagactatttatacatttatttaattcagtgaagaaaggtctgttccgttatttgatgagcgtttctgacatgctgctaccaggaatttggttaaactcttctaatcttcagtattttgggaagacttgccttgtggcctctgggccattccctggatggtcacttattatattaacagagaaggagaaaaactgctaaaaagtaaaaccctagaaggtatgggaagaaagaacagcgcccggggaagctgtgtgtgaggtaagtgcttacttacctaattaatcggctggaagtgtctctgatactgtatttagttttcacaaaatgatgatatttaaaaatgtattatagctttatgggacacttttcttttgatttttaggacaattttaaataggagagaatttgtcacctaaggctattactaccgattgtttcatatttgtttaaacattcacaagaggacaaaagaagataggattggggataacagttgattgtgcatgagtgtgagtgtgtgcttgtgatcttgaggttgcaaaaaatgaattttaagaatcacttggattttttttttttcaaaatccctcttacaggtaaaggggaaaaagataaatctaaacatttgaattaatggtacacatttttggtctttagttttccacagtcaaatactacattcgttgtaagttttctaacctgtgggttaaaagaaattatgaggtcaagaaatgtctattgaacaataaattcttatttccttcaagtgactaaatgcggaagtacagaggagacaaacgttggcgttacaggagcaatgtggaaatttcacccagtataacatttattagctgaggatagtctaaactctcatgaaattatacacagattaaaaaacatattaatcatgggtcatgaacaaagttcataatatttccaaactcaggatcgtttacattccttacacctaccacagaaaacttacataacttttctcaaaaggataggtaacagattttaaaatattccggcgaggtttcgccttacggcaatctaaactgatttccccattgacaaaggaaagtaactgcttcagaattagccaaagaactatgtaatcgctgaaaatcaacaaacttgctctgacagacccttgcaaagagaagtcggagtaattcttgtcccgcaagctagacccccgtacacccaccgcaaacaagacgacatctggatattgtttcacgagcaagaataaaacacttttttttgtcccatcattaagtaaaatcccgttttccacatgcaaacagcacttgtaaattcccccagataagcacgggcgtcttaaatgatttaaataagctttaaaagaatcacaacgctttcattacctttagaagtaaagtttttcaaaaatacctccagcgtgccacatgccccagagttaacataagcgccgtgtacctcttacctgcaaagactgaagagtgcagactcctggctggatgggaagttatgtcaagtcagagaaatgctcagtccagacaggttgccttgggaaagataggtgtttagggttcctcaaaatgaagaaaactctctcactgttcactgtcagtcaaaaacaagttggtacaagtttgagtaagaattacctggaggaactgaagagagaaaggaaagagattgggagacattgggcagaggagggagggatagggaaggagggagggagggagggagggaggaaaggagagaaagtgagagacagagagagagagtgggggagaaagagaaaaagagagaaggaatctgagaaaggagaccatgatgtcagcatgtcttaaggtcttaaggaaatctacaaaccagcacaggattctagtgggcatccagtccgggctctccaaacacctgtgcaaaagaaaactgatgcctttttaaagaatgccagttaatctttgaagaaactttggccattcttatcaaagcattttaaggtccctttggctaagtaaactataaataaataaccagattaccttttctaacaatctctcctttatcccatgttttctttttctctttcctctctcctccccaaatgaatattaacaaaatctcttgcctcctggtggaatcagaatgaatccatacagactatacctatgtcaaacatacctaagcaaaatgccacagaggaaaactcatgtttttagctcaacccctttattgagctgatttttttctattgccctgctttccctgataaatattatatatatatatatatataagctgaatagacatgggcaaaatttggttcttctggatcatggaaattgggcttcgggatacatgttggaatctgagttccagcattcttgcatagtctggcatctttatgagaaatggtcagaattccatccttgaagaaggcttctaatggaagatctctggaagcagaggcagtaagcttctttcgggaatggggttatatgtccatcctatgcaaagtgactcttgcagccaccacatcaagggaggcccgtccaaggctcatgtgctctcctggccttctcacggccagactgcatggggatcgtggtcaatcctaagagatggaatgggtttttcaaaagcacttcccctagagagagccctctacactggtccaaaggcaatgccaagagacgcaaacggtctgtttcccatgggagacgatgatatacccacacgtcccctgcccaggcatgtcggtggggccagaccacggcatctggtttgacatagagcagacagggtgaggaacactttgcttctgttggaaatgaatgatacttcctctccccagagtactgggctctgcaattcaccccaagtgcagctgctgctgttctgggtgcttgaactaagtgggagctggaagggatggggtgtcattctgtctttaggaaggaagggctgagacttccttattttctcccccctctccctgctgactcaaagctcagggcataaatcattccatttctgttttcccagtggagatggtatgcctcagtctccttctcttttgctctttctttccctggaagcaagggactccttttcagcctgggagtataaatggtggccctggaaagaagacactgggctcccaggggttcagggcaggaggatgaagaagctacacgagatttggacttcttagagctggtactcccggagtctagaatcagatagacctcccgcgaggatatgctaaaagtcccatagaaaacaggtaagcacagaggtgcagaacgatgaaagagggaaaactgagaattaaaggatctgagtatataccagctgctcaggtgggatgatttgcaggggctgtttcctcggcctggaatggtcccctctggccttcattcactgagctgactcattgttcaggtcctagcctgaatggcacctcctctgggaggtccttatctgatctggtcctgatccaagtccgtgccccaagactccttttgttgtgtatctcacttatcactgtctgaagttgccctcaagcttttccatttaccatctgtgttccagtctagagctcaatggtacctgtcttattcaccaaacatctttccagcaatatctggcacatcatagtccctcaaaaaatatgcatatttgtcaagtgggttgacaaaagattacatatggaagacatgatttgttaccgtggaactttaattatctccttatatttaatctgtatttccagcctaagctttacttaataaactaacatttgaacacctttttttcaatttgtaaaacactgccagaaatgttgttaagtccatgctcagatcaaaatgtaggcatgattagttgtattttaagggcaaggagatggaagccaaagaagataagtgatttgtgcaaagtcacacagctacagagcg

SEQ ID NO: 1562393 - DNA, 4001 bp, Homo sapiens
tacatctattacgaatataaacacaaaagttctcaacaaaatacaagcaaattaaatatggatacatacaaaaaggattacacactcactatgacaaagtgggatatatctcagaaatataatgctggtctaacatccaaaaaaccagtcgatataatgccccatatcaatagaaagaagaacaaaaaaacacgtggtcatttcaatagagcataaaaagcatgtaacaaaatccaaaatccatttatgataaaaaaaaaactattcaataaactaggaatagaggaaaacttcttcagcttgatgaagggtatctacaaaaacaaaacaaacaatacaaaatctcagctcatatcatacttaatggtgaaagactgaatgcttttccccaaagctcaagtacagcataagtgtgtccactctcactacttctatttaacaatatattggaggttctagcctgggaaattgggtaaacaagataaatcttaaaaattaagattgcaaaaacataaggaaaagttcttatatttacatacgacataatttggtatgtagaaattttaagtaatctactattaataattagaataaattaatttagaaaggttgcattatacaagataaatatacacaaattaattgcattgttataggctagcaatgaagaatctgaaaagaaattaagaaagcaattttatttataacatccaaaaagaataagatacttgggaacaaatttaatgaaaaattataagactttcacagtgaatactatgatgctgtaatgtaacactttgtacaactacaaaacgttgttgaaagaaattttaaaagaccaaaataaagggaaagacatcccatgttcatggattggaagagttgttattgttaaaatagcaacactcatcaaattgatctatacattcaatgcaatacctatcaaaattccaaatggctattttgtagaaactgacatggtgattctagaatgtatatgggaattcaaaggaactagagtagccaaaagaatcttgaaaaagaactaaattgaagatctcacactgatttcaaaacttatttcaaagctacaataaacaaaacagtatggtattgacataaggataaacatatagatcaatagaataaaattgaaagcccaaaagtaaactacttaatttcaataagtagtgccaagataattcactaaggacattatattaacttgaggtaggtcataaacctaaatagaagagctaaatctatgaaattcttgagaggaaacatgaaagcaaactttgtgaactgctgttagagatgacaataaaaacaaacaaaaaaaaactgacaagagagaaaaatagataatttggacaatagtataattaaacatttttgtgctgcaaataatacaatcaggaaagtgaaaagaagacaatccacagaaggggagaaaatatttgcaaatcatatatctgataatgggctcatatccagactgcatgaagaatttttaacaacttaacaataaaaatataaatagctgagtttaaaaaacaataatggatctaaatagacatttacccaaagaagagaaacaacttgtcaataaaaacatgaaaagatgttcaacatctttagccactagggaaatgcaaatcaaaaccacaatgagatactacttcaaaaccacaaggatagttataatgaaaaagacagataataacatgtgttggcaaggatgcaaagaaattggaatgttcaaacgttatgggtggtaacattaaaaaaaagaaaaattttggcaatttctcaaaatattaaatacagagttattatatgatccaatcattctattcttagttatatacccaagagaaataaaaacatacctccacataaaaatttgtgcatgaatgttcacagtaacactcttcagaacagccaaaaagtggatgcaacccaaatgcccatcagctgctgaatgtataaacaaaatgtggtattgaagcaaaagttaaaaagaggaaaaacaaatttttctcctttaggcaactcgagaccccgaccccccacccaaccccgtgtgctattgtatcctgggaagttttgtaagtttgcaaattcctgttttctgtggctggtttctgtaagttcctgctttccatccgggtgacacagtgaaggacacaagataagcttgagcaagcctagattacagccacctgggccgcatagcaggagtcacatgacatgcttaaacaagcctgagttacaggcctgccactgtttgataaactgcctttgttacctgctttcacgccactgcgttttgcaccactgtaagcttgtttcaaactagccaaccccctttcagaagtgtgtataaaaatcaagccctgcctttgttcaggactcagcctttggttgttaatctgctgggcctgagcacactcaataaaatcctcctgttccacccagtagtctctccagtctcctcattcctgcaatattttggtgaaccagccaggagtggagatgacaggtttgctgtctcctttgcctgtgggtctggggccctgagctgggggagacctgtgacctcaggcatgccatcggggaacttaaacccagagaagggattggttcttccgtgatccagtacccctccctgacagcgcaacagaatccaagggattacaggatgatttcagggatagtgcgccacaggactgtggtaaggtttggggcccaagacaggacccatcccataaggacagaaggggagcctgatcaactcctaggggtgcactgagtagtctgacccaggatgtgggagtggctcacaaagtcggatgaaacctacaccccacccagagaaaaggaatggggagcagggaagtgtgtgaatgcatgtgaaagaggcagttctaaaaggagtcaatgtggggagtgaagtgtgtggggccacaggtctcttagcatagaccatacgcccctagcaaagtgtgggaccaaccaggactagtggcaaacgtcctccggggctaccacatatggcttagggaggcaccccacaattcagtgattgtggtggtccaggtttgggactcatatgaaccctccattaaagctaagcagcatctgaaagttcccatgagggagatggtctaatcagtctgaagagaaagtaaaagagtgaataagttgtgtcataactgggaggaaatgggaaggaagctgtcaaaacccaccccattacaatgtatgttaaagaacttcaagaaaagttatgcagagtgttgtgggatcaagttgaccccccagaggttgagaactctctgtgaaatagaatggacctcttttggtgtgagatggctggtcgaaggaactatagatagggaaacaattggccatgtatttaaggtggtgactgggttgggaggacagccagggcatccagaccaatttccttatattgactcatggctacatatagtccaaaactgacctgcgtggttgcagctctgcctgacagcttatggcaaaacactcgtggctcaagccaagcttaaagtgaaagaaaaatcagcttcgctgtcagctacagaaacaaagggaaagccacaggaaaaaccagttctgcaggaatcaccagaggagataggaatcctccctacagtccaatctacccgcctttactaaggccagcccccgaggagtcaaattcaaatggtaacgaaccctgggccttgcctcaaaaagaaaaatcaaaaccactgccccaggtcaaggaggaaagtcaggatgatcaagcctgctgcctccagtctggccatgcctgggctttgcagatgcctccccgggaaactcagggacccctctattatactgaacatggccagattcaaggggagagaaaaggaacccctcctctgggaggctgaccaggagaaagcatttaaaaaaatcaaagaagccttaacacaggccccagtctt

SEQ ID NO: 1562394 - DNA, 4001 bp, Homo sapiens
tggggaaataagactttctgtaaaatgaccacaactgttggtgggaggaaggagtggaaacatggagagaggacgttttagaaaaatgtgttttccttaagcaaccagaatcacaaagttcaactaaggcaatttctgtaaaacccccagactatttatacatttatttaattcagtgaagaaaggtctgttccgttatttgatgagcgtttctgacatgctgctaccaggaatttggttaaactcttctaatcttcagtattttgggaagacttgccttgtggcctctgggccattccctggatggtcacttattatattaacagagaaggagaaaaactgctaaaaagtaaaaccctagaaggtatgggaagaaagaacagcgcccggggaagctgtgtgtgaggtaagtgcttacttacctaattaatcggctggaagtgtctctgatactgtatttagttttcacaaaatgatgatatttaaaaatgtattatagctttatgggacacttttcttttgatttttaggacaattttaaataggagagaatttgtcacctaaggctattactaccgattgtttcatatttgtttaaacattcacaagaggacaaaagaagataggattggggataacagttgattgtgcatgagtgtgagtgtgtgcttgtgatcttgaggttgcaaaaaatgaattttaagaatcacttggattttttttttttcaaaatccctcttacaggtaaaggggaaaaagataaatctaaacatttgaattaatggtacacatttttggtctttagttttccacagtcaaatactacattcgttgtaagttttctaacctgtgggttaaaagaaattatgaggtcaagaaatgtctattgaacaataaattcttatttccttcaagtgactaaatgcggaagtacagaggagacaaacgttggcgttacaggagcaatgtggaaatttcacccagtataacatttattagctgaggatagtctaaactctcatgaaattatacacagattaaaaaacatattaatcatgggtcatgaacaaagttcataatatttccaaactcaggatcgtttacattccttacacctaccacagaaaacttacataacttttctcaaaaggataggtaacagattttaaaatattccggcgaggtttcgccttacggcaatctaaactgatttccccattgacaaaggaaagtaactgcttcagaattagccaaagaactatgtaatcgctgaaaatcaacaaacttgctctgacagacccttgcaaagagaagtcggagtaattcttgtcccgcaagctagacccccgtacacccaccgcaaacaagacgacatctggatattgtttcacgagcaagaataaaacacttttttttgtcccatcattaagtaaaatcccgttttccacatgcaaacagcacttgtaaattcccccagataagcacgggcgtcttaaatgatttaaataagctttaaaagaatcacaacgctttcattacctttagaagtaaagtttttcaaaaatacctccagcgtgccacatgccccagagttaacataagcgccgtgtacctcttacctgcaaagactgaagagtgcagactcctggctggatgggaagttatgtcaagtcagagaaatgctcagtccagacaggttgccttgggaaagataggtgtttagggttcctcaaaatgaagaaaactctctcactgttcactgtcagtcaaaaacaagttggtacaagtttgagtaagaattacctggaggaactgaagagagaaaggaaagagattgggagacattgggcagaggagggagggatagggaaggagggagggagggagggagggaggaaaggagagaaagtgagagacagagagagagagtgggggagaaagagaaaaagagagaaggaatctgagaaaggagaccatgatgtcagcatgtcttaaggtcttaaggaaatctacaaaccagcacaggattctagtgggcatccagtccgggctctccaaacacctgtgcaaaagaaaactgatgcctttttaaagaatgccagttaatctttgaagaaactttggccattcttatcaaagcattttaaggtccctttggctaagtaaactataaataaataaccagattaccttttctaacaatctctcctttatcccatgttttctttttctctttcctctctcctccccaaatgaatattaacaaaatctcttgcctcctggtggaatcagaatgaatccatacagactatacctatgtcaaacatacctaagcaaaatgccacagaggaaaactcatgtttttagctcaacccctttattgagctgatttttttctattgccctgctttccctgataaatattatatatatatatatatataagctgaatagacatgggcaaaatttggttcttctggatcatggaaattgggcttcgggatacatgttggaatctgagttccagcattcttgcatagtctggcatctttatgagaaatggtcagaattccatccttgaagaaggcttctaatggaagatctctggaagcagaggcagtaagcttctttcgggaatggggttatatgtccatcctatgcaaagtgactcttgcagccaccacatcaagggaggcccgtccaaggctcatgtgctctcctggccttctcacggccagactgcatggggatcgtggtcaatcctaagagatggaatgggtttttcaaaagcacttcccctagagagagccctctacactggtccaaaggcaatgccaagagacgcaaacggtctgtttcccatgggagacgatgatatacccacacgtcccctgcccaggcatgtcggtggggccagaccacggcatctggtttgacatagagcagacagggtgaggaacactttgcttctgttggaaatgaatgatacttcctctccccagagtactgggctctgcaattcaccccaagtgcagctgctgctgttctgggtgcttgaactaagtgggagctggaagggatggggtgtcattctgtctttaggaaggaagggctgagacttccttattttctcccccctctccctgctgactcaaagctcagggcataaatcattccatttctgttttcccagtggagatggtatgcctcagtctccttctcttttgctctttctttccctggaagcaagggactccttttcagcctgggagtataaatggtggccctggaaagaagacactgggctcccaggggttcagggcaggaggatgaagaagctacacgagatttggacttcttagagctggtactcccggagtctagaatcagatagacctcccgcgaggatatgctaaaagtcccatagaaaacaggtaagcacagaggtgcagaacgatgaaagagggaaaactgagaattaaaggatctgagtatataccagctgctcaggtgggatgatttgcaggggctgtttcctcggcctggaatggtcccctctggccttcattcactgagctgactcattgttcaggtcctagcctgaatggcacctcctctgggaggtccttatctgatctggtcctgatccaagtccgtgccccaagactccttttgttgtgtatctcacttatcactgtctgaagttgccctcaagcttttccatttaccatctgtgttccagtctagagctcaatggtacctgtcttattcaccaaacatctttccagcaatatctggcacatcatagtccctcaaaaaatatgcatatttgtcaagtgggttgacaaaagattacatatggaagacatgatttgttaccgtggaactttaattatctccttatatttaatctgtatttccagcctaagctttacttaataaactaacatttgaacacctttttttcaatttgtaaaacactgccagaaatgttgttaagt

SEQ ID NO: 1562395 - DNA, 4001 bp, Homo sapiens
cagacagcatcttcctgtttattgaggagtagaggaggacagaaattggagaagtgtgatcttactaaaggggatgatggtatggcactttggtgtaagaggaacaagctgaaggatgtggaacaaacttggctagcttttgagtcacatgtaggagaggcaacaagagatgaagaaaggattcagccagcaggcaggtctctgtgaggttttcaagcatgaacactagttcacgtctttgcttacacctaacatgactttgcccaggcggaacagcctgcaagcactgctgcatatggaagaggtgggctgcccagagttgggattggcaaagcctcagtggtaaaggttactggggcccaggtttacaaataccacattagaaacataaacatttgaaaaccacagaatgtaaatgctcaaggtcacagcacgctcatcaactcgtggaatccatacagtaattgagcacatgaagaagcctactgacgctgctgtctagttttagaagagctataatttagtattgctagctatcaattagtcctgttttcctcatctgtaaaatgagagggttggatgaaatgacctcaaagtcttcttccagcatggtcaatggtgaatgctagagcacacgtgaaattctgaaagttaatttacttctttaacatttatgttgatcgtttaactattgatgttcaaaaatgcagctgcagagctactacaaatcttttaggtctgtgcacacaaagctattagttttatggaccattctgattttaaaataaattgccctgtgaaaatatgcaacctaaattctggtgggagaaatctcaagtgacatgggtaattgaatagggtaattgataggtcattgacaggacatggaaatagaccaagtagaaaagtattagacatgaataggttttaatatttgcaagtttggaaaatgactttctgaacattgggagaaaaggagcttttcaaatactaggatgacagtagctagggatacaaaataaagttattcaaatatgacttgtcttcctgcactaagattaatttagagtaatatgcataggacctctttcatccctttcaaacattgccagtaagagttaaccaggccttggttggatcctgaaaaattaaggtataatgtgaccaactagacaatctgtaaaggtaactagagtattagctagctactgttgtttcatattgcaaaaatcttgtcacttttcatatacaataagacttttgaataatactatatataatcttgaaagaaacctcagtatgtgtactttttctaaccgctgcatttacacatcttgtcactgaaatcaaagtctttgaggcttaaaacttagtgctaactctgaaagttacttatttgtatatctaacctaaatgaatagtttattgctattttcaaaagcatgtttggtgcattactattgaaagcagtctttggcataaccaactacattttacttttatacccaaagcctctgtttatgcagataaattgaggttccagtctttagagtgtagggtataagtattaatcagttgatttcctgccaaggttaatatatttttatttgcaatctcatagagtagggctcaatcattgttaagcgctggtagtttcagaagcagaagtcttcttcagatcagtaagatttatactacttgaaattaaaaacagcagataatggggaaaagtcatgcctgaggttaaggtgaatcactttgattggatcttccagaaatctcctttaaggtctgggtggctttttcccctcttcctttgcactaccctgattgatcagctacaagcatcctaaggggccttaccttgagtccaggtgctggggcccaatctcagctgaagatcccagagatctggggaagtgatgaagagatctggggaactgactcagcagggggaagcctgtgtacaacccacacctgcaggctacgtgctcctgtgctggctgagccggtaggcaggaacacactctccaccccagcttgcagaagctgagcattcaggcagagcctcggtcccaccgcccagctgccctcatccgtgtccaaggacagagcccttgagccacgagggcttctggcacatggcttcagtttttatgggtgaaagacagtcctctggcatcattaaggtatttatatctgagatagctccagatttcttaaaagctatttgacaacaaaaactgccaagcagaattaactaccacagaggcctggaaagcagcacaagtaagttttttaattcttcagaggtggtagaagtcaccagaaattctccctcttgaattctctctaaagggctctggatccttggaaaaatgatctggtcaagcctcatactttagtaattcttaaaactgtcatggtcccatgctttctgtctcaattgtggcaccggatcgcaggttttggccgtttctttttaaagcagcctctaacggtggagaaattattataaacaaatgggagcatgctagcagcttcccatgacagtgggtggatctcacctgccttcggtttagacaagcaccatgtgaatttctatgggcgttttcttccctgtgccatgtgttcctatagtgaccttctgcacaggatgggcatgatctgcatggaacaatgatggcgacgtctggcagcccaggcttgggggatcgtgtggcctaagcagtgtagcacacaagctcattgccttccattgagaagaatactcaaatacacccagctcagtctccaggacttccccttataggaccacattagcaatgagagagctccaggaaagacatataaacacatttcaactgcttaggaaaagcaggaatcgcatgcctcttttaaactgcaagtgtttcactgattttcactttccactcactcctctgatctctgttgccaaacgataaaccagtttaattatgttgcttccgcctgagtttggcttcatcttttcctctttagtttccacctgggataggaggaggcctggtgaagagttctaggccacattaggagaacaagctcttctgtgtcctgcaaaacctccggcaaatgacccagcccctccgagcttcagttttctcaatgatactgggagatggggtcagactagcttctctgaaacctctttaagttttagctttctatgaagggaaatttaaagaaaagcacagagagacggactagactctattcggggcttatttaagcagctacaccaactttacaagagcatcttttcttgaagatgcccaaccaggttttgtccctgagaggatttggaaaggtccacttagcagaaaccctgctggcctggggctccccaatgtccagatggactcagcttcaccagatcagtgttgttgccactcagaaatgcctttggctgttggagaaaccaggctgtatgcctatctgctgcatatgaaattcctgatgatgcatgcaacgtatagggaattctacattgacccaggtagaacagttacacactcccttaaatatgaatacacttatgaaccttttcagtctgttactataatgcaaagaatgcagaatcaagttttgccttggtcttgccataaatacactgctctggtcaaatttgctgatttttttttatgttctcttagttttgacaaaacgggatgatcacaagttcatttgatattatgccatgttcaacttcgtgttgggcattttggtgatagggaggcaatatgctatagtgggaaaggtacagggtaggagccagacagacttgggttcaaatctcagatcttcaggttatgaccttctaggaggagttaaagtgtgaaagcctagcccctggggtcatcctgaagatggagtgagatgccttctgaaaggcaactgggctagtgactttggacaagtcacactgtctccctgatcttcagtttcctcatttgtaaaaagag

SEQ ID NO: 1562396 - DNA, 4001 bp, Homo sapiens
caggggcacccggccagctctgggcgccctctcgagcgtcgccgtcagggagttgggcacaaccgatgccctgggacccgccacagggcacgcggctggcgtattcctttgcctggagccgggaaagttttgtccaatttttttcccctataactggagctgcggtctcccctcccacctgggtcgccatggagactcgagctctttttctttctccaggcaaaatgggcgaagctcagttagctcagccctgactgtagcaagcccttttttctccctaagcagttcctgggcatcacccttttccgtttctttttttcagcaaaagaaaggcaggcagggaacagggctagcaggatgtggcattgctccctgtaccgtagggctccccgggaccgacagactttggataacagcagttgggaaacactctaaacatataatacatctccaactcccaaacactggagttgtggggtttttttttttttctcttcctttttttgggggttggaggcggaattctttggaaaattctggtattttgtttctccactaacctcaccctctgtggctgtttctattaagatatattttccccctgacaatctctccatattgcacctagtacaacagatgtacctgtggatccactgggcttttattgggttttgggaatactgatgttatttcacttaaaaactaatccaagcttaatgttttgatgaaaatgaaaatatatccacagggaagcaaatatccacagccacccagtcctctaaatgccacacacatctcattttatctaaagtgttttttcttcccttccaattacaaaataattcagtttactcctaggaagatcttcctattcactgtttttagtcatgctagcacatcttcggttttaaggatagagaacagttaggagttacagtattctgtttcccattctccgcatgtttctccccaaccctcacttttcctccctttcgtgttgtctcctctcctctccatgcaaagcagaacaagaagactgccttccacaaagacaataggcttttcccaactgtaaatgactacatcacaagccgcacctgtcagttaatcagtgcatttaagtctttgccagcggatgttgaaatgatgtctgcaataactgactgggtttctgcgagcccagggatgcagacccctccttcccccgccccccgtgcgagtttcagtcgctaatgaaaaccgtatgaaacagattccccttctgttatgtaaccggcttctccctcgcctttcggctgacttgggcacaatgtttctcatgagagtggagatgcctgcggcgacggcggagctggggaaggggacgcggggacccgagagcacggaacgcctcgcccaggtggacgccagctcctcgcctgcgagcagctcagcgcaccgcttacctggctgcggacggggtggcttcactcaatcatgatctcctctcttgaaacggagcaagactgaacaattcactacacgacggatggcgagggaaggaaatgcaaaaaagaaaaggaaaagaaaaaaactggaatcagatggtcaaatttcacatcagcaccgagaggctgttaggagactccattctgctcgcggctgctccggctccaggtccggcttcccggcgtccgcgggtctccacccctccgcccgcccagcctctccagccaggtgcggccgtctccggactggctccctctggccgagcgcggagagcagggctgggcgctggggccaagggaggggcggaggggcgcgcgtttgggcagggacgggggagggagactgggtggaatgaagtggggaaagataagagtggcagaagaaaaaaaaaatccccggttaggagaaaagtggtggaccacgcagagagacgtcatgaaatccgcagattcaatgaatgctactcaattccagccgactggctgagccccgctggcagcgcacgaagcgacgcggctccgagataaaagcgagtgcagcgccgcgtgctggggaaaaagccgcacagcgccggcgcggtccgggaggaaggggcgggggcgagcaggacagagccacagacccagagacgcccaccccgccgcccatgccagctagcgtgtcagcgcgtcgaggaccgggcttggtgggggcgggctgggcacaaaccaacgtgcatcccccgccactggaaacgtgggtgctccatgctgggggaatcttttgggtttcggtccccgaccccccagtcccaacctttctcccagtgccactaagtaagttattcccggagaaacgcctggaaagcaggaaagagccgaagctcggggagcagttttgtctgctggttgtaggggttcggcttttagggttttgtgagataaggaaaaagaggctctgggcactgcctcccaccgggctgaaatccgtgagaggcagccccggcgcgggagccggagcctgcaccgcccagagggggcgcagcgagcggccgggacggaggggaggggccctatccctgagctttgcttgcacctggtggcgccccagcctgctgccccattcagtcccttctgtcctgtccactgcaactgggacctggtcccggctgctgcatcatcaccccatccttatatgatgtctctggggtcactggagacaaagaatggccttttccaagaatgacccaggctgccttcaaagttgaatttgtcaggataagccccttagacaaaggtctactccactctttgaatctaacttgctttgtgctgttattccaggggcccctcatagtgctcccctcttgcaccccctctttttcttatggtcatcaaaaacaatggttctacatttccaaagtcttcccataaattgcttctacctatgaacagaactctcttttatgctgtctttttcctagggatgaatggattgacaaattgtaagagtagcgaataccattggctagtaattttataatggccctttcaataactggctattcttgtgctgctttatgaagtggctttccttccacaaggcacagaatctctacctcaaagaaggtgaccttattttagagagaaggcttacggaaacctcttatttccaagattattttattctacatacatacattttaattacctagcaattcaggtcccctcaagaatgctgtctgccctctaaaaatgactgtaatatggagaggtgtttgtgtcaatttgcatccaaagtcatgtaaaagtcaaccgtacacacggcctgtgagcttgtatttgctgttgattttccctaagaggttgtaatctgacttgctattacttctgagtcatatatcccatatacagaagatatgagtatgtgtaatatctgtagtatgtgtaatacgtgctccacaatgcctgctggatctagtgatagtgttacaaataaacaaagaacaactgaaccaaataatccctgagagaccaggaatacaaatgcaagatgcaggatttcggtggacacagccttagaacattaaaagaacaacccatgttgactatagttgtgtaaagggcattctgtttaatctgtgaagctgctatgggtatgcctgctaattttgatgatatatacttttaccagtagaatgatttcacaaagtatctttcttacaagatattagactaaataagaaagtcaagagttggaagtaacctatttgtctccttcaaatactttgaaaactcccctacttgaaacagctgccggggtgatgtgggcaatagcactttgtgaatggcataagagcacgtgttgaatgagatggatcccattaacacagcctgggatttgataaacaccagagacaagagcaattggcttaactgaattcattcatttattccgtagagttctgataaagtgatctgcatgggtgtaactaagagactgcagccacatctgaaaatcaggcgagctgtgct

SEQ ID NO: 1562397 - DNA, 4001 bp, Homo sapiens
tgaggactgactgctctgcacccacccagggtggcggagccccatgcgctgcctgatcttaccattgtccccgctgacggcctttcccacaggacatcacaggcagctcatgctccccgcgtggaccaagccttagagagatgagagtgtcgctgactgtgtgcccgcaccggcatcatctgtgggaacccaggctccttgtccctacacctgtgtggaaactgctgccccccccccccccaagaggagaacctgggcagcgccagggttttggggaatcctgtgcctccatccgcccaccccatgatgcttttgttcccatcgagtcccttgtctcctgcgcaggtgcagcagcccctccctctcccctcgcattgctgctaaaacgggcagaaccctcgggcgggcggcacacagggagggtgaccaggcctggaggctgcagtgcccggaccccagggcagcttcccggaaggtgaccctgcagtgtgggctctcccaggtgagagagtgggtgggacagtcctggggcctggagagccccacagcccagggcatgacagcgaatgaccaggctcaggaagacccgggcacaggggctgagctgggactgagccttcctgggagtgaccgtgagtcccacctggtgaccccctggaggagttaggccactgtcccctgtgacttctaggttaagtcactcattcctaaaaataatcatggctggaggagaccaatgtcagctcaaaaccatgtgtcccccaggaacacaacagaaaagagaatcaggtgaccaaggagagtttattggggagcaggaggaggtgctgagaggttcaagtcgaggccaagtgacccagagcagagaagctgggagggaggacaggggacctagcaggcaggtgggcacctgctggaaggcaagagctggggagctgcaaggatggaggctcctgggagcaaggagggggggtcacctcagcacaggggagacacggggacccgtcctaggtgggggaagccacctaacccaggtcaggaactgagcccagctggcccagggcgggtgcccatcagcagctggactcctggcctgagcagaggcctcagcaggccgggcgggagcacgcggggcggcagaggagggacacgcaggaggccgggcggcagcagctggcctggcaggaggaggcaggggcacagcaggaggagacaggcatacagcaggcgggccggcatacagggcggcagaggagggacacggaggaggagggtctgcagcaggaggtggtgcagcaagccggctggcagctagactgctggcagcatgaagtggaagccccagagcagacgggcacacagcagatgggcttgcagcagacaggcttgcaacggacgggcacgcagcaggcctgctggcagggggaggaggtgcagcaagctggatggcagctagactgctggcagcatgaagaggaatcctcagagcaggtgggcacatagcacacaggcttgcagcaaacaggcacacagcaggactgctggctggaggaagaggcacagcaagttggctggcagctagactgctggcagcatgaagaggaatccttagagcaggtgggcaggcagcacacaggcttgcagcagacgggcacgcagcaggcctgctggcagggggaggaggtgcagcaagccggctggcagctagactgctggcagcacgagggcgtgcaggagctggtgcagcctgattggcaggggctgggctcacaggctgcctggcagcaggggctggacacacggctcactggggtgcagaccagggtcaggcagggggccggggcgcagcagctgagggcgcagcagtggggctcacagcagctctctgggcaggcatccacctgccaggagtcggagcaagcgctggagcagacggacatggtggacgcggccatgctggggtggggaggaggtgagctgcgggaggtgtgagtgagtgagtgtgggagtcagtgtgtgtgtgagtgactgagtgtgtgagtgagtgtgtgagcttcgtggggctctgcttttataccccttctggccttgttgttccagggcccacagcgtccccttcctggttgctgagaggtggcgtgtgtcatgactagggatgtttgtttgcctgtgatgtggcccaggtcataaatctcctgtcctgtctgggctgtagcctgtcccatgtggatccctgggggcaagagtggaggtggacctggtcccagcacgccaccagtgcagtccgggttgtaagaagggggctgcggaggcaggggtggcccttcagccttatgcaaagtgtggcatgccagggtgagagctgtcccactcacgatcgtgggggcgtctcctccctaaagcgggtcctcactgaagaggcagaagcagctggtagaagcacaggatcactggagcagccggagagaaggtgcagcagtggccagcgaaccccacagtggtggccctgcacattccttcccccatccccatcactgaagaaattagagccccaaacagggagaaggggagcaaggaaggagaggccatgcccctccccacggccttccccgaggtccactcagacgttggtgtgggaacgctggggataggactgggtttcggacaggaaagaaaagttttgaactggcccatggatttggttctgctcttaaaggccatagctttatgatgtgcttcaaccatagataactcaagtcccgttatcaatattcttaaatttatttttttttttttttgtacagatggcgtctcaagtgatccctcctgccttggccaaagtactgggattgcaggcgtgagcccggtgcctggccatcatcagtatttctgcaccacgtgtcttccctgttcctgttcattgtccttgctgtcctcagcttcctttcttcaaacgtaagctgcatgtgagcagggagtgtgtttgtcttgttcaccactcagtcttcaaaggcctaaaatcatgcctggcccaaggaaaagcctttataaaaatgggctgaaataataaacttttttggagaaattattgaagagtaattttgagctctgaacgcgattccattgtgccacctttttcttatgctgtataaaatgctctgtcaagttctcctttcgtgtgtggggaactggcttacatcagactggccatctagctgagaaatattaggaaatctggtttacaaacaaaatctctgttcgaaggggccgggaggtatcaagacagctgagacttgagtgagtgaatccgcattagagagaaactgcacagaagtgagtccaatattccttgtggattttcttactgaggcatttaccaatttacagaccacagccaagaggccgagagcctgatcagctgagcagagcttttagtagtctcatggaattagaagaaaaaaaccacagagttcaggacctgacaaggtggagggattctagcaaaaacaccctaggctttcagttggaaatgctgaatgtaagtgaagggctactccctaggaggaaggaaaaaccagaaagaatgaaacctatctttaaataaactcgcactgaactcatatgatctgcctgtagcctaactgcctcccagaaacaaaagtgatctcttctggagacagcagcatcaacagaggctcaaatcatcttataaattttcataaagtccttcatgcagtcaaaaaattactagggatattagaagacaagaccaactgaccaaaagaccaagaggaaaaaaacaaacaagagaaacagacgtgcaggagatctagatattagaattgtgaaactggaatttaatgctgattaacttgctcaagaaaatagagaacaaatggagaatttcagtgtcaaactggatttattaaatggaatcaaacaaaaattctggaaacgaagaacacaatagctgaaattaagaactaggtagcttagcttta

SEQ ID NO: 1562398 - DNA, 4001 bp, Homo sapiens
ggtcatttgctggagccggacgtgcgctctcaaatgcgcacagcgacctggcggaaagagtgcagcagcttgtgccacttccccgacgtggcatctgggacggagggtggcaggcagagctgagggctatttgggagagacctgggaggctgggggtgcggggacagggtcctcggggtcagagtccaggaccacgggaccaaaagggagccaggaccctgaatgtctaggtgaggccgcatggggcaggggggcccgcaggcttggttagtgggtgccatggtccctgcccatctgtgctctcgccagcgatgcctgagcaatgggtattccagaaccccatgaatactgggctgctgggctcgagtcctgggggagggcgtggtcccaatgtcttactgtggaggagatgagggctgcagggatgagcactgtggtccatagctggtctccccaggggtaacaggaggggtgaggctgctgggtggagccaggccccaggtggtctaccccaggcctggggggcagccatggagctggggagggtgaatgtggctcaggggcccagagtgctgccagggtccactttgtcccgaaactcctggccttggttccagaggcagctttcctaagatgggccggggggccacgtgctggggttgggggcccacggggctaagagggagactggccttcagggttcacagaggccagcaccagaaggcattgcttcctgcctcatcccatgcccctcgggggtccacagacaggatggaaggtcgacagagacagaggggtggagccaggcctgctgggggtcaggactctccctgcagtcaggggtggcatcacttcccacctcaccctgtgcccccccgggggtccacagacaggacagaggttggtgtgagacagaggcggctttattagaactagagggggtgctgcccagggtggaaccaggcctgctgggggttagttctgcagaacttgggtctgggggagtagctggggtcccacaggcagccatcatctgggaaggactgggggagcatcctggtccccaagacaaagagcctgccccaccttctgagggtgtcaaagccagagagggcagagcttgctggggcagctgggaggtcagcccctggtgggaagggactccggatcacatccagggctgtcagcagctggacttctggccagagcagaggctgtagcaggcagggcgggagcacacggggcggcagaggagggaaacacaggaggccgtgcggcagcagctgggctggcaggaggaggcagaggcaccgcaggaggggacgggcacgcagcaggtggacttgcacacagggtggcagaggagggacacggaggaggagggtctgcagcaggaggcggtgcagcaagcaggctggcagctagactgctggcagcatgaagtggaagccccagagcacacaggcacatagcagacggacttagagcagacaggcacacagcaggcctgctggcatggggaggaggtgcagcaagttggctggcagctagactgctggcagcatgaaggggaagactcggagcaggtaggcacgaagcacacaggcttgttacagacgggcacgcagcagacgggcacacagcagacaggcacacagcaggcctgctggcagggggaggaggtgcagcaatccggctggcagctagactgctggtagcatggggttgtgcaggagctggtgtagcctgattggcaggcgctgggctcacaggccgtctggcagcaggggctggacacacagctcactggggtgcagaccagggtcaagctgggggctggggcacagcagcagggctcgcagcagctctctgggcagtcgactacccgccaagagtcagtgcaggcgctggagcagatggacatggtggaggcggccatgctggagtggggaggcggtgagctgggggaggtgtgtgagtgagtgagtgtgtgagtgagtgtgtgtgtgagcctgtcagctgctggggcttttatatgcccagggcctgtgttttcccagcaggagactcagcaatgccctccccttccgtgttggtgtttggagccgggaggaccctcattatttctgcttcctttgccatgacttgtcctcactctgctcctaacacttggctggtcctgggcaggaccggcgcccctggctgagcctgtctcccgggaacaccaggagggaaggtgtgacctctctggggctgacctggtgacttccacctggcaggtcccgtgactgtgcccagcgtgggccctcagcctgggggaggcccagcctctgtctgcagggacctcacggggtgggctggcgtggctgagattgggagagccaggacggaggtgcctgtgttgggaaaagatgcttgaagacagcgcttcctggcgggctctgggatcttctgagatcctgatgtctgccaagggcaggaggacagggaggacctcccctcctctgaggagatggaatgttctggcaaggcctctggacagtcagctcattaggaggacaaggtttggggactggcctttgggtctggactgccatcccctggagccctggtcaggtgtcctgagaggggcgggtgcaggtcagggtctgagggtggggaggggcctctaccttggagaggcaggtgtggagtgagggttgcgtggagagtggaggatacttggggtctggatgagaaaagtgtcagatggggccacagtcagccccactgcccggacgcctggtcttactctatgtttgcactttggctgaagccacatgccaagaagttgaaatgtgatgtgaatttctagtatctgtaggtgacatcattgtccacctaggatcagagtgactgtcccaggccacgctcactgaagggctggatgagagacaaagtcactgcacccagcaccccctacctgtacccctgccatgacagtgtggaaatacaatgggaaaggaagcccgtcagccagcagacccaagtataaaatgcccagtggaatgtcagagggtcagatgtgaacgaaagcataaaccttgaccagaacacatacaacgtatgtcccctggaaacccggcagggttgggtgctggagaccggtccacatgcctcagctcagctcagcatccacgacgttcccatcacagccctgaaggaatcattgggtacacaaatgaagatatgaactgccagaaagtacttgtaatctccatgacaggtggaagattaatgtgaaaaatttgaagtccttaccactaaaacaggataagatacaaaagaaatgaatagaagactaaaaattttaaatttccaataagcatgaatgagatgaacagctagttgatctcattaataactaaagtttctcaggtttaaacacacgtctcccacctgtaagagcaaacaagatttaaaatgctgataatatccagcattgcagagcgaggggcttcattcttagaaacccttggcaggtgtaattttatttaaattgtgatcaaccataaaataaaatgtaccattttacccattttaaagtgtgcaattcagtgacagtacagtcataatgttgtgcaaccatccccactacctagttccagaatactatcatcgctcccgaaggaaccccggtactattaagcagccatgcccagcccctggcaaccaatactattctgcttgtctctatggatttgcctgttctgcacatttcatatagacgcagtcatggaatatgtggtctttgtgtctagctttgttcactcagcatgttttcaaggtacacctgtgtttgggtatgtttcagaacgccattccttttcttggctgaatcatattccatcaaagggacacgccacatttcatttatccattcatctgctaatgcacttttgggttcttttcaacttttggctagtgtgaatagtgcttctataaacattcttttttttttt

SEQ ID NO: 1562399 - DNA, 4001 bp, Homo sapiens
tgggtttaaattcagctactttctggttcaaggtcctcttggggtttttgttctgttgcttcttccctgggccctcccagcctcctgaggaggtgctgacctgactggtctcactagtgccctcttcactctccagtgctagtggtccactgagactacagcctcatcctctcccactgtcctaagggttcatcgataaggtgtctttttgctctgtgtctcctcacccaggccttaaaccctgagtaggatgagtgacgtctgagtaactccaggacccctcttggggcccatgaaattgctagtgcttcagagcacacagagtggccctcaaactctcggggcagccctctgtgtgggcaccttttccacggcccacacaccacgaggccagcacggtgcctggggctctcaggtcccaactgaacgggatttctgcttcttcccgactcagctttagcttggactggcaggggacaggcatgggcgggtggcccaaagctcaccagaggccgagcccactcagctctgctcccctccctggctcagcttggaggctcatcccctgtgggcagggctttggctgcaggaagagtgtggagctgatcacatttgctttcaaagcctgctgtcttccaagtgtttgatctcggaatgagagacactgtcctgtctgcctttaacaagacagtgggtcccacaccccaaatttggagtaggcagaggggctcaggggaagagcagaaagtgcacaccagcccgtatttcctgactcaagaatttattgattagagcagttcttctttgtcacattgggtataagcaacacatttggagaagggggctccagaaagccacagtccacctgctgagggatttgtgggttgtctcttcccagacagtggggaggaaagtgtgacgcgctcaaaatccccttcaggcagcagctctgtggctactgatggagctggtggattctgaggactccaggggctcctgagactggagaatcctgcttggcagcaaagacacagtcagcaggagacaaggattgagcactcagcagctggacttcttgcctgagcagaggctgtagcaggccaggcgggagcttgcggggcggcagaggagggacacgcaggaggccgggcggcagcagctggactggcaggaggaggtgggggcacagcaggaggagacgggcacacagcaggtggacctgcacacggggtggcagaggagggacacagaggaggagggtctgcagcaggaggtggtgcagcaagctggctggcagctaggctgctggcagcgtgaagaggaagccctagagcagacaggcacacagcagatgggcttgcagtagacagtcttgcagcagacaggcacgcagcaggcctgctggtaggaggaggaggtgcagcaagctggctggcagctagactgctggcagcatgaagaggaatcctcagagcaggtggacacacagcacacaggcttgcagcagacgggcacacagcaggccggctggcaggaggaagaggcacagcaagctggctggcagctagactgccggcagcacgaagaagcagccccacagcagacaggcacacagcacacaggcttgcagcagacagtcttgcagcagacaggcacacagcaggcctgctggcagggggaggaggtgcagcaagccggctggcagctagactgctggcagcatgacggcgtgcaggagctggtgcagcctgattggcaggcgctgggctcacaggccgcctggcagcaggggctggacacacagctcactggggtgcagaccaggctcagggagggggccggggcgcagcagctgggggcgctgcaggggggctcacagcagctctctgggcagtcgtccacctgccaggagtcggagtaagcgctggagcagacagacatggtggacgcggccatgctggggtggggaggaggtgagctgggggaggtgtaagtgagtgtgtgagtgtgtgtgtgagtgagtgagtgaggtgctcagggctgtggggcttttaaatccctccctggcatgtgttgtcccaacaggaggctccacaagcttttcttccttgttggtgtttacagctggtggctggagatgcatcattcatgctggtttatctctttgtttttcccttattaaactggtatgtatgtcgcagggctctgtttcttcatcagtttttattttggccacagaaatgtggtggaaaatatttccttttttttttttttttttttttttttttttgagagggagtcttgctctgtcacccaggctggagtgcagtggcgcgatctcagctcactgcaacctccgccccctgggttcaagcgattctcccacctcagcctcccgagtagctgggattacaggcacgctgtaatttttgtatttttagtagagacggggtttcaccatcttggccaggctggtcttgaactcctgacctcatgatctacccgcctcagcctcccaaagtgctgggattacaggcgtgagccaccgcgtccggccggaaaatatttcaagcaagcttttgttgagttgaggttttagagatgaacgtttctccaaaggaagcaattctgtttccacctatcctgtttctggactgattagatatattttattacttttagcatcttaaaacataaacatggagaaaaatgtacacttcatatgaaataaaaacggcacagacgataagataagaggaagctggctgagcgtggtgactcatgcctctaatcccagtactttggggggctgaggtgggtggatcacgaggtcaggagtttgagaccagcctggccagcatggtgaaacccggtctctactaaaaatacaaaaaattagccaggcatggtggcatgtgcctgtagtcccagctacttaggctgaggcaggagaattcttgaacccaggaggtggaggttgcagtgagctgagattgcaccattgcaccccagcctaggtgacagagcaagactctgtctcaaaaaaaaaaaaaaaagctaagtggccctcccttcgatccctcacaccttgtaaggagaatgctcagagattcagtagctggtggatccaagctttatttttgtctcttcagctcttccatgccaccctcagaggctctttgttttatttgaagctgcactctggattatttcaattttcattttgccttggtgaaagatcaagtactttttcatatatggtgattttaggacatacattttaagattccttgcttgtctgaaaatatgtcaactttatcctcacatttataatgatagtttagctgggtataaaattctggttttaaattacttttcctcaaaatgatgaacacatgtcaccatttttttgtgatgtccagtgttgccgatgacagtctgatactggtcatttgtcattttttagtttctctctttccttaactctctgggagcatttgggtttctttttattgttctaaagtgtcacgcttttgtttctaggctaatgcattattttactttcagtggttagaacttattgagcctttcaatataaagacttatctccgaagtgtttttccatttttaataataatttcatctttcctggtctctctttttatgactttttatttcatcttgtgatgaatgaaatatgttatccattcactctgatgatgttactttgagtttttaaatgtttttttcttgtttccttggacatcagatagtctgctcattggtggcagttcattcagttttctgaataaaagactattttattccagtgcattagggtcctgctccaatttactccctaacctgtttctgtctgcttctcttttctacaaacatatgaaggaccctgctgagcctcccgtttttgttagataattttgatttcattttttataactctttaaatatcctttcagtgattattagtacaggtgtgtgag

SEQ ID NO: 1562400 - DNA, 4001 bp, Homo sapiens
caggctggagtgcagtggtacaatctcagctcactgcaccctccgcctcccggctcgagtgattcttctgcttccgcttcccgggtaggtggtaccacaggcgcgtgccatgatgccctgctaatttttgtatttttagagacaaggtctcactatgttggccaggctggtctcgaattcctgggctcaagtgatcttcctgcctcagtctcccaaaatgctgggactgcaggcctgagccacacgcctggcctttttatttttaatggagacaaggtttcactctgttgccccggctggagctttatctattttctgttagaagagacttcaagatattcatgatctgggcagtaggcttcagacacgggagttgtaggggcagtagaaggaagtggaccgcttctggatctggagaggtgggagaggtttggcagctgagcctggacgcttgtcccgggactctgaatctccctgtgaggactgaggggctgggctgcaggtggagcgagccatcctctctgtctgcagccaggactccgtgtccagccagcccccacttggcagggactggcaacttggcggggaaatgtggggcggtggggacggctgtgcctgcgagtgaccccgctgccacctctgacactcgcccatcagggccctgggagacggacttgcctgctgggctggggtggggacggccgctccgttgaccctccctgggactggtacattcctgcggggacggcaccagtgccagactaatgtgtgttggggcctggagaagggctgagactgggcgcgagggccccaggaggctgcatctgtgtcctggcctcctgtcgggctggtcagcaattcaaccagaaatgactcaaagaagagagcaaagtgcagccgggctacgtggagggtgtttattaggacttccaagcatggtcctacaatggccagaggaggcacagcagcttccaaggaggcgagaccacaggggcctggaatgtgggaagtggtctggaagagccgggggagtgggtggaggcagggtcatctggagcttagcaggagcccccagggcttaggggaagagaggctgtgcacgcatctccaaggaagagacagacaccagagcagccgaggggccagtagtgggagaggtgggggactcatagtgcccagtggccctgggggacatgcctggcagcagctggacttctggcctgagcagaggcctcagcaggccaggcgggaacatgtggggcggcagaggagggacccgcaggaggccaggcggccgcagcttggctggcaggaggaggtggggacacagcaggaggggacgggcacgcggcgggcgggtctgcacacagggcggcagaggagggacacggaggaggagggtctgcagcaggaggtggtgcagcaagctggctggcagctagactgctggcagcacagagaggaggccccagagcagacaggcacacagcagatgggcttgcagcagacgggcacacagcaggactgttgacacggggaggagatgcagcaagctggctggcagctagactgctggcagcatgaagaagaaggcccacagcagacgggcatacagcacacaggcttgcagcagacagtcttgcagcagacgggcacgcagcaggcctgctggcagggggaggaggtgcagcaagccggctggcagctagactgctggcagcacgagggcgtgcaggagctggtgcagcctgattggcaggggctgggctcacaggtcactcggcagcaggggctggatacacggctcactggggtgcagaccaggctcaggcagggggccggggcgcagcaggggggctcacagcagctctctgggcagtcgtccacctgccaggagtcggagcaagagtcacaggaaccaggaaggcagacgcggctgccatagctcaggtcgctggagcagacggacatggtggatgcagccgtgctgggggttgagctgggggagctgagagggagacagtgagtgtctgggtgctggatgggaaggagggagtgagtgagtgtctgggtgctggatgggcaggagggagggagtgagtgagcgtctgggtgctggatgggcaggagggagggagtgagtgagcgtctgggtgctggatgggaaggagggagtgagtgagtgtctgggtgctaggagcttatatatctctcaagggtgtgtgtgttgtcccagcacaaggccccaggcttctttccttgttggtgtttggggtggtttcttgaggatgctcaccatgaaccgtgtagcgtagcttagctcctgaagctccccaggtgtcagaactgagcgggaccgtggggccgtggagggagccggccaatgggctggagcccagcctctgcgtggaccacagaaggtcagcagcccttggccgcccctctgtgattgtcatttggtattgcttactattatttccccctaatttcttcacactcagttgagtcaaggatgtttttcttcttgttttatattctctttatcttgaatccgtagaccaatgaatggcttgggagctggatttatttttatttttttcggcaaacagtcatgtgataggtcttgctgtgtgtcaggaagtattctgagcaagtttgtaaatatgacctcactaacccatacatcaaccttgtaaagtaggggctgttattatccccactctacagatggagaaactgagtcacaatgaagaacttgtgcaaaaggctgcaccagcaggcagaggagcatacactggaggcctggcaggcccgtattctatgttcttagccattaacctctgctgcctcagagagcaagggacatgggaaatcagaatgagaaacccagattgtgtgagaagagcggggcggagcatggtttagacatggcggtgtgggattgatgtgaaaatatctgatgggtgcccagacggttgggtctagctataaaaaaggagctccttccatctaaagagagaggatttgggtttatttatgagtgggaatgtgaaaaaacattattgtgaagggaaggtccagttcagagttcagaggggttgttctaggaggttgaaagatttctttatgggaagtgaattgtttttaattttgagaagaagacattcggcagcctttgtggttgaggactctagagccccagggctcatctagcctggaggatcctgagattaagggagagctgcttggctctgcctggaaagttggagggcttcaggcccacaggcagtgaccagcaggtgagggctcgaggtgtgtggtggatgggccccttgaagtgaaaagccctggtgtgtggtgtctgctggtctctgcgttgtaaacattaccctgtgatgagatgaaaccctggtgtgtggcgtgtacccctgtcccgctgcggtgagatgagaaccctggcgtggagtgttagctgtcatccgtggtgtaaatattcatatcctggctgatttcaagctatgagcagtttaacaacctgcttgagaagattctgaatatttaacaatcatttctcctaagctgaataaactggcccaccacaagggaccaggaacttggaggaaaaattggacttgggaaaagggtcttgggatcggaggtcattgcaaccctgagggagtgtgagccaggttggggcatggccagggagaggcccaagggagggaggaccagctgatgcctctggcctgagtcgtgcattcatttcctgctgtgtgtcatgacccgacccccgacctctcagtagaaggtctgagaagaggtgctttggggaccgagacccaggggcctgttctgtacatatcagagtctgtggtgcacttgcgtacctgagagacagcacagcgtccagtccagtgggagcaaaggtgccaggacaggaccaggagagtgtgaatgccccaaagccacaggagttggggtggggtcgggggaggctggat

SEQ ID NO: 1562401 - DNA, 4001 bp, Homo sapiens
aacccggacaaaaaaaagaataatgtgtgccccccgcattgtgattgtatagctgtggagaagtaaagactcagggcctcttgcgggcaacgtggtgacggtcatacctcgccagcatcccttgcctgcatttgcatttctaggagtctattctcagatttgctcaatcctgtttgaaaccacatctggctacatctggacctgtgcgtccacgtgtttctctcgccctctggtctgcatgtgtccccatgctgtcctgcacttcctctgccattggggccttgctgttcccaccggccctccgcccacccagcccagcacacggagctctggaggccgcgtctctgttctctgctctgcatcccagctgtaagcctggtgcaggaacagagggcgcccctgagcgtatgtgagtgtgcgcaggaggccaggatgcccaagctgtccctgagtggaactccctgagcgcagggacagctggagcccaagtctcccgccgtgtcccacctcccagcacagctggggcctgccaccccccgggacagccccaacccttgccatgggaaggagctgcttctacccacagtgcgtggggcgttggcctgagtcatgtggtgtctgtgggactcagccaatgaacaaggcttttgggccccacaggacctgggaggggagccggacagcagaacgtgccacgaggtggacaggagcttccaggtgtcacacaagagccccccggggcccccagctggggaagtaaagagatccacggggcccagccccccagagccaggccaggccccactctgccccctcccgccctgggtgcggagagtcagcacggagtcagctggggccgcagacgctttattggtgctcagaggcagagggtgacgctcctgggggtgagacccaggtcaggagggcccatccccaaccagcgaccagcgaccagcggagggttgtggtctgcagccaggaagcaccgtgaggagaagccagggctcgcccgcccggcgggaggtcagagaggagccagtgagcatctgagaccccggggctgggcggctgtggctggggctgctccttctgtgctgagctgtgctgaggctgggtgggctgggaggtccaaggactggcagggaggtggggcctgagcccggctggccctgggggacatggccatcagcagctagacttttggcctgaggaaaagctgcaggaggctgggcgggagcacacggggcggcagaggagggacacagaggaggagggtctgcagcaggaggaggtgcagcaagctggctggcagctagactgctggcagcacggagaggaagccccagagcaaacaggtacacagcagatggacttgcagcagacaggcttgcagcagacggacacacagcaggactgctgacacggggaggaggtgcagcaagccggctggcagctagactgctggcagcatgaagaggatgactcagagcaggtgggcacgcagcacacagctttgcagcagacaggcacacggcaggactgctggcaggaggaagaggcacagcaagctggctggcagctagactgctggcagcatgaagaagccccacagcagacgggcacacagcacacaggcttgcagcagacgggcacgcagcaggcctgctggcagggggaggaggtgcagcaagccggctggcagctagactgctggcagcacgagggcgtgcaggagctggtgcagcctgattggcaggcgctgggctcacaggccgcctggcagcaggggctggacacacagctcactggggtgcagaccagggtcaggcagggggctggggcacagcagctgggggtgccgcaggggagctcacagcagctctctgggcagtcgtccacctgccaggagttggtgcaggcgctggagcagatggacatggtggaggcggccatgctggagtggggaggaggtgagctgggggaggtgtgtgagtgagtgagtgtgtgtgtgagtgtgtgagtgagtgtgtgtgtgagcctgttggctgctggggcttttatatgcccagggcctgtgttttcccagcaggagactcagcaacgccctccacttccgtgttggtgtttggagccgggaggaccctcattatttctgcttcctttgccatgacttgtcctcactctgctcctaacactcggctggtcctgggcaggaccggcgcccctggctgagcctgtcccccgggaacaccaggagggaaggtgtggcctctctggggctgacctggtgacttccacctggcaggtcccgtgactgtgcccagcgtgagctctgggcccgggggaggcccagcctctgtctgcagggacctcacagggtgggctggcgtggctgtgattgggagagccaggatggaggtgcctgtgttgggaaaagacgcttgaggacagcgcttcctggcgggctctgggatcttctgagatcctgatgtctgccaagagcaggaggacagggaggacctcccctcctctgagaaggagatggaatgttctggcaaggcctctggacagtcagctcattaggaggacaaggtttggggactggcctttgggtctggactgttgtcccctggagccctggtcaggtgtcctgagagtggtgggtgcagatccaggcctgggggtggggaggggcctctgccttgaggaggtggatgtggaatgagggtcactggagagtgaaggacacttggggtgggcaaagccagcctgtgcttgggaggtcatcaggcaggacaggccctgaccccggggcagggaccgtcacaggtgagctcctctgtcttggggcctgagcccagcatggcctgaagctggttctcaccaggaaccagcaacatctcccagtgtccttccagcctctttcagctggggatgaggctacggcagcctgggacgggctttcatggtggcccagaaagcctatagcgctagggaggctcactggaagctctcctgtcatagcgtagcaggaggtgagcaggcccctggtcaccagaacctttctctgttgtcctacagggccagtcaaagcagcaagccgagaaatagaaatgagacgtgaacctctgttattcgcaggtgacacaattgtccacctaaagatctgagtcactgccattgtgactgtcactggccatgtgcaccggctggacgtgggataaactcacagcccccaacagcccctccctgcacacctgcctcgccattgtgatggaaattccatctgaacctggggcctccagcacgtgccagtcactccgccctccatggctgttgtcaaacaagcccctccgacctctcaggggtgatgtctgtgaagactcagctcccgacaagagcctctcatctgaagacgcagggcagtcagcactgggagccagggtgagagccgaagggaagccgaggcagcggcgttccctaatggagtatgagggggagggtcccacagacctggagctgcaaattatagcatgtgactgtagtgacagcttcggtgatcttagaaaatgaccccctagtagcactgatgatgaagctggtgaggtcggagcatgtggctgcgccagggagcattccaagcacttggcatctattaattcactgaatttcggcattaacttcttgtcgaagttactatggacagacgcggaagcttcagcagagaggttgagcaatctgctcaaagccacacagaaaacagtgacagaaccaggactagaagccagccggtctgtacataggatctacattctcaaccagtgagtctccgattctaaaaataaaaaatgttgaagatgaaagacagcaagtcttcaataccaaatttaataccaaacagctggattaaaaattcacatcagaagcagaagagcaaaactaataccacagagaatcaattcaattttaagtccaaacatgagttcttccaaacgccgagg

SEQ ID NO: 1562402 - DNA, 4001 bp, Homo sapiens
tcctgctgaaaacaattgaaaacactaggaagaatcttcctagttgcaacaggaaactggaaaaggaataaagaattacaggattacaggcccaaatcaaagacaggggtctttgccctttttgcacaagggaacttcccggccacctcgtgaaagctttggaggttttcagataagtaaaaggaaaccaacttcatgaaaacactgctgttacactatgaaaaagtgaactggtgagatagcatgtacttccctagggagcatgtgcctggtgggacccagcaggtgcatctcgcgctaccataattatgaaacagcagtggccagaatgaggttttgagcatttgcggccggcataatgtgacgccacgcatctcattcctgttggtgacaaagctgcaggtgctgccataggttttgtcggctacatgagagggttcctcacataaggcaaaagaaaacacacctgtcttagaggcctcaaaaatgcccacaaatactttccaaggacaaaggtggttactcagctgcaaacagtgaagcacacaaggaaacgacaccatgagcgagaactggtggaaatgacagaaagctgaaatggacccacagagacttcaggcattgggatgaccgtgcacagatatttgaaataagagatcagctctaaaatgtcttccaggaatgagaaatatttattttatttaataagagagggctggtgagaagatgatgagtgggggtcagacaggcagaggaaggagagagggggaggagctgagcccagggagaggccgggccgggtgggtgtgggggattcacagagaagcacccccggggcctggagacgctgaggctggcaggagaaccccacaacagcagaccccgcacagcgggaagtcaggactgcctccgcccctggtgctgtcagcctggatgcagctcaaggccagagtcccgaagctcccaccccacgcggcacgttgaagttcttcccacagggtttgccagatatgcaaaaaagacctctgagagggcacattggtgactttatttgttgacagactgatcactcacatggggcaggacacagtgaccaccggctggccagcatggagatgagggtgtgggagagatgcatgcctggagggaatcggcatgaaagctcagcattgctggctggaggtgcagtggctatgggcagaggagactcagacagggctcagggctgcaaggattttcggaagtcagagatggccctggaacaactctggagaaacgggacctgcccgtcagcagctggacttctggcctgaggagaggccgcagcacgcggaagagaggcgggagcacgtggggcggcagaggagggacacgcaggaggccgggcggcagcagctgggctggcaggtggaggcaggggcacagcaggaggggatgggcacacagcaggtggacctgcacacggggcggcagaggagggacacggaggaggagggtctgcagcaggaggtggtgcagcaagccggctggcggctagactgctggcagcatgaagaggaagccccagagcagacgggcacacagcagatgggcttgcagcagacaggcttgcagcagacgggcacacagcagactggcttgcagcagacaggcacgcagcaggcctgctggcagggggaggatgtgcagcaagctggctggcagctagactgctggcagcacgagggcgtgcaggagctggtgcagcctgactggcaggggctgggctcacaggccgcctggcagcaggggctggacacacagctcactggggtgcagaccagggtcaggcagggggccggggcgcagcagctggtggcgcagcaggggggctcacagcagctctctgggcaggcgtccacctgccaggagtcagagtaagcgctggagcagacggacatggtagacgtggccatgctggggtggggaggaggtgagctgggggagacgtgagtgagtgagtgtgggagtgagtgagggagtgagtgagtgatcgtgccaggcctctgagtggtcggaacctttatacccctctgtgttgattgtgctgcccctgcctggcttcgagaagccttcctcttccttgttgttgttgtaggcactgttgtgttagtagtgttggttcattgtttgtggatgttctggtttgtgaggctcctgactggagttagggcttccctaatgtgggcttgtccacagagataaactagtagaaatatattgattgcatcaaagcacactgcagaagcagggacagtggcagttaggagatattctggaattgacagccctctgctccatcccaggaggagtttgcacttaaaaaaagacttctacacctaaggagggatgaggttaggagaacctcagtttctgggccttgaggaaagggagagatgtgttctgctgtggacaagtttgaagatgctcagttggcctggccacacggcgagatccaccctgtgggttgacactgctggttgtcagtgggaaccatggggcatatttctgctgggggtgagccctggggcaggtgtgagggaatagtgtcttcctgggcagagattggctcgcagaggggagcagggaggcagctgcaggcccagcacagtagggatggagatgaggggcaagcacctttgtttcatttcacgttgaactgttatggggccttcccccggtggtgtgcacaatagtgttcacaccttctcctctcacatctcgggcaacatcacctgcaatggtgtccttgggagctccaaggtctcttcccttatgggccagaaagtcatcagaatgtattagttctactgttggctcctggacattgtcatagtaaatgtacaaataaaagggtctgattgcagagccttgtctcacaaatacctatacacctgtgtgtatcagcccatgcctgtgcccgggaccatacctgtgcgctagtaagcccccaaagttctgatcatggatccctcatctcctcactctatgatcgctattttctactaaatctttgaaatggcaaaggcagaggctctgatgatgctctaggctgcagggctttccaaaattaggccaggggtccactgagtgcttggtgggggcccataggctgcagggtttgaagcctctgacctttgatgagtatggctaagggctctgttggaggactacctggcaaagtcagactacagtggaaaaatattatttcatagaaataatagctggacacagactggcaaattggatgaagagtcatgacccgtcagtgtgctgtattcaggagacccatctcacttgcaaagacacacataggctcaaaataaaggaatggaggaaaatgtaccaagcaaatggaaagcaacgtaagcaggggttgcaatcctagtctctgataaaacagactttaagccaacaaagatcaaaaaagacaaagaagggcattacataatgataaagggatcaattcaatgagaagagctaattatcctaaatatatatgcaccaaatataaaagcacccagtttcataaaacaagctcttagagacctacaaagagacttagactcccacacaataatagtgggaaactttaacaccctgctgtcaatattagacagatcaatgtgacagaaaattaacaaggatattcagaacttgaactcagctctggatcaaatggacctaatagacatctgcagaactctccaccccaaatcaacagaagatacattcttctcagtgtcacatggcacttattctaaaattgactttataattgaaagtaaaacactcctcagcaaatgcaaaagaactgaaatcataacaaagtctaccggaccacagtgcaatcaaattagatctcaagattaagaaactcactcaaaaccacacaactacatggaaattgaacaacctgctcctgaatgactcctgggtaagtaacgaaattaaggcaaaaa

SEQ ID NO: 1562403 - DNA, 4001 bp, Homo sapiens
tgattttgaagctagggaggcatttggacacactctgggcaagcatggcgctagaagacaccattcttatttgacaagtattgtgcagcagaaggataatttaaaaagcaaatcagcaaaaagaactatgacacgactaacaacacaggagggttagggacaaacccaagggcccgaaatggccaaagggctgcaaggctccccgcgtccatgtccgtctagcctggacccctgggaaccacacgcccctgggcacaggaaaacactcaggggcctgaaggacagcagagggttgtgcacaaaggagaaaaccatggccgtgagctccagccaaggcattaatcaacacacctgggtgtcagcgccattgcagtctcagggcctttattggtcagcttgagggcgtccaaagaaggctctgcggctctgagccaggaggacagagacctcacgggtcaaggctgaactgaccctcatgagaggtgggagatatggaggggaggccactgccatgggaactttctagaagcgcccccctccccccgcaagagggctgcagcattgagtatagactttcagttcttccattgtccagctcaacagcagacaccaggaaatggtcaaagtgcaggagcaattcaggacgcgactatcagctttcaggtgggacctgagcctggctggcactggggggcgtgtccatcagcagctgggcttctgacctgagcggaggcctcagcaggctgggcgggagcacacggggcgtcagaggagggacacgcaggaggctgggcggcagcagctgggttggcaggaggaggtgggagcacagcaggaagggacgggcacgcagcaggcgggcctgcacacggggcggcagaggagggacacggaggaggagggtctgcagcaggaggtggtgcagcaagctggctggcagctagattgctggcagcatgaagaggaagccccagagcaaacaggcacacagctcacaggcttgcagcagacgggcacgcagcagccctgctggctttgggaggaggtgcagcaagctggctggcagctagactgctggcagcacagagaggaagccccagagcagatgggcacagagcagacaggcttgcagcacacaggcttgcagcagacaggcacacagcaagcctgctggcagggagaggaggtgcagcaagccggctggcagctagactgctggcagcatgaagaggaatcctcagagcacacaggcttgcagcagacagtcttgcagcagacgggcacgcagcaggcctgctggcaggaggaggaggtgcagcaagccggctggcagctagactgctggcagcacgagggcgtgcaggagctgatgcagcctgattggcaggggctgggctcacagaccgcctggcagcaggggctggacacacagctcacacagctagactgctggcagcacgaagaggaaatcccagagcagacaggcttgcagcagatgggcacacagcaggcctgctggcagggggaggaggtgcagcaagctgactggcagctagactgctggcagcatgaagaatccccacagcagacgggcacacagcacacaggcttgcagcagacagtcttgcagcagacgggcacgcagcaggcctgctggcagggggaggaggcacagcaagccagctggcagctagactgctggcagcacgagggcgtgcaggagctggtgcagcctgattggcaggggctgggctcacaggtcactgggcagcaggggctggacacacggctcactggggtgcagaccaggctcaggcagggggccggggcgcagcagctgggggcgcagcaggggggctcgcagcagctctctgggcagtcgtccacctgccaggagtcggagcaagagtcacaggaaccaggaaggcagacgcggctgctgtagctcaggtcgctggagcagacggacatggtggatgctgctgtgctgggggttgagctgggggagatgggagggagtgggtgagcgagtgagtgaggtgctcgggtttgtggggcttttatactcctccttggtgcatgttgtccagacaggaggctcagcaagccctcccttccttgttggggtgtacagccagctccaggagaataaacagtagctgtgtttttgtttcccaagagctgttgctcagtttacaaaacttggaattggcctggggcgcatgtgcgtgttttagactcaggaggaagagctgaggggcagttcaggctgtgctgctttgctccccaggcgcacgtggagggtggcatggtccacgtgtgtgccgggctatggggagtgggtgcctgcgggtggctctgccgtgtgtgtgctggactatgaggagtgggtgcctgtgggtggctctgccgtgtgtgtgtgccaggctatggggagtgggtgcctacgggtggctccgctgggccttggttttctaggctgctgaacaagatcatgtgcctctgtgattgaaagcttagggagagaggtttgtttgggttctaagtaaagataatgtgagtcatggtttgtatgctgtaatgtattcttttccttgggctgccatgacaaacagtaccacaaactggctggtcacacaacagaaattccgtgtctcatggttttggaagccagaagtctgagatcgaggtgtggacagtggacagcatgggttccttctgaggctgcgaggggcactgtctcaccccgctcccctcactcctgtgggctgctgctatctttggggtccttggcttacagtggcctcacctgagctctgcctttatcttcacacagcttctccgtgtgtgtgtgtgtgtgtgtgtgtgtgtgtgtgtgtgtgtgtgtgtgtgtgtccaaatctcccctttttataaggatacaaagcattattgcagtagggcctatcctaacagcctcctcttaacttgatcacctacaaagaccctatttccatatagggtcacattcacatgtaccagcggtcaggacttcggcaccttttgagggacacaattcaatccacagcaagcagacacaatggcagaacctgggatgaggacgtgggcacgggagcagaacccgggatgggaaggcaagcacggcagaagtgtttcttgtggacttgggcctggggcaggtggagcatggggggtggcgagggtagcacaggacagcaggtgcccagcactgggcactcagcagcctttgcttgtgaggtgtggcttgacctcgtggaatggttttagggaatagtggctgaaaagcggggttcacatcgccctttgccagcttcccgacaccaccgcaggttggttcccagctctgagaaagcagcgctgctctgtttcttctcagccaggacggtctttaggcagctgcaccaacttccggtgggtcctgctcaggaccccacatggcgttggctgaaaggtctcctcgacttctctggtttgtgacggttgcccaatctctccttggcctcagcgaccttgaccggttgggtgttttgtagaatgcccctccacgtggacttgcttgaggtttcctcgtggtcagagtgggcatcgcgttgggggaggaatcccacaggagcagtgtgcgtggggcatggaggtgacacggccgcggcccatccctcgcggtgccgccgtttccctctgtaattggtcatgtctgagacttggcagctgtcctgcgtctgcccaggcgtttgcccggcagtgctggtgcccctccgggggcctcgcccgcacggtccctgtggggctctgttgaggattctcctccctgccttgttccttccacacttactaattgaaattctcccgggaggaggagctgtcccgctcttctgtgtgtctatttgcttccttatttatttatctatgtgtggactaaagaatgtttatctattacttgagctataatccaatatgatcactatgtattttgtggttgc

SEQ ID NO: 1562404 - DNA, 4001 bp, Homo sapiens
gacacagactcctgggatgagagggggactcatggaggaacacccacgccttgaccctgagatggccttgcagggagggtaactgaaaatttacccactggggacagttgcctacttactaaaacagttccagccaccaccgcagcccctggaaggccatccccccagaaaatcccccaggtctcagcagggccttgtccacctgtgccctccagtgtcgcccatgtcaacctcacctaagaggggcctgacgcacggtcctgcaggtgcggactctgggtcctgaaagcccatgcggaacctggtgcccccagaggagggcctggggcagtgccagttttggggaatcatgtgcatccatccacccactccatgatgctttcgtcctgatcgagtcccttgtctcctgcgcaggtgcagcagcccctccctctccccccgcattgctgctaagcgggcagaactctcgggcgggcggcacacagggagggtgaccaggcctggaggctgcggtgcccggaccccaggccagcttcctggaaggtgaccctgcagggtgggctctcccaggtgggacagtgggtgggacagtcctggggcctggagagccccacagcccagggcacggcagccaatgaccaggctcaggaagacccaggcatggaggctgagccgggactgagccttcctgggcgtggctgtgagttccacctggtgaccccctggaggagttaggccactgtcccccgtgacttctaggttaagtcactcattcatagaaacagtcatggctagagaccaatctgagctcaaaaccatgtatccccaggagcactacagaaaaagagaatcaggcgaccaaggggagtttattggggagcaggaggaggtgctgacaggttcaagtcgaggccaagtgacatggggcagagaagctgggagggaggacaggggacccaacaggcaggtgggcccctgctgggaggcaggagctggggagcttcgaggatggagattcctgggagtatggaggggggggtcacctcagcacatgggggccccgtcccaagcgggggcaacctcctaacccgagtcaggaccagttggccctgggggatgtgcacatcagcaactggactcctggcctgagcagaggcctcagcaggccaggggggagcacgcggggcggcagaggagggacacgcaggaggccgggcggcagcagctggcctggtaggaggaggcaggggcacagcaggaggagatgggcaggcagcaggcgggcctgcatatggggcggcagaggagggacacggaggaggagggtctgcagcaggaggtggtgcagcaagccggctgacagctagactgctggcagcatgaagtggaagccccagagcagacgggcacacagcagatgggtttgcagcagacaggcttgcaacagacaggcacgtagcaggactgctggcagggggaggaggtgcagcaagtcggctggcagctagaatgctggcagcatgaagaggaatcctcagaacaggtgggcacacagcacacgggcttgcagcagacaggcacacagcaggactgctggcaggaggaagaggcacagcaagttggctggcagctagactgctggcagcatgaagaggaatccttagagcaggtgggcaggcagcacacaggcttgcagcagacgggcacgcagcaggcctgctggcagggggaggaggcgcagcaagccggctggcagcacgagggcgtgcaggagctggtgcagcctgattggcaggggctgggctcacaggccgcctggcagcaggggctggacacacagctcactggggtgcagaccagggtcaggcagggggcggtgccgcaggggggctcacagcagctctctgggcagtcgtccactcgccaggagtcagagcaagcgctggagcagacggacatggtgcacgcggccatgctggggtggggaagacgtgagctgggagctgggggaggtgtgagtgagtgagtgtgtgagtgagtgaaggagggagtgagtgagtgaggtgctcagggctgtggggcttttaaatccctccctggcgtgtgttgtcccgacaggaggctccacaagcttctcttccttgttggtgtttagagctggtggctggagatgcgtcattcatgctggtttatctgtttgtttttccctcattaaacttgtgtgtatgttgcagggccgtgtttcttcatcggttcttattttagccccagaaatgtggtggaaaatatttcaagcaaacttttgttgagtagaggttttagagatgaagacttctctaaagggaggaattctagtttcacctatcctgtgtttggactgattggatatattttattacttttagcatattaaaatataaataggtagaaaaatatgcatttcttataaaatgcagctggcacagagggtacgatgaagctaagtggccctctcttcaaccccttgtgcctcgtaaggggaatgctcagagatttggtatctggtggatctgtgctttatccttgtctcttcagctcttccatgccaccctcagagccctctctctgttttatttgaagctgcgctctgggttttctccatttttatttcctcatggtgacagatcaagtactttttcacatatggtgattttaggacatacattttaagatttctttcttgcctaaaaatgtactcaactttaccctcacacttatatgatagtttagctgggtatataattctggttttaagtcagaattattattataaataataacaaaaaatctgttttctcaaaatgatgaacctgtgtcaccatttttctgtagtgtccagcgttgctgatgagagactgaggttggtcatttgtcattttttatagtttgtctctctctctccgtttaactctctgggaacatttggttttctttttattcttcttttgtttctatgcgtgtgcattattttactttctgtggttagaattcattgagcctttcaatgtggagactcaggaagtgttttgcgctcttaaaaataactcatctctcaaggtctttccttttgtgactttaattttgtctcacgatgaatgaaatacatttttggctcactgtaatgatgttatgttgagcatttaaacgtttttcccctcgtttcactggacatcagttaagctctgctcattggtggcagttcatttgattttctgagtaaaagactattttattccagggcattggggtcctgatccagtttacattctaatttgtttccatctgtttctcttttctacaaatatataaaggattttaaagagcctccctttttgttagacaattttgattttattttttataactctttgaatatcctttcagtgattattagtagaggttgtgcgagaactgtgtgcttaacccactttctgggactgaaggactcgatgctcctttcaggaaatgacaggaaagccaggaaggctaggatgacgtcatatcagcgggtgtgctacagacatgcacggcgcaggtgcggtctccacatcagccaccgcgtgaggggtgactctgcagcccattttgacagttgcagaaatgatgagagaagataagtaaccttgaaagaggacagctggccggcagtgaacctgacaaccgcgagctctcactcctttccctcacggccatacatggctccgttctgtcacacagctcccagaagagtgcgtgcttcctgagtggcaggcagggaggcaggtggtcctgagccagcgggatgtggtaaggctgacatggcttctgggacaagccctggggcctgtatgataatttgctttagttttcccatcgctatctctggcagcctccttaatcgaatgggtgtggtgattccttgtctctttattcctatttgtgatccacgccctctgtcgctcccttctcctggtgtctggacc

SEQ ID NO: 1562405 - DNA, 4001 bp, Homo sapiens
tctcgccagcgatgcctgagcaatgggtattccagaaccccacgaatactgggctgctgggctcgagtcctgggggagggcgtggtccccatgtcttactgtggaggagatgagggctgcagggatgggcactgtggtccatagctggtctccccaggggtaacaggaggggtgaggctgctggctggagctaggccccgggtgggctaccccagtcctggggggcagccatgagctggggagggtgaatgtggctcaggggcccagagtgctgccagggtccactttgtcccgaaactcctggccttggttccagaggcagctttcctaagatgggccggggggccatgtgctggggttgggggcccacggggctaagagggagactggccttcagggttcacagaggccagcaccagaaggcattgcttcctgcctcatcccatgcccctcgggggtccacagacaggatgaaaagtcgacagagacagaggggtggagccaggcctgctgggggtcaggactctccctgcagtcaggggtggcatcacttcccacctcaccctgtgccccccgggggtccacagacaggacagaggttggtgtgagacagaggcggctttattagaactagagggggtgctgcccagggtggaaccaggcctgctgggggttagttctgcagaacttgggtctgggggagtagctggggtctctcatgcagccagcatctgggaaggacagggggagcatcctggtccctaagacaaagagcctgccccatcttctgagggtgtcaaagccagagagggcagagcttgctggggcagctgggaggtcagcccctggtgggaagggactccggatcacatccagggctgtcagcagctggacttctggccagagcagaggctgtagcaggcagggcgggagcacatggggcggcagaggagggaaacacaggaggccgtgcggcagcagctgggctggcaggaggaggcagaggcaccacaggaggggacgggcacgcagcaggtggacttgcacacagggtggcagaggagggacacggaggaggaggatctgcagcaggaggcggtgcagcaagccggctggcagctagactgctggcagcatgatgtggaagccccagagcagacgggcacacagcaggcgtgctggcagggggaggaggtgcagcaagctggctggcagctagactgctggcagcatgaagaggaatcctcagagcaggtgggcacacagcacacaggcacgcagcagacgggcacgcagcaggcctgctggcagggggaggaggtgcagcaagttggctggcagctagactgctggcagcatgagggtgtgcaggagctggtgcagcctgattggcaggggctgggctcacagaccgcctggcagcaggggctggacacacagctcacacagctagactgctggcagcacgaagaggaaatcccagagcagacaggcttgcagcagacgggcacacagcaggcctgctggcagggggaggaggtgcagcaagctgactggcagctagactgctggcagcatgaagaatccccacagcagacggacacacagcacacaggcttgcagcagacagtcttgcagcagacgggcacgcagcaggcctgctggcagggggaggaggcacagcaagccagctggcagctagactgctggcagcacgagggcgtgcaggagctggtgcagcctgattggcaggggctgggctcacaggtcactgggcagcaggggctggacacacggctcactggggtgcagaccaggctcaggcagggggccggggcgcagcaggggggctcacagcagctctctgggcagtcgtccacctgccaggagtcggagcaagagtcacaggaaccaggaaggcagacgcggctgccgtagctcaggtcgctggagcagacggacatggtggacgcggccatgctggggttgaactggtggagggtgagggagtgagcctgtgaggtgctgaggctctcgggcttttattccacctggccttgttgtccccgggcccacagcttccccttccgtgttgccgagagctggagtctgccgggattaggggtgtttgttcgcccgtgatgtgggccagctcataaatctcccatcacatctgggctgtgtcccatcccatgtggatccctggcggcaggaattgggcggggcctggtcccagctgggttcggggagctgggagagccacaggtcgcggcatcgtccacccctggccccagcagccccgggacacagagtccctctgcaggaagccggcctcaggaagtgtccttgtggtgaaaacccctcatccagcgtggtccttcccccatcaccggacacaggactgtggccatcttctgagggacaacctggggcccatgagccttcattgacctgccctgggccatggcatggtgggggtggggggcagctgtaactgtgcccagacctcttggctttgagctctggacgacttctcatccccacagcctcttcacctccggccctgtttcgtgtccacctcgtctttgtgttttggaggcagcaggacctgtgtgttccagggcaaggacggtgggcttggcccctccctgcttggacagcatgacagccttctgggctgtggttttgggttctgaacctgcagagtaaccgtgctgagcagcgggcggtcagcagccctcgtccccgcctggggtggctcctctgtgtgctctgcttctccgaggctgcccgtcagcccccacccagcctcctgctgggcccatttcccagccctgtcttccaagccctgtgccaggcctcttagtgtcaccaccttaaaattaagggacatctgtccaaagaacccgcacagaagacacaaaatgggtccatgagaagttgatctcactgcaaacccattgccagtgtaaacgaaacataaaatcctaagcccctcaactgactaaatggatcccatcttgcccacggggacccccgaaaaactgcgttcctggccatgacaggaagggaggtcagacacgcctcgttacaccccctccctttagggtttcgacacaaccactacccagcactaaagttaaaatagagaccgtaagacccacagagcagactctggcaataagatatcaaattacaaacaggacctcaggccgcgccaggcaagggacaagccgcgtgccctacactgagaggacggactctgctctcacgccacagctgctgtttttctacagtggctaaacacgcactggccccgcgatgaggatgagcaaggttcaaacgactgcagctcatccaccagcagatgccaactgaccacgttccacagccatgaccacagctctgactgggcaggagactgacttcaggaacctcctcctgataagggacccccaaccatggactggctccagccggtttacagaggctgtgcactggagtgcctttgtgtcctgagaagacttctgaggtttagggcctcattgcgacccattgacatgataagactccaccctgtaagaagtacatttcaagtggtccgtattcagaaaacaggccctggcaagtccaggcagctcccttgcagatgtgacaagccacacagtacagacatctgggaagagtgataagactcacagaagtcagaggggaggaagaaaaagtgacggatggctaacacataaaaggaaagaaacttttgccattgagaaatcaaatgtaaagtggggaaggggacaagatgtaaccttataaggggataatgaaacttaggtgacgtccaggaagcctgtgaccccatagtactcaggctgcgaggaactgggcgagggacctgcacactaggggataaattgcttgttgaaagtgtgctgggtgtgcccgcccatcagacaccagatcttgcaagaccgacattaaagtctcactttcactgttct

SEQ ID NO: 1562406 - DNA, 4001 bp, Homo sapiens
agctcaggcccagtgaggcggggccggggggagcccctcggaaatcccagttcccagacgccagccaagggccagcccggccagcgggcctcaggatggccgtccccgcccaccgtgtggacccattctgcacacggccatggggtttcctttctggagccaggggctggacacaacccagtttctggggaggccccaaagcagccccacccagggcaggcgctgctgttggatccctcacctctcccatccctcagtcctgcctacccctcggacatccgtgtggtgaggctggtgcagggctgccaggacgcctgggaaggacagggacctcgtggcgtgggagcagcccaggaccacccgcgggtggggggcatcaggcaggggtctttggttgtgaacaacaagaatgaattccagttgtactttttaggaaaggagtttattagaagggtctgacctgctcccgtggtcagggaagacagagaaagaggcccaggcccacagcaggggaggagcagggctcgccactgagctgggacagtgacgagaaacccagttggtacctgtctaccctcatttctccccacaccgggctatggcctgggagcacccgctggccttgctggggtcactgcccacctgttgctggggaagcagggctgggtaattgggggaaagtcaagacttggagaaacagctgagctgcttctaggaggagaagcgcacactggatggccagctgaccactgacgtccactgcagggcttaggagcgggatgtggagagccgtcaagggtaaagaatccaggggtgcaggtggcagtgagcactcaggctttggatgatcttaaggagatcactcagcagctggacttctgggttgaggtggggccacagcaggccgggcgggagcatgcggggcggcaaaggagagacacacaggaggctgggcggcagcagctggcctggcaggaggaggtgggggcgcagcaggaggggacgggcacgcagcaggcgggcctgcacacggggcggcagaggagggacacggaggaggagggtctgcagcaggaggtggtgcagcaagccggctggcagctagactgctggcagcatgaagtggaagccccagagcagacgggcacacagcacacaggcttacagcagacgggcacgcagcagccctgctggctttgggaggaggtgcagcaagctggctggcagcatgaaccggaatcatcagagcaggtgggcacacagcagacgggcttgcagcagacaggcacacagcaggcctgctggcaaggggaggaggtgcagcaagccggcttgcagctagactgctggcagcacgagggcgtgcaggagctgatgcagcctgattggcaggggctgggctcacagaccgcctggcagcagggactggacacacagctcacacagctagactgctggcagcacgaagaggaaatcccagagcagacaggcttgcagcagatgggcacacagcaggcctgctggcagggggaggaggtgcagcaagctgactggcagctagactgctggcagcatgaagaatccccactgcagacaggcacacagtacacaggcttgcagcagacagtcttgcagcagacgggcacgcagcaggcctgctggcagggggaggaggcacagcaagccagctggcagctagactgctggcagcacgagggcgtgcaggagctggtgcagcctgattggcaggggctgggctcacaggtcactcggcagcaggggctggacacatagctcactggggtgcagaccaggctcaggcagggggccggggcgcagcaggggggctcgcagcagctctctgggcagtcgtccacctgccaggagtcggagcaagagtcacaggaaccaggaaggcagacgcggctgccgtagctcaggtcgctggagcagacagacatagtggacgcagccatgctggggattgaactggaggagatgggagtgagtgggtgagtgagtgaatgagtgagtgagtccgtgtgttaggtgctcagggatgttggcttttatatgtctccctggtctgttgtcccagctggagtgtcaacaactcctgccccttccttgtttgtgtttaaaacctagagaacgcttattagtgcgagtttcatgtttagtcctatgagatgccgttcagtttgtaaagtcctgagtctatatttggttccgttgacgcaccctcacctacctttggctccagagcataatattgaagtagacagggtgtaatgtctgcaaatagagtgtcccaggggcctgtgctggctgcaggagagatccatccatcctaatcccagcgcctgtgggccatcgccaggggactctgcttgtctgggtggctgtggcttctggaatgccaggctagagaagcccctgtcaatgatggcatgagggtggaacattcctagaagtgactccccacactctctctggtgcataaagtccccccaagggctttagagcaagtggcaaacgggaaagggtggacagtggtgtgagccatttcccgtcaggttcacagtagttcctggggggccgtgcaccccctcttccatctgggcacttagggaggccccagatccctgtttggggcccccatttccatttggttttatcccaagcactgcaaacctgtaagtctaacccagaacacctcctccgcaaaaagcacagccactctcaacagcactgccgtgtgaaaagcagcaagcactgctttcgcttgcagtgtgttttcttgattgccagctaagtccttggtcaccccagctagacatctgatctaagtctccatttcttctgcaaataatatccaattggccaccacatctttttggttgtttctgctaaatgtttccaattgtatccgatacttttacttctcaagcattcatttattcatgatgcagtgagtcctcccacatgctggaaattgcaccaggtgctgagaatgtgaaagtgaaggggtagtaaccctgactgtggaccccaccagggagggaggtgggctgcttggtgcctggtgatgtcagtgatgaccagccatagcccagcatgcatgcggccctgagaagtggcccctacccaggggagagggctccaggggcccttctggtggggtttgatgcccaggcaagtctcagaggctcagggtgtcctgtgtctctatctgtgtttcccagtccaggcctcttaactcctaggggatttaggaaaagtacaaaaggcctcagagggctagaaattcagttacacggtgggatgaattgtctttctgtatattttgaactataaaaataatataaatttgagcatggcctggtccctccagaggtacaggatctggtcctatgggatggaaggagagagagagagagagagagagagagagagagagagaaaatgggggcctctgcttccatatgggacaaagtagctatgtcagacatatactcctgctgagaacaacttgaaaagctgaacaaaatgttttaaaaatgattcctttaaagctctcctaaaagagctgttgaagaaactaaaggtaatagaatgacatctttaaagagctgaaagaaaatcactgcaaacctagaattctagaccaggaagaacattgttcaaaggtgaaatatgaaacaaaacaattctggataacaactgagcaaactgaacacgagcagacctactctacagtaactatgaaaggggatttttttaggcaggatgacggaaggataaaaatgcaggaaggaaccaggaggatctgaaagggtaatattattatatttataatctcttgtggggtctaaactagaagtagaaaagtaatgcatgatgacattaacaataaaaggtgagaaggataaatggagtgaaagttttctaaggtttcagcattgttttggaagcggcggaagtgctgacatatgttacac

SEQ ID NO: 1562407 - DNA, 4001 bp, Homo sapiens
agctcatggcgtcatcaggtgagggacctacggcaggatgggcaagcccagcagagcaggggcagtccctatgccgctgggcagggtgggaggaggagaggcctgagctggagccgtgtggacccctgaccccggtcggggcggcagagccacagggccttgaagaacctggccaggcctggcctgggagagattagggacaagccttgaaaatcataagtcgcgcacctaaacgacgtgaaggacacacatttcaggggcaggggcggcgggccttggggaatgtcccagtcggcagcaagcatccccccatcccatccctccacccaccccatgatgcttttgtctccatcaagatcctgggggaatcctgtgtgtccctccacccagtccatgatgcttttgttcccatcgagtcccttgtctcctgcgcaggtgcagcagcccctccctctcccctcgcattgctgctaagcgagcagaaccctcgggcgggcggcacacagggagggtgaccaggcctggaggctgcagtgcccggaacccaggccagcttcccggcaggtgactctgtagggtgggctctcccaggtgggacagtgggtgggttggtcctggggcctggagagccccacagcccagggcactacagcgaatgaccaggctcaggaagacccggtcacaggggctgagccgggactgagccttcctgggagtgaccgtgagtcccacctggtgaccccctggaggagttaggccactgtcccttgtgacttctaggttaagtaactcactcctagaaacggtcatggctggaggagaccaatgtcagctcaaaaccgtgtgtcctcccaggagaacaacaggaaaagagaatcaggtgaccaaggagagtttattggggagtaggaggaggtgctgagaggttcaagtcgaggccaagtgacccagagcagagaagctgggagggaggacaggggacccagcaggcaggtgggcacctgctggaaggcaagagctggggagcagtgaggatggaggctcctgggagtaaggagggagaggtcacctcagcacaggggagacatggagaccccatcccaggtaggggcagccacttaacccaggacaggaccggagccggctggccctgggggacgtgcccatcagcagctggactcctggcctgagcagaggcctcagcaggccaggcgggagcacgcggggcggcagaggaaggacaggcaggaggccgggtggcagcagctgggctggcaggaggaggcagggacacaacaggaggggacaggcacacagcaggcaggccggcacacagggcggcagaggagggacacggaggaggagggtctgcagcaggaggtggtgcagcaagccggctggcagctagacttctggcagcacagagaggaagccccagagcagacaggcacacagcagatgggcttgcagcagatgggcacacagcaggcctgttggcatggggagaaggtgcagcaagctgactggcagctagactgctggcagcatggggaggaagctccagagcagatggacacgcagcacacgggcttgcagcagttggacttgcagcacacaggcacacagcaggcctgttggcagggggaggaggtgcagcaagccggctggcagctagactgctggcagcatgaaggtgtgcaggagtcggtgcagcctgattggcaggggctgggctcacagctcactggggcacagaccagggccaggcagggggctggggcacagcagctaggggtacagcagctggaggcacaggagcggggctcgcagcagctttcctggcaattgtccacctgccaggaggagccagtgcaggtgctgggggaggagactcggctgacatggcccacgtcactggagcagacagacatggtggatgcagcaatcacatacgtcctggtgcagcaggcgtcagccatggtgggtgctggactgggtggtgtgagtgctggtgtgaggtgtgtgggtttgtgtgccctggctgctgaggttttataccctccctgggtattttcctcacaggagtctcacaagccttccctttccttgttgtggctgagactttgcctccaggcaaccctaattagtttacttgctgtgggatgttactgtggtcccaggactgctgcatgtggttgggtgatgctgaccacttgcaggtgtctgtgccctgcaaccacacacagtgatgctgcgtgtctgctggtggagctgggagttgaacagatcgtgagttggcaagtctggaaaacccagccccactttcctcctgtctttgcctgtatgtctttgctattggggtatttggtaccaggggtggggtgtttttttaccagcagatgttctccacctgtcccagagttctgctccattgaacaatgggtgtctcggctaggaatgccccctggctccccaccctgccacccctacctgttccatctgcaaactatggtgcgatgcccctgtattagtccattttcacactgctgatagagacatacccaagactgagaggaaaaagggctttaattggacttacagttccacatggctggggaggccgcagaatcttggtgggagctgacaggcacttcttacatggtgacagcaagagaaaatgaggaagaagcaaaagcagaagcccctgataaacccatcagatcttgtgagacttattcactaccactagaatagcacaggaaaagaccggcccccatgattcaattatctccccctgggttcctcccacaacatgtaggaatgctgggagatgaaattcaagtcgagatttgggtaaggacacagccaaaccatatcattctgtccctggcccttccaaatcttatgtcttcacatttcaaaaccagtcatgccttcccaacagtcccccaaagtcttaactcatttcagcattaacccaaaagtccacagtccaaagtttcatctgagacaagacaagtctcttccacctatgagcctgtaaaatcaaaaacaagctagtttcttcctagataaaataggggtacaggtattgggtaaatacagccattccaaatggcagaaattggccaaaacaaagggattttacagggcccatgcaagtccaaaatccagcaggggagtcaaattttaaagctccaaaatgatctcgtttgactccaggtctcacatccaggtcataatgatgcaagaggtgggttcccatggtctcggacagctccacccctgtggctttgcagggtacagcctccctcctggctgctttcatgggctggtgttgagtgtcagcagcttttccaggcacatggtgcaaggtgtcaatagatctaccattctggggtctggaggatggtggccctcttatcacagctccactaggcagtgccccagtagggactctgtgtgggggccctggccctacatttcccttctgcactgccgtagcagaggttctccatgagggccccacccctgcagcaaacttctgcctgggcatccatgcgtttccatatatcttctgaaatctaggcggaggttcccaaacttcaattcttgacttctgtgcacctgcaggctcaacgcaacatggaagctgccaaggcttggggcttccaccctctgaagccacagtctgagctgtacattggctcctttcacccaggctgcatacagcatggggaccctggacccacgaaaccactttttcctcccaggcctccaggcctctgatgggaggggctgccatgaaggtctctgacatggcctggagatattttccccatggtcttggggattaacaataggctccttgctacttatgcaaatttctgcatccggcttgaatttctccctagaaaatgggtttttcttttctattgcatagtcaggctacaaatttttcaaacttttatgctctgctttcattataaaactgaatgcct

SEQ ID NO: 1562408 - DNA, 4001 bp, Homo sapiens
gtgggtgaggactggaggggacagtgtggctctggccatctgcctgtctcccatggcaggagctaagaaactacccccaggaggcctccttcctgctgtctggtctggacacattcccacactgtcctgggactcctctgtcatcgccgccctgagaccttcctgttcccaccggccctccacccacccagcccagcacagggagctctggagaccacgtgtctgttctctgctctgcatcccagcggcaagcccagggctggagcaggggccatccctgagcgtctgtgagtgtccacaggaggccaggatggccaagctctctccgagtggaactcctgagtgctgggacagctggagcccaagtctccacacccaccccccaccgcccgtctcccacctcccagcacagctggggcctgccaccccccgggacagccccaacccttgccatgggaaggagctgcttctacccacagtgagtggggcattagcctgagtcacgtggtgtctgtgggactcagccagtgaacaaggcttttgggccccacaggacctgggaggggagccggacagcagaacgtgccacgaggtggacaggagcttccaggtgtcacacaagagccccccgaggccccccagctggggaagtaaagagatccacggggcccagccccccagagccaggccaggccccactctgccccctcccgccctgggtgcggagagtcagcacggagtcagctggggccgcagacgctttattggtgctcaggggcagagggtgacgctgctgggggtgagacccgggtcaggagggcccgtccccaaccagcgaccagcggagggttgtggtctgcagccaggaagcaccgtgaggagaagccagggctcgcctgcccgggggggaggtcagggaggagccagtgagcatctgagaccccggggctgggcggctgtggctggggctgctccttctgtgttgagctgtgctgaggctgggtgggctgggaggtccaaggactggcagggaggtggggcctgagcccggctggccctgggggacatgaccgtcagcagctggacttctggcctgaggagaagctgtagcaggccgggcgggagcacacagggcggcagagaagggacacacaggaggcctggcggcaatagctgggctggcgggaggaggtgggggcacagcaggaggagacgggcacgcagcaggcgggcctgcacacagggcggcagaggagggacacagaggaggagggtctgcagcaggaggtggtgcagcaagccggctggcagccagactgctggcagcacaaagaggaagccccagagcagacaggcacacagcagatgggtttgcagcagacaggcttacagcagacaggcacacagtaggactgctggcagggggaggaagtgcagcaagctggctggcagctagactgttggcagcatgaataggaatcctcagagcaggtgggcgcacagcacacaggtttgcagcagacgggcacacagcaggccggctggcaggaggaagaggcacagcaagctggctggtagctagactgttggcagcacgaagaagccccacagcagacgggcacgcagcacacaggcttgcagcagacgggcacgcagcaggcctgctggcagggggaggaggtgcagtaagccggctggcagctagactgctggcagcacgagggcgtgcaggagctggtgcagcctgattggcaggggctgggctcacaggtcacctggcagcaggggctggatacacggctcactggggtgcagaccagggtcaggcagggggccggggcgcagcagctggtggcgcagcaggggggctcacagcagctctctgggcagtcgtccacctgccaggagtcggagtaagcgctggagcggatggacatggtggacgcggccatgctggggtggggaggaggtgagctgggggaggtgtaagtgagtgtgtgagtgtgtcagtgagtgagtttgtgagtgtgtgaggttcttggggctctcaggcttttatacccctcctggccttgttgttccagggcccacagcttccccttccttgttgctgagaggcggcgtctgccatgattagggatgtttgtttgctggtgacattgcccagctcacaaatctcctgtcacacctgggctatagtctgttgcatgtggaacctcaggggcaggagttggggtgggcctgatcccagctgggttctggaggcaaggacggctgtgggcgtctggtgggtgggatgtgggtgggatgtgcctggggccatctttggttgctggggcatcgtccagccactggccccagcagcctcaggacacgggcttcctctgcaggaagccggcccttaggaattatttcctgtggtgcaaactcctcctctagtatggtccttcccctgctgtaggacacaggactcgccaatttctaatccccatggcctctgtgcctcctgccctctgttcattgcccaccctgtcctttgcttgggaggcagcaggactctgttccagggcagggatcgtgggctcagcccactccttgctgaggcacaatggcagcatcgtgggctgtggtttcgggttctgaacccgtgaagtagctgtgctaggcagcaggcagccgccagccctcgccactgctggagccatctcctccgtgtgccctgcactgcaagcatctttttctcaccagccctgcccacaggccccatcacacacccccaggtcagccacaggcaactctcacggctgcatgatctttgatgatgaattgttatcaccacagggcatgatgaagtcccgagcttcttgccttataaaatggccctgatcactttccaggaacattgctacccagcagctaattataatattgattgtgatttcacatttttatttaaaaattcaagtacacatacgcatatttcattataaagtaagacgtattacacgatgttgagtagaacgtctttgttgctgtgaatctggcaaagctggaaacggcctctcattctaaaaataatgctaacattctgggtcagacctgtccccacagggtttctaaaataagacagaagttgaccagctatggccagctgccacaccccaccagtgctgcccaggttgtaagaaggaggctgtggaggcaggggtggcccttcagtcttacgcaaagtgtggtgtcccagggagagagtcctccagctactgtccctgggggtgtctctaaagtgggtcctcactgaagaggcagaagcagctggtagaagcacaggatcactggagcagccggagagaaggtgcagcagtggccagtgagccccacagtggtggccctgcacattccttcccccgtccccatcactgaagaaattagagcccaaaacagggagaaggggagcaaggaaagagaggccatgccgctccccgcggccttccccgaggtccactcagacttgcatgtgggaacgctggggataggactgggtttcagacaggatagaaaagttttgaactggtccattttgggctatggatttggttctgctctttcaggccatagctttatgatacgcttcaatcatagataattcaagtcccattatcaatatttctttttgtaaaaaaaaattttttttgtagagaccagagtcttgctatgttgcccagctggtcttgaactcctgggctcaagtgatcctcctgccttggcctcccaaattgctgggactacaggcgtaagccaccgtgcgtggcccatcatcagtatttctgtgccaagtctcctaacttttcatgctcattttctttgctgtgctcagctcccattcttcaaaggtaagcttcatgtgggcaggaagtgtggttgtcttgttcaccactcagtctctgagggcctaaaataatgcctggaatagggaagatccttcataaaaatgggctgaa

SEQ ID NO: 1562409 - DNA, 4001 bp, Homo sapiens
taaagctagagccactcttttgatgtgattaatttcagggcctgaaaagtgccttctctttctttctccttctccttccatcccgattgatcatggaggaatcttttccaaaggtttctactgtgatcctctaactaaataagactcagcacttctcagtgatcccactgctcccttccctgcacatctttctgaaatacctggttttctgggtaacttttctttttcctaaatgtaagttattccatgtgcccctagaaatggaaggagacgtagaagacaagttactcctagaaatctcatagccctggcctgtaatcccagcactttaggaggccgaggcggcagatcacctgagctcaggagttcaaaaccagcctggccaacgtggtgaaacctgtctctactaaaactacaaaaattagccgggcgtagtggtgaacgtctgtaatcccagctactctggaggctgaggcaggagaatcacttgaacccagtaggcagagtttacagtgagccaagatcgtgccactgcactccagcctgggcgacagagtgagactccatctcaaaaaaaagaaaaaaaagaaaaagaaaaagaaagaaagaaaagaaaagaaaaatcatagcccttacttcaccgcacagctgaagactctctctgaacaagtaaaatataagataatccttggtttggtcacagggcataatgattaagcccatattctaggctcaggaaaaaaaaaatcagaccctgatcagcaaagactcttgcaaacaaggagctctgttgagaaaactaaataccacctgttctcactaataagtaggagctaaacattaggtacacgtggacataaagataaaaacaatagacactggcaactggaagagcggggagtgaggaagaggaaaagggttggaaaactacctattgggtactatgttcaatacctgacagatgggttcaatcataccccaaacctcagcatcacacagtatacccctgtagcaaacctgcacatgtaccccgcaaaaactaaattaaaagttgaaatgtttaaaaaagaattctgctgagacatacatttgcaatgccaactaatgcaggtttattgagaaatacatggtgagacaagctctgtttttgtgagacacaaaagcagaggccaggagatacagcagcaaggtgaaaacatgtcaaaagcatcagagactggggtgtggatggtaaagcttctggacacatccagaggcatacacagcaccagtgagcaacccttaaaacaagcttagggctggccagaaaaattttagagtgctaaagacagcgtgtgcatggatagtagccagcagtcaggcggtcacaagaagggtcagctatgaagagctattcagggacaagcagcatgctggaagatcctggaaacagctggcaggtcgtggagtcttgattcgctcactggctcctacacacttagcaggttcttcggcagctggacacgcaggactgctgatacgtcctggagaccccacaggctggctggcagacagtagagactcctcccactggttggcagacagtagagatgccgcccactggttggcagacactggagatgcctcccaggggctgacatccactagagacaaaggtgagcggccggctgtaggtagttgagcaggggttggaaatacaggtagtttgtcgagagcaagtcacctggcaagggttggagacacatgaagttcgccggtaacaggttggctggcaagcagtgggctcacagcaggtctcttgacagtggtccaggagccaagagccagtctggaaggaactgggcaaacagatgccgcccaggcagtcagcatcagtggtggaagtcgtggtaacttgggccactggaacaatgcagcgtcctccaatgggcctggaagagcaatttcttgtggagcagttgaaggacatgatgtcagacagagggctgcaggtagcttgctgaagttacctcctgagttgtgaatgtcactccagactcctgagcttttatatatccttgctggtgggtggggctctctccctggtctccgtggcttctttggctcagaccagtttgccttagaacatcttgtgaatctacacattaattgtctcttaagaagccttcaccctcataaagaaagtttagtagtttggtaactaaatcacaagtcttctgtactgtacttagtctgattaagaaggctggttggcagcttcaaagctattggtcatcccagcccacacgttgtccctcattcatcttgcttatgatgagtgttgacctgacactcatcctaccaaagatgccaccatcctaccatcacacactctctccctccctaccaggaccaattacaagcccatgccctgtttcatttgtcactggacttaatatcttttaaacataacttaatcagtcactctaccacacctaacggagctcctcattgggaaggtgcctccttgaatatgtttcaagacaacagtgacaacacttgacaggaacaaagggcacagagacttgtatccaaagtctgagctggctctcaaaattaatcaactgactcaaacaagatgcccgtgggaaggctagagggcagtgggacccaccctttatgttcaaccaacaaagcaaattagaagctaactaagtgcaactgtatttgtagccaagaccttttctaagtaaattggatgagctttattcctaaaatgtttaatttaataacagtggataatagtgactcctgggtctcattaatatgccagtggaaaaggcttagttaatttttaaaattatcataatgttaatttgaaagggtacagtgtctttctcccaatttgttcaatatgttcaaaagatatttattttcacacatatagatagaatgcattttaattatggacaaactaaaggctcttcaaggtcattgtctccatcagggataagggggaggcagagctgggggaagcaggcacttaatcaatgtttggtaatgaagagatgtgtgaagagtgtgctatatttaattattctttttatgcttggggaagctatagggatatcactctattttatttcatctcactacaatataatgaattttaaacaccagaatgatggctcgtttgggtccacctgaacatagatgaataaactgcctcaactctggcaaaataagcaacttcaacatcgcttcaagtggtcagtggtatttctgtcccaaaacagctgtagcatctgactcatttttaaactagcttacatgagggagcgtaagggaataaaatggatttccatgtatttgagggctacaggtaagctatgttttaaatatccacaaagcaaacagcgttatgtcaggactcatcagaaatccctaattggaaactaacgacacacccaaagaagagggtgctgtgagcaatagcatgattcccagatatcagacctcaatgtcctgaccctccctcagtgactcaccatgtgttcccaggaacggggtgaaattaatgagatgactactttccacaatgttgtggctatgctcttcccaccacagagggtatcttagttggtgtttgaaggcctgagtccttggccctagggcctggcttgcatgttgtaaaatggattactagtttacaggcttctcccagccacaggttcacaggctactatggaagagtacttaactgtggcaattcccaaaatctgaagtgagtagtagagttacaaaggagaacgtttcagtgcctactgccacattcctggaatgacagacaattgtataagttattaccttgtcttgatgtgtctctcccattgaaagctggaaattacagataaaaggatcctagaaaatatcttccatcacttcaggaaaaaagaaaatgagtgtcttttaagcacacaactctcttccaggcattgagttaaaggtttgtacaactcagc

SEQ ID NO: 1562410 - DNA, 4001 bp, Homo sapiens
tgtaaggaactcaaacaactcaacaacaacaacaaaacaaataattccattaataaatgggcaaagcacctgaataggcatctctcaaaagaagacatacaaatggccaacaggtatattaaaaaaaactcaacatcactaatcatcagggaacttcagatcaaaactacaatgagatagcatcatcttaccccaattagaatggctattatcaaaaagacaaaaaataacagatgctggtaaagatgtggagaaaagggaactcttatacatcatttgtggaagtgtaaattagtacagccattatcaaaaacggtatacagatttctcagaaaactaaaataaaactaccatactatccagcaatcctgctactatttattcaaaggatagggaattggtgtatcaaaaagatacctgcacccccatgtttattgcagcactattcacaatagccaagatacagattcaacctaaatgtctatcaataaataaatgaatcaagaaactgtggtatatatttacaatggaatcttattcggccataaaaaagaatgaagtcctgccatttgcagcaacatggatggaaccgaaggtcattaaagacaaatattacatgttctcactcacatgtgggagttcacaaagttgatctcatggaagtagagagtagaatgatattaccagaggtgaagaacggtgtgtgttagaggagaagtgagtttggttaatgggtacaaacatacagttacacagaaagaataagttctaatatttgatagcagcatagggtgactacagttaacaatgtattgtatgtctcaaatcagctagaagagagagtgtaaaatgtcctcaacacagagaaatgatagacaaggtgatgaatatcctgatttcatcattacgtatcctctgtgtgtaaagtatttcatatgccccataaatatgtaaacatattatgtatcaatttttaaaaagtgccatatgtagatcagtgatgggagtgtgtgctgcagaactaatccagttctgtaaacctgagatcctccgcgacccgggaagcaggacatccaccaaccacatgggaaagcccgatcctcagtgctctgaggctttggccatcaatgcagggcttgctggcctggagcaggagtggacagccagtggggaagcgaggccactccaccacaggcgggtaagtcaccgctgtggccactgcagctgggccccaggagccctgggagagaccacatgggcatctgcagccgcgccctccacccgggacaccaccttctgatgagcactgggtgaagggatcactgaagagggtttagcagcaaattctatgtaatcagcagaatagatagcggggagtatagaaataaaaaagagagacaagaaacgcagagttgcatggggaaagctggtttatttgactctcatggggtcagagaatgactctgggaccccagacttccctggggggataggcaagttcagccagggctccagatcattctattatattctcgatccagaattcagagggttcactgagcatgcttttcacctgcaccatgtgcagaagaccaactgaggactcatccagggagtgtacaggtgtggcctcatctgcactgggagcagcgggtctggagattcatgctcagcagcaggaaggggtgctgcaggagatgggtctgcagaggacgctggtgcaggaaggctggcagcacccagaggactggcaggagggagccgcatacacgacgggcctgcagctcacgggcacgcacacagaggactggcatctcacgggcacacacacggctggcttgaagctcacgggcacgcacacggaggactggcagcccacggggatgtaacaggatgcctggcaggggctgggcgcgcagcaggctggctggcagcccgaggagcagctggtgtggcacatggtggcgtgtggctggataaggtcgaggcagagggcagtgatgtctggggatggcctccctgggtagcctttatacctggacccaggcatccccacagcacagaagcacacacctgttgtcttccttgtttttcttcctcaaggctgtttcctggaactcagttttctgtcgtagatgatgttttttatctggccctttgtttcgtgactaattgcaccctcttcaagctcttgttacatttggaaacctgcccaaatttatcagtgatgcacaggcagttttagctccacctgcctgatatctgcctcccttcgttagttctacgctgaagcagacatgagtggtacccaaaagagctcctcgaaccgcaacttctgttgcatcaaccagaaactttggggaagagaccagaactgaatatagacaatgaaatcatactggggaacctgctggagtgagtgatgcaaagctggctactctatcaactatacagttgagatttaggagatgctcgttttcaggcagccgtcaaccagcagtgcagactgtgcttcctgagagagaagaaacttaggagataaactcccatttcccagctctctgctggggcaggcttccaaaatgcagtgtcaccttccaaaatgcagtgtcaccagccggagtcagagcagaatacagtgacccaactctgccgaggaggaaggggccagcgctcaagcagctgaagccctggagtccgaggagcagagaagcggaaagaaggatccgtgtggagagcaggccccacactgtggaagctgactgtgaatctgtggaacggggcagggctgtgcattcccagggcaaggcaaccacaggctcaccagagagaagctgctagaggattgagagtgaagcccccctccagtccccacgtcgacatccagccgagaccccctacagcccggcaccaaatgagtaaggaccacagactacagtgagacccgcctaggccagcccgaacaaagcctaaaccaattcagaataggatttttagggaagacagtttggaatgtgagtcccaccaagatacagagtgttccaagttgtagatgcttcccagagatccaccctagcaaagtgttgaacaaaaactgcacaagattaaggtcattctccagtaactgacggctagaacaaaaatcagaaacatgatacagctcagagtctgtaaatgcattattatgatacctcatacacaatcaaaatcatcagatattgaccaggcacggttgtttatgcctgtaatcccagcactttgggagaccaagatgggaagattgcttgaggctaggagtttcagaccagcctgggcaacatagtgagactctgtctctacaaaaaaatggttaaaaattagccagacatggtggtgcatgcttgtggtcccagctacacggtaggttgaggcaggagggtctattgagcctgggaggttgaggatgccatgagttatgatcacaccactgcattccagccagggcaacagagcaagaccccgtctcaaaaaacaaatcatcagatattaaaagatataggtaaatttaattcactgttaaaaaaaataaacctgatatggtctagatattggacatggcaaatgatgactgtaagcagctattatagacatcttccaaaaaatccaagaaaactgttcaaataattaaaggaaaacattgtcttcatgaatggataaatagggaatctcagtagagtaattgaagctattttttaaaatgggaatcctagaactgaaaagtacagtagttagaaattttaaatacaccaaatttgacttcaaaaatcaacaacgtccaaatccaggaatctcagaaagcccccagtaggataaataggaagaaaaccacatccaggcacatcatgaagtgatgaaaaccaaaaatgaagacaaaatctcaaaagcagtgacaggaagacactttacatacaaaggaacaaggataagaaaaacgccctggcttctcatgagaaacagtggag

SEQ ID NO: 1562411 - DNA, 4001 bp, Homo sapiens
tccagaagcattttttggttaccaaccctccctcctctcatgctctgatttccagtttgacctctaactcccagcctgggggaccagagtgcttacgtgtgtgcataagtgtgtgcacgttgtatagtgcacacattgggtgtgttcatggattcgaatgtgttcggctgcaagcatttatatgtctgggttgattggttccatttctcactcagttttatccaaagcctcccagtttaaactacacaataggtccctgaccaccttgcctaaaagatgatgaaaccagttttttaaccctaaactcaacacttgcctccaaggcaaataaaaatcttggaatcgaaggcagccagtagtgagaacgttcttcaggggacagttctgggctatgctatctggaatagcagactcctggggcaagagggctggcccatctactggggaacgtttaacctgagacagtcacagcagagccccccaggaggggaatacagcccagacaggggaaatgcagaagaatgctaccagcacaacgcagactgggaaaagcaagttccagattacattctgaataatttccttttcatatcaccagaaattactaaattagaaaacacccatttcaggaatacatagagatatgactcaactctattttttctagaaagtaacagaataaggagcacacaatcccaacagtggctgccccaagaagttcttggtaaattattgatgatgttctcatttctatgtcaggcagtgggttcatgcgggtttattatattaggatcctcagtaattgatcatcagtcaatcaataaaaaccaagcctttgtggaccagtgatgggagtgtgtgccgcagaactaatccagttctgtaaacttgagatcctccgcgacctgggaaacaggacgtccaccaaccacatcagaaaacccaattgtcaatgctctgaggctttggccatcagtgcagggcttgttggcctggagcaggagtggacagccagtggggaagcgagaccactctaccacaggcgggtaagtcacttctgtggccactgcacctgggccccaggagccctgggagagaccacatgggcatctgcagctgcgccctccacccgggacaccaccttctgatgagcactgggtgaagggatcactgaagagggtttagcagcaaattctatgtaatcagcagaatagatagcagggagtatggaaataaaaaagaaagaccagaaatgcagagctgcatggggaaagctggtttatttggctctcatggggtcagagaatgactctgggaccccagacttccctggggggatgggcaaggtcagcaagggctccagatcattctgtcacattctcaatccagaattcagagggttcaactgagcatgcttttcacctgcaccatgtgcagaagaccaactgaggactcatccagggagtgtacaggtgtggcctcatctgcactgggagcagcgggtctggagattcatgctcagcagcaggaagagatactgtaggagatgggtctgcagaggacgctggtgcaggagggctggcagcacccagaggactggcaggacggagccgcatacacgacaggcctgcagctcacaggcacgcacagggaggactggcaggagggggctgcacacacaatgggcctgcagctcacaggcacacacacagaagactggcagctcacgggcacgcacacagctgacttgaagctcatgggcacacacacagaagactggcagctcacgggcaggcacacggctggcttgaagctcacgggcacacacacggaggactggcagcccacaggcacacagcaggatgcctggcaggagctgggcacacaacaggctggctggcaggggctgggcgcgcagcaggctggctggcagcccgaggagcagctggtatgacacatggtggcgtgtggctggataaggtcgaggcagagggcagtgatgtctggggacggcctccctgggcagcctttatacctgggcccaggcatccccacagcacagaagcacacctgtcttccttgtttttcttcctcagtgctgtctcctggagcttaattttctgttgtaggtgtctctgggttttgtttggcccttagcttcatgactaattgcaccttcttcgaactcttggtatgcttggaaacctgccagagtgttttactggcttcatcaagattcttccttgttctttaaaattttacctgagttacttttgtgagattccaaaaactcagatctccagatttttttcctctctgtgtgatgatggtccttaaaccacagaagtttacactcctctcatggctcaggaaggctccacagtcaatgtgaggtagaacaggacgtgtctagctgatctgtgggtgtcctgagagcttagagctggatgagagctagcagatggaggaagaacatggaaatcacttgtccataggatgagtggggacaaagggtgtgggtcacagagaacttcttgtgagtggtgaccatggatctttgtcttgagaaatcctcctagttaagaaccaagatgagacaacaccactggccctcatgcatggagacacagctctaaggaaatcaagctggtccaagcatgttcccagggaagcatgtgaggccagtgaagggtcccatggacagccacagcaggatatgtgtgagctgaatatagaaggttccaagggccagaatgacttctgggtatgttcagcagaaagccatgtgcaccctgtactgcagggacagtagaatctctgagcctacagatgtcaacaccagatcacttggaacttggcatcatgataacagaatgaaggaaaaaaccacgtgatcatctcaattgatatagaaaaggcatttcacaaaattcaagattctttcatgatgacaacaatcaacaaactaagaatagaagaaaactacctcaacacaatacaagccatacatgaaagacccacagcaagcctcatacccactggtgaaaaactgaaggctttttctctaatattgggaacaaagccagcatagtactagaagttttactaagagcaactaggcaattgtttttaaaaggaagaaagaaagaaacaaaaagcatccaaattgaaaagcaagaagtaaagttagctgtgttcacagatgacatgatttttatatgtagaaaactctaaatattccacacacaaaaattttagaataaatgaattcagcaaagtagcaggatacaaaagcaaaacacaaaaatcagttctatttccataaactaacaagcataatctcaaaaggaaagtacaataacaattccatttacaatacattaaaaagaacaaaatactcaggagttaaccaaagaattaaaataattgtgtaacaaaaactacaaaacgttgaaagaaattaaaggcaacagaaataaatggaaacacatcccatgttcatgaattggaaattaatattgttaatatgtccatactaaccaaagcaatctacagattcaatgcaatccctgtcaaaatcccaaggacatttcttgcagaaatagaaaaacccatcctaaagtttatgtggagtctcaagggaccctaaatagccaaatcaatcttaagaaaagaatagagctggaggagtcacactttctgatttcaaaacttactacaaagctacactaatcaaaactgtggtactggcataaagaccaatatatagactaatggaatagcatagagagcccagaaataaactctcacaactacagtcaaataattttcggcaaggctgtcaagacctttcagtgagggaagaacagactttttaacaaatggcagtgggaaaacaggatatccacacacaaaagattatttttaacccttacctcacaccatatacaaaattaactcaagatcaaagatagagaatctcagtagggaaattgaaacta

SEQ ID NO: 1562412 - DNA, 4001 bp, Homo sapiens
catttctctgctgaaattacccatctgttcatttatgtttttaatgctttactcttgatcttttaatctattcattatagttattgtaaagtttatacctgatagctctaacacctgtgtgattttactttctactttctgtttttagagatagtgtcttgctcttttacccaggctggagtgcagtggtgcaatctcagctcactgcagcctcgaaccaccaggctcaaacgactctccagcctcagcctcccaatgtgctggggttacaggggtgaactgtgcccagcccctgggtcacttttgaatccagttttattgatttctttgtctcccaacaatggcttggtttttccttgcttttttgcatatcttataattttttattgaatatcagacatcatcagttccttctggaaatgcgtgcgtctcttttcctgtcaggccattagtgtgtggggggaggtggatgagtcaatctggtcagacactgaccgtggtttgggttttgttgttactgtggttaccttcagtgcaccaaccgcttgtgcttagggtgtatcagtgcttgtgcttagggtgtatcagtgcttgtgcttagggtgtatcagtgcttgtgcttagggtgtatcatcagtgcttgtgcttaggatgaggggtggggaggtcagcgcttttgctccaccctaagtttcacacgcccctgcatgcctgacgttcagaggagatctctacacacttctgcctttccccagaggcaggctgacgttgcttattgagctgtgcctgctaggctggagctggagaaaggagggctctctgttgtcctggtccagtgtcagtcttaggcaggccctttgcatgtgggacttggagaatgagactttcttcgacttcctgctacccctcccggggtagacgaactctgctctgtatttgtggtgggtgttgtttgaaagagtttcctgccctctttgccacagtaatcctttgaggtattgcatgggatctggggcccaggactatttcttgtccatccttctgggtagaggattgttttcttctaccctcccccaacacgctccatctggaagcttcttctctggtggtctttatacccgggtcccaggcatctgggtaacataaaaacgcaagagttgtcttcctcatggtggtttccactgtgtttcccaacatcttattaccccacagtgcaaggcttggggagggagtcgggggacagaaccttcaggccactcccccaaccaaggaccctccacttcagctcagccatcaggaaggtggctctctgaagaggtgctgctgccattgaagttggtatgtaccttcaaggaaagaacttacgaaatacatgaagataaaagagagagacgaggtgtatagggacagccgatttatttggctcacatgggttttagtttcctgctggagtgagagaaggactctggcagccaagacttccttgagggggttcccagggtcatggaaggtctgaatcatttttccacgttctcaccccagagttcagaggtttccttgggcatgcttttcatctgccctatgtgtgcaatctgggggtccaccagatgcttattcacggagggatacaggtgtgtacccccgtgtaccaggagcagctggtcagcagcaggaaggggtgctgcaggagatgggtctgcagagggcagtggtgcaggggggctggcagcaccccgaagattggcaagagggagtcacatatatgatgggcctgcagctcacgggcacgcacacggagggctggcaggagggagccacgcacacaatgcgcgtgcagctcacgggcatgcacacggaggactggcagctcacgggcacatagcaggatgcctggcaggggctgtgtatgcagcaggttggctggcaggctggggagcagctggtgtggcacatggtggcgtgtggctgggctggtactggggaggaggatggtgatgtctggaagctgcttctctggtggtctttatacctgggtcctgtcatctgggtaacacaaaaacacaactgttgtcttccttgtggttgtttccactgtgtttcccaacatcttattttcccgcgtgtactttcccgcgtcatgctccaccataaatagcttcggccttgaggttagtttcttctgtaaacaggatgttctggtttgacgttatgcaggttttttgtcaatttttttcaggctactaccgtgcacatagcaccactggctcgactcaaagtaccgaatcccgttgtttcacttttgtttcatgctatcaaggaagatgttgaggcaataatgtattttgagctttaattttgtagagtaaaactttaaagcataggttggcaaactatcgtctgtgagccacatttggcccactgcctgtttttcaaatgaactcttattggatcacagcatgtcattagtttatgtgttgtctgtggcttcttttgcactatagtggcacaactgaatagttatggaagagactgtaacatgcaaaggctaaaatatttgctgtctgccctttacagaaagttagccaaccctgccatagagtaatctatacaagaagttatttgttaatgcaacaaatatatattgtgtaccagcagcaacgaggtcttggcctcaagagcattctagcagtgggcaatgaataaatgagtaaaggaagaaatgaatgcatgaaataattccatacagggctgagtgctggggaaaatgggttcaggagatagtaatgggggtgctggtgggtggtctggggggcgtctgtgaggagacaatgtggccatggagagagtgaggatgctgcttcagaaactggtatgtccaggggaggcaggaatcctgtactctgggtgttgggccatgggtgcaggtgaactggtcagatcatgaggacccaagaaccaagcatcagaatcccatgctgggggggtctgggatttggggttaggagtcagatggaaaaagaatcagtgaacctgaagacacaccagtagaaattatcttgtctcaagaagaggagaaagaatctagaaaaatgaaaagacatatgagacagtactgaactgtctaacatactagtagtttgaaccttggaaagagaagagagcgatactgaaccataaataagtttcaaaaaaataatggcccaaggcaccaaatatgatttaaaaaataacaacttacagacccaagaatctcagaacctttaggaggatcaacacaaagaaaaccatatccaagcatcaaatagtaagagtaatgaaaatcaaaaaattattgaagacagtggaaaaaaaagacacttctcatacaaggtataaggttcttgcaaggatgagaaaatccctcacttctcagcaaaaacagtggaggccagaagacaatggaacaacttctttaaaatgctcaaaaaaaatttgccaacccagaattctatacctatgaaaaaaatccttcaaaacatgttgaggtaaaaacctgttcagaagagcaaaagctgggagaaatcctcccctgcagatgtgcactgcaggtgacgtgcacggatgtcctttaggttgactaggacgaggccaggtgggccctgacctgcaggaaggagtaggaggaacaggggaaggtaaaggagcagataaatatcaaagacgcatccttgttcttctgtaatcgactcgtaagacaaccaacttttaaaatggattacttggtgactagctcacaatcactgtggctgccccaattctcttggtttttaagtgtgattctgaactatagcagtgaaaggagttgcctgtgaacttgtggcctcgcccggcttgtccctaggccttaaggtgactcccacatggccacagatcggctctgggtccatagacttctaagttctgtccacagctctgagaccccacttggtcttcagccttggaggggatttcattaatgtggt

SEQ ID NO: 1562413 - DNA, 4001 bp, Homo sapiens
tagaagtaaggggttagctaaaggagattgaacactgaaatggccaaaactgggattctcaaacattaaggcgtgccaggttttctgggactccagttgactacatatcatggcccattcttgtacacatttttaaatagttaaattatatcaaggaaaagtcagaactcagaatcatcaacctgcaaatatagggttaaaatgtagagtcttctggcggggtgtggtggctcacacctgtaatcccagcactttgggaggccgaggcgggtggatcacaaggtcaggagatcaaaaccatcctggctaacacggtgaaaccccgtctctactaaaaatacaaaaaaaattaaccaagcgtggcggcgggcacctgtagtcccagatactcgggaggctgaggcagaagaatggcgtgaacttgggaggtggagcttgcagtgagctgagatcacgccgctgcactccagcctggtgacagagcgagactccatctcaaaaaaaaagaaagataaatgatgctagtccttgccttttcctgaacaagataacgtcttatagggcgagtgatgatgcctctgcggtccataaccagatgtgctcctgcccccaaacccggatgtgattctgctttgatgcagcttctgagccagtttcatgtgatctgcacgtgctgacctcccgccacctgcatatgaactgtgagctgaaacccggggcggagcctctgacagggctgcccccgggctggtgtgagctgaaacacggagccggaatctctgacagagctgcccccggctagaaacctcactcttctatagtcctcggtaaaacttctgagtaaagctcactttaattccttaaaagctttttttatcaacaccacaaacctctttcccatccagttggatgaaggagtagctatagatttaaatttagtttaaggttttaatttcttgacaagagtgggttgcacataccagctaataagcagatggcccgttttacctaaaatggatcaaactacaaaattagtgatttgtcctcaatctcacccagaagagagtaagaactgacctcatacatttaaggaacaaagtgggacgaaggaagcctgatgtgactggggttgggggttcccatcaggccaagctcaggagcacggcccactagcccgagagggtgctgttgagaggccgctcaccaggcctaacattcatctggtacctgccccttctctgcagggaaggagctttccagaatcctggggaaggtacctcctgaggaaggagtgtgggaaagacactgaggagaaggcatcacacagactcaggtgagcactcagcatctggtatttatgatatttgcaagagacctaacatcagacagtgcggagggccctgtggatggcccaggctgtgaacccaggagaaactgtgtagaaaggcgcatggcctcaccggctgggatctagtgacggtgccgcaaaggaggcaggcggtctagtcaggtgacgacagtttgctgtgggaggatgtggggactgcctggcaggagttcagagagcctgctggcttctgacctcgcacctacgagggtcataggaggccacctgctcagcagccagtgggggtgctccaggtgacaggtctatagaccagggtggggcagaagggctggcagcacccagaggttgggcagaaggaagccacacacaaaacaggcttgcagctcacaggcacacagcaggccacctggcaggggctgggcacacagcaggctggctggcagcaggtggataccccacacaggggccggcacagcagagccacacagggggctgagcagcagcaggaggtcccatagccctcgggtgggtagcaggtgctggggacacagcacggggagccagggcaggccattgggcagcccgaagagtggctggtgtggcacatgatggagtgtggacaggtggggggcgcagaggacagggctggtctggagcctgcttccttaggtggcctttatacccaggctaccggcatcctggcaacaagccccctggcatcttcctcgtgggtggtttttcctcctctgccctgtctggttgatctttctgtgtttttctgttgaggttactcagttcaggaaactctttcagctaggggtgccctatcattcagcagaccgtgtgtttcctggaaacagagcaggggtagctggtgaagggctgtcagtgaggccaggggcccacctcatggatgttcaaggtccccccgttgtaaatgccatctggagctcacacaagcacagtcacactcactacaccaggggccccgttttgactgagaagctcagtcatcatcagggtcttcccaagtaacgagagccaaactactgggctctatattgtggaataataatgatgattattgaggtaacagtaatgcacagaggtctagcactgtgccaggctgtgattatctcattcatctttgccagcattcggggtggccgataccccattttacagatgtgcaatttgtaagtcatagagggtttgcacaatgggtgcgtgtctgcaccactgcagaggtgcagggatctggactgcttagtttcactctgggatccatggtcgttaccactgtgccaaattatactagggcttgaaggttcaataagtgactcatcctgaagtcctgaaccagctcggacagagaagatggacgaaaacatcagccacgttggcgtctgcagagcatggctcaggcgtgtgaccacagtgggcttcctgacaccacacctcagaagtgcccacttcccacgagtagcactaatggccacaggacacctcctctgcagacggagcccaggaggacccatcacggagtcgggcatgagctattcatatctggttcctctccctcgctgtgggtctgatcagtctcacccctgcagaggcagcttgggggaaagtgaggagctggtgtgaaattccaggatgcccctgaacttgggaagcagcgggcaggagtgtggatgacacgctcctcctcacactccagctctgttctcttgatggattggccacagcgctttattctacggtggtgtcacacggtgggggatgagccatctctcagggcagagctactctgtccatcccaggcagctcccaggggcaccctctgctcctgtgtgggtccttctgtgcctgctggtggtggatatgggtgattcctgccaagaagccttcagacaagtcagacaccacattaatgaaatcccctccaaggctgaagaccaagtggggtctcagagctgtggacagaacttagaagtctatggacccagagccgatctgtggccatgtgggagtcaccttaaggcctagggacaagccgggcgaggccacaagttcacaggcaactcctttcactgctatagttcagaatcacacttaaaaaccaagagaattggggcagccacagtgattgtgagctagtcaccaagtaatccattttaaaagttggttgtcttacgagtcgattacagaagaacaaggatgcgtctttgatatttatctgctcctttaccttcccctgttcctcctactccttcctgcaggtcagggcccacctggcctcgtcctagtcaacctaaaggacatccgtgcacgtcacctgcagtgcacatctgcaggggaggatttctcccagcttttgctcttctgaacaggtttttacctcaacatgttttgaaggatttttttcataggtatagaattctgggttggcaaattttttttgagcattttaaagaagttgttccattgtcttctggcctccactgtttttgctgagaagtgagggattttctcatccttgcaagaaccttataccttgtatgagaagtgtcttttttttccactgtcttcaataattttttgattttcattactcttactatttgatgcttggatatggttttctttgtgt

SEQ ID NO: 1562414 - DNA, 4001 bp, Homo sapiens
aaaaaaaaaaaaaaagtgccctatctcaagactgtgttagtagtttgaatgaacatgtttgtcattaccacaccatattaaatcactttgcattgtaactgagctaaatttccaataattccttgaatacacaaagactttcagccccttctgctttgcttattgcgtgtaatcttcccagacttctcccctccgatatttctgtctttgcaagtcaaaaatttgcagctccttcaagatatcgtacaataagtttccctgtacattccttatcatctttgtgtctccatatttttacatttaacatcatttacatgtataatggatctctttctctaacagctgttgtctaaaggaataatgcatgggaatagttattgaacgttgtttgagctctttttttcttctcaactttaggttccttattgaaatctatttatcttcacacctgtttctggaactgctttgcctgagaaaacaaagaatgctaccacaaaaaagagaaataacatttccctaattttatgctcagatgtgaattaaattatcacttctgatgatatcaaaaggttattatcttcagctttacttagtgtgaaacatgaatacaaaccaaggtggaatatcaatcctccattcaagtttcatggtatcccttattacacatatgtagataactgaatcatattgaattctcatcaatgagatgcaggcatttgatcatgattaccaacaaatattgggtgacttcaaaagttacttcaaatcacttttgtttctcttcaattccatttttcttttatgtatatctataaccatattgttctaaatagtatttttttctctgcagattcctgatataactatcaactagtttgctaccttatgcttgttggcatagacacaagaatccacattttataaggggatcaagctaattcctgattctgatattttaatgaataaaagtctgtaaatttagtagacttccactacctgtagtttgaataacaaaaatctctgaggcccccaaaagtttgtctgaatcgcaaacttcatatgattttgaaacctattcctatatatatacaccaattgtttcataataattgcctaatacatcacaaccaaaaccctagcaatataaaaccaccacaaacatagctgaatatgagaccaatggatttattggattaaaatgatttgactttttatacaattgtggaagaaaatcgaataatataaattctacttttaatgtgtatttcaagatttattttgagctagttctccaattacagtttttcagatgaagcctgccagccagtatttggggacaaagacaaactgagaacttgataattatagaataagaggctaattctttctgtacatgatgaagacaataaaggttatgagtagaggcattgaaggcattagccaacaaaatcagcaatttaacaagatgatcaatagtagaagcctgatccacaagttggtctgtagcaagaagactggcagctcctagaagccaagtaggttgggcggcagaatccaacgccatagcccagggaagggaagccacagcctccataacccagggatctgaagccactggacccacagcccactgagtagcagctcctcgatccatagcccagggagcggcagctgctggatccaaagcctagagacccagagtaagttgtctggcagggactgcagagcaaggaggttctgggacggtagcaggaggtctggcaggggctggactccacataggatgtctggcagctggtgggctcccagcaggtctgctgacagcccctatagagagaggaacccagctggcacgtgctgggagagcagaggtcagtgctgtagacctggttgctggggtaggaaaagccacaggaggaggctgggtagtgcaggtagccaccacaggagcgggaggagaagtttccagagcagcagttgtaggacatgttgatgggagatgtgagttcagctgagttacactgagaagattctgagtttgcatgccacatctggacaggaccatttatatacgttcagccgtgggtgtggcaccttacagggtcatccttcacacatttaagctcccacatttcatataagcaacttagtaatcttctttgtcattgcagttaactaacacccttcatcttatatttatggaagaactccttttgtttttacagctctgcgtcaatgaaatgcatttatgttacaaatgctatgacagtatgtgattagtccctactccattatgtccaggaaaacccctcttattttctctgcccatgatttatacatctgctcctgttttggctgggaaattctttctgtcttgggtggggatagcaatgtattcatctttttttgtcagtggcctagaggcagaaatcttattgttcacactctccaaaatagtttgccatctgttatttactataatcagtgcttgtaagtccagtctcgagggcctatataaaagtaagccaaaggaattgagagataactagacatagatatcatcttgaacaaatttttttaaaaaattagtatttagaaaaaagaaatcaaaacaaaagcaaaaaataaataaatacaaatacaacaataaggacccatgtgaaaaaaaggaaagtagaagacactgctgagatgaggtaggaaacaagtcagagtagtcacaatagcagaaggatgctcaggactccatcctaaaagcaaatcaaaatgctttcaaataaacttatttgatgacttttgtatgatgcattcatatttgtaagtgttctggagcctacctgtctacaacacctctaaacccccacctcaaaatgttgactgccttctgagcatttgcggggtaacaccagcttctatgtttttcgtgactctgtcccagccctctttaaagaggtggatttaggttttgtggtgttgaaaagtataatttggagatcctcattaaaaacacaatattaggaatataataatagatataaacatggatattaacttagaataaaaacttccatagttaacaaaacccaagatgtcacaaaatcaagacaataatatacctttatcatcatcctcatctataatctttttctacattttttggttgcatagtcggtctttgatcatctctacacatgacaatggttttgtccacatgattttctgtagaacaaatggaagtaaaacttggtgtttcttttagaaatagtacatcaaaaatacttgaattattttttatgacacagaaaagttttttttttttaacattgccatttgttgtgagcaacgccacagctgtaacaccctctgtcatttcatttcagcagtgcttcaagcctgagattgtgcgcctcttgtccagatgtccctggttcacctcccacctgtatctgttggcaatttgcatgaggatcggctgcaaacagctgtggatccagggttgtaggggtcttctagtttgtggcagagcagtatcctcgttccaatccttcttcttaaaaggaaaactatgggccgggggctgtggctcacgcctgtaatcccaacactttgggaggccgaggcgggcggatcacaatgtcaggagatagagaccatcctggctaacacggtgaaaccctgtctttactaaaaatacaaaaaattagctggatgtggtggcgggcgcctgtagtcccagctactcgggaggctgaggctggagaatggcgtgaaccccggagacagagcttgcagtgagccgagatggcgccactgcactccagcctgggcgacagagtgagactctgtttcaaaaaaaaaaaaaaaaaaaaaaaaggaaaactttctaaggtttataaggttgaccctggggactagatatattagaagtagtgcaggcagctctccggatacacccacagcctgaggatgccacgagggactcctaggccacagcagcatag

SEQ ID NO: 1562415 - DNA, 4001 bp, Homo sapiens
tcagaggatgtggttcccacacttccatgcttagcccgtattgtctccattataagagaaaagataccctcttttttcaggtttaattataaaaagcttaagggaaaggtgtcagggaaaaaaatcaattaaagctcgtgacatattattggaggaaatgataatctttcaaagttgttttcccattcatggagagttgttattgaatattttatgaaaaagttttagctgaacttttacactacctttagcctctgaaagaaatcacttgcttaaattaaaataaatagagaaggtcttatatctcagatgtgaatagcatcctacaaatatttatttttattcacactgtcacagctgagcagtggattccaaggatactgagggaggttataaaatctagaacattgaaagtaatctaattttaactgccactcaatgcagaaatcactgaaaagtaatatctttttccttgttgataaactcaataatccaaagaaaacacaaaggtcataatagttctataaatttatgatttataaatatacatttaaaacaagccaaagtatttctccctataactgtttccattactcacagttgtaaaccttaagtctttctgtcttctgtgctctctctctctttctcacacacacacaacacaaacacacacacacactgaataattaattttctcctatatttaaacacaaccgtaatgtcctccagtacctaacatttcatattttcccttttccatcataacatttcagatttattcaaatatttcataattttatatttaatcacctagttgacatcttctgagaaaactctaaatactcttttaaaaatgtaaacaaaaagcaaatatgattgtcagcaaaatgtgtcttccttgaaaacacaccaccattatgagtgtactctcaataattctgttaagaatccaaccagttttcatggcagaagacatgcacttgctcagtcttttaggcactggcatgcccggagaatctccccacacactaggcctgatgacattaccgatggaaatggatgtccaaggaaaagacgtctgggggcctggagcccccaaaacagatcacaaatcaaactttggaaaccaataaaagacaaagagaacatattggaatcaacagtaaatgaatttattacgtgaaacaaaactgaacttccatatactttataagatgaacttacgtgataacgaatcacttgtttcaaaattatagacatttgactctatattttgctcattcattaatttcacagtctgaaagaactagcctgtccagccagtacttgatgccagagaaaggatgaagagctagtagtaagaggggttagctcacattgctggaaatgcctatgataacagctctacgtagagactgagacactttgcttaaaaggtctggaaattcagcaagttgatctgcagaaggttgatccataggctggtctgtaacaaggagactggcagctcctagaagccaagtaggttgggcggcagaatccagatccatagccgagggaagggaagccacagcttccataacccagggatctgacaccactggacccacagcccactgagtagcagctcctcgatccatagcccagggagcggcagctgctggatccaaagcctagagacccagagtaagtcgtcttgcaaggactgcagagcaaggaggttctggggcggtagcaggaggtctggcaggggctggactccacataggacgtctggcagctggtgggctcccagcagatctcctgacagcccctatagagagaggaacccagctggcaggtgctgggagagcagaggtcagtgctgtagaccagattgctggggtaggaaaagccacgtgaggatgctgggtagcgcaggtagtcaccacaggagcgggaggagaagtttccagagcagcagttgtaggacatgttgacgggagatgtgagttcagctgagttatagtggaaagattctctgagtttgaatgtcatagtctggactccaagttatatatgctcttagacctgggtgtgtccactgtctcgacactcccttctccttgctcactttttattataagaatgcttccctaggttattgtttaatttatcacatcttcatatacttacttgtactttagtcactctggaacacttagaaggaagccactcagtttttttttttcctggaattcactgtggtttgaccttcaatgttatatgtcatcacatttatgagtatcttgcctcttattatttgagtacagtgagtccttattgtaccaaatggaattacacaaaattctttctttacttcccttaagttatcaggagcatcagtggttactactcaaaatagattgtccttctttttaacacaagcatattatttgttaccagaaacggaggatttctccaaatactaactgtattcagtagcctcagcaatctgtcagttaaaccttttactagtaccttaagagctcaggatcagaactgaggagtgcagcattatgttgggtgtccatatcaggcatcttccttaacaagaggctactttagacaatgctcacttaggaaacaataaacacaaactttttagtaagactttaaattgaagtttttcagatattttctgatgaacctatcttgtagcaagcactattctatggttatgctctaaatcaactcataaattttattttgttttatgtttcaatttttttttctggataaaaggacagattcttagctgcaattattaatttatacttaaactttgaggaattgttaacatttttctgaagcttttaacttgaagtattagagttatatgggtctttaaacatcccctgttcaacccatacatggaaaaattacctctcagagagctttaactttcccctaatttctcagtaagatagaagcaaaattgaagctttaattatggttttcttattcagagtcaagttgcaaataccttgcaaatataaaagtaaattcaactttaacttgtctcagaaaagaaactattaagcttatttatactaagatataaaagcctaacaaagccttatttacttttcctaacaatattcacactgaatagtgttcaactggggaattctatgccttactgatcttcatacatttgaagtatatttcacttcctagcccaagaaagagaaagaatattggtaatccatgtttagattaatggggggaagaggcttcttatctgtgtctattcttcttcttttgaatttgacattttatttggtttaactaagggaaatggcattcacaatggttatcgaaaagagagcctcttaactacctgaaaattaacttccttcattccaaagcacactgtttcagagcacttagttactttgttttatgattatctctcccatgcagaatccaaagtgtggcatgcatcacatgaagtgcccttgtgcaatacttaaaccatcactctgattcactgaagtaaaataagctgtgctttatgaatggacacctattaaattcaccaaaaagtatgcaccacccccaacacatgggattccttataatggcagcttttaacacctttaaaatgagaaatatttttcttttcttactacaggttgattctgctcaaaaaaaagaaaacaaaaaacttactaatatccaaaagttcttgcctttctagaccagctccctatgtctgggaataaacactaaaataacttgggagtaagtcagttccaattaacagtccctccacccattcctaattgggttaacactttttattaggagttatttgtgcactttgtacaaatgctaatgaacaactcccaaatgctaataaatgtgtccatctgaaaggcagaaaaagcagaacaaaactagagtagccttaacagttcaaaagtggattctggaactaataaaatactctacgtact

SEQ ID NO: 1562416 - DNA, 4001 bp, Homo sapiens
tttatcacattcgcagtaaaagaggaagagaacatgatgagatgactgttatgtacttataagactaagttttttgtgaagtgtctaataatctgcattatatttctaatttcagagaatgttagaagatcttataaaataaagaataggaaaatacttgaacattgcttgttttatataaatattatgtctgccattaccatcgtattgtcttagtaccttactttttataacacttggatgtaagagagcagaacagcataagtacagtctatccaattttatttcaagatacgacaaaaaacaatcatttttgatgatagtaaaggcttcagagttttcaattagattcagtttatattttggcaaagaacccaggtacaactaacacctgctgagcctacttccttcccatcaaagtttgttgcctgcctttttaaacaaatggagatcatttgagcagattgaaaacagtaattggggttcagggatttagctaattaaaaataagtgatactcctgcactatgatacctgaagctcataggtgctcttttctaaacatttacatccatgtgttagtcttccattttaatatacttcatgaacaggcctaatcatataagtatgaattttgttcatgtactcttcaaacttttctgttacattctgtccttagagatgcatggcatattcaaggaatgaacaaggatagtcaatgctcttaatactatcagtaacttactttttataacgctttgatgtgagagaacagaacagtataaatacagcctatccaattttatttcaagatacaacccaaacaatcatttttgatgattctgatgaaaggttatcatcaaaaatgatagcaaaggctatcttaactatcctgacgaggatacttaagagaaaggctatccttggaaactgtgagaatcccagaaactcctgcttaaagaggaggaaaatatctaaagcccaaccaaaattagtgtggagatcccacaatctgggcattgcaaagcccattaccagaagcaatgacaatgcacatcctagacaatgctttactaataaatagcaatattaacagcacatttggacagaagaataaagagtttattaaaataaaatctttttcacttcctatctcttttggaaagaaatacaaaaactataaattatatctataatgcagtttggatcactcattgatccaatggcttcagatatctgaattataaaatccatgccttcccttcccagagttatagatccagattgatccagttatagattattcattgatccaaactgcagtttgacagaactaacatacaacccagtttttgagggctggaaagtaaggaagacctggtgatcaataatattagaatacttctcaaaggaagaaattaacagatgaccttactaaagaatatgcatttctcaaatgagttttaccagtcaccacattagtcagtagaaaccagatctacagaatggctgataacaagatgaatggaaccaccttctaggtggaaaatagattggatggcagaatctggatctataactctgggaaggggaggtatggattctataattcagatatctgaagccattggatccacagcccagtgaggagcagctcctggatccacagctcagggagcagcagctattggatccaaaaccccgagacccaacatgcatagtcaggcaagaattgcagagcatgtgagtcctggggtagtagcaggaggtgtggcaggggctggactcaacacacaatgtctgacagctgttgggcctccagcaggtctcctgacagcccctatagagagaggaacccagctggcaggtgctgggagagcagaggtcagtgctgtagaccaggttgctggggtaggaagagccacaggaggagcctgggtagtgcaagtaacccccgtgggagcaggaggagaagtttctagagcaacagttgtaggacatgttgacgggaagatgtgagttcagctgagtgtacctgggaagattctgagttttaacgtggcatcctggacagtgtcatttatatcctctcagcaataggtgtggtgcacagcagagtcatccctcacatttttgtgctccctcatttacatatgtgtagctcagcaatcttgcctgtaattgcatttgaatacttttccacatgttgtatttatgcgtgctataattttggtgttatagcacaaagccaatgaactgcacttatgccagaaatgctatgactgtttcgtattaatatttattttattatgtctaggaaagcacctccttttcctcctagcataattttcatgtgtcttgttattggctgttatgggcaataattttccctaaacagtgagaaatgagataaagttacatgtcttttttgtcaatggattagagacacaactttggccttaatgagaaacctgctgaaaactaaacctacatgtcaccatcctttctcattccacaaaagtttccttcatctattatgtactgttactcactgtgtctcacatccagtgtagagggaaaagtatgagccaagacaaattgaataacattgatgcctatgaccagaaggaaacctggacaattatttggagacatggtgacagcaagggatggaactgagacaatcacaaatgaaaaacaattctggggccttatgaagagaattaaagtgttaaataaacacacaccattgaaatgacagaaaaaaataaatgaattttagattcaatgcatctaatatgaggcccatggtcctaagagattctcattcatatgtgtggcagcctggagaattctcatctcggatcttaaattacaggaggcttaaataaccagtggtcctacctgctgtgttctaaaagttaacactgcatttttggggaaggcttgctttctctgggctgctcccaagcaaagactgagcacagtgggatataggaattcctggaagacaattgacggccagctttgactcagggtttcctcaacggccttaaagaactactgtctcctgcataggtctcaagcacttctttctctttctccttcacttgggccagacctatgtccaaatcttacaactctcccagcctctctcaggggagactctggaaagagaaaaaatgcagaaaatctgtaaatatttaatcttgtttatactttttaaaaagtgatactgtttggatttgtgtccctgcccaaatctcaggccaaattgtaatccccagtgttggggaaggcctggtgggagatgattggatcatgggggtggatttcccccttgctgttctcgtgctagtgagttagctctcatgagatctggttgtttaaaaatgtgtagcacttcccccttcactctttctactgcttcccttgtaggactgcctgcttctccttcattttctgccatgattgtaagttccctgaagcctccccagccgtgcttcgtgtacagcctgcagaactgtgagtcaattaaacctcttctctttataaattacccagtcacaggtagtagtttatagcagtgtgagaatagactaatacaaaaagtaaaccaattttttgaaggatagcaaaaaatttaaactgaacattttatcttgagtatgccaatcagggtaaacaaaaaaaaaattatttcagttgttcaatgatttagagaaacaataaacaaacttttgagtttagttttggagcttatgttcagactgtctccaggtaatatctgctaaaactcattttttcagccatctccaccttagttagactagatctacaccattctcctattatttcacgtgtgagttgatgtcttttatcaagattggtaaattcccaactgtactctcttcaaatattgcttctgccccatcctctcatctttcttttgcttagattccaattataagcaaggtacactttttaactacattacatatg

SEQ ID NO: 1562417 - DNA, 4001 bp, Homo sapiens
atacagtatttgtctttctcacagggatgttaagtattaagggaaaatctgttacctgataactcttttgccttcttgtgtggtatacactcacctatgaccacaagcatagcaatgcaaaccattttatgttggcttcaaccacctttgtgtggacaacatctgccctcagtcatatgcaacgccacttttactgtacctgggtttcttccaggtcacaactaggaaaacagaaggtgcccactgtgattctttccttgcataattataaggttcctgaaaattacacatcttggatattgttcagccaatgggagaaagaagcggatggataaatgtttttccatgttgatctgatcctgtgggggacaattccaagagtcattctacatgctcctaaaaggtccttacaagatttagccaagttgctctccataaaataaactcgaaaatgcaccctttctttagattttcctctttgattctttcatcttccatagtgtctcatacttgcttcctgggatcttgtgccacataaactgtttgcacccaaatctttgacattagccttgttctggggagaagaggaggatccagagtaagactaatggatataaatgcttgttcagcatggctcaggtgtgttgctgtcagcttgattaaggttgagccttgaagaagcatcggtaggttaccgaagcctcctggacccaataattcccacttaagatcattggtgaatgatcctgactctccttaccagtgggaggcaggaaacctggcacttaagtctactaacaaagagcaaagcgtctgtcctagcagtgcttaagcttcacttttctcttggttgaaaatccacattcagatactagactttaagtaacctttagtgcaagcatacagtttaccttataaattacatcctagtcttgttgtctgcatttctagtttatgcatcaaattttctgctttcctatatcagtagaaatgcatgtccttcattcttagacaattctcactgctgttgagacaagtctgcagatgcaaactatgttcttccagaaatgattactcttaatagacaacatacctaatttcaagagaaatgttctcagatctgtcagattatatgggccccaaatccagttacacagtcatattgatttttacttaaatctcccaaattcttgaatgcaaaaatgtaagcaaaataataataataaaataataacaatgtgaacaatatatttgggtaccagattacatacatttattagattaaaatttccattttcaacagtttttggatgaaaatcagatagcatatattcgatcaatggtaaagatattagaagttaatattaggttactcattaatttcgcagtctgccagaagttggtcatgcaagaagctggtggtggaagaataaaaagatattgggatctggcaagaatgaaaataatggctgcattcagtagagactttgatcccaatactcaaaaggatctagaaatttagcaggtgaattgatagaagcgagatccacagattggtctgtaacaagaagactgccaggctccagaagccaagtagtttgggtagcagaatctggatccgtaactcagggaaggaaaaccacagcctccatatttcaggaatctgaagccactggatccatttcccagcgagtagcagcacctagatccatagccctgggagcgacagctgctggaccgaaagcctagagatccagagcaagtcgtctgacagggacagcagaggatggaggtcctggggcggtagcaggatttctggcagctggcgggctcccagcaggtcttctgacagtccctgtagagagaggaacgcagctggcaggtgctgggagagcagagggcagtgctgtagaccaggctgctggggtaggagcctgggtagtacaggtagcccccaaaggagcgggaggagaagtttctagagcagcagttgtaggacatgctgatgagagatgggagttcagctgagtgtacctaagaagattctgagttttaatgtcgcatcctggacaagggcatttatatcctctcagcaataggtgtggtgcccaacagggtcatcctttacatatttgtgatccctcatttacatatgtgtaactgcgtaatcttgtctgtaattgcatttgaatagttttccatgtattgtatttatgggtgctataattttcgtgttatagcacaaagccaatgaactgtacttatgtcagaaatgctatgactgttttatattaatgtctagctcatcatgacaaggaaagctcttcctatttctttggcacatgctaactgcctcttttcctgtgtattcacatctggctttgctagtagatgttttcctcttaagagtggggaatgagataacgttagtttctttctggtgcaatttccacctggatgagaacctttgtgaaaatgatccatcttgtcaccattgattgctatactccaaaattactttgtggtgattttttagggcggtaagagtaaattaatacattaagtactacagttataaagtctgtctcatatccagtgaagaaagatcaagaacaggcaaagcaaagagatagaaagaaatggctagaaattgaaagaaaccttgccatttatttaaagacgagataacaaaaagaagctcgattgaaacacagtcacagagaagatcaatttgaggtcatgtctcttcagccaaagagcccgaatgcttgtctgctgaagggaggaaacaagtgaaagagaaacaaagagaaagctcaggaatttcagaattttttttcctattgcattccagctgtcatgtgtcttgtctcaatgtctttatgagcaaaaattttcaaaattagcaaatcttatgaactttgatatatttatcatctacttttgtaattatacaggacttctaccttcttagaatggctctagctttccatattactggctttcagtgtctttttgccacttgtagaaccaggtaccatcctacattttcctgtgaaaatgtgaagtttctttgttccccagtcctcttttcctctgcatggtatatgaatgtttctctcttattttctctctctcttcctctgactttctttccctctatttttctttcttttttctgtgcttaagtttgattttatcttttttcttttttttacttgttatattttatgttttgttcatgtgtttgtttgcctctgctgaattatagattccatgttgaaaaataaaaattggacagctttgtcgtattctttgaggatagccactttgtaagttcattcacaaaatattctatgttgaaatacaagtagttaaattatattcaggaccaaagaaagtgtactgtcatggttgatgacattttattttataataaaatataataaacttacaacaataatgttagacattttctcgattaaattttctcaattaaaatgtatggcaatattgaaaagtaacttaatataggccttccagaaggaagaatgaagaaagaagcaaatatggccaattcaaatatctattcagtgagttactttctatttttcaatggcagttgatttcccctaaccttgtaccttagtaagtaggtttggaaactattccttccccattttcttttgtttcaaatgtaactctttaaaataatcttgaatacaaaacttatgagttaaatggagagcatgaatttattcaggcaaaactaagggatttagtgaatttgtcttcagttaatccaggctccttattcaaaaatccttctctgaaccagttattgtgaaaagaggtgttcttcccttctctctgcctctaaatctctaaaactttgtccacattaatttgatagaagtttaagaagaacttgtaaatgccacaactttggactcacttcatcttggagatcatattatttgttctgtttaatatggagcctc

SEQ ID NO: 1562418 - DNA, 4001 bp, Homo sapiens
ctcagcctcccgagtagctgggactacaggcacccgccaccaggcccggctaattttttgtatttttagtagagacggggtttcaccgtgttagccagggtggtctcgatctcctgacctcgcgatccacccgcctcggcctcccaaagcgctgggatcacaggcatgagccaccacgcccgatggggagtttcttaaagaagtttcttctagaccaaacttagttccctctgtccttcactgaggctagacatactccacagtagtatggctctcccagacctctccaactacctccccattatctatcactggcattttcaccaataaatcttttttatgtttaatcccatttggcagctgcttttcaagggactgcaatggacacaatagatcagtaagatttgttattctaaaattaagtgtaacttatttactctattttcaataatgggtttatattattttctctgagtgtttttgaagttcttctttgtgttcccactgaatcttgtcttcaccccattattccatttgccatataagttataattgtatttgtgggaacttcctgaagcagagaatttgtgtctttgttcagcgtaatgcttggtatataataggacctcaataaattttttttcaatgaaagactaaaacaaaattttctgaagcaaatatataaaaaatgcacttatgaggggatttaaatctcttaaaacatgtgataggttatatatttaaattttctttgcactttgttttctattcaacaaaatatcaataaaacatatgaaacaaacaaaaagtgtacctaaggaagacagttgaagatatgggatgaattcactaaatgtatcatttttacttatttatttatttattttttgacacagagtcccactttgttgcccaggctggagtgtagtggcatgatctcagctgactacaacctccgtctctcagattcaagtgattcgcctgcctcagcctcctgagtagctgggattataggtgcacaccaggccttgctaatttttgtatttttagtagaaatgggttttcactgtgttggccaggatggcctcaaactcttgacctaaagtgatccgccagcctcagtctcccaaagtgctgggattacaggtgtgagccatcatgcccagcctaagtgtattgtattaacaaaataaaatggaatgccagaattcatgccaaagaaataagcttatttaaaatattgtaactatttgaaatatatttgagtggaagagttctgggaaaataatgagagaaggattttagaaagatgataacagaaatgatcctgagcattggcacaaaaattgaaattcaagatatatctcctgtcagatttaggaagggtcctaggtcaagattaatttgtccgtgttcaatcatatacttccaagagggctaggatgctgagtcctactgatgtagatggtcaacaatcacagatattggacaggctgagtgttgcagttccatagagtacagaaataatcatgagagaatggagaatattcagtaagatgatccaaaaaggcgagacccaaaggctggttagtaacaagttgcctggaaattcctggatgaaaaggtagttgggtggtagaagctggacccacagtccagagattggaagccagtgcttccacaaccaagagatccaaggccagtgtttccacatccaagggatcttatgtagttagtctggcggggactgcagaagatggaattctttgggcagtaacaggatgtctgataggatctggccaaagtgcaggatgtctggcagctggtgggctcacagtaggtctcctgacagccattgtagagagaggagcccagttggcaggtatttggagaatagatggcattgctggggtagaacaaattataagtggaaactggatacctcaggtaacttccaaaacagcaggaggagaagtttccagagctgcagttgtaagacatgttaacaggagttctgagctcaggtgatttgcagtgaggagcgtgtgtgtgtgaatgttaccttctatactggacactgacatactctagcaataggtgtagtcacaagtgcccattctaatgagaacacttaattaggctgcagtcaaaatgaaatatattaacactcaaagaattttatttatgaacgtagacttctacatgaaagaatttcattagtttttcaaagcaattgttcatgaaacaaaaatgccatttctcattcatcttgcttaggtagaatgaaaaccaccataattgtacctataagactgatgcttcaaagggtcgggcgcggaggctcacacttgtaattccagcactttgggaggctgaggcaggcatatcacgaggtcaggagttccagaccagcctgaccaacatggtgaaactccgtctctactaaaaatacaaaaattagccgggcatggtggtgggcggctgtaatcccagctactcaggaggctgaggcaggagaattgcttgaacccgggaggcggagtttgcagtgagccgagatcgtaccactgcactccagcctgggagacagagcaagattccatctccaaaacaaacaaacaaacaaagaaacaaaaaaacaaagaaaaaaacttgatgcttcattcatcctgtccttctagaaattggatcaaacggctaagacactgagagttctggtatttgtaaagatctgaaaaataccttgtaatctggaagggactttgatcttgctccaattttataaattcaattgagaacagaaaaaaaatttcaatatctattccttctttcaattctttgaaccattagaagaaataacccaataacaatccttatttggtagacatgctaaatgagtgcctaacatatttaagtttagatttcttataacacaagtagctaagtcactcttgtgcacatgaagagttaagaatgaagggtgaaatttttgaacaagtgctttgaagtttacattgtaaaactactaaagaaatcccttactcaaaggttgatttgcttcttcatagaagtcatcaataagtttgattataaaaaaccgtttatccccataaggtataagtaatttttggtcatgttgatgttactgagaggaaaataataagcactataagtaaaatgtaaatcgttaatcttttcctttcttttctctcagagggtgacatttttaccagagagggaaaagaaaagcaagaaatgagggaaatgtctatcccatgtagtattcacagaaagataaaatatgtaaagaattcatagtaacaaatgactttataaattgaaataaaggggtgggaaggatacatgatgataatgtgtaattgagagtgaatgcctttgtgacctctgatgtatcagctgacatatatattctgcctagagtactagagtaatgaggatttttctggattcgctcagaaagttcatcagagcaaactgtaaatagatatatggcacggatgcaggaaatgccttaacctgtgggaatgggcaaacctcttaagacatccatcttcagaactgatgtattctacaatggaagtgaactgagactcccttctatgaagaatcaggattactaggtaaaagttttaggggaagattcagctaaaaatctaaaatgagttgctcttgcaattaatgatatttccatactgagggccctgggaaaatctaattaggatgttgtaagtggaattccaatctgacaggaggctggagataattgctcaacttccttccaaattgtagactttataagtctaaacttttgaggagacaaattgatctccaatcatgtttcatttattaagtaacatagtttgttctgtgtttctggaataaacaattcttatttattaggcttctcaattattaatagccaaaaagcattctagtagattccaaatcttcctgttgtgtttgtcaataaaatattgaat
